United States Patent Application Publication US 2026/0193644 A1 - sequence listing, part 9

SEQ ID NO: 21056 - protein, 306 aa, Homo sapiens
MGILDIEVWGKDNKKHEERLGTCKVDISALPLKQANCLELPLDSCLGALLMLVTLTPCAGVSVSDLCVCPLADLSERKQITQRYCLQNSLKDVKDVGILQVKVLKAADLLAADFSGKSDPFCLLELGNDRLQTHTVYKNLNPEWNKVFTFPIKDIHDVLEVTVFDEDGDKPPDFLGKVAIPLLSIRDGQPNCYVLKNKDLEQAFKGVIYLEMDLIYNPVKASIRTFTPREKRFVEDSRKLSKKILSRDVDRVKRITMAIWNTMQFLKSCFQWESTLRSTIAFAHRKEEPPLSMKCTLFSGDIGPSL

SEQ ID NO: 21057 - protein, 1111 aa, Homo sapiens
MIESENLNQEEIIKELCLCNGLSYEMVGQEGSDTSKLEMFFLGYPRIVGLSLFPNLTSLTIVAQDIKEISGLEPCLQLKELWIAECCIEKIEGLQECRNLEKLYLYFNKISKIENLEKLIKLKVLWLNHNTIKNIEGLQTLKNLKDLNLAGNLINSIGRCLDSNEQLERLNLSGNQICSFKELTNLTRLPCLKDLCLNDPQYTTNPVCLLCNYSTHVLYHLPCLQRFDTLDVSAKQIKELADTTAMKKIMYYNMRIKTLQRHLKEDLEKLNDQKCKLQKLPEERVKLFSFVKKTLERELAELKGSGKGHSDGSNNSKVTDPETLKSCETVTEEPSLQQKILAKLNALNERVTFWNKKLDEIEAIYHIEVKQKKKSHGLLIPLLLIELETVGNFHFEEGTRSDDWFNFCYELILSRFCAWDFRTYGITGVKVKRIIKVNNRILRLKFEEKFQKFLENEDMHDSESYRRMLECLFYVFDPEVSVKKKHLLQILEKGFKDSETSKLPLKKEAIIVSNSLSISECPRIEFLQQKHKDEKKISLKHELFRHGILLITKVFLGQSVQAHEKESISQSNYPMVNSVFIPRKYLLNSVMGQRNCDCSVRQCKWFVFDHDLVLPEYVVEFEYITMVKAPSLFSVFNNVILEESKKNPEVSVFSKDLKFDDEVIKMEPRIKARPKLISLDDKTILSLAKTSVYSHIVSLNLHGNSLSKLRDLSKLTGLRKLNISFNEFTCLDDVYHLYNLEYLDASHNHVITLEGFRGLMKLKHLDLSWNQLKKSGNEINMLCKHTTSLLTLDIQHNPWQKPATLRLSVIGRLKTLTHLNGVFISEEEATAAMKFIAGTRITQLSLLRHSSTKEERPRILSIWPSAKILTQVSKLGPHLHLSGNCYLKITALNLDGQHLFEITNLEKLENLKWASFSNNNLTKMEGLESCINLEELTLDGNCISKIEGISKMTKLTRLSINNNLLTGWEEHTFDNMLHLHSLSLENNRITSLSGLQKSFTLVELYISNNYIAVNQEMHNLKGLCNLVILDMCGNIIIWNQENYRLFVIFHLPELKALDGIPIEPSETDSAKDLFGGRLTSDMIAERQGHSNFKQMQELNWTSSSISCIYFV

SEQ ID NO: 21058 - protein, 163 aa, Homo sapiens
MDFNGLADPYVKLHLLPGACKANKLKTKTQRNTLNPVWNEDLTYSGITDDDITHKVLRIAVCDEDKLSHNEFIGEIRVPLRRLKPSQKKHFNICLERQVPLASPSSMSAALRGISCYLKELEQAEQGQGLLEERGRILLSLSYSSRRRGLLVPEARCGQEIQA

SEQ ID NO: 21059 - protein, 93 aa, Homo sapiens
TNLTFGDVANKATLCSMKGCMRALVAQLKSESEDLQQVIASVLRNLSWRADVNSKKTLREVGSVKALMECALEVKKMALQKQFHGLFVSILLI

SEQ ID NO: 21060 - protein, 416 aa, Homo sapiens
MLENFGNLTALGYPVPKPALISLLERGDMAWGLEAQDDPPAERTKNVCKDVETNIDSESTLIQGISEERDGMMSHGQLKSVPQRTDFPETRNVEKHQDIPTVKNIQGKVPRIPCARKPFICEECGKSFSYFSYYARHQRIHTGEKPFECSECGKAFNGNSSLIRHQRIHTGERPYQCEECGRAFNDNANLIRHQRIHSGDRPYYCTECGNSFTSSSEFVIHQRIHTGEKPYECNECGKAFVGNSPLLRHQKIHTGEKPYECNECGKSFGRTSHLSQHQRIHTGEKPYSCKVCGQAFNFHTKLTRHQRIHSEEKPFDCVDCGKAFSAQEQLKRHLRIHTQESSYVCDECGKALTSKRNLHQHQRIHTGEKPYECSKYEKAFGTSSQLGHLEHVYSGEKPVLDICRFGLPEFFTPFYW

SEQ ID NO: 21061 - protein, 135 aa, Homo sapiens
MPGPAAGSRARVYAEVNSLRSREYWDYEAHVPSWGNQDDYQLVRKLGRGKYSEVFEAINITNNERVVVKILKPVKKKKIKREVKILENLRGGTNIIKLIDTVKDPVSKTPALVFEYINNTDFKQLYQILTDFDIR

SEQ ID NO: 21062 - protein, 223 aa, Homo sapiens
MPLLVEGRRVRLPQSAGDLVRAHPPLEERARLLRGSISILGSDDATTCHIVVLRHTGNGATCLTHCDGTDTKAEVPLIMNSIKSFSDHAQCGRLEVHLVGGFSDDRQLSQKLTHQLLSEFDRQEDDIHLVTLCVTELNDREENENHFPVIYGIAVNIKTAEIYRASFQDRGPEEQLRAARTLAGGPMISIYDAETEQLRIGPYSWTPFPHVDFWLHQDDKQIL

SEQ ID NO: 21063 - protein, 248 aa, Homo sapiens
LRKAERSWSCSREKKEGYAKDMVTDFDEKHDEYLILLQQRNRILKHLKSKDPVQLRLEHLEQGFSVYVNGANSELKSSPRKAIHSDFSRSASHTEGTHDYGRRTLFREAEEALRRSSRTAPSKVQRRGWHQKSVQIRTEAGPRLHIEPPVDYSDDFELCGDVTLQANNTSEDRPQDTKSPTSTKPCGFNFSLLNACGHSDPSSSVDKERILLTIQDVMELRRSLELSVNLQRKQKDCSSDEYDSIEED

SEQ ID NO: 21064 - protein, 631 aa, Homo sapiens
MPRPALSVTSFCHRLGKRERKQSFMGNSGNSWSHTPFPKLELGLGPQPMAPRELPTCSICLERLRDPISLDCGHDFCIRCFSTHRLPGCEPPCCPECRKICKQKRGLRSLGEKMKLLPQRPLPPALQETCPVRAEPLLLVRINASGGLILRMGAINRCLKHPLARDTPVCLLAVLGEQHSGKSFLLNHLLQGLPGLESGEGGRPRGGEASLQGCRWGANGLARGIWMWSHPFLLGKEGKKVAVFLVDTGDAMSPELSRETRIKLCALTTMLSSYQILSTSQELKDTDLDYLEMFVHVAEVMGKHYGMVPIQHLDLLVRDSSHPNKAGQGHVGNIFQRLSGRYPKVQELLQGKRARCCLLPAPGRRRMNQGHASPGDTDDDFRHLLGAYVSDVLSAAPQHAKSRCQGYWNEGRAVARGDRRLLTGQQLAQEIKNLSGWMGRTGPGFTSPDEMAAQLHDLRKVEAAKREFEEYVRQQDVATKRIFSALRVLPDTMRNLLSTQKDAILARHGVALLCKGRDQTLEALEAELQATAKAFMDSYTMRFCGHLAAVGGAVGAGLMGLAGGVVGAGMAAAALAAEAGMVAAGAAVGATGAAVVGGGVGAGLAATVGCMEKEEDERLLEGDREPLLQEE

SEQ ID NO: 21065 - protein, 69 aa, Homo sapiens
MCQVGEDYGEPAPEEPPPAPRPSREQKCVKCKEAQPVVVIRAGDAFCRCSWRGLGGLRPAPWSGRFLRA

SEQ ID NO: 21066 - protein, 227 aa, Homo sapiens
MNGPADGEVDYKKKYRNLKRKLKFLIYEHECFQEELRKAQRKLLKVSRDKSFLLDRLLQYENVDEDSSDSDATASSDNSETEGTPKLSDTPAPKRKRSPPLGGAPSPSSLSLPPSTGFPLQASGVPSPYLSSLPEPSPLRPKREKRPRLPRKLKMAVGPPDCPVGGPLTFPGRGSGAGVGTTLTPLPPPKMPPPTILSTVPRQMFSDAGSGDDALDGDDDLVIDIPE

SEQ ID NO: 21067 - protein, 382 aa, Homo sapiens
MPVPRATDKDHSTQPGTMGRKKIQISRILDQRNRQVTFTKRKFGLMKKAYELSVLCDCEIALIIFNSANRLFQYASTDMDRVLLKYTEYSEPHESRTNTDILETLKRRGIGLDGPELEPDEGPEEPGEKFRRLAGEGGDPALPRPRLYPAAPAMPSPDVVYGALPPPGCDPSGLGEALPAQSRPSPFRPAAPKAGPPGLVHPLFSPSHLTSKTPPPLYLPTEGRRSDLPGGLAGPRGGLNTSRSLYSGLQNPCSTATPGPPLGSFPFLPGGPPVGAEAWARRVPQPAAPPRRPPQSASSLSASLRPPGAPATFLRPSPIPCSSPGPWQSLCGLGPPCAGCPWPTAGPGRRSPGGTSPERSPGTARARGDPTSLQASSEKTQQ

SEQ ID NO: 21068 - protein, 236 aa, Homo sapiens
MPAPIRLRELIRTIRTARTQAEEREMIQKECAAIRSSFREEDNTYRCRNVAKLLYMHMLGYPAHFGQLECLKLIASQKFTDKRIGYLGAMLLLDERQDVHLLMTNCIKNDLNHSTQFVQGLALCTLGCMGSSEMCRDLAGEVEKLLKTSNSYLRKKAALCAVHVIRKVPELMEMFLPATKNLLNEKNHGVLHTSVVLLTEMCERSPDMLAHFRKVACAPISSYFKEPHHVRIFTRT

SEQ ID NO: 21069 - protein, 132 aa, Homo sapiens
MSGSREVMLLQLTVIKVMTTRILSVKTEFHAKEQYRDVIKILLESAKVDSKLICMFQNSDKLLSHMAAQCLALLLYFQLREKITLSNSWIAFCQKNLSEYSESNKAIYCLWTLTAIIKEIFKDSCSQKTEIL

SEQ ID NO: 21070 - protein, 1099 aa, Homo sapiens
PYKPQWCRSREAWALYLFSPQNRFRVSCQKVITHKMFDHVVLVFIFLNCVTIALERPDIDPGSTERVFLSVSNYIFTAIFVAEMMVKVVALGLLSGEHAYLQSSWNLLDGLLVLVSLVDIVVAMASAGGAKILGVLRVLRLLRTLRPLRVISRAPGLKLVVETLISSLRPIGNIVLICCAFFIIFGILGVQLFKGKFYYCEGPDTRNISTKAQCRAAHYRWVRRKYNFDNLGQALMSLFVLSSKDGWVNIMYDGLDAVGVDQQPVQNHNPWMLLYFISFLLIVSFFVLNMFVGVVVENFHKCRQHQEAEEARRREEKRLRRLERRRRSKALPVAVAVAEAQRRPYYADYSPTRRSIHSLCTSHYLDLFITFIICVNVITMSMEHYNQPKSLDEALKYCNYVFTIVFVFEAALKLVAFGFRRFFKDRWNQLDLAIVLLSLMGITLEEIEMSAALPINPTIIRIMRVLRIARVLKLLKMATGMRALLDTVVQALPQVGNLGLLFMLLFFIYAALGVELFGRLECSEDNPCEGLSRHATFSNFGMAFLTLFRVSTGDNWNGIMKDTLRECSREDKHCLSYLPALSPVYFVTFVLVAQFVLVNVVVAVLMKHLEESNKEAREDAELDAEIELEMAQGPGSARRVDADRPPLPQESPGARDAPNLVARKVSVSRMLSLPNDSYMFRPVVPASAPHPRPLQEVEMETYGAGTPLGSVASVHSPPAESCASLQIPLAVSSPARSGEPLHALSPRGTARSPSLSRLLCRQEAVHTDSLEGKIDSPRDTLDPAEPGEKTPVRPVTQGGSLQSPPRSPRPASVRTRKHTFGQRCVSSRPAAPGGEEAEASDPADEEVSHITSSACPWQPTAEPHGPEASPVAGGERDLRRLYSVDAQGFLDKPGRADEQWRPSAELGSGEPGEAKAWGPEAEPALGARRKKKMSPPCISVEPPAEDEGSARPSAAEGGSTTLRRRTPSCEATPHRDSLEPTEGSGAGGDPAAKGERWGQASCRAEHLTVPSFAFEPLDLGVPSGDPFLDGSHSVTPESRASSSGAIVPLEPPESEPPMPVGDPPEKRRGLYLTVPQCPLEKPGSPSATPAPGGGADDPV

SEQ ID NO: 21071 - protein, 1281 aa, Homo sapiens
MGRVGYWTLLVLPALLVWRGPAPSAAAEKGPPALNIAVMLGHSHDVTERELRTLWGPEQAAGLPLDVNVVALLMNRTDPKSLITHVCDLMSGARIHGLVFGDDTDQEAVAQMLDFISSHTFVPILGIHGGASMIMADKDPTSTFFQFGASIQQQATVMLKIMQDYDWHVFSLVTTIFPGYREFISFVKTTVDNSFVGWDMQNVITLDTSFEDAKTQVQLKKIHSSVILLYCSKDEAVLILSEARSLGLTGYDFFWIVPSLVSGNTELIPKEFPSGLISVSYDDWDYSLEARVRDGIGILTTAASSMLEKFSYIPEAKASCYGQMERPEVPMHTLHPFMVNVTWDGKDLSFTEEGYQVHPRLVVIVLNKDREWEKVGKWENHTLSLRHAVWPRYKSFSDCEPDDNHLSIVTLEEAPFVIVEDIDPLTETCVRNTVPCRKFVKINNSTNEGMNVKKCCKGFCIDILKKLSRTVKFTYDLYLVTNGKHGKKVNNVWNGMIGEVVYQRAVMAVGSLTINEERSEVVDFSVPFVETGISVMVSRSNGTVSPSAFLEPFSASVWVMMFVMLLIVSAIAVFVFEYFSPVGYNRNLAKGKAPHGPSFTIGKAIWLLWGLVFNNSVPVQNPKGTTSKIMVSVWAFFAVIFLASYTANLAAFMIQEEFVDQVTGLSDKKFQRPHDYSPPFRFGTVPNGSTERNIRNNYPYMHQYMTKFNQKGVEDALVSLKTGKLDAFIYDAAVLNYKAGRDEGCKLVTIGSGYIFATTGYGIALQKGSPWKRQIDLALLQFVGDGEMEELETLWLTGICHNEKNEVMSSQLDIDNMAGVFYMLAAAMALSLITFIWEHLFYWKLRFCFTGVCSDRPGLLFSISRGIYSCIHGVHIEEKKKSPDFNLTGSQSNMLKLLRSAKNISSMSNMNSSRMDSPKRAADFIQRGSLIMDMVSDKGNLMYSDNRSFQGKESIFGDNMNELQTFVANRQKDNLNNYVFQGQHPLTLNESNPNTVEVAVSTESKANSRPRQLWKKSVDSIRQDSLSQNPVSQRDEATAENRTHSLKSPRYLPEEMAHSDISETSNRATCHREPDNSKNHKTKDNFKRSVASKYPKDCSEVERTYLKTKSSSPRDKIYTIDGEKEPGFHLDPPQFVENVTLPENVDFPDPYQDPSENFRKGDSTLPMNRNPLHNEEGLSNNDQYKLYSKHFTLKDKGSPHSETSERYRQNSTHCRSCLSNMPTYSGHFTMRSPFKCDACLRMGNLYDIDEDQMLQETGMTNAWLLGDAPRTLTNTRCHPRR

SEQ ID NO: 21072 - protein, 844 aa, Homo sapiens
MVTVMPLEMEKTISKLMFDFQRNSTSDDDSGCALEEYAWVPPGLKPEQVHQYYSCLPEEKVPYVNSPGEKLRIKQLLHQLPPHDNEVRYCNSLDEEEKRELKLFSSQRKRENLGRGNVRPFPVTMTGAICEQCGGQINGGDIAVFASRAGHGVCWHPPCFVCTVCNELLVDLIYFYQDGKIYCGRHHAECLKPRCAACDEIIFADECTEAEGRHWHMKHFCCFECETVLGGQRYIMKEGRPYCCHCFESLYAEYCDTCAQHIGIDQGQMTYDGQHWHATETCFCCAHCKKSLLGRPFLPKQGQIFCSRACSAGEDPNGSDSSDSAFQNARAKESRRSAKIGKNKGKTEEPMLNQHSQLQVSSNRLSADVDPLSLQMDMLSLSSQTPSLNRDPIWRSREEPYHYGNKMEQNQTQSPLQLLSQCNIRTSYSPGGQGAGAQPEMWGKHFSNPKRSSSLAMTGHAGSFIKECREDYYPGRLRSQESYSDMSSQSFSETRGSIQVPKYEEEEEEEGGLSTQQCRTRHPISSLKYTEDMTPTEQTPRGSMESLALSNATGLSADGGAKRQEHLSRFSMPDLSKDSGMNVSEKLSNMGTLNSSMQFRSAESVRSLLSAQQYQEMEGNLHQLSNPIGYRDLQSHGRMHQSFDFDGGMAGSKLPGQEGVRIQPMSERTRRRATSRDDNRRFRPHRSRRSRRSRSDNALHLASEREAISRLKDRPPLRAREDYDQFMRQRSFQESMGHGSRRDLYGQCPRTVSDLALQNAFGDRWGPYFAEYDWCSTCSSSSESDNEGYFLGEPIPQPARLRYVTSDELLHKYSSYGLPKSSTLGGRGQLHSRKRQKSKNCIIS

SEQ ID NO: 21073 - protein, 124 aa, Homo sapiens
MPKGGCPKAPQQEELPLSSDMVEKQTGKKDKDKVSLTKTPKLERGDGGKEVRERASKRKLPFTAGANGEQKDSDTGPPGSCLSWGSHEGALVRSAMGRSCLPSARGCFFGTRGKIMIFLFCFDL

SEQ ID NO: 21074 - protein, 758 aa, Homo sapiens
MSESSGSALQPGRPSRQPAVHPENLSLDSSCFSSPPVNFLQELPSYRSIARRRTTVHSRDKQSGTLLKPTDSYSSQLEDRIAENLSSHSLRNYALNISEKRRLRDIQETQMKYLSEWDQWKRYSSKSWKRFLEKAREMTTHLELWREDIRSIEGKFGTGIQSYFSFLRFLVLLNLVIFLIIFMLVLLPVLLTKYKITNSSFVLIPFKDMDKQCTVYPVSSSGLIYFYSYIIDLLSGTGFLEETSLFYGHYTIDGVKFQNFTYDLPLAYLLSTIASLALSLLWIVKRSVEGFKINLIRSEEHFQSYCNKIFAGWDFCITNRSMADLKHSSLRYELRADLEEERMRQKIAERTSEETIRIYSLRLFLNCIVLAVLGACFYAIYVATVFSQEHMKKEIDKMVFGENLFILYLPSIVITLANFITPMIFAKIIRYEDYSPGFEIRLTILRCVFMRLATICVLVFTLGSKITSCDDDTCDLCGYNQKLYPCWETQVGQEMYKLMIFDFIIILAVTLFVDFPRKLLVTYCSSCKLIQCWGQQEFAIPDNVLGIVYGQTICWIGAFFSPLLPAIATLKFIIIFYVKEWSLLYTCRPSPRPFRASNSNFFFLLVLLIGLCLAIIPLTISISRIPSSKACGPFTNFNTTWEVIPKTVSTFPSSLQSFIHGVTSEAFAVPFFMIICLIMFYFIALAGAHKRVVIQLREQLSLVRKHSSRGSWLGTFTQDTARKVLFSWEGVKLLQPSLTTTSPKLCLEAQPRPASLIH

SEQ ID NO: 21075 - protein, 816 aa, Homo sapiens
MNNSNGNWKSSVRSTNNWNYSGPGDKFQPGRNRNSNCQMEDMTMLWNKKSNKSNKYSHDRYNWQRQENDKLGTVATYRGPSEGFTSDKFPSEGLLDFNFEQLESQTTKQADTATSKVSGKNGSAAREKPRRWTPYPSQKTLDLQSGLKDITGNKSEMIEKPLFDFSLITTGIQEPQTDETRNSPTQKTQKEIHTGSLNHKASSDSAASFEVVRQCPTAEKPEQEHTPNKMPSLKSPLLPCPATKSLSQKQDPKNISKNTKTNFFSPGEHSNPSNKPTVEDNHGPYISKLRSSCPHVLKGNKSTFGSQKQSGDNLNDTLRKAKEVLQCHESLQNPLLSTSKSTRNYAKASRNVEESEKGSLKIEFQVHALEDESDGETSDTEKHGTKIGTLGSATTELLSGSTRTADEKEEDDRILKTSRELSTSPCNPIVRQKESELQMTSAASPHPGLLLDLKTSLEDAQVDDSIKSHVSYETEGFESASLDAELQKSDISQPSGPLLPELSKLGFPASLQRDLTRHISLKSKTGVHLPEPNLNSARRIRNISGHRKSETEKESGLKPTLRQILNASRRNVNWEQVIQQVTKKKQELGKGLPRFGIEMVPLVQNEQEALDLDGEPDLSSLEGFQWEGVSISSSPGLARKRSLSESSVIMDRAPSVYSFFSEEGTGKENEPQQMVSPSNSLRAGQSQKATMHLKQEVTPRAASLRTGERAENVATQRRHSAQLSSDHIIPLMHLAKDLNSQERSIPPSENQNSQESNGEGNCLSSSASSALAISSLADAATDSSCTSGAEQNDGQSIRKKRRATGDGSSPELPSLE

SEQ ID NO: 21076 - protein, 761 aa, Homo sapiens
MDASLEKIADPTLAEMGKNLKEAVKMLEDSQRRTEEENGKKLISGDIPGPLQGRIQNIGEQGHMALLGHSLGAYISTLDKEKLRKLTTRILSDTTLWLCRIFRYENGCAYFHEEEREGLAKICRLAIHSRYEDFVVDGFNVLYNKKPVIYLSAAARPGLGQYLCNQLGLPFPCLCRVPCNTVFGSQHQMDVAFLEKLIKDDIERGRLPLLLVANAGTAAVGHTDKIGRLKELCEQYGIWLHVEGVNLATLALGYVSSSVLAAAKCDSMTMTPGPWLGLPAVPAVTLYKHDDPALTLVAGLTSNKPTDKLRALPLWLSLQYLGLDGFVERIKHACQLSQRLQESLKKVNYIKILVEDELSSPVVVFRFFQELPGSDPVFKAVPVPNMTPSGVGRERHSCDALNRWLGEQLKQLVPASGLTVMDLEAEGTCLRFSPLMTAAVLGTRGEDVDQLVACIESKLPVLCCTLQLREEFKQEVEATAGLLYVDDPNWSGIGVVRYEHANDDKSSLKSDPEGENIHAGLLKKLNELESDLTFKIGPEYKSMKSCLYVGMASDNVDAAELVETIAATAREIEENSRLLENMTEVVRKGIQEAQVELQKASEERLLEEGVLRQIPVVGSVLNWFSPVQALQKGRTFNLTAGSLESTEPIYVYKAQGAGVTLPPTPSGSRTKQRLPGQKPFKRSLRGSDALSETSSVSHIEDLEKVERLSSGPEQITLEASSTEGHPGAPSPQHTDQTEAFQKGVPHPEDDHSQVEGPESLR

SEQ ID NO: 21077 - protein, 160 aa, Homo sapiens
MVKNVLERPEDQRLIYSGKLLLDHQCLRDLLPKQEKRHVLHLVCNVKSPSKMPEINAKVAESTEEPAGSNRGQYPEDSSSDGLRQREVLRNLSSPGWENISRPEAAQQAFQGLGPGFSGYTPYGWLQLSWFQQIYARQYYMQYLAATAASGAFVPPPSAQ

SEQ ID NO: 21078 - protein, 114 aa, Homo sapiens
MELCEFAFNMKKDEVCVNPYHYQRVETPVLPPVLVPRHTEIPAEFPPLDDYSHSIPENTNFPAGIEPQSNIPETPPPGYLSEDGETSDHQMNHSMDAGSPNLSPNPMSPAHNNL

SEQ ID NO: 21079 - protein, 633 aa, Homo sapiens
MLRPRFLPPDDRTVREGERKAAKLHFSQLGNSENFLLEVEKSSREKTMKNCVTGESSASKVSANVDSRIEMDSNKGLFIPFPNREIKDSLSTSATQGNGTRDQKLDTFPLGTQTQEVARREMPSDNHQEDEFRHYSPRQSTVRSPEKMTREGYQVSFLDNKSSGSSPEKELIPKPDTFHLTHDASLSKCLDVGDSSQIHPYQLPSDVGLENYDSCYSQTLSLHGSLGKRPQRSKNYQEYSIKPSNDIKTTASHSCGDLLTSLSNPDSSTGRLLKLSSDLYATTHFNSDPAVLVNVEQQLSTSLDDLTPAHGSVPNNAVLGNRTTPLRTLLLSPGTSEHRKIFTKRSLSPSKRGFKWKDNILANLNLKHGFQDATGSEPLSSDLGSLHGLAGNHSPPISARTPHVATVLRQLLELVDKHWNGSGSLLLNKKFLGPARDLLLSLVVPAPSQPRCCSHPEDTMKAFCRRELELKEAAQLVPNDMESLKQKLVRVLEENLILSEKIQQLEEGAAISIVSGQQSHTYDDLLHKNQQLTMQVACLNQELAQLKKLEKTVAILHESQRSLVVTNEYLLQQLNKEPKGYSGKALLPPEKGHHLGRSSPFGKSTLSSSSPVAHETGQYLIQSVLDAAPEPGL

SEQ ID NO: 21080 - protein, 746 aa, Homo sapiens
MAGSRGAGRTAAPSVRPEKRRSEPELEPEPEPEPPLLCTSPLSHSTGSDSGVSDSEESVFSGLEDSGSDSSEDDDEGDEEGEDGALDDEGHSGIKKTTEEQVQASTPCPRTEMASARIGDEYAEDSSDEEDIRNTVGNVPLEWYDDFPHVGYDLDGRRIYKPLRTRDELDQFLDKMDDPDYWRTVQDPMTGRDLRLTDEQVALVRRLQSGQFGDVGFNPYEPAVDFFSGDVMIHPVTNRPADKRSFIPSLVEKEKVSRMVHAIKMGWIQPRRPRDPTPSFYDLWAQEDPNAVLGRHKMHVPAPKLALPGHAESYNPPPEYLLSEEERLAWEQQEPGERKLSFLPRKFPSLRAVPAYGRFIQERFERCLDLYLCPRQRKMRVNVDPEDLIPKLPRPRDLQPFPTCQALVYRGHSDLVRCLSVSPGGQWLVSGSDDGSLRLWEVATARCVRTVPVGGVVKSVAWNPSPAVCLVAAAVEDSVLLLNPALGDRLVAGSTDQLLSAFVPPEEPPLQPARWLEASEEERQVGLRLRICHGKPVTQVTWHGRGDYLAVVLATQGHTQVLIHQLSRRRSQSPFRRSHGQVQRVAFHPARPFLLVASQRSVRLYHLLRQELTKKLMPNCKWVSSLAVHPAGDNVICGSYDSKLVWFDLDLSTKPYRMLRHHKKALRAVAFHPRYPLFASGSDDGSVIVCHGMVYNDLLQNPLLVPVKVLKGHVLTRDLGVLDVIFHPTQPWVFSSGADGTVRLFT

SEQ ID NO: 21081 - protein, 507 aa, Homo sapiens; identical to SEQ ID NO: 21022

SEQ ID NO: 21082 - protein, 182 aa, Homo sapiens
SRYRSRSRSRSRSRGRSYCGRAYAIARGQRYYGFGRTVYPEEHSRWRDRSRTRSRSRTPFRLSEKDRMELLEIAKTNAAKALGTTNIDLPASLRTVPSAKETSRGIGVSSNGAKPELSEKVTEDGTRNPNEKPTQQRSIAFSSNNSVAKPIQKSAKAATEEASSRSPKIDQKKSPYGLWIPI

SEQ ID NO: 21083 - protein, 1086 aa, Homo sapiens
MEEKQQIILANQDGGTVAGAAPTFFVILKQPGNGKTDQGILVTNQDACALASSVSSPVKSKGKICLPADCTVGGITVTLDNNSMWNEFYHRSTEMILTKQGRRMFPYCRYWITGLDSNLKYILVMDISPVDNHRYKWNGRWWEPSGKAEPHVLGRVFIHPESPSTGHYWMHQPVSFYKLKLTNNTLDQEGHIILHSMHRYLPRLHLVPAEKAVEVIQLNGPGVHTFTFPQTEFFAVTAYQNIQITQLKIDYNPFAKGFRDDGLNNKPQRDGKQKNSSDQEGNNISSSSGHRVRLTEGQGSEIQPGDLDPLSRGHETSGKGLEKTSLNIKRDFLGFMDTDSALSEVPQLKQEISECLIASSFEDDSRVASPLDQNGSFNVVIKEEPLDDYDYELGECPEGVTVKQEETDEETDVYSNSDDDPILEKQLKRHNKVDNPEADHLSSKWLPSSPSGVAKAKMFKLDTGKMPVVYLEPCAVTRSTVKISELPDNMLSTSRKDKSSMLAELEYLPTYIENSNETAFCLGKESENGLRKHSPDLRVVQKYPLLKEPQWKYPDISDSISTERILDDSKDSVGDSLSGKEDLGRKRTTMLKIATAAKVVNANQNASPNVPGKRGRPRKLKLCKAGRPPKNTGKSLISTKNTPVSPGSTFPDVKPDLEDVDGVLFVSFESKEALDIHAVDGTTEESSSLQASTTNDSGYRARISQLEKELIEDLKTLRHKQVIHPGLQEVGLKLNSVDPTMSIDLKYLGVQLPLAPATSFPFWNLTGTNPASPDAGFPFVSRTGKTNDFTKIKGWRGKFHSASASRNEGGNSESSLKNRSAFCSDKLDEYLENEGKLMETSMGFSSNAPTSPVVYQLPTKSTSYVRTLDSVLKKQSTISPSTSYSLKPHSVPPVSRKAKSQNRQATFSGRTKSSYKSILPYPVSPKQKYSHVILGDKVTKNSSGIISENQANNFVVPTLDENIFPKQISLRQAQQQQQQQQGSRPPGLSKSQVKLMDLEDCALWEGKPRTYITEERADVSLTTLLTAQASLKTKPIHTIIRKRAPPCNNDFCRLGCVCSSLALEKRQPAHCRRPDCMFGCTCLKRK

SEQ ID NO: 21084 - protein, 525 aa, Homo sapiens
MALERLCSVLKVLLITVLVVEGIAVAQKTQDGQNIGIKHIPATQCGIWVRTSNGGHFASPNYPDSYPPNKECIYILEAAPRQRIELTFDEHYYIEPSFECRFDHLEVRDGPFGFSPLIDRYCGVKSPPLIRSTGRFMWIKFSSDEELEGLGFRAKYSFIPDPDFTYLGGILNPIPDCQFELSGADGIVRSSQVEQEEKTKPGQAVDCIWTIKATPKAKIYLRFLDYQMEHSNECKRNFVAVYDGSSSIENLKAKFCSTVANDVMLKTGIGVIRMWADEGSRLSRFRMLFTSFVEPPCTSSTFFCHSNMCINNSLVCNGVQNCAYPWDENHCKEKKKAGVFEQITKTHGTIIGITSGIVLVLLIISILVQVKQPRKKVMACKTAFNKTGFQEVFDPPHYELFSLRDKEISADLADLSEELDNYQKMRRSSTASRCIHDHHCGSQASSVKQSRTNLSSMELPFRNDFAQPQPMKTFNSTFKKSSYTFKQGHECPEQALEDRVMEEIPCEIYVRGREDSAQASISIDF

SEQ ID NO: 21085 - protein, 961 aa, Homo sapiens
MSGPGNKRAAGDGGSGPPEKKLSREEKTTTTLIEPIRLGGISSTEEMDLKVLQFKNKKLAERLEQRQACEDELRERIEKLEKRQATDDATLLIVNRYWAQLDETVEALLRCHESQGELSSAPEAPGTQEGPTCDGTPLPEPGTSELRDPLLMQLRPPLSEPALAFVVALGASSSEEVELELQGRMEFSKAAVSRVVEASDRLQRRVEELCQRVYSRGDSEPLSEAAQAHTRELGRENRRLQDLATQLQEKHHRISLEYSELQDKVTSAETKVLEMETTVEDLQWDIEKLRKREQKLNKHLAEALEQLNSGYYVSGSSSGFQGGQITLSMQKVALRSLPEEVVRETGEYRMLQAQFSLLYNESLQVKTQLDEARGLLLATKNSHLRHIEHMESDELGLQKKLRTEVIQLEDTLAQVRKEYEMLRIEFEQNLAANEQAGPINREMRHLISSLQNHNHQLKGDAQRYKRKLREVQAEIGKLRAQASGSAHSTPNLGHPEDSGVSAPAPGKEEGGPGPVSTPDNRKEMAPVPGTTTTTTSVKKEELVPSEEDFQGITPGAQGPSSRGREPEARPKRELREREGPSLGPPPVASALSRADREKAKVEETKRKESELLKGLRAELKKAQESQKEMKLLLDMYKSAPKEQRDKVQLMAAERKAKAEVDELRSRIRELEERDRRESKKIADEDALRRIRQAEEQIEHLQRKLGATKQEEEALLSEMDVTGQAFEDMQEQNGRLLQQLREKDDANFKLMSERIKANQIHKLLREEKDELGEQVLGLKSQVDAQLLTVQKLEEKERALQGSLGGVEKELTLRSQALELNKRKAVEAAQLAEDLKVQLEHVQTRLREIQPCLAESRAAREKESFNLKRAQEDISRLRRKLEKQRKVEVYADADEILQEEIKEYKARLTCPCCNTRKKDAVLTKCFHVFCFECVRGRYEARQRKCPKCNAAFGAHDFHRIYIS

SEQ ID NO: 21086 - protein, 1089 aa, Homo sapiens
IQLTSMFKDVPLTAEEVEFVVEKALSMFSKMNLQEIPPLVYQLLVLSSKGSRKSVLEGIIAFFSALDKQHNEEQSGDELLDVVTVPSGELRHVEGTIILHIVFAIKLDYELGRELVKHLKVGQQGDSNNNLSPFSIALLLSVTRIQRFQDQVLDLLKTSVVKSFKDLQLLQGSKFLQNLVPHRSYVSTMILEVVKNSVHSWDHVTQGLVELGFILMDSYGPKKVLDGKTIETSPSLSRMPNQHACKLGANILLETFKIHEMIRQEILEQVLNRVVTRASSPISHFLDLLSNIVMYAPLVLQSCSSKVTEAFDYLSFLPLQTVQRLLKAVQPLLKVSMSMRDCLILVLRKAMFANQLDARKSAVAGFLLLLKNFKVLGSLSSSQCSQSLSVSQVHVDVHSHYNSVANETFCLEIMDSLRRCLSQQADVRLMLYEGFYDVLRRNSQLANSVMQTLLSQLKQFYEPKPDLLPPLKLEACILTQGDKISLQEPLDYLLCCIQHCLAWYKNTVIPLQQGEEEEEEEEAFYEDLDDILESITNRMIKSELEDFELDKSADFSQSTSIGIKNNICAFLVMGVCEVLIEYNFSISSFSKNRFEDILSLFMCYKKLSDILNEKAGKAKTKMANKTSDSLLSMKFVSSLLTALFRVLLWRYTSIPTSVEESGKKEKGKSISLLCLEGLQKIFSAVQQFYQPKIQQFLRALDVTDKEGEEREDADVSVTQRTAFQIRQFQRSLLNLLSSQEEDFNSKEALLLVTVLTSLSKLLEPSSPQFVQMLSWTSKICKENSREDALFCKSLMNLLFSLHVSYKSPVILLRDLSQDIHGHLGDIDQDVEVEKTNHFAIVNLRTAAPTVCLLVLSQAEKVLEEVDWLITKLKGQVSQETLSEASSQATLPNQPVEKAIIMQLGTLLTFFHELVQTALPSGSCVDTLLKDLCKMYTTLTALVRYYLQVCQSSGGIPKNMEKLVKLSGSHLTPLCYSFISYVQNKSKSLNYTGEKKEKPAAVATAMARVLRETKPIPNLIFAIEQYEKFLIHLSKKSKVNLMQHMKLSTSRDFKIKGNILDMVLREDGEDENEEGTASEHGGQNKEPAKK

SEQ ID NO: 21087 - protein, 111 aa, Homo sapiens
MMASFQRSNSHDKVRRIVAEEGRTARNLIAWSVPLESKDDDGKPKCQTGGKSKRTIQGTHKTTKQSTAVDCKITSSTTGDKHFDKSPTKTRHPRKIDLRARYWAFLFDNLR

SEQ ID NO: 21088 - protein, 596 aa, Homo sapiens
MKDIFFQFIIARVRKCYSLSCLHTLPVVPTLRKTERGSYSSYGRESNLQGCHQSLLGGDMDMGNPGTLSPTKPGSQYYQYSSNNPRRRPLHSSAMEVQTKKVRKVPPGLPSSVYAPSASTADYNRDSPGYPSSKPATSTFPSSFFMQDGHHSSDPWSSSSGMNQPGYAGMLGNSSHIPQSSSYCSLHPHERLSYPSHSSADINSSLPPMSTFHRSGTNHYSTSSCTPPANGTDSIMANRGSGAAGSSQTGDALGKALASIYSPDHTNNSFSSNPSTPVGSPPSLSAGTAVWSRNGGQASSSPNYEGPLHSLQSRIEDRLERLDDAIHVLRNHAVGPSTAMPGGHGDMHGIIGPSHNGAMGGLGSGYGTGLLSANRHSLMVGTHREDGVALRGSHSLLPNQVPVPQLPVQSATSPDLNPPQDPYRGMPPGLQGQSVSSGSSEIKSDDEGDENLQDTKSSEDKKLDDDKKDIKSITSNNDDEDLTPEQKAEREKERRMANNARERLRVRDINEAFKELGRMVQLHLKSDKPQTKLLILHQAVAVILSLEQQVRERNLNPKAACLKRREEEKVSSEPPPLSLAGPHPGMGDASNHMGQM

SEQ ID NO: 21089 - protein, 732 aa, Homo sapiens
MVPAWLWLLCVSVPQALPKAQPAELSVEVPENYGGNFPLYLTKLPLPREGAEGQIVLSGDSGKATEGPFAMDPDSGFLLVTRALDREEQAEYQLQVTLEMQDGHVLWGPQPVLVHVKDENDQASGHQATATVEVSIIESTWVSLEPIHLAENLKVLYPHHMAQVHWSGGDVHYHLESHPPGPFEVNAEGNLYVTRELDREAQAEYLLQVRAQNSHGEDYAAPLELHVLVMDENDNVPICPPRDPTVSIPELSPPGTEVTRLSAEDADAPGSPNSHVVYQLLSPEPEDGVEGRAFQVDPTSGSVTLGVLPLRAGQNILLLVLAMDLAGAEGGFSSTCEVEVAVTDINDHAPEFITSQIGPISLPEDVEPGTLVAMLTAIDADLEPAFRLMDFAIERGDTEGTFGLDWEPDSGHVRLRLCKNLSYEAAPSHEVVVVVQSVAKLVGPGPGPGATATVTVLVERVMPPPKLDQESYEASVPISAPAGSFLLTIQPSDPISRTLRFSLVNDSEGWLCIEKFSGEVHTAQSLQGAQPGDTYTVLVEAQDTDEPRLSASAPLVIHFLKAPPAPALTLAPVPSQYLCTPRQDHGLIVSGPSKDPDLASGHGPYSFTLGPNPTVQRDWRLQTLNGSHAYLTLALHWVEPREHIIPVVVSHNAQMWQLLVRVIVCRCNVEGQCMRKVGRMKGMPTKLSAVGILVGTLVAIGIFLILIFTHWTMSRKKDPDQPADSVPLKATV

SEQ ID NO: 21090 - protein, 869 aa, Homo sapiens
MDFPSSLRPALFLTGPLGLSDVPDLSFMCSWRDALTLPEAQPQNSENGALHVTKDLLWEPATPGPLPMLPPLIDPWDPGLTARDLLFRGGCRYRKRPRVVLDVTEQISRFLLDHGDVAFAPLGKLMLENFKLEGAGSRTKKKTVVSVKKLLQDLGGHQPWGCPWAYLSNRQRRFSILGGPILGTSVASHLAELLHEELVLRWEQLLLDEACTGGALAWVPGRTPQFGQLVYPAGGAQDRLHFQEVVLTPGDNPQFLGKPGRIQLQGPVRQVVTCTVQGESKALIYTFLPHWLTCYLTPGPFHPSSALLAVRSDYHCAVWKFGKQWQPTLLQAMQVEKGATGISLSPHLPGELAICSRSGAVCLWSPEDGLRQIYRDPETLVFRDSSSWRWADFTAHPRVLTVGDRTGVKMLDTQGPPGCGLLLFRLGAEASCQKGERVLLTQYLGHSSPKCLPPTLHLVCTQFSLYLVDERLPLVPMLKWNHGLPSPLLLARLLPPPRPSCVQPLLLGGQGGQLQLLHLAGEGASVPRLAGPPQSLPSRIDSLPAFPLLEPKIQWRLQERLKAPTIGLAAVVPPLPSAPTPGLVLFQLSAAGDVFYQQLRPQVDSSLRRDAGPPGDTQPDCHAPTASWTSQDTAGCSQWLKALLKVPLAPPVWTAPTFTHRQMLGSTELRREEEEGQRLGVLRKAMARGQLLLQRDLGSLPAAEPPPAPESGLEDKLSERLGEAWAGRGAAWWERQQGRTSEPGRQTRRPKRRTQLSSSFSLSGHVDPSEDTSSPHSPEWPPADALPLPPTTPPSQELTPDACAQGVPSEQRQMLRDYMAKLPPQRDTPGCATTPPHSQASSVRATRSQQHTPVLSSSQPLRKKPRMGF

SEQ ID NO: 21091 - protein, 7555 aa, Homo sapiens
MPLLDSSYLPPTIFILTHVLGVAGVLYWKRHARGRADERDRVQKKTFTKWVNKHLMKVRKHINDLYEDLRDGHNLISLLEVLSGIKLEPAGLKTLRLVSMPSWCHTNNEEQAEEDDDDVPREKGRMRFHRLQNVQIALDFLKQRQVKLVNIRNDDITDGNPKLTLGLIWTIILHFQISDIYISGESGDMSAKEKLLLWTQKVTAGYTGIKCTNFSSCWSDGKMFNALIHRYRPDLVDMERVQIQSNRENLEQAFEVAERLGVTRLLDAEDVDVPSPDEKSVITYVSSIYDAFPKVPEGGEGISATEVDSRWQEYQSRVDSLIPWIKQHTILMSDKTFPQNPVELKALYNQYIHFKETEILAKEREKGRIEELYKLLEVWIEFGRIKLPQGYHPNDVEEEWGKLIIEMLEREKSLRPAVERLELLLQIANKIQNGALNCEEKLTLAKNTLQADAAHLESGQPVQCESDVIMYIQECEGLIRQLQVDLQILRDENYYQLEELAFRVMRLQDELVTLRLECTNLYRKGHFTSLELVPPSTLTTTHLKAEPLTKATHSSSTSWFRKPMTRAELVAISSSEDEGNLRFVYELLSWVEEMQMKLERAEWGNDLPSVELQLETQQHIHTSVEELGSSVKEARLYEGKMSQNFHTSYAETLGKLETQYCKLKETSSFRMRHLQSLHKFVSRATAELIWLNEKEEEELAYDWSDNNSNISAKRNYFSELTMELEEKQDVFRSLQDTAELLSLENHPAKQTVEAYSAAVQSQLQWMKQLCLCVEQHVKENTAYFQFFSDARELESFLRNLQDSIKRKYSCDHNTSLSRLEDLLQDSMDEKEQLIQSKSSVASLVGRSKTIVQLKPRSPDHVLKNTISVKAVCDYRQIEITICKNDECVLEDNSQRTKWKVISPTGNEAMVPSVCFLIPPPNKDAIEMASRVEQSYQKVMALWHQLHVNTKSLISWNYLRKDLDLVQTWNLEKLRSSAPGECHQIMKNLQAHYEDFLQDSRDSVLFSVADRLRLEEEVEACKARFQHLMKSMENEDKEETVAKMYISELKNIRLRLEEYEQRVVKRIQSLASSRTDRDAWQDNALRIAEQEHTQEDLQQLRSDLDAVSMKCDSFLHQSPSSSSVPTLRSELNLLVEKMDHVYGLSTVYLNKLKTVDVIVRSIQDAELLVKGYEIKLSQEEVVLADLSALEAHWSTLRHWLSDVKDKNSVFSVLDEEIAKAKVVAEQMSRLTPERNLDLERYQEKGSQLQERWHRVIAQLEIRQSELESIQEVLGDYRACHGTLIKWIEETTAQQEMMKPGQAEDSRVLSEQLSQQTALFAEIERNQTKLDQCQKFSQQYSTIVKDYELQLMTYKAFVESQQKSPGKRRRMLSSSDAITQEFMDLRTRYTALVTLTTQHVKYISDALRRLEEEEKVVEEEKQEHVEKVKELLGWVSTLARNTQGKATSSETKESTDIEKAILEQQVLSEELTTKKEQVSEAIKTSQIFLAKHGHKLSEKEKKQISEQLNALNKAYHDLCDGSANQLQQLQSQLAHQTEQKECRAVAGVIDLGTVEIFPIFKAMQKGLLDQDTGLVLLESQVIMSGLIAPETGENLSLEEGIARNLINPQMYQQLRELQDALALISRLTESRGPLSVVEAIEKRIISETVGLKILEAHLATGGFSLSPSENCINLEEAFHQGLISAWLHSVLESYLRTSKNLIDPNTAEKIGLLDLMQRCIVHQESGFKLLPVKQLAGGMVSLKSGRKVSIFRAVQEGLIDRQVTVRLLEAQLFAGGIVDPRTGHRLTVEEAVRHNLIDQDMACAILIRQLQTGGIIDTVTGQRLTIDEAVSNDLVAAKIALVILESLWSFMGLLWPESGEILPITDALEQGIVSTELAHKILSNRQHIKALFLPATTEILSWKKAIESGILDRDLANNLKSICIPDVMPHMQLADSAEQNINPGAAVLPCSKSHPKATASQSENLLFQLMTHSYINVQNGQRLLLLDKELMETLTSRDEYQTSPPKVVEIGHQRQKTPEGLQESANVKISGTFSSGWTVRLPEFQFSSQNKEYPDREDCTTEKGKKTTVETEDSSVENPEQDLFVEQKERNPNIDALKVINKVKLEVQRQLIGTQREDQTAVSVRENASRGHLLTIPPAEAEGVPLVVDKDVFSVETPKKEHQPLRNTSFTCQNEQAHTLETEYIHDETGGSHIKPQSKKLQVQVKKTLGIKLELKSETDGNVHPLDKKEMLKKTFLAKDDHKESQEAQNIAGGSMMMSEKTDEEDSGREIFLSCSHPLELLEEATLNVLSAQLLDGGIFHEQTGQKLLLNEAISRGIVPSHTAVKLMEKLNMFQGFFDSQTCESLTTEEVINEGLMDEKLLHNVLMADKAISGVLDPRTQTLCSVKDAVTVGLLDKETATRILERQVVTGGIIDLKRGKKVSVTLASTLGLVDVADQPELINLEKASKGRDAEKTVRERLISLQMETTGLIDPDSKAPLTVVQSIDRGLLEREEAVRLLTKQVVDGGIIHHISGMRLSVDNAFRHGLIGEDLAEKLKRVENLNIHQIFNPETKENISLPKAIKLDLITSDLKREIQEVQAFTGNFVDLISGQRLTLAEAKKEGLLTNEAVLSPGMMHGIVDPENCRIVPYSELVKKCKIDIESGQRYLEVIPFSDIKDGVSDKVLTLSQAIQLGKVDFASTLKVLEAQANTGGIIDTATGKRLTLASALEEKLVDENMVRIIASHQVLNGGIVDIFSDQRVTLVEAIEKRLISPELANMIQIDSSEFSDHRAQIEKQEGIEVCALQNEFLGKDMLIACNQTAEMSCNKVEESERLFQVENQSAQEKVKVRVSDGEQAKKSREISLKEFGCKDQRKPRMSSDAKEFISIINPHNLKGKSLGQVSLTHPYSECDFKLKEVARNNMGNDTNEEQEKAVTKIEIISHMKQSTSCLDSEEIRENQGEVILEVQETYCETSGKLPSEQVLQQPMNARVKSKREKREVIVEESIRTCKPAFLSEEKLYQETAIRDEHDSHIKSQPREMTSSEKGKEADTEMGFSITFKIEESSSQVVPQGISVKHLDALTLFSSKQANEGKVNNLSLCLTLKPEENLSREIACGAQSEPFPCMTPRPEGLHYQESDGKAQVTGPSQISKTDKSFQGTTRQETNYQDSWVTSKTKETKHQISSSNECKEKSYQEVSFDPARGLKLEEITVSRPDSKEVRYLEFSDRKDLHHQGSKSDDKLCGTLKSEIATQELTGEKFLEMANPNVAGLEAGSIEDIVTQRGSRVLGSFLPEKLFKGVSQKENTGQQNAIISPTVLETSEEKTVSLTVCSAVKTEKTPQEKLRESPGSEQTPFMTAPEGKGNGGVNPEPFRATQNVFTRQLCLEHDEKLVSYLSLLRNIEMRTKQIQPLELNLAELQDLLCQAKVLERELKDLTTLVSQELECVNQIIISQPQEVPAQLLKALEKDAKNLQKSLSSVSDTWNSRLLHFQNAVEIEKTKVLNQHTQLEGRLQDLRAWVGNKNLILNSKGSNSEIDVDSLNLCLQQYEDLKQPMAERKAQLDALAFDIQFFISEHAQDLSPQQNRQMLRLLNELQRSFQDILEQTAAQVDALQGHLQQMEQEALVKTLQKQQNTCHQQLEDLCSWVGQAERALAGHQGRTTQQDLSALQKNQSDLKDLQDDIQNRATSFATVVKDIEGFMEENQTKLSPRELTALREKLHQAKEQYEALQEETRVAQKELEEAVTSALQQETEKSKAAKELAENKKKIDALLDWVTSVGSSGGQLLTNLPGMEQLSGASLEKGALDTTDGYMGVNQAPEKLDKQCEMMKARHQELLSQQQNFILATQSAQAFLDQHGHNLTPEEQQMLQQKLGELKEQYSTSLAQSEAELKQVQTLQDELQKFLQDHKEFESWLERSEKELENMHKGGSSPETLPSLLKRQGSFSEDVISHKGDLRFVTISGQKVLDMENSFKEGKEPSEIGNLVKDKLKDATERYTALHSKCTRLGSHLNMLLGQYHQFQNSADSLQAWMQACEANVEKLLSDTVASDPGVLQEQLATTKQLQEELAEHQVPVEKLQKVARDIMEIEGEPAPDHRHVQETTDSILSHFQSLSYSLAERSSLLQKAIAQSQSVQESLESLLQSIGEVEQNLEGKQVSSLSSGVIQEALATNMKLKQDIARQKSSLEATREMVTRFMETADSTTAAVLQGKLAEVSQRFEQLCLQQQEKESSLKKLLPQAEMFEHLSGKLQQFMENKSRMLASGNQPDQDITHFFQQIQELNLEMEDQQENLDTLEHLVTELSSCGFALDLCQHQDRVQNLRKDFTELQKTVKEREKDASSCQEQLDEFRKLVRTFQKWLKETEGSIPPTETSMSAKELEKQIEHLKSLLDDWASKGTLVEEINCKGTSLENLIMEITAPDSQGKTGSILPSVGSSVGSVNGYHTCKDLTEIQCDMSDVNLKYEKLGGVLHERQESLQAILNRMEEVHKEANSVLQWLESKEEVLKSMDAMSSPTKTETVKAQAESNKAFLAELEQNSPKIQKVKEALAGLLVTYPNSQEAENWKKIQEELNSRWERATEVTVARQRQLEESASHLACFQAAESQLRPWLMEKELMMGVLGPLSIDPNMLNAQKQQVQFMLKEFEARRQQHEQLNEAAQGILTGPGDVSLSTSQVQKELQSINQKWVELTDKLNSRSSQIDQAIVKSTQYQELLQDLSEKVRAVGQRLSVQSAISTQPEAVKQQLEETSEIRSDLEQLDHEVKEAQTLCDELSVLIGEQYLKDELKKRLETVALPLQGLEDLAADRINRLQAALASTQQFQQMFDELRTWLDDKQSQQAKNCPISAKLERLQSQLQENEEFQKSLNQHSGSYEVIVAEGESLLLSVPPGEEKRTLQNQLVELKNHWEELSKKTADRQSRLKDCMQKAQKYQWHVEDLVPWIEDCKAKMSELRVTLDPVQLESSLLRSKAMLNEVEKRRSLLEILNSAADILINSSEADEDGIRDEKAGINQNMDAVTEELQAKTGSLEEMTQRLREFQESFKNIEKKVEGAKHQLEIFDALGSQACSNKNLEKLRAQQEVLQALEPQVDYLRNFTQGLVEDAPDGSDASQLLHQAEVAQQEFLEVKQRVNSGCVMMENKLEGIGQFHCRVREMFSQLADLDDELDGMGAIGRDTDSLQSQIEDVRLFLNKIHVLKLDIEASEAECRHMLEEEGTLDLLGLKRELEALNKQCGKLTERGKARQEQLELTLGRVEDFYRKLKGLNDATTAAEEAEALQWVVGTEVEIINQQLADFKMFQKEQVDPLQMKLQQVNGLGQGLIQSAGKDCDVQGLEHDMEEINARWNTLNKKVAQRIAQLQEALLHCGKFQDALEPLLSWLADTEELIANQKPPSAEYKVVKAQIQEQKLLQRLLDDRKATVDMLQAEGGRIAQSAELADREKITGQLESLESRWTELLSKAAARQKQLEDILVLAKQFHETAEPISDFLSVTEKKLANSEPVGTQTAKIQQQIIRHKALEEDIENHATDVHQAVKIGQSLSSLTSPAEQGVLSEKIDSLQARYSEIQDRCCRKAALLDQALSNARLFGEDEVEVLNWLAEVEDKLSSVFVKDFKQDVLHRQHADHLALNEEIVNRKKNVDQAIKNGQALLKQTTGEEVLLIQEKLDGIKTRYADITVTSSKALRTLEQARQLATKFQSTYEELTGWLREVEEELATSGGQSPTGEQIPQFQQRQKELKKEVMEHRLVLDTVNEVSRALLELVPWRAREGLDKLVSDANEQYKLVSDTIGQRVDEIDAAIQRSQQYEQAADAELAWVAETKRKLMALGPIRLEQDQTTAQLQVQKAFSIDIIRHKDSMDELFSHRSEIFGTCGEEQKTVLQEKTESLIQQYEAISLLNSERYARLERAQVLVNQFWETYEELSPWIEETRALIAQLPSPAIDHEQLRQQQEEMRQLRESIAEHKPHIDKLLKIGPQLKELNPEEGEMVEEKYQKAENMYAQIKEEVRQRALALDEAVSQSTQFHDKIEPMLETLENLSSRLRMPPLIPAEVDKIRECISDNKSATVELEKLQPSFEALKRRGEELIGRSQGADKDLAAKEIQDKLDQMVFFWEDIKARAEEREIKFLDVLELAEKFWYDMAALLTTIKDTQDIVHDLESPGIDPSIIKQQVEAAETIKEETDGLHEELEFIRILGADLIFACGETEKPEVRKSIDEMNNAWENLNKTWKERLEKLEDAMQAAVQYQDTLQAMFDWLDNTVIKLCTMPPVGTDLNTVKDQLNEMKEFKVEVYQQQIEMEKLNHQGELMLKKATDETDRDIIREPLTELKHLWENLGEKIAHRQHKLEGALLALGQFQHALEELMSWLTHTEELLDAQRPISGDPKVIEVELAKHHVLKNDVLAHQATVETVNKAGNELLESSAGDDASSLRSRLEAMNQCWESVLQKTEEREQQLQSTLQQAQGFHSEIEDFLLELTRMESQLSASKPTGGLPETAREQLDTHMELYSQLKAKEETYNQLLDKGRLMLLSRDDSGSGSKTEQSVALLEQKWHVVSSKMEERKSKLEEALNLATEFQNSLQEFINWLTLAEQSLNIASPPSLILNTVLSQIEEHKVFANEVNAHRDQIIELDQTGNQLKFLSQKQDVVLIKNLLVSVQSRWEKVVQRSIERGRSLDDARKRAKQFHEAWKKLIDWLEDAESHLDSELEISNDPDKIKLQLSKHKEFQKTLGGKQPVYDTTIRTGRALKEKTLLPEDSQKLDNFLGEVRDKWDTVCGKSVERQHKLEEALLFSGQFMDALQALVDWLYKVEPQLAEDQPVHGDLDLVMNLMDAHKVFQKELGKRTGTVQVLKRSGRELIENSRDDTTWVKGQLQELSTRWDTVCKLSVSKQSRLEQALKQAEVFRDTVHMLLEWLSEAEQTLRFRGALPDDTEALQSLIDTHKEFMKKVEEKRVDVNSAVAMGEVILAVCHPDCITTIKHWITIIRARFEEVLTWAKQHQQRLETALSELVANAELLEELLAWIQWAETTLIQRDQEPIPQNIDRVKALIAEHQTFMEEMTRKQPDVDRVTKTYKRKNIEPTHAPFIEKSRSGGRKSLSQPTPPPMPILSQSEAKNPRINQLSARWQQVWLLALERQRKLNDALDRLEELKEFANFDFDVWRKKYMRWMNHKKSRVMDFFRRIDKDQDGKITRQEFIDGILASKFPTTKLEMTAVADIFDRDGDGYIDYYEFVAALHPNKDAYRPTTDADKIEDEVTRQVAQCKCAKRFQVEQIGENKYRFFLGNQFGDSQQLRLVRILRSTVMVRVGGGWMALDEFLVKNDPCRVHHPGSKIKRSDSSSSISSQSPIARGRTNIELREKFILPEGASQGMTPFRSRGRRSKPSSRAASPTRSSSSASQSNHSCTSMPSSPATPASGTKTSLQFSRCYDKPWLVNSKAGTPIRDSHSPDLQLPTPEVIPSSGSKLKRPTPTFHSSRTSLAGDTSNSSSPASTGAKTNRADPKKSASRPGSRAGSRAGSRASSRRGSDASDFDLLETQSACSDTSESSAAGGQGNSRRGLNKPSKIPTMSKKTTTASPRTPGPKR

SEQ ID NO: 21092 - protein, 108 aa, Homo sapiens
CCSPGVGWAQRCGQGACRREDPQACIEEQLCYSCRVNMKDLPSLDPLPPYILAEAQLRTQRYWGPHCRGAWVRGLGAGAHCSFLSRAWGLQEIRDCLIEDSDDEAGQS

SEQ ID NO: 21093 - protein, 2881 aa, Homo sapiens
MTDPMMDFFDDANLFGETLEGLSDDAFVQPGPVSLVDELNLGAEFEPLHIDSLNHVQGTPTHQKMTDFEQLNQFDSIKFHHVNQSFGSPAEHVLSPHSQFNCSPIHPQNQPNGLFPDVSDGSPMWGHQTATTISNQNGSPFHQQGHSHSMHQNKSFVAHHDFALFQANEQQTQCTSLRSQQNRNNLNPGQNSLSQSKNFMNVSGPHRVNVNHPPQMTNASNSQQSISMQQFSQTSNPSAHFHKCSSHQEGNFNGPSPNMTSCSVSNSQQFSSHYSFSSNHISPNSLLQSSAVLASNHTNQTLSDFTGSNSFSPHRGIKQESTQHILNPNTSLNSNNFQILHSSHPQGNYSNSKLSPVHMNFPDPVDSGTQMGHFNDHVETNGFSSLEENLLHQVESQTEPFTGLDPEDLLQEGLLPHFDESTFGQDNSSHILDHDLDRQFTSHLVTRPSDMAQTQLQSQARSWHSSFSNHQHLHDRNHLCLQRQPPSSKKSDGSGTYTKLQNTQVRVMSEKKQRKKVESESKQEKANRIISEAIAKAKERGERNIPRVMSPENFPTASVEGKEEKKGRRMKSKPKDKDSKKTKTCSKLKEKTKIGKLIITLGKKQKRKNESSDEISDAEQMPQHTLKDQDSQKRRSNRQIKRKKYAEDIEGKQSEEEVKGSMKIKKNSAPLPGEQPLQLFVENPSEEDAAIVDKILSSRTVKKEISPGVMIDTEEFFVKYKNYSYLHCEWATEEQLLKDKRIQQKIKRFKLRQAQRAHFFADMEEEPFNPDYVEVDRVLEVSFCEDKDTGEPVIYYLVKWCSLPYEDSTWELKEDVDLAKIEEFEQLQASRPDTRRLDRPPSNIWKKIDQSRDYKNGNQLREYQLEGLNWLLFNWYNRRNCILADEMGLGKTIQSITFLYEILLTGIRGPFLIIAPLSTIANWEREFRTWTDINVVVYHGSLISRQMIQQYEMYFRDSQGRIIRGAYRFQAIITTFEMILGGCGELNAIEWRCVIIDEAHRLKNKNCKLLEGLKLMNLEHKVLLTGTPLQNTVEELFSLLHFLEPLRFPSESTFMQEFGDLKTEEQVQKLQAILKPMMLRRLKEDVEKKLAPKEETIIEVELTNIQKKYYRAILEKNFSFLSKGAGQTNVPNLVNTMMELRKCCNHPYLIKGAEEKILGEFRDTYNPAASDFHLQAMIQSAGKLVLIDKLLPKMKAGGHKVLIFSQMVRCLDILEDYLIHKRYLYERIDGRVRGNLRQAAIDRFSKPDSDRFVFLLCTRAGGLGINLTAADTCIIFDSDWNPQNDLQAQARCHRIGQNKAVKVYRLVTRNSYEREMFDRASLKLGLDKAVLQSMSGRESNVGGIQQLSKKEIEDLLRRGAYGAIMEEEDEGSKFCEEDIDQILLRRTKTITIESEGRGSTFAKASFVASGNRTDISLDDPNFWQKWAKKAEIDIEAISGRNSLVIDTPRIRKQTRPFSATKDELAELSEAESEGDEKPKLRRPCDRSNGYGRTECFRVEKNLLVYGWGRWREILSHGRFKRQLNEHDVEIICRALLAYCLVHYRGDEKIKGFIWDLITPTEDGQTRELQNHLGLSAPVPRGRKGKKVKTQTSSFDIQKAEWLRKYNPEQLLQDEGYKKHIKHHCNKVLLRVRMLYYLKQEVIGNECQKVFDGVDASDIDVWVPEPDHSEVPAEWWDFDADKSLLIGVFKHGYEKYNTIRADPALCFLERVGKPDEKAVAAEQRANDYMDGDVEDPEYKPAPAIFKDDIEDDVSSPGDLVIADGDGQLMEGDKVYWPTQSALTTRLRRLITAYQRTNKNRQIQQIQPTFSVPTSVMQPIYEEATLNPKMAAKIERQQRWTRREEADFYRVVSTFGVVFDPDRGQFDWTKFRAMARLHKKTDDSLEKYLYAFMSMCRRVCRLPSKEELVDPNIFIQPITEERASRTLYRIELLRKVREQALRHPQLFERLKLCHPNPDLPVWWECGPHDRDLLIGAAKHGVSRTDYHILRDPELSFMAAQRNYSQSKMAHSRTSTPLLQQYQVALSASPLTSLPRLLDAKGIILEEMKVKSENLKEEPQSSEEESMSSVETRTLIKSEPVSPKNGVLPQATGDQKSGGKCETDRRMVAARTEPLTPNPASKKPRVHKRGSESSSDSDSDSERSSCSSRSSSSSSSSSCSHSRSGSSSSSSSSCSSASSSSSSSTSSSSSSSSSSSEESDSDEEEAQKRESTTHMKAYDEESVASLSTTQDETQDSFQMNNGTPESAYILQGGYMLAASYWPKDRVMINRLDSICQTVLKGKWPSARRSYDANTVASFYTTKLLDSPGAATEYSDPSVPTPPGAGVKEEHDQSTQMSKEGGLKLTFQKQGLAQKRPFDGEDGALGQQQYLTRLRELQSASETSLVNFPKSIPVSGTSIQPTLGANGVILDNQPIVKKRRGRRKNVEGVDIFFFNRNKPPNHVSLGLTSSQISTGINPALSYTQPQGIPDTESPVPVINLKDGTRLAGDDAPKRKDLEKWLKEHPGYVEDLGAFIPRMQLHEGRPKQKRHRCRNPNKLDVNSLTGEERVQLINRRNARKVGGAFAPPLKDLCRFLKENSEYGVAPEWGDVVKQSGFLPESMYERILTGPVVREEVSRRGRRPKSGIAKATAAAAAASATSVSGNPLLANGLLPGVDLTTLQALQQNLQNLQSLQVTAGLMGMPTGLPSGGEAKNMAAMFPMLLSGMAGLPNLLGMGGLLTKPTESGTEDKKGSDSKESEGKTERTESQSSENGGENSVSSSPSTSSTAALNTAAAANPLALNPLLLSNILYPGMLLTPGLNLHIPTLSQSNTFDVQNKNSDLGSSKSVEVKEEDSRIKDQEDKGGTEPSPLNENSTDEGSEKADASSGSDSTSSSSEDSDSSNED

SEQ ID NO: 21094 - protein, 335 aa, Homo sapiens
MASASSSRAGVALPFEKSQLTLKVVSAKPKVHNRQPRINSYVEVAVDGLPSETKKTGKRIGSSELLWNEIIILNVTAQSHLDLKVWSCHTLRNELLGTASVNLSNVLKNNGGKMENMQLTLNLQTENKGSVVSGGELTIFLDGPTVDLGNVPNGSALTDGSQLPSRDSSGTAVAPENRHQPPSTNCFGGRSRTHRHSGASARTTPATGEQSPGARSRHRQPVKNSGHSGLANGTVNDEPTTATDPEEPSVVGVTSPPAAPLSVTPNPNTTSLPAPATPAEGEEPSTSGTQQLPAAAQAPDALPAGWEQRELPNGRVYYVDHNTKTTTWERPLPPG

SEQ ID NO: 21095 - protein, 99 aa, Homo sapiens
MQTASGGPQPRLSAVEVEAEAGRLRKACSLLRLRMREELSAAPMDWMQEYRCLLTLEGLQAMVGQCLHRLQELRAAVAEQPPRPCPVGRPPGASPSCGG

SEQ ID NO: 21096 - protein, 642 aa, Homo sapiens
MFSPPVSSGKNGPTSLASGHFTGSNVEDRSSSGSWGNGGHPSPSRNYGDGTPYDHMTSRDLGSHDNLSPPFVNSRIQSKTERGSYSSYGRESNLQGCHQSLLGGDMDMGNPGTLSPTKPGSQYYQYSSNNPRRRPLHSSAMEVQTKKVRKVPPGLPSSVYAPSASTADYNRDSPGYPSSKPATSTFPSSFFMQDGHHSSDPWSSSSGMNQPGYAGMLGNSSHIPQSSSYCSLHPHERLSYPSHSSADINSSLPPMSTFHRSGTNHYSTSSCTPPANGTDSIMANRGSGAAGSSQTGDALGKALASIYSPDHTNNSFSSNPSTPVGSPPSLSAGTAVWSRNGGQASSSPNYEGPLHSLQSRIEDRLERLDDAIHVLRNHAVGPSTAMPGGHGDMHGIIGPSHNGAMGGLGSGYGTGLLSANRHSLMVGTHREDGVALRGSHSLLPNQVPVPQLPVQSATSPDLNPPQDPYRGMPPGLQGQSVSSGSSEIKSDDEGDENLQDTKSSEDKKLDDDKKDIKSITSNNDDEDLTPEQKAEREKERRMANNARERLRVRDINEAFKELGRMVQLHLKSDKPQTKLLILHQAVAVILSLEQQVRERNLNPKAACLKRREEEKVSSEPPPLSLAGPHPGMGDASNHMGQM

SEQ ID NO: 21097 - protein, 1315 aa, Homo sapiens
MLSRPKPGESEVDLLHFQSQFLAAGAAPAVQLVKKGNRGGGDANSDRPPLQDHRDVVMLDNLPDLPPALVPSPPKRARPSPGHCLPEDEDPEERLRRHDQHITAVLTKIIERDTSSVAVNLPVPSGVAFPAVFLRSRDTQGKSATSGKRSIFAQEIAARRIAEAKGPSVGEVVPNVGPPEGAVTCETPTPRNQGCQLPGSSHSFQGPNLVTGKGLRDQEAEQEAQTIHEENIARLQAMAPEEILQEQQRLLAQLDPSLVAFLRSHSHTQEQTGETASEEQRPGGPSANVTKEEPLMSAFASEPRKRDKLEPEAPALALPVTPQKEWLHMDTVELEKLHWTQDLPPVRRQQTQERMQARFSLQGELLAPDVDLPTHLGLHHHGEEAERAGYSLQELFHLTRSQVSQQRALALHVLAQVISRAQAGEFGDRLAGSVLSLLLDAGFLFLLRFSLDDRVDGVIATAIRALRALLVAPGDEELLDSTFSWYHGALTFPLMPSQEDKEDEDEDEECPAGKAKRKSPEEESRPPPDLARHDVIKGLLATSLLPRLRYVLEVTYPGPAVVLDILAVLIRLARHSLESATRVLECPRLIETIVREFLPTSWSPVGAGPTPSLYKVPCATAMKLLRVLASAGRNIAARLLSSFDLRSRLCRIIAEAPQELALPPEEAEMLSTEALRLWAVAASYGQGGYLYRELYPVLMRALQVVPRELSTHPPQPLSMQRIASLLTLLTQLTLAAGSTPAETISDSAEASLSATPSLVTWTQVSGLQPLVEPCLRQTLKLLSRPEMWRAVGPVPVACLLFLGAYYQAWSQQPSSCPEDWLQDMQRLSEELLLPLLSQPTLGSLWDSLRHCSLLCNPLSCVPALEAPPSLVSLGCSGGCPRLSLAGSASPFPFLTALLSLLNTLAQIHKGLCGQLAAILAAPGLQNYFLQCVAPGAAPHLTPFSAWALRHEYHLQYLALALAQKAAALQPLPATHAALYHGMALALLSRLLPGSEYLTHELLLSCVFRLEFLPERTSGGPEAADFSDQLSLGSSRVPRCGQGTLLAQACQDLPSIRNCYLTHCSPARASLLASQALHRGELQRVPTLLLPMPTEPLLPTDWPFLPLIRLYHRASDTPSGLSPTDTMGTAMRVLQWVLVLESWRPQALWAVPPAARLARLMCVFLVDSELFRESPVQHLVAALLAQLCQPQVLPNLNLDCRLPGLTSFPDLYANFLDHFEAVSFGDHLFGALVLLPLQRRFSVTLRLALFGEHVGALRALSLPLTQVLSQPSRTCKGTLHWASGAVLSLEELWKTSASSSYLLGALRGLRESMKRA

SEQ ID NO: 21098 - protein, 747 aa, Homo sapiens
MMASFQRSNSHDKVRRIVAEEGRTARNLIAWSVPLESKDDDGKPKCQTGGKSKRTIQGTHKTTKQSTAVDCKITSSTTGDKHFDKSPTKTRHPRKIDLRARYWAFLFDNLRRAVDEIYVTCESDQSVVECKEVLMMLDNYVRDFKALIDWIQLQEKLEKTDAQSRPTSLAWEVKKMSPGRHVIPSPSTDRINVTSNARRSLNFGGSTGTVPAPRLAPTGVSWADKVKAHHTGSTASSEITPAQSCPPMTVQKASRKNERKDAEGWETVQRGRPIRSRSTAVMPKVSLATEATRSKDDSDKENVCLLPDESIQKGQFVGDGTSNTIESHPKDSLHSCDHPLAEKTQFTVSTLDDVKNSGSIRDNYVRTSEISAVHIDTECVSVMLQAGTPPLQVNEEKFPAEKARIENEMDPSDISNVSAANLSMAEVLAKKEELADRLEKANEEAIASAIAEEEQLTREIEAEENNDINIETDNDSDFSASMGSGSVSFCGMSMDWNDVLADYEARESWRQNTSWGDIVEEEPARPPGHGIHMHEKLSSPSRKRTIAESKKKHEEKQMKAQQLREKLREEKTLKLQKLLEREKDVRKWKEELLDQRRRMMEEKLLHAEFKREVQLQAIVKKAQEEEAKVNEIAFINTLEAQNKRHDVLSKLKEYEQRLNELQEERQRRQEEKQARDEAVQERKRALEAERQARVEELLMKRKEQEARIEQQRQEKEKAREDAARERARDREERLAALTAAQQEAMEE

SEQ ID NO: 21099 - protein, 180 aa, Homo sapiens
MLSRPKPGESEVDLLHFQSQFLAAGAAPAVQLVKKGNRGGGDANSDRPPLQDHRDVVMLDNLPDLPPALVPSPPKRARPSPGHCLPEDEDPEERLRRHDQHITAVLTKIIERDTSSVAVNLPVPSGVAFPAVFLRSRDTQGKSATSGKRSIFAQEIAARRIAEAKGPSVGEVVPNVGPPE

SEQ ID NO: 21100 - protein, 2084 aa, Homo sapiens
MDALESLLDEVALEGLDGLCLPALWSRLETRVPPFPLPLEPCTQEFLWRALATHPGISFYEEPRERPDLQLQDRYEEIDLETGILESRRDPVALEDVYPIHMILENKDGIQGSCRYFKERKNITNDIRTKSLQPRCTMVEAFDRWGKKLIIVASQAMRYRALIGQEGDPDLKLPDFSYCILERLGRSRWQGELQRDLHTTAFKVDAGKLHYHRKILNKNGLITMQSHVIRLPTGAQQHSILLLLNRFHVDRRSKYDILMEKLSVMLSTRTNHIETLGKLREELGLCERTFKRLYQYMLNAGLAKVVSLRLQEIHPECGPCKTKKGTDVMVRCLKLLKEFKRNDHDDDEDEEVISKTVPPVDIVFERDMLTQTYDLIERRGTKGISQAEIRVAMNVGKLEARMLCRLLQRFKVVKGFMEDEGRQRTTKYISCVFAEESDLSRQYQREKARSELLTTVSLASMQEESLLPEGEDTFLSESDSEEERSSSKRRGRGSQKDTRASANLRPKTQPHHSTPTKGGWKVVNLHPLKKQPPSFPGAAEERACQSLASRDSLLDTSSVSEPNVSFVSHCADSNSGDIAVIEEVRMENPKESSSSLKTGRHSSGQDKPHETYRLLKRRNLIIEAVTNLRLIESLFTIQKMIMDQEKQEGVSTKCCKKSIVRLVRNLSEEGLLRLYRTTVIQDGIKKKVDLVVHPSMDQNDPLVRSAIEQVRFRISNSSTANRVKTSQPPVPQGEAEEDSQGKEGPSGSGDSQLSASSRSESGRMKKSDNKMGITPLRNYHPIVVPGLGRSLGFLPKMPRLRVVHMFLWYLIYGHPASNTVEKPSFISERRTIKQESGRAGVRPSSSGSAWEACSEAPSKGSQDGVTWEAEVELATETVYVDDASWMRYIPPIPVHRDFGFGWALVSDILLCLPLSIFIQIVQVSYKVDNLEEFLNDPLKKHTLIRFLPRPIRQQLLYKRRYIFSVVENLQRLCYMGLLQFGPTEKFQDKDQVFIFLKKNAVIVDTTICDPHYNLARSSRPFERRLYVLNSMQDVENYWFDLQCVCLNTPLGVVRCPRVRKNSSTDQGSDEEGSLQKEQESAMDKHNLERKCAMLEYTTGSREVVDEGLIPGDGLGAAGLDSSFYGHLKRNWIWTSYIINQAKKENTAAENGLTVRLQTFLSKRPMPLSARGNSRLNIWGEARVGSELCAGWEEQFEVDREPSLDRNRRVRGGKSQKRKRLKKDPGKKIKRKKKGEFPGEKSKRLRYHDEADQSALQRMTRLRVTWSMQEDGLLVLCRIASNVLNTKVKGPFVTWQVVRDILHATFEESLDKTSHSVGRRARYIVKNPQAYLNYKVCLAEVYQDKALVGDFMNRRGDYDDPKVCANEFKEFVEKLKEKFSSALRNSNLEIPDTLQELFARYRVLAIGDEKDQTRKEDELNSVDDIHFLVLQNLIQSTLALSDSQMKSYQSFQTFRLYREYKDHVLVKAFMECQKRSLVNRRRVNHTLGPKKNRALPFVPMSYQLSQTYYRIFTWRFPSTICTESFQFLDRMRAAGKLDQPDRFSFKDQDNNEPTNDMVAFSLDGPGGNCVAVLTLFSLGLISVDVRIPEQIIVVDSSMVENEVIKSLGKDGSLEDDEDEEDDLDEGVGGKRRSMEVKPAQASHTNYLLMRGYYSPGIVSTRNLNPNDSIVVNSCQMKFQLRCTPVPARLRPAAAPLEELTMGTSCLPDTFTKLINPQENTCSLEEFVLQLELSGYSPEDLTAALEILEAIIATGCFGIDKEELRRRFSALEKAGGGRTRTFADCIQALLEQHQVLEVGGNTARLVAMGSAWPWLLHSVRLKDREDADIQREDPQARPLEGSSSEDSPPEGQAPPSHSPRGTKRRASWASENGETDAEGTQMTPAKRPALQDSNLAPSLGPGAEDGAEAQAPSPPPALEDTAAAGAAQEDQEGVGFTESFGAANISQAARERDCESVCFIGRPWRVVDGHLNLPVCKGMMEAMLYHIMTRPGIPESSLLRHYQGVLQPVAVLELLQGLESLGCIRKRWLRKPRPVSLFSTPVVEEVEVPSSLDESPMAFYEPTLDCTLRLGRVFPHEVNWNKWIHL

SEQ ID NO: 21101 - protein, 664 aa, Homo sapiens
MQRAKTELFRLQIVTDDLRKNEMFSPPVSSGKNGPTSLASGHFTGSNVEDRSSSGSWGNGGHPSPSRNYGDGTPYDHMTSRDLGSHDNLSPPFVNSRIQSKTERGSYSSYGRESNLQGCHQQSLLGGDMDMGNPGTLSPTKPGSQYYQYSSNNPRRRPLHSSAMEVQTKKVRKVPPGLPSSVYAPSASTADYNRDSPGYPSSKPATSTFPSSFFMQDGHHSSDPWSSSSGMNQPGYAGMLGNSSHIPQSSSYCSLHPHERLSYPSHSSADINSSLPPMSTFHRSGTNHYSTSSCTPPANGTDSIMANRGSGAAGSSQTGDALGKALASIYSPDHTNNSFSSNPSTPVGSPPSLSGTAVWSRNGGQASSSPNYEGPLHSLQSRIEDRLERLDDAIHVLRNHAVGPSTAMPGGHGDMHGIIGPSHNGAMGGLGSGYGTGLLSANRHSLMVGTHREDGVALRGSHSLLPNQVPVPQLPVQSATSPDLNPPQDPYRGMPPGLQGQSVSSGSSEIKSDDEGDENLQDTKSSEDKKLDDDKKDIKSITSNNDDEDLTPEQKAEREKERRMANNARERLRVRDINEAFKELGRMVQLHLKSDKPQTKLLILHQAVAVILSLEQQVRERNLNPKAACLKRREEEKVSSEPPPLSLAGPHPGMGDASNHMGQM

SEQ ID NO: 21102 - protein, 959 aa, Homo sapiens
TGDEFLLLFTMASNHPAFSFHQKQVLRQELTQIQSSLNGGGGHGGKGAPGPGGALPTCPACHKITPRTEAPVSSVSNSLENALHTSAHSTEESLPKRPLGKHSKVSVEKIDLKGLSHTKNDRNVECSFEVLWSDSSITSVTKSSSEVTEFISKLCQLYPEENLEKLIPCLAGPDAFYVERNHVDLDSGLRYLASLPSHVLKNDHVRRFLSTSSPPQQLQSPSPGNPSLSKVGTVMGVSGRPVCGVAGIPSSQSGAQHHGQHPAGSAAPLPHCSHAGSAGSALAYRTQMDTSPAILMPSSLQTPQTQEQNGILDWLRKLRLHKYYPVFKQLSMEKFLSLTEEDLNKFESLTMGAKKKLKTQLELEKEKSERRCLNPSAPPLVTSSGVARVPPTSHVGPVQSGRGSHAAELRVEVEQPHHQLPREGSSSEYSSSSSSPMGVQAREESSDSAEENDRRVEIHLESSDKEKPVMLLNHFTSSSARPTAQVLPVQNEASSNPSGHHPLPPQMLSAASHITPIRMLNSVHKPERGSADMKLLSSSVHSLLSLEERNKGSGPRSSMKVDKSFGSAMMDVLPASAPHQPVQVLSGLSESSSMSPTVSFGPRTKVVHASTLDRVLKTAQQPALVVETSTAATGTPSTVLHAARPPIKLLLSSSVPADSAISGQTSCPNNVQISVPPAIINPRTALYTANTKVAFSAMSSMPVGPLQGGFCANSNTASPSSHPSTSFANMATLPSCPAPSSSPALSSVPESSFYSSSGGGGSTGNIPASNPNHHHHHHHQQPPAPPQPAPPPPGCIVCTSCGCSGSCGSSGLTVSYANYFQHPFSGPSVFTFPFLPFSPMCSSGYVSAQQYGGGSTFPVVHAPYSSSGTPDPVLSGQSTFAVPPMQNFMAGTAGVYQTQGLVGSSNGSSHKKSGNLSCYNCGATGHRAQDCKQPSMDFNRPGTFRLKYAPPAESLDSTD

SEQ ID NO: 21103 - protein, 198 aa, Homo sapiens
MPLFGWMKWPKNDSYKPTHYPGSDIVTKTLLRELKWHLKERERLIQEIENEQKVKKTGVDYNWLRNYQNPHTTIPVTEQRQLEVLCSQVQPCQTGTILSRFREVLAENDVLPWEIVYIFKQVLKDFLSSSDRGSEQEDLEDSGSMDCSAPSVIQGDSSKRADKDEIPTISSYVDKNTKDRFPVFSHRIWNLPYYHPSS

SEQ ID NO: 21104 - protein, 167 aa, Homo sapiens
MDRGRPAGSPLSASAEPAPLAAAIRDSRPGRTGPGPAGPGGGSRSGSGRPAAANAARERSRVQTLRHAFLELQRTLPSVPPDTKLSKLDVLLLATTYIAHLTRSLQDDAEAPADAGLGALRGDGYLHPVKKWPMRSRLYIGATGQFLKHSVSGEKTNHDNTPTDSQP

SEQ ID NO: 21105 - protein, 222 aa, Homo sapiens
MVISFYYGGKLVGQATTTCPEGCRLSLSQPGLPGTKLYGPEGLELVRFPPADAIPSERQRQVTRKLFGHLERGVLLHSSRQGVFVKRLCQGRVFCSGNAVVCKGRPNKLERDEVVQVFDTSQFFRELQQFYNSQGRLPDGRVVLCFGEEFPDMAPLRSKLILVQIEQLYVRQLAEEAGKSCGAGSVMQAPEEPPPDQVFRMFPDICASHQRSFFRENQQITV

SEQ ID NO: 21106 - protein, 242 aa, Homo sapiens
MGLHLRPYRVGLLPDGLLFLLLLLMLLADPALPAGRHPPVVLVPGDLGNQLEAKLDKPTVVHYLCSKKTESYFTIWLNLELLLPVIIDCWIDNIRLECSGAISAHYTSASQAQALLLPQTPDNWDYRLVYNKTSRATQFPDGVDVRVPGFGKTFSLEFLDPSKSSVGSYFHTMVESLVGWGYTRGEDVRGAPYDWRRAPTAAAGLEGQVYPGLRVTGCALGGRGQDPARPGFRRQQPDPSHR

SEQ ID NO: 21107 - protein, 205 aa, Homo sapiens
MSLNYIKNFYEGCVKPPTVIGQFHTLFFGSIRIFFLGVLGFAVYGNEALHFICDPDKREVNLFCYNQFRPITPQVSFSALQLVIVLVPGALFHLYAACKSINQECILQKPIYTIIYILSVLLRISLAAIAFWLQIYLFGFQVKSLYLCDARSLGENMIIRCMVPEHFEKTIFLIAINTFTTITILLFVAEIFEIIFRRLYFPFRQ

SEQ ID NO: 21108 - protein, 254 aa, Homo sapiens
PRALLAALWALEAAGTAALRIGAFNIQSFGDSKVSDPACGSIIAKILAGYDLALVQEVRDPDLSAVSALMEQINSVSEHEYSFVSSQPLGRDQYKEMYLFVYRKDAVSVVDTYLYPDPEDVFSREPFVVKFSAPGTGERAPPLPSRRALTPPPLPAAAQNLVLIPLHAAPHQAVAEIDALYDVYLDVIDKWGTDDWAAIRLRSSEVFKWLIPDSADTTVGNSDCAYDRIVACGARLRRSLKPQSATVHDFQEEF

SEQ ID NO: 21109 - protein, 128 aa, Homo sapiens
MLSRPKPGESEVDLLHFQSQFLAAGAAPAVQLVKKGNRGGGDANSDRPPLQDHRDVVMLDNLPDLPPALVPSPPKRARPSPGHCLPEDEDPEERLRRHDQHITAVLTKIIERDTSSVAVNLPVPSGVA

SEQ ID NO: 21110 - protein, 177 aa, Homo sapiens
NTDRPDASAVYLHDFQRFLIHEQQEHWAQDLNKVRERMTKFIDDTMRETAEPFLFVDEFLTYLFSRENSIWDEKYDAVDMQDMNNPLSHYWISSSHNTYLTGDQLRSESSPEAYIRCLRMGCRCIELDCWDGPDGKPVIYHGWTRTTKIKFDDVVQAIKDHAFVTSRCPLSWVEVLL

SEQ ID NO: 21111 - protein, 182 aa, Homo sapiens
SAGPLETSSGPPVLDVRTTTALEMPDRENTFVVKVEGPSEYIMETVDAQHVKAWVSDIQECLSPGPCPATSPRPMTLPLAPGTSFLTRENTDSLELSCLNHSESLPSQDLLLGPSESNDRLSQGAYGGLSDRPSASISPSSASIAASHFDSMELLPPELPPRIPIEEGPPTGTVHPLSAPYP

SEQ ID NO: 21112 - protein, 376 aa, Homo sapiens
MDSPGYNCFVDKDKMDAAIQDLGPKELSCTELQELKQLARQGYWAQSHALRGKVYQRLIRDIPCRTVTPDASVYSDIVGKIVGKHSSSCLPLPEFVDNTQVPSYCLNARGEGAVRKILLCLANQFPDISFCPALPAVVALLLHYSIDEAECFEKACRILACNDPGRRLIDQSFLAFESSCMTFGDLVNKYCQAAHKLMVAVSEDVLQVYADWQRWLFGELPLCYFARVFDVFLVEGYKVLYRVALAILKFFHKVRAGQPLESDSVKQDIRTFVRDIAKTVSPEKLLEKAFAIRLFSRKEIQLLQMANEKALKQKGITVKQKSPGRCLWHSQERYRHCGHVCHAAGADHEVHHPSGHGWHHRHLRPGGGSPHRQLPE

SEQ ID NO: 21113 - protein, 430 aa, Homo sapiens
MMSEGKPPDKKRPRRSLSISKNKKKASNSIISCFNNAPPAKLACPVCSKMVPRYDLNRHLDEMCANNDFVQVDPGQVGLINSNVSMVDLTSVTLEDVTPKKSPPPKTNLTPGQSDSAKREVKQKISPYFKSNDVVCKNQDELRNRSVKVICLGSLASKLSRKYVKAKKSIDKDEEFAGSSPQSSKSTVVKSLIDNSSEIEDEDQILENSSQKENVFKCDSLKEECIPEHMVRGSKIMEAESQKATRECEKSALTPGFSDNAIMLFSPDFTLRNTLKSTSEDSLVKQECIKEVVEKREACHCEEVKMTVASEAKIQLSDSEAKSHSSADDASAWSNIQEAPLQDDSCLNNDIPHSIPLEQGSSCNGPGQTTGHPYYLRSFLVVLKTVLENEDDMLLFDEQEKGIVTKFYQLSDLWTVPFKDRVWRKWKLSS

SEQ ID NO: 21114 - protein, 1224 aa, Homo sapiens
MEDESIYTCDHCQQDFESLADLTDHRAHRCPGDGDDDPQLSWVASSPSSKDVASPTQMIGDGCDLGLGEEEGGTGLPYPCQFCDKSFIRLSYLKRHEQIHSDKLPFKCTYCSRLFKHKRSRDRHIKLHTGDKKYHCHECEAAFSRSDHLKIHLKTHSSSKPFKCTVCKRGFSSTSSLQSHMQAHKKNKEHLAKSEKEAKKDDFMCDYCEDTFSQTEELEKHVLTRHPQLSEKADLQCIHCPEVFVDENTLLAHIHQAHANQKHKCPMCPEQFSSVEGVYCHLDSHRQPDSSNHSVSPDPVLGSVASMSSATPDSSASVERGSTPDSTLKPLRGQKKMRDDGQGWTKVVYSCPYCSKRDFNSLAVLEIHLKTIHADKPQQSHTCQICLDSMPTLYNLNEHVRKLHKNHAYPVMQFGNISAFHCNYCPEMFADINSLQEHIRVSHCGPNANPSDGNNAFFCNQCSMGFLTESSLTEHIQQAHCSVGSAKLESPVVQPTQSFMEVYSCPYCTNSPIFGSILKLTKHIKENHKNIPLAHSKKSKAEQSPVSSDVEVSSPKRQRLSASANSISNGEYPCNQCDLKFSNFESFQTHLKLHLELLLRKQACPQCKEDFDSQESLLQHLTVHYMTTSTHYVCESCDKQFSSVDDLQKHLLDMHTFVLYHCTLCQEVFDSKVSIQVHLAVKHSNEKKMYRCTACNWDFRKEADLQVHVKHSHLGNPAKAHKCIFCGETFSTEVELQCHITTHSKKYNCKFCSKAFHAIILLEKHLREKHCVFDAATENGTANGVPPMATKKAEPADLQGMLLKNPEAPNSHEASEDDVDASEPMYGCDICGAAYTMEVLLQNHRLRDHNIRPGEDDGSRKKAEFIKGSHKCNVCSRTFFSENGLREHLQTHRGPAKHYMCPICGERFPSLLTLTEHKVTHSKSLDTGTCRICKMPLQSEEEFIEHCQMHPDLRNSLTGFRCVVCMQTVTSTLELKIHGTFHMQKLAGSSAASSPNGQGLQKLYKCALCLKEFRSKQDLVKLDVNGLPYGLCAGCMARSANGQVGGLAPPEPADRPCAGLRCPECSVKFESAEDLESHMQVDHRDLTPETSGPRKGTQTSPVPRKKTYQCIKCQMTFENEREIQIHVANHMIEEGINHECKLCNQMFDSPAKLLCHLIEHSFEGMGGTFKCPVCFTVFVQANKLQQHIFAVHGQEDKIYDCSQCPQKFFFQTELQNHTMSQHAQ

SEQ ID NO: 21115 - protein, 178 aa, Homo sapiens
MLAGGVRSMPSPLLACWQPILLLVLGSVLSGSATGCPPRCECSAQDRAVLCHRKRFVAVPEGIPTETRLLDLGKNRIKTLNQDEFASFPHLEELELNENIVSAVEPGAFNNLFNLRTLGLRSNRLKLIPLGVFTGLSNLTKLDISENKIVILLDYMFQDLYNLKSLEVGDNDLVYISH

SEQ ID NO: 21116 - protein, 406 aa, Homo sapiens
MTLDVGPEDELPDWAAAKEFYQKYDPKDVIGRGVSSVVRRCVHRATGHEFAVKIMEVTAERLSPEQLEEVREATRRETHILRQVAGHPHIITLIDSYESSSFMFLVFDLMRKGELFDYLTEKVALSEKETRSIMRSLLEAVSFLHANNIVHRDLKPENILLDDNMQIRLSDFGFSCHLEPGEKLRELCGTPGYLAPEILKCSMDETHPGYGKEVDLWACGVILFTLLAGSPPFWHRRQILMLRMIMEGQYQFSSPEWDDRSSTVKDLISRLLQVDPEARLTAEQALQHPFFERCEGSQPWNLTPRQRFRVAVWTVLAAGRVALSTHRVRPLTKNALLRDPYALRSVRHLIDNCAFRLYGHWVKKGEQQNRAALFQHRPPGPFPIMGPEEEGDSAAITEDEAVLVLG

SEQ ID NO: 21117 - protein, 641 aa, Homo sapiens
MEPAPARSPRPQQDPARPQEPTMPPPETPSEGRQPSPSPSPTERAPASEEEFQFLRCQQCQAEAKCPKLLPCLHTLCSGCLEASGMQCPICQAPWPLGADTPALDNVFFESLQRRLSVYRQIVDAQAVCTRCKESADFWCFECEQLLCAKCFEAHQWFLKHEARPLAELRNQSVREFLDGTRKTNNIFCSNPNHRTPTLTSIYCRGCSKPLCCSCALLDSSHSELKCDISAEIQQRQEELDAMTQALQEQDSAFGAVHAQMHAAVGQLGRARAETEELIRERVRQVVAHVRAQERELLEAVDARYQRDYEEMASRLGRLDAVLQRIRTGSALVQRMKCYASDQEVLDMHGFLRQALCRLRQEEPQSLQAAVRTDGFDEFKVRLQDLSSCITQGKDAAVSKKASPEAASTPRDPIDVDLPEEAERVKAQVQALGLAEAQPMAVVQSVPGAHPVPVYAFSIKGPSYGEDVSNTTTAQKRKCSQTQCPRKVIKMESEEGKEARLARSSPEQPRPSTSKAVSPPHLDGPPSPRSPVIGSEVFLPNSNHVASGAGEAEERVVVISSSEDSDAENSVSSSPQSEVLYWKVHGAHGDRRATVLASPLLASPLLASPLLASPVSAESTRSLQPALWHIPPPSLASPPAR

SEQ ID NO: 21118 - protein, 75 aa, Homo sapiens
MMASFQRSNSHDKVRRIVAEEGRTARNLIAWSVPLESKDDDGKPKCQTGGKSKRTIQGTHKTTKQLFEESPYFFP

SEQ ID NO: 21119 - protein, 2371 aa, Homo sapiens
MNLDSLSLALSQISYLVDNLTKKNYRASQQEIQHIVNRHGPEADRHLLRCLFSHVDFSGDGKSSGKDFHQTQFLIQECALLITKPNFISTLSYAIDNPLHYQKSLKPAPHLFAQLSKVLKLSKVQEVIFGLALLNSSSSDLRGFAAQFIKQKLPDLLRSYIDADVSGNQEGGFQDIAIEVLHLLLSHLLFGQKGAFGVGQEQIDAFLKTLRRDFPQERCPVVLAPLLYPEKRDILMDRILPDSGGVAKTMMESSLADFMQEVGYGFCASIEECRNIIVQFGVREVTAAQVARVLGMMARTHSGLTDGIPLQSISAPGSGIWSDGKDKSDGAQAHTWNVEVLIDVLKELNPSLNFKEVTYELDHPGFQIRDSKGLHNVVYGIQRGLGMEVFPVDLIYRPWKHAEGQLSFIQHSLINPEIFCFADYPCHTVATDILKAPPEDDNREIATWKSLDLIESLLRLAEVGQYEQVKQLFSFPIKHCPDMLVLALLQINTSWHTLRHELISTLMPIFLGNHPNSAIILHYAWHGQGQSPSIRQLIMHAMAEWYMRGEQYDQAKLSRILDVAQDLKALSMLLNGTPFAFVIDLAALASRREYLKLDKWLTDKIREHGEPFIQACMTFLKRRCPSILGGLAPEKDQPKSAQLPPETLATMLACLQACAGSVSQELSETILTMVANCSNVMNKARQPPPGVMPKGRPPSASSLDAISPVQIDPLAGMTSLSIGGSAAPHTQSMQGFPPNLGSAFSTPQSPAKAFPPLSTPNQTTAFSGIGGLSSQLPVGGLGTGSLTGIGTGALGLPAVNNDPFVQRKLGTSGLNQPTFQQTDLSQVWPEANQHFSKEIDDEANSYFQRIYNHPPHPTMSVDEVLEMLQRFKDSTIKREREVFNCMLRNLFEEYRFFPQYPDKELHITACLFGGIIEKGLVTYMALGLALRYVLEALRKPFGSKMYYFGIAALDRFKNRLKDYPQYCQHLASISHFMQFPHHLQEYIEYGQQSRDPPVKMQGSITTPGSIALAQAQAQAQVPAKAPLAGQVSTMVTTSTTTTVAKTVTVTRPTGVSFKKDVPPSINTTNIDTLLVATDQTERIVEPPENIQEKIAFIFNNLSQSNMTQKVEELKETVKEEFMPWVSQYLVMKRVSIEPNFHSLYSNFLDTLKNPEFNKMVLNETYRNIKVLLTSDKAAANFSDRSLLKNLGHWLGMITLAKNKPILHTDLDVKSLLLEAYVKGQQELLYVVPFVAKVLESSIRSVVFRPPNPWTMAIMNVLAELHQEHDLKLNLKFEIEVLCKNLALDINELKPGNLLKDKDRLKNLDEQLSAPKKDVKQPEELPPITTTTTSTTPATNTTCTATVPPQPQYSYHDINVYSLAGLAPHITLNPTIPLFQAHPQLKQCVRQAIERAVQELVHPVVDRSIKIAMTTCEQIVRKDFALDSEESRMRIAAHHMMRNLTAGMAMITCREPLLMSISTNLKNSFASALRTASPQQREMMDQAAAQLAQDNCELACCFIQKTAVEKAGPEMDKRLATEFELRKHARQEGRRYCDPVVLTYQAERMPEQIRLKVGGVDPKQLAVYEEFARNVPGFLPTNDLSQPTGFLAQPMKQAWATDDVAQIYDKCITELEQHLHAIPPTLAMNPQAQALRSLLEVVVLSRNSRDAIAALGLLQKAVEGLLDATSGADADLLLRYRECHLLVLKALQDGRAYGSPWCNKQITRCLIECRDEYKYNVEAVELLIRNHLVNMQQYDLHLAQSMENGLNYMAVAFAMQLVKILLVDERSVAHVTEADLFHTIETLMRINAHSRGNAPEGLPQLMEVVRSNYEAMIDRAHGGPNFMMHSGISQASEYDDPPGLREKAEYLLREWVNLYHSAAAGRDSTKAFSAFVGQMHQQGILKTDDLITRFFRLCTEMCVEISYRAQAEQQHNPAANPTMIRAKCYHNLDAFVRLIALLVKHSGEATNTVTKINLLNKVLGIVVGVLLQDHDVRQSEFQQLPYHRIFIMLLLELNAPEHVLETINFQTLTAFCNTFHILRPTKAPGFVYAWLELISHRIFIARMLAHTPQQKGWPMYAQLLIDLFKYLAPFLRNVELTKPMQILYKGTLRVLLVLLHDFPEFLCDYHYGFCDVIPPNCIQLRNLILSAFPRNMRLPDPFTPNLKVDMLSEINIAPRILTNFTGVMPPQFKKDLDSYLKTRSPVTFLSDLRSNLQVSNEPGNRYNLQLINALVLYVGTQAIAHIHNKGSTPSMSTITHSAHMDIFQNLAVDLDTEGRYLFLNAIANQLRYPNSHTHYFSCTMLYLFAEANTEAIQEQITRVLLERLIVNRPHPWGLLITFIELIKNPAFKFWNHEFVHCAPEIEKLFQSVAQCCMGQKQAQQVMEGTGAS

SEQ ID NO: 21120 - protein, 530 aa, Homo sapiens
MPAKGRYFLNEGEEGPDQDALYEKYQLTSQHGPLLLTLLLVAATACVALIIIAFSQGDPSRHQAILGMAFLVLAVFAALSVLMYVECLLRRWLRALALLTWACLVALGYVLVFDAWTKAACAWEQVPFFLFIVFVVYTLLPFSMRGAVAVGAVSTASHLLVLGSLMGGFTTPSVRVGLQLLANAVIFLCGNLTGAFHKHQMQDASRDLFTYTVKCIQIRRKLRIEKRQQENLLLSVLPAHISMGMKLAIIERLKEHGDRRCMPDNNFHSLYVKRHQNVSILYADIVGFTQLASDCSPKELVVVLNELFGKFDQIAKANECMRIKILGDCYYCVSGLPVSLPTHARNCVKMGLDMCQAIKQVREATGVDINMRVGIHSGNVLCGVIGLRKWQYDVWSHDVSLANRMEAAGVPGRVHITEATLKHLDKAYEVEDGHGQQRDPYLKEMNIRTYLVIDPRSQQPPPPSQHLPRPKGDAALKMRASVRMTRYLESWGAARPFAHLNHRESVSSERSPAPPPDPRQKHVPQGAVGG

SEQ ID NO: 21121 - protein, 604 aa, Homo sapiens
MHVKKYLLKGLHRLQKGPGYTYKELLVWYCDNTNTHGPKRIICEGPKKKAMWFLLTLLFAALVCWQWGIFIRTYLSWEVSVSLSVGFKTMDFPAVTICNASPFKYSKIKHLLKDLDELMEAVLERILAPELSHANATRNLNFSIWNHTPLVLIDERNPHHPMVLDLFGDNHNGLTSSSASEKICNAHGCKMAMRLCSLNRTQCTFRNFTSATQALTEWYILQATNIFAQVPQQELVEMSYPGEQMILACLFGAEPCNYRNFTSIFYPHYGNCYIFNWGMTEKALPSANPGTEFGLKLILDIGQEDYVPFLASTAGVRLMLHEQRSYPFIRDEGIYAMSGTETSIGVLVACLRSCFQDHMIRNCNCGHYLYPLPRGEKYCNNRDFPDWAHCYSDLQMSVAQRETCIGMCKESCNDTQYKMTISMADWPSEASEDWIFHVLSQERDQSTNITLSRKGIVKLNIYFQEFNYRTIEESAANNIVWLLSNLGGQFGFWMGGSVLCLIEFGEIIIDFVWITIIKLVALAKSLRQRRAQASYAGPPPTVAELVEAHTNFGFQPDTAPRSPNTGPYPSEQALPIPGTPPPNYDSLRLQPLDVIESDSEGDAI

SEQ ID NO: 21122 - protein, 1111 aa, Homo sapiens
MVRERKCILCHIVYSSKKEMDEHMRSMLHHRELENLKGRFGIEMVPLVQNEQEALDLDGEPDLSSLEGFQWEGVSISSSPGLARKRSLSESSVIMDRAPSVYSFFSEEGTGKENEPQQMVSPSNSLRAGQSQKATMHLKQEVTPRAASLRTGERAENVATQRRHSAQLSSDHIIPLMHLAKDLNSQERSIPPSENQNSQESNGEGNCLSSSASSALAISSLADAATDSSCTSGAEQNDGQSIRKKRRATGDGSSPELPSLERKNKRRKIKGKKERSQVDQLLNISLREEELSKSLQCMDNNLLQARAALQTAYVEVQRLLMLKQQITMEMSALRTHRIQILQGLQETYEPSEHPDQVPCSLTRERRNSRSQTSIDAALLPTPFFPLFLEPPSSHVSPSPTGASLQITTSPTFQTHGSVPAPDSSVQIKQEPMSPEQDENVNAVPPSSACNVSKELLEANREISDSCPVYPVITARLSLPESTESFHEPSQELKFSVEQRNTRNRENSPSSQSAGLSSINKEGEEPTKGNSGSEACTSSFLRLSFASETPLEKEPHSPADQPEQQAESTLTSAETRGSKKKKKLRKKKSLRAAHVPENSDTEQDVLTVKPVRKVKAGKLIKGGKVTTSTWEDSRTGREQESVRDEPDSDSSLEVLEIPNPQLEVVAIDSSESGEEKPDSPSKKDIWNSTEQNPLETSRSGCDEVSSTSEIGTRYKDGIPVSVAETQTVISSIKGSKNSSEISSEPGDDDEPTEGSFEGHQAAVNAIQIFGNLLYTCSADKTVRVYNLVSRKCIGVFEGHTSKVNCLLVTQTSGKNAALYTGSSDHTIRCYNVKSRECVEQLQLEDRVLCLHSRWRILYAGLANGTVVTFNIKNNKRLEIFECHGPRAVSCLATAQEGARKLLVVGSYDCTISVRDARNGLLLRTLEGHSKTILCMKVVNDLVFSGSSDQSVHAHNIHTGELVRIYKGHNHAVTVVNILGKVMVTACLDKFVRVYELQSHDRLQVYGGHKDMIMCMTIHKSMIYTGCYDGSIQAVRLNLMQNYRCWWHGCSLIFGVVDHLKQHLLTDHTNPNFQTLKCRWKNCDAFFTARKGSKQDAAGHIERHAEDDSKIDS

SEQ ID NO: 21123 - protein, 638 aa, Homo sapiens
YSCVCGEERTSATLTVKALPAKFTEGLRNEEAVEGATAMLWCELSKVAPVEWRKGPENLRDGDRYILRQEGTRCELQICGLAMADAGEYLCVCGQERTSATLTIRALPIKFTEGLRNEEATEGATAVLRCELSKMAPVEWWKGHETLRDGDRHSLRQDGARCELQIRGLVAEDAGEYLCMCGKERTSAMLTVRAMPSKFIEGLRNEEATEGDTATLWCELSKAAPVEWRKGHETLRDGDRHSLRQDGSRCELQIRGLAVVDAGEYSCVCGQERTSATLTVRALPARFIEDVKNQEAREGATAVLQCELSKAAPVEWRKGSETLRGGDRYSLRQDGTRCELQIHGLSVADTGEYSCVCGQERTSATLTVRALPARFTQDLKTKEASEGATATLQCELSKVAPVEWKKGPETLRDGGRYSLKQDGTRCELQIHDLSVADAGEYSCMCGQERTSATLTVRALPARFTEGLRNEEAMEGATATLQCELSKAAPVEWRKGLEALRDGDKYSLRQDGAVCELQIHGLAMADNGVYSCVCGQERTSATLTVRALPARFIEDMRNQKATEGATVTLQCKLRKAAPVEWRKGPNTLKDGDRYSLKQDGTSCELQIRGLVIADAGEYSCICEQERTSATLTVRGKDHM

SEQ ID NO: 21124 - protein, 214 aa, Homo sapiens
MLGWVQRVLPQPPGTPRKTKMQEEEEVEPEPEMEAEVEPEPNPEEAETESESMPPEESFKEEEVAVADPSPQETKEAALTSTISLRAQGAEISEMNSPSRRVLTWLMKGVEKVIPQPVHSITEDPAQILGHGSTGDTGCTDEPNEALEAQDTRPGLRLLLWLEQNLERVLPQPPKSSEVWRDEPAVATGAASDPAPPGRPQEMGPKLQARETPS

SEQ ID NO: 21125 - protein, 348 aa, Homo sapiens
MPRSFLVKKVKLDAFSSADLESAYGRARSDLGAPLHDKGYLSDYVGPSSVYDGDAEAALLKGPSPEPMYAAAVRGELGPAAAGSAPPPTPRPELATAAGGYINGDAAVSEGYAADAFFITDGRSRRKASNAGAAAAPSTASAAAPDGDAGGGGGAGGRSLGSGPGGRGGTRAGAGTEARAGPGAAGAGGRHACGECGKTYATSSNLSRHKQTHRSLDSQLARRCPTCGKVYVSMPAMAMHLLTHDLRHKCGVCGKAFSRPWLLQGHMRSHTGEKPFGCAHCGKAFADRSNLRAHMQTHSAFKHFQCKRCKKSFALKSYLNKHYESACFKGGAGGPAAPAPPQLSPVQA

SEQ ID NO: 21126 - protein, 154 aa, Homo sapiens
MMASFQRSNSHDKVRRIVAEEGRTARNLIAWSVPLESKDDDGKPKCQTGGKSKRTIQGTHKTTKQEVLMMLDNYVRDFKALIDWIQLQEKLEKTDAQSRPTSLAWEVKKMSPGRHVIPSPSTDRINVTSNARRSLNFGGSTGTVPAPRLAPTGV

SEQ ID NO: 21127 - protein, 306 aa, Homo sapiens
SGRGARSGEWGLAAAGAWETMHHCKRYRSPEPDPYLSYRWKRRRSYSREHEGRLRYPSRREPPPRRSRSRSKDPADQRPHPPFGSHDRLPYQRRYRERRDSDTYRCEERSPSFGEDYYGPSRSRHRRRSRERGPYRTRKHAHHCHKRRTRSCSSASSRSQQSSKRSSRSVEDDKEGHLVCRIGDWLQERYEIVGNLGEGTFGKVVECLDHARGKSQVALKIIRNVGKYREAARLEINVLKKIKEKDKENKFLCVLMSDWFNFHGHMCIAFELLGKNTFEFLKENNFQPYPLPHVRHMAYQLCHALR

SEQ ID NO: 21128 - protein, 507 aa, Homo sapiens
MYCAYTIPGMGGNSLMYYYNGKAVYAPSASTADYNRDSPGYPSSKPATSTFPSSFFMQDGHHSSDPWSSSSGMNQPGYAGMLGNSSHIPQSSSYCSLHPHERLSYPSHSSADINSSLPPMSTFHRSGTNHYSTSSCTPPANGTDSIMANRGSGAAGSSQTGDALGKALASIYSPDHTNNSFSSNPSTPVGSPPSLSAGTAVWSRNGGQASSSPNYEGPLHSLQSRIEDRLERLDDAIHVLRNHAVGPSTAMPGGHGDMHGIIGPSHNGAMGGLGSGYGTGLLSANRHSLMVGTHREDGVALRGSHSLLPNQVPVPQLPVQSATSPDLNPPQDPYRGMPPGLQGQSVSSGSSEIKSDDEGDENLQDTKSSEDKKLDDDKKDIKSITSNNDDEDLTPEQKAEREKERRMANNARERLRVRDINEAFKELGRMVQLHLKSDKPQTKLLILHQAVAVILSLEQQVRERNLNPKAACLKRREEEKVSSEPPPLSLAGPHPGMGDASNHMGQM

SEQ ID NO: 21129 - protein, 133 aa, Homo sapiens
MTVLEQDTQGLDGWWLCSLHGRQGIVPGNRLKILVGMYDKKPAGPGPGPPATPAQPQPGLHAPAPPASQYTPMLPNTYQPQPDSVYLVPTPSKAQQGLYQVPGPSPQFQSPPAKQTSTFSKQTPHHPFPSPAT

SEQ ID NO: 21130 - protein, 484 aa, Homo sapiens
MAGAAGRVQDRALRRFPITLPVGDLSNLHLKEEKIKPDTNGAVVKTNANAEKTDEEEKEDRAAQSLLNKLIRSNLVDNTNQVEVLQRDPNSPLYSVKSFEELRLKPQLLQGVYAMGFNRPSKIQENALPLMLAEPPQNLIAQSQSGTGKTAAFVLAMLSQVEPANKYPQCLCLSPTYELALQTGKVIEQMGKFYPELKLAYAVRGNKLERGQKISEQIVIGTPGTVLDWCSKLKFIDPKKIKVFVLDEADVMIATQGHQDQSIRIQRMLPRNCQMLLFSATFEDSVWKFAQKVVPDPNVIKLKREEETLDTIKQYYVLCSSRDEKFQALCNLYGAITIAQAMIFCHTRKTASWLAAELSKEGHQVALLSGEMMVEQRAAVIERFREGKEKVLVTTNVCARGIDVEQVSVVINFDLPVDKDGNPDNETYLHRIGRTGRFGKRGLAVNMVDSKHSMNILNRIQEHFNKKIERLDTDDLDEIEKIAN

SEQ ID NO: 21131 - protein, 563 aa, Homo sapiens
EIYSENSVSIREYGTIDDVDIDLHINISFLDEEVSTAWKVLRTEPIVLRLRFSLSQYLDGPEPSIEVFQPSNKEGFGLGLQLKKILGMFTSQQWKHLSNDFLKTQQEKRHSWFKASGTIKKFRAGLSIFSPIPKSPSFPIIQDSMLKGKLGVPELRVGRLMNRSISCTMKNPKVEVFGYPPSPQVSGHCKNIPTLEYGFLVQIMKYAEQRIPTLNEYCVVCDEQHVFQNGSMLKPAVCTRELCVFSFYTLGVMSGAAEEVATGAEVVDLLVAMCRAALESPRKSIIFEPYPSVVDPTDPKTLAFNPKKKNYERLQKALDSVMSIREMTQGSYLEIKKQMDKLDPLAHPLLQWIISSNRSHIVKLPLSRQLKFMHTSHQFLLLSSPPAKEARFRTAKKLYGSTFAFHGSHIENWHSILRNGLVNASYTKLQLHGAAYGKGIYLSPISSISFGYSGMGKGQHRMPSKDELVQRYNRMNTIPQTRSIQSRFLQSRNLNCIALCEVITSKDLQKHGNIWVCPVSDHVCTRFFFVYEDGQVGDANINTQDPKIQKEIMRVIGTQVYTN

SEQ ID NO: 21132 - protein, 7592 aa, Homo sapiens
MSSSDEETLSERSCRSERSCRSERSYRSERSGSLSPCPPGDTLPWNLPLHEQKKRKSQDSVLDPAERAVVRVADERDRVQKKTFTKWVNKHLMKVRKHINDLYEDLRDGHNLISLLEVLSGIKLEPAGLKTLRLVSMPSWCHTNNEEQAEEDDDDVPREKGRMRFHRLQNVQIALDFLKQRQVKLVNIRNDDITDGNPKLTLGLIWTIILHFQISDIYISGESGDMSAKEKLLLWTQKVTAGYTGIKCTNFSSCWSDGKMFNALIHRYRPDLVDMERVQIQSNRENLEQAFEVAERLGVTRLLDAEDVDVPSPDEKSVITYVSSIYDAFPKVPEGGEGISATEVDSRWQEYQSRVDSLIPWIKQHTILMSDKTFPQNPVELKALYNQYIHFKETEILAKEREKGRIEELYKLLEVWIEFGRIKLPQGYHPNDVEEEWGKLIIEMLEREKSLRPAVERLELLLQIANKIQNGALNCEEKLTLAKNTLQADAAHLESGQPVQCESDVIMYIQECEGLIRQLQVDLQILRDENYYQLEELAFRVMRLQDELVTLRLECTNLYRKGHFTSLELVPPSTLTTTHLKAEPLTKATHSSSTSWFRKPMTRAELVAISSSEDEGNLRFVYELLSWVEEMQMKLERAEWGNDLPSVELQLETQQHIHTSVEELGSSVKEARLYEGKMSQNFHTSYAETLGKLETQYCKLKETSSFRMRHLQSLHKFVSRATAELIWLNEKEEEELAYDWSDNNSNISAKRNYFSELTMELEEKQDVFRSLQDTAELLSLENHPAKQTVEAYSAAVQSQLQWMKQLCLCVEQHVKENTAYFQFFSDARELESFLRNLQDSIKRKYSCDHNTSLSRLEDLLQDSMDEKEQLIQSKSSVASLVGRSKTIVQLKPRSPDHVLKNTISVKAVCDYRQIEITICKNDECVLEDNSQRTKWKVISPTGNEAMVPSVCFLIPPPNKDAIEMASRVEQSYQKVMALWHQLHVNTKSLISWNYLRKDLDLVQTWNLEKLRSSAPGECHQIMKNLQAHYEDFLQDSRDSVLFSVADRLRLEEEVEACKARFQHLMKSMENEDKEETVAKMYISELKNIRLRLEEYEQRVVKRIQSLASSRTDRDAWQDNALRIAEQEHTQEDLQQLRSDLDAVSMKCDSFLHQSPSSSSVPTLRSELNLLVEKMDHVYGLSTVYLNKLKTVDVIVRSIQDAELLVKGYEIKLSQEEVVLADLSALEAHWSTLRHWLSDVKDKNSVFSVLDEEIAKAKVVAEQMSRLTPERNLDLERYQEKGSQLQERWHRVIAQLEIRQSELESIQEVLGDYRACHGTLIKWIEETTAQQEMMKPGQAEDSRVLSEQLSQQTALFAEIERNQTKLDQCQKFSQQYSTIVKDYELQLMTYKAFVESQQKSPGKRRRMLSSSDAITQEFMDLRTRYTALVTLTTQHVKYISDALRRLEEEEKVVEEEKQEHVEKVKELLGWVSTLARNTQGKATSSETKESTDIEKAILEQQVLSEELTTKKEQVSEAIKTSQIFLAKHGHKLSEKEKKQISEQLNALNKAYHDLCDGSANQLQQLQSQLAHQTEQKECRAVAGVIDLGTVEIFPIFKAMQKGLLDQDTGLVLLESQVIMSGLIAPETGENLSLEEGIARNLINPQMYQQLRELQDALALISRLTESRGPLSVVEAIEKRIISETVGLKILEAHLATGGFSLSPSENCINLEEAFHQGLISAWLHSVLESYLRTSKNLIDPNTAEKIGLLDLMQRCIVHQESGFKLLPVKQLAGGMVSLKSGRKVSIFRAVQEGLIDRQVTVRLLEAQLFAGGIVDPRTGHRLTVEEAVRHNLIDQDMACAILIRQLQTGGIIDTVTGQRLTIDEAVSNDLVAAKIALVILESLWSFMGLLWPESGEILPITDALEQGIVSTELAHKILSNRQHIKALFLPATTEILSWKKAIESGILDRDLANNLKSICIPDVMPHMQLADSAEQNINPGAAVLPCSKSHPKATASQSENLLFQLMTHSYINVQNGQRLLLLDKELMETLTSRDEYQTSPPKVVEIGHQRQKTPEGLQESANVKISGTFSSGWTVRLPEFQFSSQNKEYPDREDCTTEKGKKTTVETEDSSVENPEQDLFVEQKERNPNIDALKVINKVKLEVQRQLIGTQREDQTAVSVRENASRGHLLTIPPAEAEGVPLVVDKDVFSVETPKKEHQPLRNTSFTCQNEQAHTLETEYIHDETGGSHIKPQSKKLQVQVKKTLGIKLELKSETDGNVHPLDKKEMLKKTFLAKDDHKESQEAQNIAGGSMMMSEKTDEEDSGREIFLSCSHPLELLEEATLNVLSAQLLDGGIFHEQTGQKLLLNEAISRGIVPSHTAVKLMEKLNMFQGFFDSQTCESLTTEEVINEGLMDEKLLHNVLMADKAISGVLDPRTQTLCSVKDAVTVGLLDKETATRILERQVVTGGIIDLKRGKKVSVTLASTLGLVDVADQPELINLEKASKGRDAEKTVRERLISLQMETTGLIDPDSKAPLTVVQSIDRGLLEREEAVRLLTKQVVDGGIIHHISGMRLSVDNAFRHGLIGEDLAEKLKRVENLNIHQIFNPETKENISLPKAIKLDLITSDLKREIQEVQAFTGNFVDLISGQRLTLAEAKKEGLLTNEAVLSPGMMHGIVDPENCRIVPYSELVKKCKIDIESGQRYLEVIPFSDIKDGVSDKVLTLSQAIQLGKVDFASTLKVLEAQANTGGIIDTATGKRLTLASALEEKLVDENMVRIIASHQVLNGGIVDIFSDQRVTLVEAIEKRLISPELANMIQIDSSEFSDHRAQIEKQEGIEVCALQNEFLGKDMLIACNQTAEMSCNKVEESERLFQVENQSAQEKVKVRVSDGEQAKKSREISLKEFGCKDQRKPRMSSDAKEFISIINPHNLKGKSLGQVSLTHPYSECDFKLKEVARNNMGNDTNEEQEKAVTKIEIISHMKQSTSCLDSEEIRENQGEVILEVQETYCETSGKLPSEQVLQQPMNARVKSKREKREVIVEESIRTCKPAFLSEEKLYQETAIRDEHDSHIKSQPREMTSSEKGKEADTEMGFSITFKIEESSSQVVPQGISVKHLDALTLFSSKQANEGKVNNLSLCLTLKPEENLSREIACGAQSEPFPCMTPRPEGLHYQESDGKAQVTGPSQISKTDKSFQGTTRQETNYQDSWVTSKTKETKHQISSSNECKEKSYQEVSFDPARGLKLEEITVSRPDSKEVRYLEFSDRKDLHHQGSKSDDKLCGTLKSEIATQELTGEKFLEMANPNVAGLEAGSIEDIVTQRGSRVLGSFLPEKLFKGVSQKENTGQQNAIISPTVLETSEEKTVSLTVCSAVKTEKTPQEKLRESPGSEQTPFMTAPEGKGNGGVNPEPFRATQNVFTRQLCLEHDEKLVSYLSLLRNIEMRTKQIQPLELNLAELQDLLCQAKVLERELKDLTTLVSQELECVNQIIISQPQEVPAQLLKALEKDAKNLQKSLSSVSDTWNSRLLHFQNAVEIEKTKVLNQHTQLEGRLQDLRAWVGNKNLILNSKGSNSEIDVDSLNLCLQQYEDLKQPMAERKAQLDALAFDIQFFISEHAQDLSPQQNRQMLRLLNELQRSFQDILEQTAAQVDALQGHLQQMEQEALVKTLQKQQNTCHQQLEDLCSWVGQAERALAGHQGRTTQQDLSALQKNQSDLKDLQDDIQNRATSFATVVKDIEGFMEENQTKLSPRELTALREKLHQAKEQYEALQEETRVAQKELEEAVTSALQQETEKSKAAKELAENKKKIDALLDWVTSVGSSGGQLLTNLPGMEQLSGASLEKGALDTTDGYMGVNQAPEKLDKQCEMMKARHQELLSQQQNFILATQSAQAFLDQHGHNLTPEEQQMLQQKLGELKEQYSTSLAQSEAELKQVQTLQDELQKFLQDHKEFESWLERSEKELENMHKGGSSPETLPSLLKRQGSFSEDVISHKGDLRFVTISGQKVLDMENSFKEGKEPSEIGNLVKDKLKDATERYTALHSKCTRLGSHLNMLLGQYHQFQNSADSLQAWMQACEANVEKLLSDTVASDPGVLQEQLATTKQLQEELAEHQVPVEKLQKVARDIMEIEGEPAPDHRHVQETTDSILSHFQSLSYSLAERSSLLQKAIAQSQSVQESLESLLQSIGEVEQNLEGKQVSSLSSGVIQEALATNMKLKQDIARQKSSLEATREMVTRFMETADSTTAAVLQGKLAEVSQRFEQLCLQQQEKESSLKKLLPQAEMFEHLSGKLQQFMENKSRMLASGNQPDQDITHFFQQIQELNLEMEDQQENLDTLEHLVTELSSCGFALDLCQHQDRVQNLRKDFTELQKTVKEREKDASSCQEQLDEFRKLVRTFQKWLKETEGSIPPTETSMSAKELEKQIEHLKSLLDDWASKGTLVEEINCKGTSLENLIMEITAPDSQGKTGSILPSVGSSVGSVNGYHTCKDLTEIQCDMSDVNLKYEKLGGVLHERQESLQAILNRMEEVHKEANSVLQWLESKEEVLKSMDAMSSPTKTETVKAQAESNKAFLAELEQNSPKIQKVKEALAGLLVTYPNSQEAENWKKIQEELNSRWERATEVTVARQRQLEESASHLACFQAAESQLRPWLMEKELMMGVLGPLSIDPNMLNAQKQQVQFMLKEFEARRQQHEQLNEAAQGILTGPGDVSLSTSQVQKELQSINQKWVELTDKLNSRSSQIDQAIVKSTQYQELLQDLSEKVRAVGQRLSVQSAISTQPEAVKQQLEETSEIRSDLEQLDHEVKEAQTLCDELSVLIGEQYLKDELKKRLETVALPLQGLEDLAADRINRLQAALASTQQFQQMFDELRTWLDDKQSQQAKNCPISAKLERLQSQLQENEEFQKSLNQHSGSYEVIVAEGESLLLSVPPGEEKRTLQNQLVELKNHWEELSKKTADRQSRLKDCMQKAQKYQWHVEDLVPWIEDCKAKMSELRVTLDPVQLESSLLRSKAMLNEVEKRRSLLEILNSAADILINSSEADEDGIRDEKAGINQNMDAVTEELQAKTGSLEEMTQRLREFQESFKNIEKKVEGAKHQLEIFDALGSQACSNKNLEKLRAQQEVLQALEPQVDYLRNFTQGLVEDAPDGSDASQLLHQAEVAQQEFLEVKQRVNSGCVMMENKLEGIGQFHCRVREMFSQLADLDDELDGMGAIGRDTDSLQSQIEDVRLFLNKIHVLKLDIEASEAECRHMLEEEGTLDLLGLKRELEALNKQCGKLTERGKARQEQLELTLGRVEDFYRKLKGLNDATTAAEEAEALQWVVGTEVEIINQQLADFKMFQKEQVDPLQMKLQQVNGLGQGLIQSAGKDCDVQGLEHDMEEINARWNTLNKKVAQRIAQLQEALLHCGKFQDALEPLLSWLADTEELIANQKPPSAEYKVVKAQIQEQKLLQRLLDDRKATVDMLQAEGGRIAQSAELADREKITGQLESLESRWTELLSKAAARQKQLEDILVLAKQFHETAEPISDFLSVTEKKLANSEPVGTQTAKIQQQIIRHKALEEDIENHATDVHQAVKIGQSLSSLTSPAEQGVLSEKIDSLQARYSEIQDRCCRKAALLDQALSNARLFGEDEVEVLNWLAEVEDKLSSVFVKDFKQDVLHRQHADHLALNEEIVNRKKNVDQAIKNGQALLKQTTGEEVLLIQEKLDGIKTRYADITVTSSKALRTLEQARQLATKFQSTYEELTGWLREVEEELATSGGQSPTGEQIPQFQQRQKELKKEVMEHRLVLDTVNEVSRALLELVPWRAREGLDKLVSDANEQYKLVSDTIGQRVDEIDAAIQRSQQYEQAADAELAWVAETKRKLMALGPIRLEQDQTTAQLQVQKAFSIDIIRHKDSMDELFSHRSEIFGTCGEEQKTVLQEKTESLIQQYEAISLLNSERYARLERAQVLVNQFWETYEELSPWIEETRALIAQLPSPAIDHEQLRQQQEEMRQLRESIAEHKPHIDKLLKIGPQLKELNPEEGEMVEEKYQKAENMYAQIKEEVRQRALALDEAVSQSTQFHDKIEPMLETLENLSSRLRMPPLIPAEVDKIRECISDNKSATVELEKLQPSFEALKRRGEELIGRSQGADKDLAAKEIQDKLDQMVFFWEDIKARAEEREIKFLDVLELAEKFWYDMAALLTTIKDTQDIVHDLESPGIDPSIIKQQVEAAETIKEETDGLHEELEFIRILGADLIFACGETEKPEVRKSIDEMNNAWENLNKTWKERLEKLEDAMQAAVQYQDTLQAMFDWLDNTVIKLCTMPPVGTDLNTVKDQLNEMKEFKVEVYQQQIEMEKLNHQGELMLKKATDETDRDIIREPLTELKHLWENLGEKIAHRQHKLEGALLALGQFQHALEELMSWLTHTEELLDAQRPISGDPKVIEVELAKHHVLKNDVLAHQATVETVNKAGNELLESSAGDDASSLRSRLEAMNQCWESVLQKTEEREQQLQSTLQQAQGFHSEIEDFLLELTRMESQLSASKPTGGLPETAREQLDTHMELYSQLKAKEETYNQLLDKGRLMLLSRDDSGSGSKTEQSVALLEQKWHVVSSKMEERKSKLEEALNLATEFQNSLQEFINWLTLAEQSLNIASPPSLILNTVLSQIEEHKVFANEVNAHRDQIIELDQTGNQLKFLSQKQDVVLIKNLLVSVQSRWEKVVQRSIERGRSLDDARKRAKQFHEAWKKLIDWLEDAESHLDSELEISNDPDKIKLQLSKHKEFQKTLGGKQPVYDTTIRTGRALKEKTLLPEDSQKLDNFLGEVRDKWDTVCGKSVERQHKLEEALLFSGQFMDALQALVDWLYKVEPQLAEDQPVHGDLDLVMNLMDAHKVFQKELGKRTGTVQVLKRSGRELIENSRDDTTWVKGQLQELSTRWDTVCKLSVSKQSRLEQALKQAEVFRDTVHMLLEWLSEAEQTLRFRGALPDDTEALQSLIDTHKEFMKKVEEKRVDVNSAVAMGEVILAVCHPDCITTIKHWITIIRARFEEVLTWAKQHQQRLETALSELVANAELLEELLAWIQWAETTLIQRDQEPIPQNIDRVKALIAEHQTFMEEMTRKQPDVDRVTKTYKRKNIEPTHAPFIEKSRSGGRKSLSQPTPPPMPILSQSEAKNPRINQLSARWQQVWLLALERQRKLNDALDRLEELKEFANFDFDVWRKKYMRWMNHKKSRVMDFFRRIDKDQDGKITRQEFIDGILASKFPTTKLEMTAVADIFDRDGDGYIDYYEFVAALHPNKDAYRPTTDADKIEDEVTRQVAQCKCAKRFQVEQIGENKYRFFLGNQFGDSQQLRLVRILRSTVMVRVGGGWMALDEFLVKNDPCRVHHPGSKIKRSDSSSSISSQSPIARGRTNIELREKFILPEGASQGMTPFRSRGRRSKPSSRAASPTRSSSSASQSNHSCTSMPSSPATPASGTKTSLQFSRCYDKPWLVNSKAGTPIRDSHSPDLQLPTPEVIPSSGSKLKRPTPTFHSSRTSLAGDTSNSSSPASTGAKTNRADPKKSASRPGSRAGSRAGSRASSRRGSDASDFDLLETQSACSDTSESSAAGGQGNSRRGLNKPSKIPTMSKKTTTASPRTPGPKR

SEQ ID NO: 21133 - protein, 834 aa, Homo sapiens
MEPAPARSPRPQQDPARPQEPTMPPPETPSEGRQPSPSPSPTERAPASEEEFQFLRCQQCQAEAKCPKLLPCLHTLCSGCLEASGMQCPICQAPWPLGADTPALDNVFFESLQRRLSVYRQIVDAQAVCTRCKESADFWCFECEQLLCAKCFEAHQWFLKHEARPLAELRNQSVREFLDGTRKTNNIFCSNPNHRTPTLTSIYCRGCSKPLCCSCALLDSSHSELKCDISAEIQQRQEELDAMTQALQEQDSAFGAVHAQMHAAVGQLGRARAETEELIRERVRQVVAHVRAQERELLEAVDARYQRDYEEMASRLGRLDAVLQRIRTGSALVQRMKCYASDQEVLDMHGFLRQALCRLRQEEPQSLQAAVRTDGFDEFKVRLQDLSSCITQGKDAAVSKKASPEAASTPRDPIDVDLDVSNTTTAQKRKCSQTQCPRKVIKMESEEGKEARLARSSPEQPRPSTSKAVSPPHLDGPPSPRSPVIGSEVFLPNSNHVASGAGEAEERVVVISSSEDSDAENSSSRELDDSSSESSDLQLEGPSTLRVLDENLADPQAEDRPLVFFDLKIDNETQKISQLAAVNRESKFRVVIQPEAFFSIYSKAVSLEVGLQHFLSFLSSMRRPILACYKLWGPGLPNFFRALEDINRLWEFQEAISGFLAALPLIRERVPGASSFKLKNLAQTYLARNMSERSAMAAVLAMRDLCRLLEVSPGPQLAQHVYPFSSLQCFASLQPLVQAAVLPRAEARLLALHNVSFMELLSAHRRDRQGGLKKYSRYLSLQTTTLPPAQPAFNLQALGTYFEGLLEGPALARAEGVSTPLAGRGLAERASQQS

SEQ ID NO: 21134 - protein, 43 aa, Homo sapiens
MTHTLREVHRPGLKISKREEVEAVTIVETPPLVVVGVVGYVAT

SEQ ID NO: 21135 - protein, 293 aa, Homo sapiens
MRSLPFALTVESVSARAPTCCSTGRFTQGRQPCKCKACGRGFTQSASLLQHWRVHSDWRETLSLSPVRQDLLWPLQPHQAPASPLGRSHSSAGVRQGFSGQLCCWLTKEHTLAEALRLSPVPAGFWGPVEADRPPANSHRRVCPFCCCSCGDSVNEKTSLSQRVLPHPGEKTCRGGSVESVSLAPSSVAPDSTSGLRPCGSPGSFLQHLPPSTLLPRPPFLYPGPPLTGITGAHHHAQLIFVFLVERGFDHAGQAGLELLTSGDPPTSASQSGGIIGMSHRTQPLLCFLDKYF

SEQ ID NO: 21136 - protein, 109 aa, Homo sapiens
SDKIRTVQDALESLVARESVQGYTTKTKQEVEISRRVTLEKLPPVLVLHLKRFVYEKTGGCQKLIKNIEYPVDLEISKVVYHHGNSATGGHYTTDVFQIGLNGWLRIDD

SEQ ID NO: 21137 - protein, 1773 aa, Homo sapiens
MRRGNISPAFWFLWLLLFGLLGPSSENTTAFTKGSDTTTASITGSETTMASTMASTSALTTGSKITTDSTTGSETTSASTMASTAAFTTGSETNTASTTDSGTTIASTRTFTTGSDTTTGSTAGSETIVASTTVSGTTTTFTIASTTVPETTMASSTTSTAGSEKTMASSIISETTMASTTGSETATVSTTGSETTTTSTASSEATKVSTTGSETTTASTAGSETTTTSTSMAGSEATTTSTADSKVITASSMSSETTVAPAAGSNTTTASTTGSETTTILIKASETTTASTAGSETTTPSPTGSQTTIVSISGSEITTTSTAGSENTTVSSAGSGTTTASMAGSETTVSTAGSETTTVSITGTETTMVSAMGSETTTNSTTSSETTVTSTAGSETTTVSTVGSETTTAYTADSETTAASTTGSEMTTVFTAGSETITPSTAGSETTTVSTAGSETTTVSTTGSETTTASTAHSETTAASTMGSETTKVSTAGSETTVSTAGSETTAASTEDSETNTAFTEDSKTTTASTTGFETTAASTTGSEPTMASTMGSETTMASTIGPETTKVSTASSEVTTVFAAGSETIRASTVGSETTTVSTTGSETTTASIMGSETSTDSTTGSETTTASTEGSETTTASTEGSEATTVSTTGSETTTVSITDSETTTTCTEGSEMTAVSTTVFETTTASTEGSEITIASTSDSETTTASTEGSETTTVTTAGSETKTAYTTGSETTTASNTGLETTTVFTIGSDTTTASTEGSETTAVSATGSEMTTVSTEGSENTTVSTTGSETTTVSTTGLETTTTSTEGSEMTTVSTTGAETTTDSTEGSGTTAASTAGSETTTVSTADSENTTASTADSETTSASTTGSETTTASTTSSETTTASTEGSETTTVSTTDSETTMVSTTGSERTITSTEGSETTTVSATGSETTVSTEGSGTTTVSITGSETTKVSTTGSETTTTSTEGSEITTASITGSETTTASTEGSETTTASTEGSETTSASTTGSETTTASTTSSETTMASIMGSETTMASTIGSETTKVSTASSKMTTVFTENSETTIASTTASETTTVSTAGSETIPASTAGSETTTTTSTEGSETTTASTEGSETTTASTESSETTTATTIGSETTTASTEGSETTTTSTEGSETTTASTEGSEITTVSTTGSETTTASTEGSETTTASTEGSELTTVSTTGSETITVSAEGSETTTVTTMGSETTTASTAGSETTTVSTAGSETTTASIEGSETTTVSSTGSETTTVSTTGTETTITSTEGSETTTVTTAGSETTAVYTTGSETTTTSTEGSETTTVSTTGSETTTASTADLETTTVSTSGSGTTTASTAGSETTTVYITGSKTTTASTEGSEATTVSTTSSETTTASTTGSEMTTVFTTVSETTTVSTIGSEATTSSAAGSEATTTSTEGSETTTASTAGSETTTASTAGSETTTASTSGSETNTACTTGSETSTPSSAGSETNTAFIIGSESTIASTASLEPTATSLTGSETTTVSITASGATAASTTVSSTTFVLTKATDVSIQPITNTPMSGTRTTGTRLTASSSVTMAPGMDFTASAASHTVPGIVLNTSGLGTSTMGASSTTSAHGVRTTTGSTREPTSSTFQETGPVSMGTNTVSMSHTPTNVIKPSGYLQPWAIILISLAAVVAAVGLSVGLSFCLRNLFFPLRYCGIYYPHGHSHSLGLDLNLGLGSGTFHSLGNALVHGGELEMGHGGTHGFGYGVGHGLSHIHGDGYGVNHGGHYGHGGGH

SEQ ID NO: 21138 - protein, 231 aa, Homo sapiens
MAQRGLPPAHDPWEPKPDWAHTGSHSSEAGKKDVSGPLRELRPRLCHLRKGPQGYGFNLHSDKSRPGQYIRSVDPGSPAARSGLRAQDRLIEVNGQNVEGLRHAEVVASIKAREDEARLLVVDPETDEHFKRLRVTPTEEHVEGPLPSPVTNGTSPAQLNGGSACSSRSDLPGSDKDTEDGSAWKQDPFQESGLHLSPTAAEAKEKARAMRVNKRAPQMDWNRKREIFSNF

SEQ ID NO: 21139 - protein, 843 aa, Homo sapiens
MDFPSSLRPALFLTGPLGLSDVPDLSFMCSWRDALTLPEAQPQNSENGALHVTKDLLWEPATPGPLPMLPPLIDPWDPGLTARDLLFRGGCRYRKRPRVVLDVTEQISRFLLDHGDVAFAPLGKLMLENFKLEGAGSRTKKKTVVSVKKLLQDLGGHQPWGCPWAYLSNRQRRFSILGGPILGTSVASHLAELLHEELVLRWEQLLLDEACTGGALAWVPGRTPQFGQLVYPAGGAQDRLHFQEVVLTPGDNPQFLGKPGRIQLQGPVRQVVTCTVQGETLLAVRSDYHCAVWKFGKQWQPTLLQAMQVEKGATGISLSPHLPGELAICSRSGAVCLWSPEDGLRQIYRDPETLVFRDSSSWRWADFTAHPRVLTVGDRTGVKMLDTQGPPGCGLLLFRLGAEASCQKGERVLLTQYLGHSSPKCLPPTLHLVCTQFSLYLVDERLPLVPMLKWNHGLPSPLLLARLLPPPRPSCVQPLLLGGQGGQLQLLHLAGEGASVPRLAGPPQSLPSRIDSLPAFPLLEPKIQWRLQERLKAPTIGLAAVVPPLPSAPTPGLVLFQLSAAGDVFYQQLRPQVDSSLRRDAGPPGDTQPDCHAPTASWTSQDTAGCSQWLKALLKVPLAPPVWTAPTFTHRQMLGSTELRREEEEGQRLGVLRKAMARGQLLLQRDLGSLPAAEPPPAPESGLEDKLSERLGEAWAGRGAAWWERQQGRTSEPGRQTRRPKRRTQLSSSFSLSGHVDPSEDTSSPHSPEWPPADALPLPPTTPPSQELTPDACAQGVPSEQRQMLRDYMAKLPPQRDTPGCATTPPHSQASSVRATRSQQHTPVLSSSQPLRKKPRMGF

SEQ ID NO: 21140 - protein, 149 aa, Homo sapiens
EVSLAQDPKRQQRKLKGNKISISGTKQEIFQVELNLQNASSDHQGNDKTYHCKGLLPPPEKLTAEVLGIICIVLMATVLKTIVLIPCIGVLEQNNFSLNRRMQKARHCGHCPEEWITYSNSCYYIGKERRTWEERVCWPVLRRTLICFL

SEQ ID NO: 21141 - protein, 125 aa, Homo sapiens
NDYVCKKGEIGREMYIIQAGQVQVLGGPDGKSVLVTLKAGSVFGEISLLAVGGGNRRTANVVAHGFTNLFILDKKDLNEILVHYPESQKLLRKKARPRARKTSRERKAPPPQTSTRTQRRPPPTH

SEQ ID NO: 21142 - protein, 583 aa, Homo sapiens
MFSPPVSSGKNGPTSLASGHFTGSNVEDRSSSGSWGNGGHPSPSRNYGDGTPYDHMTSRDLGSHDNLSPPFVNSRIQSKTERGSYSSYGRESNLQGCHQVYAPSASTADYNRDSPGYPSSKPATSTFPSSFFMQDGHHSSDPWSSSSGMNQPGYAGMLGNSSHIPQSSSYCSLHPHERLSYPSHSSADINSSLPPMSTFHRSGTNHYSTSSCTPPANGTDSIMANRGSGAAGSSQTGDALGKALASIYSPDHTNNSFSSNPSTPVGSPPSLSAGTAVWSRNGGQASSSPNYEGPLHSLQSRIEDRLERLDDAIHVLRNHAVGPSTAMPGGHGDMHGIIGPSHNGAMGGLGSGYGTGLLSANRHSLMVGTHREDGVALRGSHSLLPNQVPVPQLPVQSATSPDLNPPQDPYRGMPPGLQGQSVSSGSSEIKSDDEGDENLQDTKSSEDKKLDDDKKDIKSITSNNDDEDLTPEQKAEREKERRMANNARERLRVRDINEAFKELGRMVQLHLKSDKPQTKLLILHQAVAVILSLEQQVRERNLNPKAACLKRREEEKVSSEPPPLSLAGPHPGMGDASNHMGQM

SEQ ID NO: 21143 - protein, 1017 aa, Homo sapiens
MAAAPALKHWRTTLERVEKFVSPLYFTDCNLRGRLFGASCPVAVLSSFLTPERLPYQEAVQRDFRPAQVGDSFGPTWWTCWFRVELTIPEAWVGQEVHLCWESDGEGLVWRDGEPVQGLTKEGEKTSYVLTDRLGERDPRSLTLYVEVACNGLLGAGKGSMIAAPDPEKMFQLSRAELAVFHRDVHMLLVDLELLLGIAKGLGKDNQRSFQALYTANQMVNVCDPAQPETFPVAQALASRFFGQHGGESQHTIHATGHCHIDTAWLWPFKETVRKCARSWVTALQLMERNPEFIFACSQAQQLEWVKSRYPGLYSRIQEFACRGQFVPVGGTWVEMDGNLPSGEAMVRQFLQGQNFFLQEFGKMCSEFWLPDTFGYSAQLPQIMHGCGIRRFLTQKLSWNLVNSFPHHTFFWEGLDGSRVLVHFPPGDSYGMQGSVEEVLKTVANNRDKGRANHSAFLFGFGDGGGGPTQTMLDRLKRLSNTDGLPRVQLSSPRQLFSALESDSEQLCTWVGELFLELHNGTYTTHAQIKKGNRECERILHDVELLSSLALARSAQFLYPAAQLQHLWRLLLLNQFHDVVTGSCIQMVAEEAMCHYEDIRSHGNTLLSAAAAALCAGEPGPEGLLIVNTLPWKRIEVMALPKPGGAHSLALVTVPSMGYAPVPPPTSLQPLLPQQPVFVVQETDGSVTLDNGIIRVKLDPTGRLTSLVLVASGREAIAEGAVGNQFVLFDDVPLYWDAWDVMDYHLETRKPVLGQAGTLAVGTEGGLRGSAWFLLQISPNSRLSQEVVLDVGCPYVRFHTEVHWHEAHKFLKVEFPARVRSSQATYEIQFGHLQRPTHYNTSWDWARFEVWAHRWMDLSEHGFGLALLNDCKYGASVRGSILSLSLLRAPKAPDATADTGRHEFTYALMPHKAPSPAPATSWSAFSVSSPAVVLETVKQAESSPQRRSLVLRLYEAHGSHVDCWLHLSLPVQEAILCDLLERPDPAGHLTLRDNRLKLTFSPFQVLSLLLVLQPPPH

SEQ ID NO: 21144 - protein, 68 aa, Homo sapiens
MLRLRSGLRHLRATPNTRGSARLLCAEMPKKAGATTKGGKSREKVVKLLASTTPEEILEKLKKEAKKT

SEQ ID NO: 21145 - protein, 392 aa, Homo sapiens
MASRSSDKDGDSVHTASEVPLTPRTNSPDGRRSSSDTSKSTYSLTRRISSLESRRPSSPLIDIKPIEFGVLSAKKEPIQPSVLRRTYNPDDYFRKFEPHLYSLDSNSDDVDSLTDEEILSKYQLGMLHFSTQYDLLHNHLTVRVIEARDLPPPISHDGSRQDMAHSNPYVKICLLPDQKNSKQTGVKRKTQKPVFEERYTFEIPFLEAQRRTLLLTVVDFDKFSRHCVIGKVSVPLCEVDLVKGGHWWKALIPSSQNEVELGELLLSLNYLPSAGRLNVDVIRAKQLLQTDVSQGSDPFVKIQLVHGLKLVKTKKTSFLRGTIDPFYNESFSFKVPQEELENASLVFTGSNSPIPACELSSHPAHGISPWIPSPGNEHFHGIKKQVKAIKVE

SEQ ID NO: 21146 - protein, 746 aa, Homo sapiens
MEVKRLKVTELRSELQRRGLDSRGLKVDLAQRLQEALDAEMLEDEAGGGGAGPGGACKAEPRPVAASGGGPGGDEEEDEEEEEEDEEALLEDEDEEPPPAQALGQAAQPPPEPPEAAAMEAAAEPDASEKPAEATAGSGGVNGGEEQGLGKREEDEPEERSGDETPGSEVPGDKAAEEQGDDQDSEKSKPAGSDGERRGVKRQRDEKDEHGRAYYEFREEAYHSRSKSPLPPEEEAKDEEEDQTLVNLDTYTSDLHFQVSKDRYGGQPLFSEKFPTLWSGARSTYGVTKGKVCFEAKVTQNLPMKEGCTEVSLLRVGWSVDFSRPQLGEDEFSYGFDGRGLKAENGQFEEFGQTFGENDVIGCFANFETEEVELSFSKNGEDLGVAFWISKDSLADRALLPHVLCKNCVVELNFGQKEEPFFPPPEEFVFIHAVPVEERVRTAVPPKTIEECEVILMVGLPGSGKTQWALKYAKENPEKRYNVLGAETVLNQMRMKGLEEPEMDPKSRDLLVQQASQCLSKLVQIASRTKRNFILDQCNVYNSGQRRKLLLFKTFSRKVVVVVPNEEDWKKRLELRKEVEGDDVPESIMLEMKANFSLPEKCDYMDEVTYGELEKEEAQPIVTKYKEEARKLLPPSEKRTNRRNNRNKRNRQNRSRGQGYVGGQRRGYDNRAYGQQYWGQPGNRGGYRNFYDRYRGDYDRFYGRDYEYNRYRDYYRQYNRDGPSIFHIQENVMRHRYQRLDRHFTF

SEQ ID NO: 21147 - protein, 792 aa, Homo sapiens
MITVNPDGKIMVRRCLVTLRPFRLFVLGIGFFTLCFLMTSLGGQFSARRLGDSPFTIRTEVMGGPESRGVLRKMSDLLELMVKRMDALARLENSSELHRAGGDLHFPADRMPPGAGLMERIQAIAQNVSDIAVKVDQILRHSLLLHSKVSEGRRDQCEAPSDPKFPDCSGKVEWMRARWTSDPCYAFFGVDGTECSFLIYLSEVEWFCPPLPWRNQTAAQRAPKPLPKVQAVFRSNLSHLLDLMGSGKESLIFMKKRTKRLTAQWALAAQRLAQKLGATQRDQKQILVHIGFLTEESGDVFSPRVLKGGPLGEMVQWADILTALYVLGHGLRVTVSLKELQSNLGVPPGRGSCPLTMPLPFDLIYTDYHGLQQMKRHMGLSFKKYRCRIRVIDTFGTEPAYNHEEYATLHGYRTNWGYWNLNPKQFMTMFPHTPDNSFMGFVSEELNETEKRLIKGGKASNMAVVYGKEASIWKLQGKEKFLGILNKYMEIHGTVYYESQRPPEVPAFVKNHGLLPQPEFQQLLRKAKLFIGFGFPYEGPAPLEAIANGCIFLQSRFSPPHSSLNHEFFRGKPTSREVFSQHPYAENFIGKPHVWTVDYNNSEEFEAAIKAIMRTQVDPYLPYEYTCEGMLERIHAYIQHQDFCRAPDPALPEAHAPQSPFVLAPNATHLEWARNTSLAPGAWPPAHALRAWLAVPGRACTDTCLDHGLICEPSFFPFLNSQDAFLKLQVPCDSTESEMNHLYPAFAQPGQECYLQKEPLLFSCAGSNTKYRRLCPCRDFRKGQVALCQGCL

SEQ ID NO: 21148 - protein, 187 aa, Homo sapiens
MPAPIRLRELIRTIRTARTQAEEREMIQKECAAIRSSFREEDNTYRCRNVAKLLYMHMLGYPAHFGQLECLKLIASQKFTDKRIGYLGAMLLLDERQDVHLLMTNCIKNDLNHSTQFVQGLALCTLGCMGSSEMCRDLAGEVEKLLKTSNSYLRKKAALCAVHVIRKVPELMEMFLPATKNLLNEKN

SEQ ID NO: 21149 - protein, 473 aa, Homo sapiens
MWDQRLVRLALLQHLRAFYGIKVKGVRGQCDRRRHETAATEIGGKIFGVPFNALPHSAVPEYGHIPSFLVDACTSLEDHIHTEGLFRKSGSVIRLKALKNKVDHGEGCLSSAPPCDIAGLLKQFFRELPEPILPADLHEALLKAQQLGTEEKNKATLLLSCLLADHTVHVLRYFFNFLRNVSLRSSENKMDSSNLAVIFAPNLLQTSEGHEKMSSNTEKKLRLQAAVVQTLIDYASDIGRVPDFILEKIPAMLGIDGLCATPSLEGFEEGEYETPGEYKRKRRQSVGDFVSGALNKFKPNRTPSITPQEERIAQLSESPVILTPNAKRTLPVDSSHGFSSKKRKSIKHNFNFELLPSNLFNSSSTPVSGVPRRSKRIAGKKVCRVESGKAGCFSPKISHKEKVRRSLRLKFNLGKNGREVNGCSGVNRYESVGWRLANQQSLKNRIESVKTGLLFSPDVDEKLPKKGTFTYYC

SEQ ID NO: 21150 - protein, 421 aa, Homo sapiens
MGGCAGSRRRFSDSEGEETVPEPRLPLLDHQGAHWKNAVGFWLLGLCNNFSYVVMLSAAHDILSHKRTSGNQSHVDPGPTPIPHNSSSRFDCNSVSTAAVLLADILPTLVIKLLAPLGLHLLPYSPRVLVSGICAAGSFVLVAFSHSVGTSLCGVVFASISSGLGEVTFLSLTAFYPRAVISWWSSGTGGAGLLGALSYLGLTQAGLSPQQTLLSMLGIPALLLASYFLLLTSPEAQDPGGEEEAESAARQPLIRTEAPESKPGSSSSLSLRERWTVFKVRMMAGFELLFFWNTSLSHAQQYRWYQMLYQAGVFASRSSLRCCRIRFTWALALLQCLNLVFLLADVWFGFLPSIYLVFLIILYEGLLGGAAYVNTFHNIALETSDEHREFAMAATCISDTLGISLSGLLALPLHDFLCQLS

SEQ ID NO: 21151 - protein, 1052 aa, Homo sapiens
LDDRRPITLCVCVRARVCDLEPDDCASIYIFNVDPPPSTLTTPLCLPHHGLPSHSSVLSPSFQLQSHKNYEGTCEIPESKYSPLGGPKPFECPSIQITSISPNCHQELDAHEDDLQINDPEREFLERPSRDHLYLPLEPSYRESSLSPSPASSISSRSWFSDASSCESLSHIYDDVDSELNEAAARFTLGSPLTSPGGSPGGCPGEETWHQQYGLGHSLSPRQSPCHSPRSSVTDENWLSPRPASGPSSRPTSPCGKRRHSSAEVCYAGSLSPHHSPVPSPGHSPRGSVTEDTWLNASVHGGSGLGPAVFPFQYCVETDIPLKTRKTSEDQAAILPGKLELCSDDQGSLSPARETSIDDGLGSQYPLKKDSCGDQFLSVPSPFTWSKPKPGHTPIFRTSSLPPLDWPLPAHFGQCELKIEVQPKTHHRAHYETEGSRGAVKASTGGHPVVKLLGYNEKPINLQMFIGTADDRYLRPHAFYQVHRITGKTVATASQEIIIASTKVLEIPLLPENNMSASIDCAGILKLRNSDIELRKGETDIGRKNTRVRLVFRVHIPQPSGKVLSLQIASIPVECSQRSAQELPHIEKYSINSCSVNGGHEMVVTGSNFLPESKIIFLEKGQDGRPQWEVEGKIIREKCQGAHIVLEVPPYHNPAVTAAVQVHFYLCNGKRKKSQSQRFTYTPVLMKQEHREEIDLSSVPSLPVPHPAQTQRPSSDSGCSHDSVLSGQRSLICSIPQTYASMVTSSHLPQLQCRDESVSKEQHMIPSPIVHQPFQVTPTPPVGSSYQPMQTNVVYNGPTCLPINAASSQEFDSVLFQQDATLSGLVNLGCQPLSSIPFHSSNSGSTGHLLAHTPHSVHTLPHLQSMGYHCSNTGQRSLSSPVADQITGQPSSQLQPITYGPSHSGSATTASPAASHPLASSPLSGPPSPQLQPMPYQSPSSGTASSPSPATRMHSGQHSTQAQSTGQGGLSAPSSLICHSLCDPASFPPDGATVSIKPEPEDREPNFATIGLQDITLDDDQFISDLEHQPSGSAEKWPNHSVLSCPAPFWRI

SEQ ID NO: 21152 - protein, 5063 aa, Homo sapiens
MAATLGAGTPPRPQARSIAGVYVEASGQAQSVYAAMEQGLLPAGLGQALLEAQAATGGLVDLARGQLLPVSKALQQGLVGLELKEKLLAAERATTGYPDPYGGEKLALFQAIGKEVVDRALGQSWLEVQLATGGLVDPAQGVLVAPEPACHQGLLDRETWHKLSELEPGTGDLRFLDPNTLERLTYHQLLERCVRAPGSGLALLPLKITFRSMGGAVSAAELLEVGILDEQAVQGLREGRLAAVDVSARAEVRRYLEGTGSVAGVVLLPEGHKKSFFQAATEHLLPMGTALPLLEAQAATHTLVDPITGQRLWVDEAVRAGLVSPELHEQLLVAEQAVTGHHDPFSGSQIPLFQAMKKGLVDRPLALRLLDAQLATGGLVCPARRLRLPLEAALRCGCLDEDTQRQLSQAGSFSDGTHGGLRYEQLLALCVTDPETGLAFLPLSGGPRGGEPQGPPFIKYSTRQALSTATATVSVGKFRGRPVSLWELLFSEAISSEQRAMLAQQYQEGTLSVEKLAAKLSATLEQAAATARVTFSGLRDTVTPGELLKAEIIDQDLYERLEHGQATAKDVGSLASVQRYLQGTGCIAGLLLPGSQERLSIYEARCKGLLRPGTALILLEAQAATGFIIDPKANKGHSVEEALRAAVIGPDVFAKLLSAERAVTGYTDPYTGQQISLFQAMQKGLIVREHGIRLLEAQIATGGVIDPVHSHRVPVDVAYRRGYFDQMLNLILLDPSDDTKGFFDPNTHENLTYLQLLERCVRDPETGLYLLPLSSTQSPLVDSATQQAFQNLLLSVKYGRFQGQRVSAWELINSEYFSEGRRRQLLRRYRQREVTLGQVAKLLEAETQRQADIMLPALRSRVTVHQLLEAGIIDQQLLDQVLAGTISPEALLLMDGVRRYLCGLGAVGGVRLLPSGQRLSLYQAMRQKLLGPRVALALLEAQAATGTIMDPHSPESLSVDEAVRRGVVGPELYGRLKRAEGAIAGFRDPFSGKQVSVFQAMKKGLIPWEQAARLLEAQVATGGIIDPTSHHHLPMPVAIQRGYVDQEMETALSSSSETFPTPDGQGRTSYAQLLEECPRDETSGLHLLPLPESAPALPTEEQVQRSLQAVPGAKDGTSLWDLLSSCHFTEEQRRGLLEDVQEGRTTVPQLLASVQRWVQETKLLAQARVMVPGPRGEVPAVWLLDAGIITQETLEALAQGTQSPAQVAEQPAVKACLWGTGCVAGVLLQPSGAKASIAQAVRDGLLPTGLGQRLLEAQVASGFLVDPLNNQRLSVEDAVKVGLVGRELSEQLGQAERAAAGYPDPYSRASLSLWQAMEKGLVPQNEGLPLLQVQLATGGVVDPVHGVHLPQAAACRLGLLDTQTSQVLTAVDKDNKFFFDPSARDQVTYQQLRERCVCDSETGLLLLPLPSDTVLEVDDHTAVALRAMKVPVSTGRFKGCSVSLWDLLLSEYVGADKRRELVALCRSGRAAALRQVVSAVTTLVEAAERQPLQATFRGLRKQVSARDLFRAQLISRKTLDELSQGTTTVKEVAEMDSVKRSLEGGNFIAGVLIQGTQERMSIPEALRRHILRPGTALVLLEAQAATGFIIDPVENRKLTVEEAFKAGMFGKETYVKLLSAERAVTGYTDPYTGQQISLFQAMQKDLIVREHGIRLLEAQIATGGIIDPVHSHRVPVDVAYRCGYFDEEMNRILADPSDDTKGFFDPNTHENLTYLQLLERCVEDPETGLYLLQIIKKGENYVYINEATRHVLQSRTAKMRVGRFADQVVSFWDLLSSPYFTEDRKRELIQEYGAQSGGLEKLLEIITTTIEETETQNQGIKVAAIRGEVTAADLFNSRVIDQKTLHTLRVGRTGGQALSTLECVKPYLEGSGCIAGVTVPSTREVMSLHEASRKELIPAAFATWLLEAQAATGFLLDPCTRQKLSVDEAVDVGLVNEELRERLLKAERAATGYRDPATGDTIPLFQAMQKQLIEKAEALRLLEVQVATGGVIDPQHHHRLPLETAYRRGCLHKDIYALISDQKHMRKRFVDPNTQEKVSYRELQERCRPQEDTGWLLFPVNKAARDSEHIDDETRRALEAEQVEITVGRFRGQKPTLWALLNSEYVTEEKKLQLVRMYRTHTRRALQTVAQLILELIEKQETSNKHLWFQGIRRQITASELLSSAIITEEMLQDLETGRSTTQELMEDDRVKRYLEGTSCIAGVLVPAKDQPGRQEKMSIYQAMWKGVLRPGTALVLLEAQAATGFVIDPVRNLRLSVEEAVAAGVVGGEIQEKLLSAERAVTGYTDPYTGQQISLFQAMQKDLIVREHGIRLLEAQIATGGVIDPVHSHRVPVDVAYRRGYFDEEMNRVLADPSDDTKGFFDPNTHENLTYVQLLRRCVPDPDTGLYMLQLAGRGSAVHQLSEELRCALRDARVTPGSGALQGQSVSVWELLFYREVSEDRRQDLLSRYRAGTLTVEELGATLTSLLAQAQAQARAEAEAGSPRPDPREALRAATMEVKVGRLRGRAVPVWDVLASGYVSRAAREELLAEFGSGTLDLPALTRRLTAIIEEAEEAPGARPQLQDAWRGPREPGPAGRGDGDSGRSQREGQGEGETQEAAAAAAAAAARRQEQTLRDATMEVQRGQFQGRPVSVWDVLFSSYLSEARRDELLAQHAAGALGLPDLVAVLTRVIEETEERLSKVSFRGLRRQVSASELHTSGILGPETLRDLAQGTKTLQEVTEMDSVKRYLEGTSCIAGVLVPAKDQPGRQEKMSIYQAMWKGVLRPGTALVLLEAQAATGFVIDPVRNLRLSVEEAVAAGVVGGEIQEKLLSAERAVTGYTDPYTGQQISLFQAMQKDLIVREHGIRLLEAQIATGGVIDPVHSHRVPVDVAYQRGYFDEEMNRVLADPSDDTKGFFDPNTHENLTYVQLLRRCVPDPDTGLYMLQLAGRGSAVHQLSEELRCALRDARVTPGSGALQGQSVSVWELLFYREVSEDRRQDLLSRYRAGTLTVEELGATLTSLLAQAQAQARAEAEAGSPRPDPREALRAATMEVKVGRLRGRAVPVWDVLASGYVSRAAREELLAEFGSGTLDLPALTRRLTAIIEEAEEAPGARPQLQDAWRGPREPGPAGRGDGDSGRSQREGQGEGETQEAAAAARRQEQTLRDATMEVQRGQFQGRPVSVWDVLFSSYLSEARRDELLAQHAAGALGLPDLVAVLTRVIEETEERLSKVSFRGLRCQVSASELHTSGILGPETLRDLAQGTKTLQEVTEMDSVKRYLEGTSCIAGVLVPAKDQPGRQEKMSIYQAMWKGVLRPGTALVLLEAQAATGFVIDPVRNLRLSVEEAVAAGVVGGEIQEKLLSAERAVTGYTDPYTGQQISLFQAMQKDLIVREHGIRLLEAQIATGGVIDPVHSHRVPVDVAYRRGYFDEEMNRVLADPSDDTKGFFDPNTHENLTYVQLLRRCVPDPDTGLYMLQLAGRGSAVHQLSEELRCALRDARVTPGSGALQGQSVSVWELLFYREVSEDRRQDLLSRYRAGTLTVEELGATLTSLLAQAQAQARAEAEAGSPRPDPREALRAATMEVKVGRLRGRAVPVWDVLASGYVSRAAREELLAEFGSGTLDLPALTRRLTAIIEEAEEAPGARPQLQDAWRGPREPGPAGRGDGDSGRSQREGQGEGETQEAAAATAAARRQEQTLRDATMEVQRGQFQGRPVSVWDVLFSSYLSEARRDELLAQHAAGALGLPDLVAVLTRVIEETEERLSKVSFRGLRRQVSASELHTSGILGPETLRDLAQGTKTLQEVTEMDSVKRYLEGTSCIAGVLVPAKDQPGRQEKMSIYQAMWKGVLRPGTALVLLEAQAATGFVIDPVRNLRLSVEEAVAAGVVGGEIQEKLLSAERAVTGYTDPYTGQQISLFQAMQKDLIVREHGIRLLEAQIATGGVIDPVHSHRVPVDVAYRRGYFDEEMNRVLADPSDDTKGFFDPNTHENLTYVQLLRRCVPDPDTGLYMLQLAGRGSAVHQLSEELRCALRDARVTPGSGALQGQSVSVWELLFYREVSEDRRQDLLSRYRAGTLTVEELGATLTSLLAQAQAQARAEAEAGSPRPDPREALRAATMEVKVGRLRGRAVPVWDVLASGYVSRAAREELLAEFGSGTLDLPALTRRLTAIIEEAEEAPGARPQLQDAWRGPREPGPAGRGDGDSGRSQREGQGEGETQEAAAATAAARRQEQTLRDATMEVQRGQFQGRPVSVWDVLFSSYLSEARRDELLAQHAAGALGLPDLVAVLTRVIEETEERLSKVSFRGLRRQVSASELHTSGILGPETLRDLAQGTKTLQEVTEMDSVKRYLEGTSCIAGVLVPAKDQPGHQEKMSIYQAMWKGVLRPGTALVLLEAQAATGFVIDPVRNLRLSVEEAVAAGVVGGEIQEKLLSAERAVTGYTDPYTGQQISLFQAMQKDLIVREHGIRLLEAQIATGGVIDPVHSHRVPVDVAYRRGYFDEEMNRVLAHPSDDTKGFFDPNTHENLTYVQLLRRCVPDPDTGLYMLQLAGRGSAVHQLSEELRCALRDARVMPGSGALQGQSVSVWELLFYREVSEDRRQDLLSRYRAGTLTVEELGATLTSLLAQAQAQARAEAEAEAGSPRPDPREALRAATMEVKVGRLRGRAVPVWDVLASGYVSGAAREELLAEFGSGTLDLPALTRRLTAIIEEAEEAPGARPQLQDAWRGPREPGPAGRGDGDSGRSQREGQGEGETQEAAAAARRQEQTLRDATMEVQRGQFQGRPVSVWDVLFSSYLSEAHRDELLAQHAAGALGLPDLVAVLTRVIEETEERLSKVSFRGLRRQVSASELHTSGILGPETLRDLAQGTKTLQEVTEMDSVKRYLEGTSCIAGVLVPAKDQPGRQEKMSIYQAMWKGVLRPGTALVLLEAQAATGFVIDPVRNLRLSVEEAVAAGVVGGEIQEKLLSAERAVTGYTDPYTGQQISLFQAMQKDLIVREHGIRLLEAQIATGGVIDPVHSHRVPVDVAYRRGYFDEEMNRVLADPSDDTKGFFDPNTHENLTYLQLLQRATLDPETGLLFLSLSLQ

SEQ ID NO: 21153 - protein, 611 aa, Homo sapiens
MHHQQRMAALGTDKELSDLLDFSAMFSPPVSSGKNGPTSLASGHFTGSNVEDRSSSGSWGNGGHPSPSRNYGDGTPYDHMTSRDLGSHDNLSPPFVNSRIQSKTERGSYSSYGRESNLQGCHQVYAPSASTADYNRDSPGYPSSKPATSTFPSSFFMQDGHHSSDPWSSSSGMNQPGYAGMLGNSSHIPQSSSYCSLHPHERLSYPSHSSADINSSLPPMSTFHRSGTNHYSTSSCTPPANGTDSIMANRGSGAAGSSQTGDALGKALASIYSPDHTNNSFSSNPSTPVGSPPSLSAGTAVWSRNGGQASSSPNYEGPLHSLQSRIEDRLERLDDAIHVLRNHAVGPSTAMPGGHGDMHGIIGPSHNGAMGGLGSGYGTGLLSANRHSLMVGTHREDGVALRGSHSLLPNQVPVPQLPVQSATSPDLNPPQDPYRGMPPGLQGQSVSSGSSEIKSDDEGDENLQDTKSSEDKKLDDDKKDIKSITRSRSSNNDDEDLTPEQKAEREKERRMANNARERLRVRDINEAFKELGRMVQLHLKSDKPQTKLLILHQAVAVILSLEQQVRERNLNPKAACLKRREEEKVSSEPPPLSLAGPHPGMGDASNHMGQM

SEQ ID NO: 21154 - protein, 332 aa, Homo sapiens
MALPTARPLLGSCGTPALGSLLFLLFSLGWVQPSRTLAGETGQEAAPLDGVLANPPNISSLSPRQLLGFPCAEVSGLSTERVRELAVALAQKNVKLSTEQLRCLAHRLSEPPEDLDALPLDLLLFLNPDAFSGPQACTRFFSRITKANVDLLPRGAPERQRLLPAALACWGVRGSLLSEADVRALGGLACDLPGRFVAESAEVLLPRLGIVAAWRQRSSRDPSWRQPERTILRPRFRREVEKTACPSGKKAREIDESLIFYKKWELEACVDAALLATQMDRVNAIPFTYEQLDVLKHKLDELYPQGYPESVIQHLGYLFLKMSPEDIRKWNV

SEQ ID NO: 21155 - protein, 647 aa, Homo sapiens
MTSRDRIKAIRNQPRTMEEKRNLRKIVDKEKSKQTHRILQLNCCIQCLNSISRAYRRSKNSLSEILNSISLWQKTLKIIGGKFGTSVLSYFNFLRWLLKFNIFSFILNFSFIIIPQFTVAKKNTLQFTGLEFFTGVGYFRDTVMYYGFYTNSTIQHGNSGASYNMQLAYIFTIGACLTTCFFSLLFSMAKYFRNNFINPHIYSGGITKLIFCWDFTVTHEKAVKLKQKNLSTEIRENLSELRQENSKLTFNQLLTRFSAYMVAWVVSTGVAIACCAAVYYLAEYNLEFLKTHSNPGAVLLLPFVVSCINLAVPCIYSMFRLVERYEMPRHEVYVLLIRNIFLKISIIGILCYYWLNTVALSGEECWETLIGQDIYRLLLMDFVFSLVNSFLGEFLRRIIGMQLITSLGLQEFDIARNVLELIYAQTLVWIGIFFCPLLPFIQMIMLFIMFYSKNISLMMNFQPPSKAWRASQMMTFFIFLLFFPSFTGVLCTLAITIWRLKPSADCGPFRGLPLFIHSIYSWIDTLSTRPGYLWVVWIYRNLIGSVHFFFILTLIVLIITYLYWQITEGRKIMIRLLHEQIINEGKDKMFLIEKLIKLQDMEKKANPSSLVLERREVEQQGFLHLGEHDGSLDLRSRRSVQEGNPRA

SEQ ID NO: 21156 - protein, 400 aa, Homo sapiens
NKSTSTPTSPGPRTHSTPSIPVLTAGQSGLYSPQYISYIPQIHMGPAVQAPQMYPYPVSNSVPGQQGKYRGAKGSLPPQRSDQHQPASAPPMMQAAAAAGPPLVAATPYSSYIPYNPQQFPGQPAMMQPMAHYPSQPVFAPMLQSNPRMLTSGSHPQAIVSSSTPQYPSAEQPTPQALYATVHQSYPHHATQLHAHQPQPATTPTGSQPQSQHAAPSPVQHQAGQAPHLGSGQPQQNLYHPGALTGTPPSLPPGPSAQSPQSSFPQPAAVYAIHHQQLPHGFTNMAHVTQAHVQTGITAAPPPHPGAPHPPQVMLLHPPQSHGGPPQGAVPQSGVPALSASTPSPYPYIGHPQGEQPGQAPGFPGGADDRIREFSLAGGIWHGRAEGLQVGQDARVLGGE

SEQ ID NO: 21157 - protein, 611 aa, Homo sapiens
MDSCSLEIANWRNHQETLKYQFDAFYGERSTQQDIYAGSVQPILRHLLEGQNASVLAYGPTGAGKTHTMLGSPEQPGVIPRALMDLLQLTREEGAEGRPWALSVTMSYLEIYQEKVLDLLDPASGDLVIREDCRGNILIPGLSQKPISSFADFERHFLPASRNRTVGATRLNQRSSRSHAVLLVKVDQRERLAPFRQREGKLYLIDLAGSEDNRRTGNKGLRLKESGAINTSLFVLGKVVDALNQGLPRVPYRDSKLTRLLQDSLGGSAHSILIANIAPERRFYLDTVSALNFAARSKEVINRPFTNESLQPHALGPVKLSQKELLGPPEAKRARGPEEEEIGSPEPMAAPASASQKLSPLQKLSSMDPAMLERLLSLDRLLASQGSQGAPLLSTPKRERMVLMKTVEEKDLEIERLKTKQKELEAKMLAQKAEEKENHCPTMLRPLSHRTVTGAKPLKKAVVMPLQLIQEQAASPNAEIHILKNKGRKRKVKVAGGLGYTWSPELESLDALEPEEKAEDCWELQISPELLAHGRQKILDLLNEGSARDLRSLQRIGPKKAQLIVGWRELHGPFSQVEDLERVEGITGKQMESFLKANILGLAAGQRCGAS

SEQ ID NO: 21158 - protein, 290 aa, Homo sapiens
ETELLRRNVADLEEQNKRITAELNKYKYKSGGHDSARHHDNAKTEALQEELKAARLQINELSGKVMQLQYENRVLMSNMQRYDLASHLGIRGSPRDSDAESDAGKKESDDDSRPPHRKREGPIGGESDSEEVRNIRCLTPTRSFYPAPGPWPKSFSDRQQMKDIRSEAERLGKTIDRLIADTSTIITEARIYVANGDLFGLMDEEDDGSRIREHELLYRINAQMKAFRKELQTFIDRLEVPKSADDRGAEEPISMFQPIILLILILVLFSSLSYTTIFKLVFLFTLFFVL

SEQ ID NO: 21159 - protein, 2396 aa, Homo sapiens
MNINDGGRRRFEDNEHTLRIYPGAISEGTIYCPIPARKNSTAAEVIESLINKLHLDKTKCYVLAEVKEFGGEEWILNPTDCPVQRMMLWPRMALENRLSGEDYRFLLREKNLDGSIHYGSLQSWLRVTEERRRMMERGFLPQPQQKDFDDLCSLPDLNEKTLLENLRNRFKHEKIYTYVGSILIVINPFKFLPIYNPKYVKMYDNHQLGKLEPHIYAVADVAYHAMLQRKKNQCIVISGESGSGKTQSTNFLIHHLTALSQKGFASGVEQIILGAGPVLEAFGNAKTAHNNNSSRFGKFIQVNYQETGTVLGAYVEKYLLEKSRLVYQEHNERNYHVFYYLLAGASEDERSAFHLKQPEEYHYLNQITKKPLRQSWDDYCYDSEPDCFTVEGEDLRHDFERLQLAMEMVGFLPKTRRQIFSLLSAILHLGNICYKKKTYRDDSIDICNPEVLPIVSELLEVKEEMLFEALVTRKTVTVGEKLILPYKLAEAVTVRNSMAKSLYSALFDWIVFRINHALLNSKDLEHNTKTLSIGVLDIFGFEDYENNSFEQFCINFANERLQHYFNQHIFKLEQEEYRTEGISWHNIDYIDNTCCINLISKKPTGLLHLLDEESNFPQATNQTLLDKFKHQHEDNSYIEFPAVMEPAFIIKHYAGKVKYGVKDFREKNTDHMRPDIVALLRSSKNAFISGMIGIDPVAVFRWAILRAFFRAMVAFREAGKRNIHRKTGHDDTAPCAILKSMDSFSFLQHPVHQRSLEILQRCKEEKYSITRKNPRTPLSDLQGMNALNEKNQHDTFDIAWNGRTGIRQSRLSSGTSLLDKDGIFANSTSSKLLERAHGILTRNKNFKSKPALPKHLLEVNSLKHLTRLTLQDRITKSLLHLHKKKKPPSISAQFQASLSKLMETLGQAEPYFVKCIRSNAEKLPLRFSDVLVLRQLRYTGMLETVRIRQSGYSSKYSFQDFVSHFHVLLPRNIIPSKFNIQDFFRKINLNPDNYQVGKTMVFLKEQERQHLQDLLHQEVLRRIILLQRWFRVLLCRQHFLHLRQASVIIQRFWRNYLNQKQVRDAAVQKDAFVMASAAALLQASWRAHLERQRYLELRAAAIVIQQKWRDYYRRRHMAAICIQARWKAYRESKRYQEQRKKIILLQSTCRGFRARQRFKALKEQRLRETKPEVGLVNIKGYGSLEIQGSDPSGWEDCSFDNRIKAIEECKSVIESNRISRESSVDCLKESPNKQQERAQSQSGVDLQEDVLVRERPRSLEDLHQKKVGRAKRESRRMRELEQAIFSLELLKVRSLGGISPSEDRRWSTELVPEGLQSPRGTPDSESSQGSLELLSYEESQKSKLESVISDEGDLQFPSPKISSSPKFDSRDNALSASNETSSAEHLKDGTMKEMVVCSSESITCKPQLKDSFISNSLPTFFYIPQQDPLKTNSQLDTSIQRNKLLENEDTAGEALTLDINRETRRYHCSGKDQIVPSLNTESSNPVLKKLEKLNTEKEERQKQLQQQNEKEMMEQIRQQTDILEKERKAFKTIEKPRIGECLVAPSSYQSKQRVERPSSLLSLNTSNKGELNVLGSLSLKDAALAQKDSSSAHLPPKDRPVTVFFERKGSPCQSSTVKELSKTDRMGTQLNVACKLSNNRISKREHFRPTQSYSHNSDDLSREGNARPIFFTPKDNMSIPLVSKEALNSKNPQLHKEDEPAWKPVKLAGPGQRETSQRFSSVDEQAKLHKTMSQGEITKLAVRQKASDSDIRPQRAKMRFWAKGKQGEKKTTRVKPTTQSEVSPLFAGTDVIPAHQFPDELAAYHPTPPLSPELPGSCRKEFKENKEPSPKAKRKRSVKISNVALDSMHWQNDSVQIIASVSDLKSMDEFLLKKVNDLDNEDSKKDTLVDVVFKKALKEFRQNIFSFYSSALAMDDGKSIRYKDLYALFEQILEKTMRLEQRDSLGESPVRVWVNTFKVFLDEYMNEFKTSDCTATKVPKTERKKRRKKETDLVEEHNGHIFKATQYSIPTYCEYCSSLIWIMDRASVCKLCKYACHKKCCLKTTAKCSKKYDPELSSRQFGVELSRLTSEDRTVPLVVEKLINYIEMHGLYTEGIYRKSGSTNKIKELRQGLDTDAESVNLDDYNIHVIASVFKQWLRDLPNPLMTFELYEEFLRAMGLQERKETIRGVYSVIDQLSRTHLNTLERLIFHLVRIALQEDTNRMSANALAIVFAPCILRCPDTTDPLQSVQDISKTTTCVELIVVEQMNKYKARLKDISSLEFAENKAKTRLSLIRRSMGKGRIRRGNYPGPSSPVVVRLPSVSDVSEETLTSEAAMETDITEQQQAAMQQEERVLTEQIENLQKEKEELTFEMLVLEPRASDDETLESEASIGTADSSENLNMESEYAISEKSEA

SEQ ID NO: 21160 - protein, 1128 aa, Homo sapiens
MLSRPKPGESEVDLLHFQSQFLAAGAAPAVQLVKKGNRGGGDANSDRPPLQDHRDVVMLDNLPDLPPALVPSPPKRARPSPGHCLPEDEDPEERLRRHDQHITAVLTKIIERDTSSVAVNLPVPSGVAFPAVFLRSRDTQGKSATSGKRSIFAQEIAARRIAEAKGPSVGEVVPNVGPPEGAVTCETPTPRNQGCQLPGSSHSFQGPNLVTGKGLRDQEAEQEAQTIHEENIARLQAMAPEEILQEQQRLLAQLDPSLVAFLRSHSHTQEQTGETASEEQRPGGPSANVTKEEPLMSAFASEPRKRDKLEPEAPALALPVTPQKEWLHMDTVELEKLHWTQDLPPVRRQQTQERMQARFSLQGELLAPDVDLPTHLGLHHHGEEAERAGYSLQELFHLTRSQVSQQRALALHVLAQVISRAQAGEFGDRLAGSVLSLLLDAGFLFLLRFSLDDRVDGVIATAIRALRALLVAPGDEELLDSTFSWYHGALTFPLMPSQEDKEDEDEDEECPAGKAKRKSPEEESRPPPDLARHDVIKGLLATSLLPRLRYVLEVTYPGPAVVLDILAVLIRLARHSLESATRVLECPRLIETIVREFLPTSWSPVGAGPTPSLYKVPCATAMKLLRVLASAGRNIAARLLSSFDLRSRLCRIIAEAPQELALPPEEAEMLSTEALRLWAVAASYGQGGYLYRELYPVLMRALQVVPRELSTHPPQPLSMQRIASLLTLLTQLTLAAGSTPAETISDSAEASLSATPSLVTWTQVSGLQPLVEPCLRQTLKLLSRPEMWRAVGPVPVACLLFLGAYYQAWSQQPSSCPEDWLQDMQRLSEELLLPLLSQPTLGSLWDSLRHCSLLCNPLSCVPALEAPPSLVSLGCSGGCPRLSLAGSASPFPFLTALLSLLNTLAQIHKGLCGQLAAILAAPGLQNYFLQCVAPGAAPHLTPFSAWALRHEYHLQYLALALAQKAAALQPLPATHAALYHGMALALLSRLLPGSEYLTHELLLSCVFRLEFLPCLCPWSVTQCLLKTTWPSFSSTSGPWLLVRSAHVGAPCSMLWLWLMSIASSSLRTHRAQMRSKLPAGVCCRKHGCWQMRVSGSTSCTISFPIPRSQRALSSILSCPLCVSTTSRD

SEQ ID NO: 21161 - protein, 534 aa, Homo sapiens
MAALLRRLLQRERPSAASGRPVGRREANLGTDAGVAVRVRFAPSPTGFLHLGGLRTALYNYIFAKKYQGSFILRLEDTDQTRVVPGAAENIEDMLEWAGIPPDESPRRGGPAGPYQQSQRLELYAQATEALLKTGAAYPCFCSPQRLELLKKEALRNHQTPRYDNRCRNMSQEQVAQKLAKDPKPAIRFRLEQVVPAFQDLVYGWNRHEVASVEGDPVIMKSDGFPTYHLACVVDDHHMGISHVLRGSEWLVSTAKHLLLYQALGWQPPHFAHLPLLLNRDGSKLSKRQGDVFLEHFAADGFLPDSLLDIITNCGSGFAENQMGRTLPELITQFNLTQVTCHSALLDLEKLPEFNRLHLQRLVSNESQRRQLVGKLQVLVEEAFGCQLQNRDVLNPVYVERILLLRQGHICRLQDLVSPVYSYLWTRPAVGRAQLDAISEKVDVIAKRVLGLLERSSMSLTQDMLNGELKKLSEGLEGTKYSNVMKLLRMALSGQQVRQGHGLDCSLEPLIDPLNLHFLAGTELNIEYTKVNET

SEQ ID NO: 21162 - protein, 394 aa, Homo sapiens
MAASSSEISEMKGVEESPKVPGEGPGHSEAETGPPQVLAGVPDQPEAPQPGPNTTAAPVDSGPKAGLAPETTETPAGASETAQATDLSLSPGGESKANCSPEDPCQETVSKPEVSKEATADQGSRLESAAPPEPAPEPAPQPDPRPDSQPTPKPALQPELPTQEDPTPEILSESVGEKQENGAVVPLQAGDGEEGPAPEPHSPPSKKSPPANGAPPRVLQQLVEEDRMRRAHSGHPGSPRGSLSRHPSSQLAGPGVEGGEGTQKPRDYIILAILSCFCPMWPVNIVAFAYAVMSRNSLQQGDVDGAQRLGRVAKLLSIVALVGGVLIIIASCVINLGGEWGLGTGRGGMEGLARAALLTPAPALSCLSSLPLLCLSLSPPPPVCPSLSSPTVYK

SEQ ID NO: 21163 - protein, 412 aa, Homo sapiens
MKLLTRAGSFSRFYSLKVAPKVKATAAPAGAPPQPQDLEFTKLPNGLVIASLENYSPVSRIGLFIKAGSRYEDFSNLGTTHLLRLTSSLTTKGASSFKITRGIEAVGGKLSVTATRENMAYTVECLRGDVDILMEFLLNVTTAPEFRRWEVADLQPQLKIDKAVAFQNPQTHVIENLHAAAYRNALANPLYCPDYRIGKVTSEELHYFVQNHFTSARMALIGLGVSHPVLKQVAEQFLNMRGGLGLSGAKANYRGGEIREQNGDSLVHAAFVAESAVAGSAEANAFSVLQHVLGAGPHVKRGSNTTSHLHQAVAKATQQPFDVSAFNASYSDSGLFGIYTISQATAAGDVIKAAYNQVKTIAQGNLSNTDVQAAKRQRSLFLARSQWQQVEIWDIHLLLMSCNTDAHITGES

SEQ ID NO: 21164 - protein, 606 aa, Homo sapiens
MTSKRKPCQTQLRRSISEQLRDSTARAWDLLWKNVRERRLAEIEAKEACDWLRAAGFPQYAQLYEDSQFPINIVAVKNDHDFLEKDLVEPLCRRLNTLNKCASMKLDVNFQRKKGDDSDEEDLCISNKWTFQRTSRRWSRVDDLYTLLPRGDRNGSPGGTGMRNTTSSESVLTDLSEPEVCSIHSESSGGSDSRSQPGQCCTDNPVMLDAPLVSSSLPQPPRDVLNHPFHPKNEKPTRARAKSFLKRMETLRGKGAHGRHKGSGRTGGLVISGPMLQQEPESFKAMQCIQIPNGDLQNSPPPACRKGLPCSGKSSGESSPSEHSSSGVSTPCLKERKCHEANKRGGMYLEDLDVLAGTALPDAGDQSRMHEFHSQENLVVHIPKDHKPGTFPKALSIESLSPTDSSNGVNWRTGSISLGREQVPGAREPRLMASCHRASRVSIYDNVPGSHLYASTGDLLDLEKDDLFPHLDDILQHVNGLQEVVDDWSKDVLPELQTHDTLVGEPGLSTFPSPNQITLDFEGNSVSEGRTTPSDVERDVTSLNESEPPGVRDRRDSGVGASLTRPNRRLRWNSFQLSHQPRPAPASPHISSQTASQLSLLQRFSL

SEQ ID NO: 21165 - protein, 413 aa, Homo sapiens
MASRSSDKDGDSVHTASEVPLTPRTNSPDGRRSSSDTSKSTYSLTRRISSLESRRPSSPLIDIKPIEFGVLSAKKEPIQPSVLRRTYNPDDYFRKFEPHLYSLDSNSDDVDSLTDEEILSKYQLGMLHFSTQYDLLHNHLTVRVIEARDLPPPISHDGSRQDMAHSNPYVKICLLPDQKNSKQTGVKRKTQKPVFEERYTFEIPFLEAQRRTLLLTVVDFDKFSRHCVIGKVSVPLCEVDLVKGGHWWKALIPSSQNEVELGELLLSLNYLPSAGRLNVDVIRAKQLLQTDVSQGSDPFVKIQLVHGLKLVKTKKTSFLRGTIDPFYNESFSFKVPQEELENASLVFTVFGHNMKSSNDFIGRIVIGQYSSGPSETNHWRRMLNTHRTAVEQWHSLRSRAECDRVSPASLEVT

SEQ ID NO: 21166 - protein, 3551 aa, Homo sapiens
QPSNSAVVSRQRHDDTRVHADIQNDEKERSMSYSDESRLSNLLRRITREDDRDRRLATVKQLKEFIQQPENKLVLVKQLDNILAAVHDVLNESSKLLQELRQEGACCLGLLCASLSYEAEKIFKWIFSKFSSSAKDEVKLLYLCATYKALETVGEKKAFSSVMQLVMTSLQSILENVDTPELLCKCVKCILLVARCYPHIFSTNFRDTVDILVGWHIDHTQKPSLTQQVSGWLQSLEPFWVADLAFSTTLLGQFLEDMEAYAEDLSHVASGESVDEDVPPPSVSLPKLAALLRVFSTVVRSIGERFSPIRGPPITEAYVTDVLYRVMRCVTAANQVFFSEAVLTAANECVGVLLGSLDPSMTIHCDMVITYGLDQLENCQTCGTDYIISVLNLLTLIVEQINTKLPSSFVEKLFIPSSKLLFLRYHKEKEVVAVAHAVYQAVLSLKNIPVLETAYKLILGEMTCALNNLLHSLQLPEACSEIKHEAFKNHVFNVDNAKFVVIFDLSALTTIGNAKNSLIGMWALSPTVFALLSKNLMIVHSDLAVHFPAIQYAVLYTLYSHCTRHDHFISSSLSSSSPSLFDGAVISTVTTATKKHFSIILNLLGILLKKDNLNQDTRKLLMTWALEAAVLMKKSETYAPLFSLPSFHKFCKGLLANTLVEDVNICLQACSSLHALSSSLPDDLLQRCVDVCRVQLVHSGTRIRQAFGKLLKSIPLDVVLSNNNHTEIQEISLALRSHMSKAPSNTFHPQDFSDVISFILYGNSHRTGKDNWLERLFYSCQRLDKRDQSTIPRNLLKTDAVLWQWAIWEAAQFTVLSKLRTPLGRAQDTFQTIEGIIRSLAAHTLNPDQDVSQWTTADNDEGHGNNQLRLVLLLQYLENLEKLMYNAYEGCANALTSPPKVIRTFFYTNRQTCQDWLTRIRLSIMRVGLLAGQPAVTVRHGFDLLTEMKTTSLSQGNELEVTIMMVVEALCELHCPEAIQGIAVWSSSIVGKNLLWINSVAQQAEGRFEKASVEYQEHLCAMTGVDCCISSFDKSVLTLANAGRNSASPKHSLNGESRKTVLSKPTDSSPEVINYLGNKACECYISIADWAAVQEWQNAIHDLKKSTSSTSLNLKADFNYIKSLSSFESGKFVECTEQLELLPGENINLLAGGSKEKIDMKKLLPNMLSPDPRELQKSIEVQLLRSSVCLATALNPIEQDQKWQSITENVVKYLKQTSRIAIGPLRLSTLTVSQSLPVLSTLQLYCSSALENTVSNRLSTEDCLIPLFSEALRSCKQHDVRPWMQALRYTMYQNQLLEKIKEQTVPIRSHLMELGLTAAKFARKRGNVSLATRLLAQCSEVQLGKTTTAQDLVQHFKKLSTQGQVDEKWGPELDIEKTKLLYTAGQSTHAMEMLSSCAISFCKSVKAEYAVAKSILTLAKWIQAEWKEISGQLKQVYRAQHQQNFTGLSTLSKNILTLIELPSVNTMEEEYPRIESESTVHIGVGEPDFILGQLYHLSSVQAPEVAKSWAALASWAYRWGRKVVDNASQGEGVRLLPREKSEVQNLLPDTITEEEKERIYGILGQAVCRPAGIQDEDITLQITESEDNEEDDMVDVIWRQLISSCPWLSELDESATEGVIKVWRKVVDRIFSLYKLSCSAYFTFLKLNAGQIPLDEDDPRLHLSHRVEQSTDDMIVMATLRLLRLLVKHAGELRQYLEHGLETTPTAPWRGIIPQLFSRLNHPEVYVRQSICNLLCRVAQDSPHLILYPAIVGTISLSSESQASGNKFSTAIPTLLGNIQGEELLVSECEGGSPPASQDSNKDEPKSGLNEDQAMMQDCYSKIVDKLSSANPTMVLQVQMLVAELRRVTVLWDELWLGVLLQQHMYVLRRIQQLEDEVKRVQNNNTLRKEEKIAIMREKHTALMKPIVFALEHVRSITAAPAETPHEKWFQDNYGDAIENALEKLKTPLNPAKPGSSWIPFKEIMLSLQQRAQKRASYILRLEEISPWLAAMTNTEIALPGEVSARDTVTIHSVGGTITILPTKTKPKKLLFLGSDGKSYPYLFKGLEDLHLDERIMQFLSIVNTMFATINRQETPRFHARHYSVTPLGTRSGLIQWVDGATPLFGLYKRWQQREAALQAQKAQDSYQTPQNPGIVPRPSELYYSKIGPALKTVGLSLDVSRRDWPLHVMKAVLEELMEATPPNLLAKELWSSCTTPDEWWRVTQSYARSTAVMSMVGYIIGLGDRHLDNVLIDMTTGEVVHIDYNVCFEKGKSLRVPEKVPFRMTQNIETALGVTGVEGVFRLSCEQVLHIMRRGRETLLTLLEAFVYDPLVDWTAGGEAGFAGAVYGGGGQQAESKQSKREMEREITRSLFSSRVAEIKVNWFKNRDEMLVVLPKLDGSLDEYLSLQEQLTDVEKLQGKLLEEIEFLEGAEGVDHPSHTLQHRYSEHTQLQTQQRAVQEAIQVKLNEFEQWITHYQAAFNNLEATQLASLLQEISTQMDLGPPSYVPATAFLQNAGQAHLISQCEQLEGEVGALLQQRRSVLRGCLEQLHHYATVALQYPKAIFQKHRIEQWKTWMEELICNTTVERCQELYRKYEMQYAPQPPPTVCQFITATEMTLQRYAADINSRLIRQVERLKQEAVTVPVCEDQLKEIERCIKVFLHENGEEGSLSLASVIISALCTLTRRNLMMEGAASSAGEQLVDLTSRDGAWFLEELCSMSGNVTCLVQLLKQCHLVPQDLDIPNPMEASETVHLANGVYTSLQELNSNFRQIIFPEALRCLMKGEYTLESMLHELDGLIEQTTDGVPLQTLVESLQAYLRNAAMGLEEETHAHYIDVARLLHAQYGELIQPRNGSVDETPKMSAGQMLLVAFDGMFAQVETAFSLLVEKLNKMEIPIAWRKIDIIREARSTQVNFFDDDNHRQVLEEIFFLKRLQTIKEFFRLCGTFSKTLSGSSSLEDQNTVNGPVQIVNVKTLFRNSCFSEDQMAKPIKAFTADFVRQLLIGLPNQALGLTLCSFISALGVDIIAQVEAKDFGAESKVSVDDLCKKAVEHNIQIGKFSQLVMNRATVLASSYDTAWKKHDLVRRLETSISSCKTSLQRVQLHIAMFQWQHEDLLINRPQAMSVTPPPRSAILTSMKKKLHTLSQIETSIATVQEKLAALESSIEQRLKWAGGANPALAPVLQDFEATIAERRNLVLKESQRASQVTFLCSNIIHFESLRTRTAEALNLDAALFELIKRCQQMCSFASQFNSSVSELELRLLQRVDTGLEHPIGSSEWLLSAHKQLTQDMSTQRAIQTEKEQQIETVCETIQNLVDNIKTVLTGHNRQLGDVKHLLKAMAKDEEAALADGEDVPYENSVRQFLGEYKSWQDNIQTVLFTLVQAMGQVRSQEHVEMLQEITPTLKELKTQSQSIYNNLVSFASPLVTDATNECSSPTSSATYQPSFAAAVRSNTGQKTQPDVMSQNARKLIQKNLATSADTPPSTVPGTGKSVACSPKKAVRDPKTGKAVQERNSYAVSVWKRVKAKLEGRDVDPNRRMSVAEQVDYVIKEATNLDNLAQLYEGWTAWV

SEQ ID NO: 21167 - protein, 948 aa, Homo sapiens
MHNFEEELTCPICYSIFEDPRVLPCSHTFCRNCLENILQASGNFYIWRPLRIPLKCPNCRSITEIAPTGIESLPVNFALRAIIEKYQQEDHPDIVTCPEHYRQPLNVYCLLDKKLVCGHCLTIGQHHGHPIDDLQSAYLKEKDTPQKLLEQLTDTHWTDLTHLIEKLKEQKSHSEKMIQGDKEAVLQYFKELNDTLEQKKKSFLTALCDVGNLINQEYTPQIERMKEIREQQLELMALTISLQEESPLKFLEKVDDVRQHVQILKQRPLPEVQPVEIYPRVSKILKEEWSRTEIGQIKNVLIPKMKISPKRMSCSWPGTPVYSVAWGPDSEKVLYTAGKQLIIKPLQPNAKVLQWKAHDGIILKVDWNSVNDLILSAGEDCKYKVWDSYGRPLYNSQPHEHPITSVAWAPDGELFAVGSFHTLRLCDKTGWSYALEKPNTGSIFNIAWSIDGTQIAGACGNGHVVFAHVVEQHWEWKNFQVTLTKRRAMQVRNVLNDAVDLLEFRDRVIKASLNYAHLVVSTSLQCYVFSTKNWNTPIIFDLKEGTVSLILQAERHFLLVDGSSIYLYSYEGRFISSPKFPGMRTDILNAQTVSLSNDTIAIRDKADEKIIFLFEASTGKPLGDGKFLSHKNEILEIALDQKGLTNDRKIAFIDKNRDLCITSVKRFGKEEQIIKLGTMVHTLAWNDTCNILCGLQDTRFIVWYYPNTVYVDRDILPKTLYERDASEFSKNPHIVSFVGNQVTIRRADGSLVHISITPYPAILHEYVSSSKWEDAVRLCRFVKEQTMWACLAAMAVANRDMTTAEIAYAAIGEIDKVQYINSIKNLPSKESKMAHILLFSGNIQEAEIVLLQAGLVYQAIQININLYNWERALELAVKYKTHVDTVLAYRQKFLETFGKQETNKRYLHYAEGLQIDWEKIKAKIEMEITKEREQSSSSQSSKSIGLKP

SEQ ID NO: 21168 - protein, 428 aa, Homo sapiens
MMLLGQVKYGLHNIQISHLSIASSQVELVEAKSIDVSIQNVSVVFKGTLKYGYTTAWWLGIDQSIDFEIDSAIDLQINTQLTCDSGRVRTDAPDCYLSFHKLLLHLQGEREPGWIKQLFTNFISFTLKLVLKGQICKEINVISNIMADFVQTRAASILSDGDIGVDISLTGDPVITASYLESHHKGHFIYKNVSEDLPLPTFSPTLLGDSRMLYFWFSERVFHSLAKVAFQDGRLMLSLMGDEFKAVLETWGFNTNQEIFQEVVGGFPSQAQVTVHCLKMPKISCQNKGVVVNSSVMVKFLFPRPDQQHSVAYTFEEDIVTTVQASYSKKKLFLSLLDFQITPKTVSNLTESSSESVQSFLQSMITAVGIPEVMSRLEVVFTALMNSKGVSLFDIINPEIITRDGFLLLQMDFGFPEHLLVDFLQSLS

SEQ ID NO: 21169 - protein, 613 aa, Homo sapiens
MHVKKYLLKGLHRLQKGPGYTYKELLVWYCDNTNTHGPKRIICEGPKKKAMWFLLTLLFAALVCWQWGIFIRTYLSWEVSVSLSVGFKTMDFPAVTICNASPFKYSKIKHLLKDLDELMEAVLERILAPELSHANATRNLNFSIWNHTPLVLIDERNPHHPMVLDLFGDNHNGLTSSSASEKICNAHGCKMAMRLATNIFAQVPQQELVEMSYPGEQMILACLFGAEPCNYRNFTSIFYPHYGNCYIFNWGMTEKALPSANPGTEFGLKLILDIGQEDYVPFLASTAGVRLMLHEQRSYPFIRDEGIYAMSGTETSIGVLVDKLQRMGEPYSPCTVNGSEVPVQNFYSDYNTTYSIQACLRSCFQDHMIRNCNCGHYLYPLPRGEKYCNNRDFPDWAHCYSDLQMSVAQRETCIGMCKESCNDTQYKMTISMADWPSEASEDWIFHVLSQERDQSTNITLSRKGIVKLNIYFQEFNYRTIEESAANNIVWLLSNLGGQFGFWMGGSVLCLIEFGEIIIDFVWITIIKLVALAKSLRQRRAQASYAGPPPTVAELVEAHTNFGFQPDTAPRSPNTGPYPSEQALPIPGTPPPNYDSLRLQPLDVIESDSEGDAI

SEQ ID NO: 21170 - protein, 1682 aa, Homo sapiens
MASWTSPWWVLIGMVFMHSPLPQTTAEKSPGAYFLPEFALSPQGSFLEDTTGEQFLTYRYDDQTSRNTRSDEDKDGNWDAWGDWSDCSRTCGGGASYSLRRCLTGRNCEGQNIRYKTCSNHDCPPDAEDFRAQQCSAYNDVQYQGHYYEWLPRYNDPAAPCALKCHAQGQNLVVELAPKVLDGTRCNTDSLDMCISGICQAVGCDRQLGSNAKEDNCGVCAGDGSTCRLVRGQSKSHVSPEKREENVIAVPLGSRSVRITVKGPAHLFIESKTLQGSKGEHSFNSPGVFLVENTTVEFQRGSERQTFKIPGPLMADFIFKTRYTAAKDSVVQFFFYQPISHQWRQTDFFPCTVTCGGGYQLNSAECVDIRLKRVVPDHYCHYYPENVKPKPKLKECSMDPCPSSDGFKEIMPYDHFQPLPRWEHNPWTACSVSCGGGIQRRSFVCVEESMHGEILQVEEWKCMYAPKPKVMQTCNLFDCPKWIAMEWSQCTVTCGRGLRYRVVLCINHRGEHVGGCNPQLKLHIKEECVIPIPCYKPKEKSPVEAKLPWLKQAQELEETRIATEEPTFIPEPWSACSTTCGPGVQVREVKCRVLLTFTQTETELPEEECEGPKLPTERPCLLEACDESPASRELDIPLPEDSETTYDWEYAGFTPCTATCVGGHQEAIAVCLHIQTQQTVNDSLCDMVHRPPAMSQACNTEPCPPRWHVGSWGPCSATCGVGIQTRDVYCLHPGETPAPPEECRDEKPHALQACNQFDCPPGWHIEEWQQCSRTCGGGTQNRRVTCRQLLTDGSFLNLSDELCQGPKASSHKSCARTDCPPHLAVGDWSKCSVSCGVGIQRRKQVCQRLAAKGRRIPLSEMMCRDLPGLPLVRSCQMPECSKIKSEMKTKLGEQGPQILSVQRVYIQTREEKRINLTIGSRAYLLPNTSVIIKCPVRRFQKSLIQWEKDGRCLQNSKRLGITKSGSLKIHGLAAPDIGVYRCIAGSAQETVVLKLIGTDNRLIARPALREPMREYPGMDHSEANSLGVTWHKMRQMWNNKNDLYLDDDHISNQPFLRALLGHCSNSAGSTNSWELKNKQFEAAVKQGAYSMDTAQFDELIRNMSQLMETGEVSDDLASQLIYQLVAELAKAQPTHMQWRGIQEETPPAAQLRGETGSVSQSSHAKNSGKLTFKPKGPVLMRQSQPPSISFNKTINSRIGNTVYITKRTEVINILCDLITPSEATYTWTKDGTLLQPSVKIILDGTGKIQIQNPTRKEQGIYECSVANHLGSDVESSSVLYAEAPVILSVERNITKPEHNHLSVVVGGIVEAALGANVTIRCPVKGVPQPNITWLKRGGSLSGNVSLLFNGSLLLQNVSLENEGTYVCIATNALGKAVATSVLHLLERRWPESRIVFLQGHKKYILQATNTRTNSNDPTGEPPPQEPFWEPGNWSHCSATCGHLGARIQRPQCVMANGQEVSEALCDHLQKPLAGFEPCNIRDCPARWFTSVWSQCSVSCGEGYHSRQVTCKRTKANGTVQVVSPRACAPKDRPLGRKPCFGHPCVQWEPGNRCPGRCMGRAVRMQQRHTACQHNSSDSNCDDRKRPTLRRNCTSGACDVCWHTGPWKPCTAACGRGFQSRKVDCIHTRSCKPVAKRHCVQKKKPISWRHCLGPSCDSTYTSQTATNKGAASHVKRDKPLEGS

SEQ ID NO: 21171 - protein, 139 aa, Homo sapiens
MPAPIRLRELIRTIRTARTQAEEREMIQKECAAIRSSFREEDNTYRCRNVAKLLYMHMLGYPAHFGQLECLKLIASQKFTDKRIGYLGAMLLLDERQDVHLLMTNCIKNDLNHSTQFVQGLALCTLGCMGSSEMCRDLA

SEQ ID NO: 21172 - protein, 285 aa, Homo sapiens
MALVASVRVPARVLLRAGARLPGAALGRTERAAGGGDGARRFGSQRVLVEPDAGAGVAVMKFKNPPVNSLSLEFLTELVISLEKLENDKSFRGVILTSDRPGVFSAGLDLTEMCGRSPAHYAGYWKAVQELWLRLYQSNLVLVSAINGACPAGGCLVALTCDYRILADNPRLKDTLENTIGHRAAERALQLGLLFPPAEALQVGIVDQVVPEEQVQSTALSAIAQWMAIPDHARQLTKAMMRKATASRLVTQRDADVQNFVSFISKDSIQKSLQMYLERLKEEKG

SEQ ID NO: 21173 - protein, 515 aa, Homo sapiens
MWWQHAKGVPVPQGVMASMLLAQRLACSFQHSYRLLVPGSRHISQAAAKVDVEFDYDGPLMKTEVPGPRSQELMKQLNIIQNAEAVHFFCNYEESRGNYLVDVDGNRMLDLYSQISSVPIGYSHPALLKLIQQPQNASMFVNRPALGILPPENFVEKLRQSLLSVAPKGMSQLITMACGSCSNENALKTIFMWYRSKERGQRGFSQEELETCMINQAPGCPDYSILSFMGAFHGRTMGCLATTHSKAIHKIDIPSFDWPIAPFPRLKYPLEEFVKENQQEEARCLEEVEDLIVKYRKKKKTVAGIIVEPIQSEGGDNHASDDFFRKLRDIARKHGCAFLVDEVQTGGGCTGKFWAHEHWGLDDPADVMTFSKKMMTGGFFHKEEFRPNAPYRIFNTWLGDPSKNLLLAEVINIIKREDLLNNAAHAGKALLTGLLDLQARYPQFISRVRGRGTFCSFDTPDDSIRNKLILIARNKGVVLGGCGDKSIRFRPTLVFRDHHAHLFLNIFSDILADFK

SEQ ID NO: 21174 - protein, 398 aa, Homo sapiens
MGPRGAASLPRGPGPRRLLLPVVLPLLLLLLLAPPGSGAGASRPPHLVFLLADDLGWNDVGFHGSRIRTPHLDALAAGGVLLDNYYTQPLCTPSRSQLLTGRYQIRTGLQHQIIWPCQPSCVPLDEKLLPQLLKEAGYTTHMVGKWHLGMYRKECLPTRRGFDTYFGYLLGSEDYYSHERCTLIDALNVTRCALDFRDGEEVATGYKNMYSTNIFTKRAIALITNHPPEKPLFLYLALQSVHEPLQVPEEYLKPYDFIQDKNRHHYAGMVSLMDEAVGNVTAALKSSGLWNNTVFIFSTDNGGQTLAGGNNWPLRGRKWSLWEGGVRGVGFVASPLLKQKGVKNRELIHISDWLPTLVKLARGHTNGTKPLDGFDVWKTIRYLHPALFPPRTETPRAA

SEQ ID NO: 21175 - protein, 683 aa, Homo sapiens
MRLWKAVVVTLAFMSVDICVTTAIYVFSHLDRSLLEDIRHFNIFDSVLDLWAACLYRSCLLLGATIGVAKNSALGPRRLRASWLVITLVCLFVGIYAMVKLLLFSEVRRPIRDPWFWALFVWTYISLGASFLLWWLLSTVRPGTQALEPGAATEAEGFPGSGRPPPEQASGATLQKLLSYTKPDVAFLVAASFFLIVAALGETFLPYYTGRAIDGIVIQKSMDQFSTAVVIVCLLAIGSSFAAGIRGGIFTLIFARLNIRLRNCLFRSLVSQETSFFDENRTGDLISRLTSDTTMVSDLVSQNINVFLRNTVKVTGVVVFMFSLSWQLSLVTFMGFPIIMMVSNIYGKYYKRLSKEVQNALARASNTAEETISAMKTVRSFANEEEEAEVYLRKLQQVYKLNRKEAAAYMYYVWGSGLTLLVVQVSILYYGGHLVISGQMTSGNLIAFIIYEFVLGDCMESVGSVYSGLMQGVGAAEKVFEFIDRQPTMVHDGSLAPDHLEGRVDFENVTFTYRTRPHTQVLQNVSFSLSPGKVTALVGPSGSGKSSCVNILENFYPLEGGRVLLDGKPISAYDHKYLHRVISLVSQEPVLFARSITDNISYGLPTVPFEMVVEAAQKANAHGFIMELQDGYSTETGEKGAQLSGGQKQRVAMARALVRNPPVLILDEATSALDAESEYLCAG

SEQ ID NO: 21176 - protein, 1059 aa, Homo sapiens
LDDRRPITLCVCVRARVCDLEPDDCASIYIFNVDPPPSTLTTPLCLPHHGLPSHSSVLSPSFQLQSHKNYEGTCEIPESKYSPLGGPKPFECPSIQITSISPNCHQELDAHEDDLQINDPEREFLERPSRDHLYLPLEPSYRESSLSPSPASSISSRSWFSDASSCESLSHIYDDVDSELNEAAARFTLGSPLTSPGGSPGGCPGEETWHQQYGLGHSLSPRQSPCHSPRSSVTDENWLSPRPASGPSSRPTSPCGKRRHSSAEVCYAGSLSPHHSPVPSPGHSPRGSVTEDTWLNASVHGGSGLGPAVFPFQYCVETDIPLKTRKTSEDQAAILPGKLELCSDDQGSLSPARETSIDDGLGSQYPLKKDSCGDQFLSVPSPFTWSKPKPGHTPIFRTSSLPPLDWPLPAHFGQCELKIEVQPKTHHRAHYETEGSRGAVKASTGGHPVVKLLGYNEKPINLQMFIGTADDRYLRPHAFYQVHRITGKTVATASQEIIIASTKVLEIPLLPENNMSASIDCAGILKLRNSDIELRKGETDIGRKNTRVRLVFRVHIPQPSGKVLSLQIASIPVECSQRSAQELPHIEKYSINSCSVNGGHEMVVTGSNFLPESKIIFLEKGQDGRPQWEVEGKIIREKCQGAHIVLEVPPYHNPAVTAAVQVHFYLCNGKRKKSQSQRFTYTPVLMKQEHREEIDLSSVPSLPVPHPAQTQRPSSDSGCSHDSVLSGQRSLICSIPQTYASMVTSSHLPQLQCRDESVSKEQHMIPSPIVHQPFQVTPTPPVGSSYQPMQTNVVYNGPTCLPINAASSQEFDSVLFQQDATLSGLVNLGCQPLSSIPFHSSNSGSTGHLLAHTPHSVHTLPHLQSMGYHCSNTGQRSLSSPVADQITGQPSSQLQPITYGPSHSGSATTASPAASHPLASSPLSGPPSPQLQPMPYQSPSSGTASSPSPATRMHSGQHSTQAQSTGQGGLSAPSSLICHSLCDPASFPPDGATVSIKPEPEDREPNFATIGLQDITLDDVNEIIGRDMSQISVSQGAGVSRQAPLPSPESLDLGRSDGL

SEQ ID NO: 21177 - protein, 220 aa, Homo sapiens
MVISFYYGGKLVGQATTTCPEGCRLSLSQPGLPGTKLYGPEGLELVRFPPADAIPSERQRQVTRKLFGHLERGVLLHSSRQGVFVKRLCQGRVFCSGNAVVCKGRPNKLERDEVVQVFDTSQFFRELQQFYNSQGRLPDGRVVLCFGEEFPDMAPLRSKLILVQIEQLYVRQLAEEAGKSCGAGSVMQAPEEPPPDQVFRMFPDICASHQRSFFRENQQI

SEQ ID NO: 21178 - protein, 125 aa, Homo sapiens
MSEKKQRKKVESESKQEKANRIISEAIAKAKERGERNIPRVMSPENFPTASVEGKEEKKGRRMKSKPKDKDSKKTKTCSKLKEKTKIGKLIITLGKKQKRKNESSDEISDAEQMPQHTLKDQDSQ

SEQ ID NO: 21179 - protein, 167 aa, Homo sapiens
MERTAGKELALAPLQDWGEETEDGAVYSVSLRRQRSQRRSPAEGPGGSQAPSPIANTFLHYRTSKVRVLRAARLERLVGELVFGDREQDPSFMPAFLATYRTFVPTACLLGFLLPPMPPPPPPGVEIKKTAVQDLSFNKNLRTTLRISETTLPIRTWAVSEPFWAGR

SEQ ID NO: 21180 - protein, 62 aa, Homo sapiens
MPGEQQAEEEEEEEMQEEMVLLVKGEEDEGEEKYEVVKLKIPMDNKERHDLALSPRLECSGT

SEQ ID NO: 21181 - protein, 281 aa, Homo sapiens
MELIQDTSRPPLEYVKGVPLIKYFAEALGPLQSFQARPDDLLISTYPKSGTTWVSQILDMIYQGGDLEKCHRAPIFMRVPFLEFKAPGIPSGMETLKDTPAPRLLKTHLPLALLPQTLLDQKVKVVYVARNAKDVAVSYYHFYHMAKVHPEPGTWDSFLEKFMVGEVSYGSWYQHVQEWWELSRTHPVLYLFYEDMKENPKREIQKILEFVGRSLPEETVDFVVQHTSFKEMKKNPMTNYTTVPQEFMDHSISPFMRKGMAGDWKTTFTVAQNERFDADYA

SEQ ID NO: 21182 - protein, 266 aa, Homo sapiens
MGARTPRPGAGLRDQQMAPSAAPQAPEAFTLKEKGHLLRLPAAFRKAASQNSSLWAQLSSTQTSDSTDAAAAKTQFLQNMQTASGGPQPRLSAVEVEAEAGRLRKACSLLRLRMREELSAAPMDWMQEYRCLLTLEGLQAMVGQCLHRLQELRAAVAEQPPRPCPVGRPPGASPSCGGRAEPAWSPQLLVYSSTQELQTLAALKLRVAVLDQQIHLEKVLMAELLPLVSAAQPQGPPWLALCRAVHSLLCEGGARVLTILRDEPAV

SEQ ID NO: 21183 - protein, 813 aa, Homo sapiens
MSGSQNNDKRQFLLERLLDAVKQCQIRFGGRKEIASDSDSRVTCLCAQFEAVLQHGLKRSRGLALTAAAIKQAAGFASKTETEPVFWYYVKEVLNKHELQRFYSLRHIASDVGRGRAWLRCALNEHSLERYLHMLLADRCRLSTFYEDWSFVMDEERSSMLPTMAAGLNSILFAINIDNKDLNGQSKFAPTVSDLLKESTQNVTSLLKESTQGVSSLFREITASSAVSILIKPEQETDPLPVVSRNVSADAKCKKERKKKKKVTNIISFDDEEDEQNSGDVFKKTPGAGESSEDNSDRSSVNIMSAFESPFGPNSNGSQSSNSWKIDSLSLNGEFGYQKLDVKSIDDEDVDENEDDVYGNSSGRKHRGHSESPEKPLEGNTCLSQMHSWAPLKVLHNDSDILFPVSGVGSYSPADAPLGSLENGTGPEDHVLPDPGLRYSVEASSPGHGSPLSSLLPSASVPESMTISELRQATVAMMNRKDELEEENRSLRNLLDGEMEHSAALRQEVDTLKRKVAEQEERQGMKVQALARENEVLKVQLKKYVGAVQMLKREGQTAEVPNLWSVDGEVTVAEQKPGEIAEELASSYERKLIEVAEMHGELIEFNERLHRALVAKEALVSQMRQELIDLRGPVPGDLSQTSEDQSLSDFEISNRALINVWIPSVFLRGKAANAFHVYQVYIRIKDDEWNIYRRYTEFRSLHHKLQNKYPQVRAYNFPPKKAIGNKDAKFVEERRKQLQNYLRSVMNKVIQMVPEFAASPKKETLIQLMPFFVDITPPGEPVNSRPKAASRFPKLSRGQPRETRNVEPQSGDL

SEQ ID NO: 21184 - protein, 771 aa, Homo sapiens
MSSGLWSQEKVTSPYWEERIFYLLLQECSVTDKQTQKLLKVPKGSIGQYIQDRSVGHSRIPSAKGKKNQIGLKILEQPHAVLFVDEKDVVEINEKFTELLLAITNCEERFSLFKNRNRLSKGLQIDVGCPVKVQLRSGEEKFPGVVRFRGPLLAERTVSGIFFGVELLEEGRGQGFTDGVYQGKQLFQCDEDCGVFVALDKLELIEDDDTALESDYAGPGDTMQVELPPLEINSRVSLKVGETIESGTVIFCDVLPGKESLGYFVGVDMDNPIGNWDGRFDGVQLCSFACVESTILLHINDIIPESVTQERRPPKLAFMSRGVGDKGSSSHNKPKATGSTSDPGNRNRSELFYTLNGSSVDSQPQSKSKNTWYIDEAFGGYLSEVVEENTPPKMEKEGLEIMIGKKKGIQGHYNSCYLDSTLFCLFAFSSVLDTVLLRPKEKNDVEYYSETQELLRTEIVNPLRIYGYVCATKIMKLRKILEKVEAASGFTSEEKDPEEFLNILFHHILRVEPLLKIRSAGQKVQDCYFYQIFMEKNEKVGVPTIQQLLEWSFINSNLKFAEAPSCLIIQMPRFGKDFKLFKKIFPSLELNITDLLEDTPRQCRICGGLAMYECRECYDDPDISAGKIKQFCKTCNTQVHLHPKRLNHKYNPVSLPKDLPDWDWRHGCIPCQNMELFAVLCIETSHYVAFVKYGKDDSAWLFFDSMADRDGGQNGFNIPQVTPCPEVGEYLKMSLEDLHSLDSRRIQGCARRLLCDAYMCMYQSPTMSLYK

SEQ ID NO: 21185 - protein, 175 aa, Homo sapiens
MQPRTPLVLCVLLSQVLLLTSAEDLDCTPGFQQKVFHINQPAEFIEDQSILNLTFSDCKGNDKLRYEVSSPYFKVNSDGGLVALRNITAVGKTLFVHARTPHAEDMAELVIVGGKDIQGSLQDIFKFARTSPVPRQKRSIVVSPILIPENQRQPFPRDVGKMKIWQVLCLARWLT

SEQ ID NO: 21186 - protein, 845 aa, Homo sapiens
FEVLWSDSSITSVTKSSSEVTEFISKLCQLYPEENLEKLIPCLAGPDAFYVERNHVDLDSGLRYLASLPSHVLKNDHVRRFLSTSSPPQQLQSPSPGNPSLSKVGTVMGVSGRPVCGVAGIPSSQSGAQHHGQHPAGSAAPLPHCSHAGSAGSALAYRTQMDTSPAILMPSSLQTPQTQEQNGILDWLRKLRLHKYYPVFKQLSMEKFLSLTEEDLNKFESLTMGAKKKLKTQLELEKEKSERRCLNPSAPPLVTSSGVARVPPTSHVGPVQSGRGSHAAELRVEVEQPHHQLPREGSSSEYSSSSSSPMGVQAREESSDSAEENDRRVEIHLESSDKEKPVMLLNHFTSSSARPTAQVLPVQNEASSNPSGHHPLPPQMLSAASHITPIRMLNSVHKPERGSADMKLLSSSVHSLLSLEERNKGSGPRSSMKVDKSFGSAMMDVLPASAPHQPVQVLSGLSESSSMSPTVSFGPRTKVVHASTLDRVLKTAQQPALVVETSTAATGTPSTVLHAARPPIKLLLSSSVPADSAISGQTSCPNNVQISVPPAIINPRTALYTANTKVAFSAMSSMPVGPLQGGFCANSNTASPSSHPSTSFANMATLPSCPAPSSSPALSSVPESSFYSSSGGGGSTGNIPASNPNHHHHHHHQQPPAPPQPAPPPPGCIVCTSCGCSGSCGSSGLTVSYANYFQHPFSGPSVFTFPFLPFSPMCSSGYVSAQQYGGGSTFPVVHAPYSSSGTPDPVLSGQSTFAVPPMQNFMAGTAGVYQTQGLVGSSNGSSHKKSGNLSCYNCGATGHRAQDCKQPSMDFNRPGKRAPWPRPPGSRRTSAHKCLVFMKSKLLSL

SEQ ID NO: 21187 - protein, 3953 aa, Homo sapiens
MPGERPRGAPPPTMTGDLQPRQVASSPGHPSQPPLEDNTPATRTTKGAREAGGQAQAMELPEAQPRQARDGELKPPSLRGQAPSSTPGKRGSPQTPPGRSPLQAPSRLAGRAEGSPPQRYILGIASSRTKPTLDETPENPQLEAAQLPEVDTPQGPGTGAPLRPGLPRTEAQPAAEELGFHRCFQEPPSSFTSTNYTSPSATPRPPAPGPPQSRGTSPLQPGSYPEYQASGADSWPPAAENSFPGANFGVPPAEPEPIPKGSRPGGSPRGVSFQFPFPALHGASTKPFPADVAGHAFTNGPLVFAFHQPQGAWPEEAVGTGPAYPLPTQPAPSPLPCYQGQPGGLNRHSDLSGALSSPGAAHSAPRPFSDSLHKSLTKILPERPPSAQDGLGSTRGPPSSLPQRHFPGQAYRASGVDTSPGPPDTELAAPGPPPARLPQLWDPTAAPYPTPPGGPLAATRSMFFNGQPSPGQRLCLPQSAPLPWPQVLPTARPSPHGMEMLSRLPFPAGGPEWQGGSQGALGTAGKTPGPREKLPAVRSSQGGSPALFTYNGMTDPGAQPLFFGVAQPQVSPHGTPSLPPPRVVGASPSESPLPSPATNTAGSTCSSLSPMSSSPANPSSEESQLPGPLGPSAFFHPPTHPQETGSPFPSPEPPHSLPTHYQPEPAKAFPFPADGLGAEGAFQCLEETPFPHEGPEVGRGGLQGFPRAPPPYPTHHFSLSSASLDQLDVLLTCRQCDRNYSSLAAFLAHRQFCGLLLARAKDGHQRSPGPPGLPSPPAAPRVPADAHAGLLSHAKTFLLAGDAQAEGKDDPLRTGFLPSLAATPFPLPASDLDMEDDAKLDSLITEALNGMEYQSDNPEIDSSFIDVFADEEPSGPRGPSSGHPLKSKAGVTPESKAPPPLPAATPDPQTPRPGDRGCPARGRPKTRSLGLAPTEADAPSQGRQQRRGKQLKLFRKDLDSGGAAEGSGSGGGGRASGLRPRRNDGLGERPPPRPRRPRTQAPGSRADPAPRVPRAAALPEETRSSRRRRLPPRKDPRKRKARGGAWGKELILKIVQQKNRRHRRLGRRAGRCGSLAAGRPRPGAEDRRLREYDFASESEEDEQPPPRGPGFRGRRGRGEKRKEVELTQGPREDEPQKPRKAARQEAGGDGAPANPEEPGGSRPGPGRSPQARGPSRSLETGAAAREGGPKCADRPSVAPKDPLQVPTNTETSEETRPSLDFPQEAKEPETAEESAPDSTEFTEALRSPPAACAGEMGASPGLLIPEQPPPSRHDTGTPKPSGSLANTAPHGSSPTPGVGSLLGGPGGTQAPVSHNSKDPPARQPGEFLAPVANPSSTACPKPSVLSSKISSFGCDPAGFNRDPLGVPVAKKGPQPYSSPHSELFLGPKDLAGCFLEELHPKPSARDAPPASSSCLCQDGEDAGSLEPQLPRSPPGTAETEPGRAASPPTLESSSLFPDLPVDRFDPPLYGSLSANRDSGLPFACADPPQKTVPSDPPYPSFLLLEEVSPMLPSHFPDLSGGKVLSKTCPPERTVVPGAAPSLPGKGSGCSVALMSHLSEDELEIQKLVTELESQLQRSKDTRGAPRELAEAESVGRVELGTGTEPPSQRRTCQATVPHEDTFSAADLTRVGESTAHREGAESAVATVEAVQGRPGGTWPCPASFHPGHAALLPCAQEDLVSGAPFSPRGANFHFQPVQKAGASKTGLCQAEGDSRPPQDVCLPEPSKQPGPQLDAGSLAKCSPDQELSFPKNKEAASSQESEDSLRLLPCEQRGGFLPEPGTADQPHRGAPAPEAFGSPAVHLAPDLAFQGDGAPPLDATWPFGASPSHAAQGHSAGRAGGHLHPTAGRPGFEGNEFAPAGASSLTAPRGREAWLVPVPSPACVSNTHPSRRSQDPALSPPIRQLQLPGPGVAKSKDGILGLQELTPAAQSPPRVNPSGLEGGTVEGGKVACGPAQGSPGGVQVTTLPAVAGHQLGLEADGHWGLLGQAEKTQGQGTANQLQPENGVSPGGTDNHASVNASPKTALTGPTEGAVLLEKCKGSRAAMSLQEEAEPTPSPPSPNRESLALALTAAHSRSGSEGRTPERASSPGLNKPLLATGDSPAPSVGDLAACAPSPTSAAHMPCSLGPLPREDPLTSPSRAQGGLGGQLPASPSCRDPPGPQQLLACSPAWAPLEEADGVQATTDTGAEDSPVAPPSLTTSPCDPKEALAGCLLQGEGSPLEDPSSWPPGSVSAVTCTHSGDTPKDSTLRIPEDSRKEKLWESPGRATSPPLAGAVSPSVAVRATGLSSTPTGDEAQAGRGLPGPDPQSRGAPPHTNPDRMPRGHSSYSPSNTARLGHREGQAVTAVPTEPPTLQGAGPDSPACLEGEMGTSSKEPEDPGTPETGRSGATKMPRVTCPSTGLGLGRTTAPSSTASDFQSDSPQSHRNASHQTPQGDPLGPQDLKQRSRGYKKKPASTENGQWKGQAPHGPVTCEVCAASFRSGPGLSRHKARKHRPHPGAPAEPSPAALPAQQPLEPLAQKCQPPRKKSHRVSGKERPNHSRGDPSHVTQPPPAQGSKEVLRAPGSPHSQQLHPPSPTEHEVDVKTPASKPRPDQAREDELHPKQAEKREGRRWRREPTVDSPSHSEGKSNKKRGKLRGRRLREESILPVSADVISDGRGSRPSPAMASYAASPSHCLSVEGGPEADGEQPPRLATLGPGVMEGAAETDQEALCAGETGAQKPPGDRMLCPGRMDGAALGEQPTGQKGASARGFWGPRETKALGVCKESGSEPAEDSSRAHSRSEEGVWEENTPPLGPLGFPETSSSPADSTTSSCLQGLPDNPDTQGGVQGPEGPTPDASGSSAKDPPSLFDDEVSFSQLFPPGGRLTRKRNPHVYGKRCEKPVLPLPTQPSFEEGGDPTLGPARLPTDLSDSSSLCLCHEDPWEDEDPAGLPESFLLDGFLNSRVPGIDPWAPGLSLWALEPSREAGAEKLPSHCPEDDRPEAIPELHMVPAAWRGLEMPAPADDSSSSLGDVSPEPPSLERERCDGGLPGNTHLLPLRATDFEVLSTKFEMQDLCFLGPFEDPVGLPGPSFLDFEGTASSQGPQSRRTEEAAGAGRAQGRGRPAKGRRASYKCKVCFQRFRSLGELDLHKLAHTPAPPPTCYMCVERRFGSRELLRGHLQERHAQSKAGPWACGMCLKEVADVWMYNEHLREHAVRFARRGQARRSLGDLPGGLEGSSAVAHLLNSITEPAPKHHRGKRSAGKAAGSPGDPWGQEGEAKKDSPGERAKPRARSTPSNPDGAATPDSASATALADAGSPGPPRTTPSPSPDPWAGGEPLLQATPVHEACKDPSRDCHHCGKRFPKPFKLQRHLAVHSPQRVYLCPRCPRVYPEHGELLAHLGGAHGLLERPELQHTPLYACELCATVMRIIKKSFACSSCNYTFAKKEQFDRHMNKHLRGGRQPFAFRGVRRPGAPGQKARALEGTLPSKRRRVAMPGSAPGPGEDRPPPRGSSPILSEGSLPALLHLCSEVAPSTTKGWPETLERPVDPVTHPIRGCELPSNHQECPPPSLSPFPAALADGRGDCALDGALERPENEASPGSPGPLLQQALPLGASLPRPGARGQDAEGKRAPLVFSGKRRAPGARGRCAPDHFQEDHLLQKEKEVSSSHMVSEGGPRGAFHKGSATKPAGCQSSSKDRSAASTPSKALKFPVHPRKAVGSLAPGELARGTENGMKPATPKAKPGPSSQGSGSPRPGTKTGGGSQPQPASGQLQSETATTPAKPSFPSRSPAPERLPARAQAKSCTKGPREAGEQGPHGSLGPKEKGESSTKRKKGQVPGPARSESVGSFGRAPSAPDKPPRTPRKQATPSRVLPTKPKPNSQNKPRPPPSEQRKAEPGHTQRKDRLGKAFPQGRPLLRPPKRGTAVHGAEPAEPHTHRTAEAQSDLLSQLFGQRLTGFKIPLKKDASE

SEQ ID NO: 21188 - protein, 767 aa, Homo sapiens
MMASFQRSNSHDKVRRIVAEEGRTARNLIAWSVPLESKDDDGKPKCQTGGKSKRTIQGTHKTTKQSTAVDCKITSSTTGDKHFDKSPTKTRHPRKIDLRARYWAFLFDNLRRAVDEIYVTCESDQSVVECKEVLMMLDNYVRDFKALIDWIQLQEKLEKTDAQSRPTSLAWEVKKMSPGRHVIPSPSTDRINVTSNARRSLNFGGSTGTVPAPRLAPTGVSWADKVKAHHTGSTASSEITPAQSCPPMTVQKASRKNERKDAEGWETVQRGRPIRSRSTAVMPKVSLATEATRSKDDSDKENVCLLPDESIQKGQFVGDGTSNTIESHPKDSLHSCDHPLAEKTQFTVSTLDDVKNSGSIRDNYVRTSEISAVHIDTECVSVMLQAGTPPLQVNEEKFPAEKARIENEMDPSDISNVSAANLSMAEVLAKKEELADRLEKANEEAIASAIAEEEQLTREIEAEENNDINIETDNDSDFSASMGSGSVSFCGMSMDWNDVLADYEARESWRQNTSWGDIVEEEPARPPGHGIHMHEKLSSPSRKRTIAESKKKHEEKQMKAQQLREKLREEKTLKLQKLLEREKDVRKWKEELLDQRRRMMEEKLLHAEFKREVQLQAIVKKAQEEEAKVNEIAFINTLEAQNKRHDVLSKLKEYEQRLNELQEERQRRQEEKQARDEAVQERKRALEAERQARVEELLMKRKEQEARIEQQRQEKEKAREDAARERARDREERLAALTAAQQEAMEELQKKIQLKHDESIRRHMEQI

SEQ ID NO: 21189 - protein, 90 aa, Homo sapiens
MKDSCITVMAMALLSGFFFFERPNGKLYPQALGRAFRALGGPGVAPSIFPEVNALEGKRRVRVAWGATSGWAWDRPPAGHVQGRGSLGRS

SEQ ID NO: 21190 - protein, 509 aa, Homo sapiens
MSENEEEEISQQEGSGDYEVEEIPFGLEPQSPGFEPQSPEFEPQSPRFEPESPGFESRSPGLVPPSPEFAPRSPESDSQSPEFESQSPRYEPQSPGYEPRSPGYEPRSPGYESESSRYESQNTELKTQSPEFEAQSSKFQEGAEMLLNPEEKSPLNISVGVHPLDSFTQGFGEQPTGDLPIGPPFEMPTGALLSTPQFEMLQNPLGLTGALRGPGRRGGRARGGQGPRPNICGICGKSFGRGSTLIQHQRIHTGEKPYKCEVCSKAFSQSSDLIKHQRTHTGERPYKCPRCGKAFADSSYLLRHQRTHSGQKPYKCPHCGKAFGDSSYLLRHQRTHSHERPYSCTECGKCYSQNSSLRSHQRVHTGQRPFSCGICGKSFSQRSALIPHARSHAREKPFKCPECGKRFGQSSVLAIHARTHLPGRTYSCPDCGKTFNRSSTLIQHQRSHTGERPYRCAVCGKGFCRSSTLLQHHRVHSGERPYKCDDCGKAFSQSSDLIRHQRTHAAGRR

SEQ ID NO: 21191 - protein, 1253 aa, Homo sapiens
MSGPTDETAGDLPVKDTGLNLFGMGGLQETSTTRTMKSRQAVSRVSREELEDRFLRLHDENILLKQHARKQEDKIKRMATKLIRLVNDKKRYERVGGGPKRLGRDVEMEEMIEQLQEKVHELEKQNETLKNRLISAKQQLQTQGYRQTPYNNVQSRINTGRRKANENAGLQECPRKGIKFQDADVAETPHPMFTKYGNSLLEEARGEIRNLENVIQSQRGQIEELEHLAEILKTQLRRKENEIELSLLQLREQQATDQRSNIRDNVEMIKLHKQLVEKSNALSAMEGKFIQLQEKQRTLRISHDALMANGDELNMQLKEQRLKCCSLEKQLHSMKFSERRIEELQDRINDLEKERELLKENYDKLYDSAFSAAHEEQWKLKEQQLKVQIAQLETALKSDLTDKTEILDRLKTERDQNEKLVQENRELQLQYLEQKQQLDELKKRIKLYNQENDINADELSEALLLIKAQKEQKNGDLSFLVKVDSEINKDLERSMRELQATHAETVQELEKTRNMLIMQHKINKDYQMEVEAVTRKMENLQQDYELKVEQYVHLLDIRAARIHKLEAQLKDIAYGTKQYKFKPEIMPDDSVDEFDETIHLERGENLFEIHINKVTFSSEVLQASGDKEPVTFCTYAFYDFELQTTPVVRGLHPEYNFTSQYLVHVNDLFLQYIQKNTITLEVHQAYSTEYETIAACQLKFHEILEKSGRIFCTASLIGTKGDIPNFGTVEYWFRLRVPMDQAIRLYRERAKALGYITSNFKGPEHMQSLSQQAPKTAQLSSTDSTDGNLNELHITIRCCNHLQSRASHLQPHPYVVYKFFDFADHDTAIIPSSNDPQFDDHMYFPVPMNMDLDRYLKSESLSFYVFDDSDTQENIYIGKVNVPLISLAHDRCISGIFELTDHQKHPAGTIHVILKWKFAYLPPSGSITTEDLGNFIRSEEPEVVQRLPPASSVSTLVLAPRPKPRQRLTPVDKKVSFVDIMPHQSDETSPPPEDRKEISPEVEHIPEIEINMLTVPHVPKVSQEGSVDEVKENTEKMQQGKDDVSLLSEGQLAEQSLASSEDETEITEDLEPEVEEDMSASDSDDCIIPGPISKNIKQPSEKIRIEIIALSLNDSQVTMDDTIQRLFVECRFYSLPAEETPVSLPKPKSGQWVYYNYSNVIYVDKENNKAKRDILKAILQKQEMPNRSLRFTVVSDPPEDEQDLECEDIGVAHVDLADMFQEGRDLIEQNIDGMGESVAQFVQPTIAELQTLY

SEQ ID NO: 21192 - protein, 828 aa, Homo sapiens
MAGRGWGALWVCVAAATLLHAGGLARADCWLIEGDKGFVWLAICSQNQPPYEAIPQQINSTIVDLRLNENRIRSVQYASLSRFGNLTYLNLTKNEIGYIEDGAFSGQFNLQVLQLGYNRLRNLTEGMLRGLGKLEYLYLQANLIEVVMASSFWECPNIVNIDLSMNRIQQLNSGTFAGLAKLSVCELYSNPFYCSCELLGFLRWLAAFTNATQTYDRMQCESPPVYSGYYLLGQGRRGHRSILSKLQSVCTEDSYAAEVVGPPRPASGRSQPGRSPPPPPPPEPSDMPCADDECFSGDGTTPLVALPTLATQAEARPLIKVKQLTQNSATITVQLPSPFHRMYTLEHFNNSKASTVSRLTKAQEEIRLTNLFTLTNYTYCVVSTSAGLRHNHTCLTICLPRLPSPPGPVPSPSTATHYIMTILGCLFGMVLVLGAVYYCLRRRRRQEEKHKKAASAAAAGSLKKTIIELKYGPELEAPGLAPLSQGPLLGPEAVTRIPYLPAAGEVEQYKLVESADTPKASKGSYMEVRTGDPPERRDCELGRPGPDSQSSVAEISTIAKEVDKVNQIINNCIDALKSESTSFQGVKSGPVSVAEPPLVLLSEPLAAKHGFLAPGYKDAFGHSLQRHHSVEAAGPPRASTSSSGSVRSPRAFRAEAVGVHKAAAAEAKYIEKGSPAADAILTVTPAAAVLRAEAEKGRQYGEHRHSYPGSHPAEPPAPPGPPPPPPHEGLGRKASILEPLTRPRPRDLAYSQLSPQYHSLSYSSSPEYTCRASQSIWERFRLSRRRHKEEEEFMAAGHALRKKVQFAKDEDLHDILDYWKGVSAQHKS

SEQ ID NO: 21193 - protein, 403 aa, Homo sapiens
MSRRKQTNPNKVHWDQVFAGLEEQARQAMMKTDFPGDLGSQRQAIQQLRDQDSSSSDSEGDEEETTQDEVSSHTSEEDGGVVKVEKELENTEQPVGGNEVVEHEVTGNLNSDPLLELCQCPLCQLDCGSREQLIAHVYQHTAAVVSAKSYMCPVCGRALSSPGSLGRHLLIHSEDQRSNCAVCGARFTSHATFNSEKLPEVLNMESLPTVHNEGPSSAEGKDIAFSPPVYPAGILLVCNNCAAYRKLLEAQTPSVRKWALRRQNEPLEVRLQRLERERTAKKSRRDNETPEEREVRRMRDREAKRLQRMQETDEQRARRLQRDREAMRLKRANETPEKRQARLIREREAKRLKRRLEKMDMMLRAQFGQDPSAMAALAAEMNFFQLPVSGVELDSQLLGKMAF

SEQ ID NO: 21194 - protein, 224 aa, Homo sapiens
MKFKNPPVNSLSLEFLTELVISLEKLENDKSFRGVILTSDRPGVFSAGLDLTEMCGRSPAHYAGYWKAVQELWLRLYQSNLVLVSAINGACPAGGCLVALTCDYRILADNPRYCIGLNETQLGIIAPFWLKDTLENTIGHRAAERALQLGLLFPPAEALQVGIVDQVVPEEQVQSTALSAIAQWMAIPDHARQLTKAMMRKATASRLVTQRDADVQNFVSFISK

SEQ ID NO: 21195 - protein, 283 aa, Homo sapiens
MAGRSLCLTRSSVPGTPFPPPVQQPSTPGPDLLALEEEYKRLNAELQAKTADVVQQAKEIIRDRQEVRSRPVSTQMKSCDDEDDYSLRGLLPSEGIVHLHSETKPKTKNIDPVNKVQNKLHSANKGRKTNSSVKLKYSDVQTADDVAIPEDFSDFSLAKTISKIEGQLEEEGLPEYIDDIFSGVSNDIGTEAQIRFLKAKLHVMQEELDNVVCECNKKEDEIQNLKSQVKNFEEDFMRQQRTINMQQSQVEKYKTLFEEANKKYDGLQQQLSSVERVIIWYFS

SEQ ID NO: 21196 - protein, 849 aa, Homo sapiens
LMHLAKDLNSQERSIPPSENQNSQESNGEGNCLSSSASSALAISSLADAATDSSCTSGAEQNDGQSIRKKRRATGDGSSPELPSLERKNKRRKIKGKKERSQVDQLLNISLREEELSKSLQCMDNNLLQARAALQTAYVEVQRLLMLKQQITMEMSALRTHRIQILQGLQETYEPSEHPDQVPCSLTRERRNSRSQTSIDAALLPTPFFPLFLEPPSSHVSPSPTGASLQITTSPTFQTHGSVPAPDSSVQIKQEPMSPEQDENVNAVPPSSACNVSKELLEANKTPLEKEPHSPADQPEQQAESTLTSAETRGSKKKKKLRKKKSLRAAHVPENSDTEQDVLTVKPVRKVKAGKLIKGGKVTTSTWEDSRTGREQESVRDEPDSDSSLEVLEIPNPQLEVVAIDSSESGEEKPDSPSKKDIWNSTEQNPLETSRSGCDEVSSTSEIGTRYKDGIPVSVAETQTVISSIKGSKNSSEISSEPGDDDEPTEGSFEGHQAAVNAIQIFGNLLYTCSADKTVRVYNLVSRKCIGVFEGHTSKVNCLLVTQTSGKNAALYTGSSDHTIRCYNVKSRECVEQLQLEDRVLCLHSRWRILYAGLANGTVVTFNIKNNKRLEIFECHGPRAVSCLATAQEGARKLLVVGSYDCTISVRDARNGLLLRTLEGHSKTILCMKVVNDLVFSGSSDQSVHAHNIHTGELVRIYKGHNHAVTVVNILGKVMVTACLDKFVRVYELQSHDRLQVYGGHKDMIMCMTIHKSMIYTGCYDGSIQAVRLNLMQNYRCWWHGCSLIFGVVDHLKQHLLTDHTNPNFQTLKCRWKNCDAFFTARKGSKQDAAGHIERHAEDDSKIDS

SEQ ID NO: 21197 - protein, 230 aa, Homo sapiens
PVKKKKIKREVKILENLRGGTNIIKLIDTVKDPVSKTPALVFEYINNTDFKLRLIDWGLAEFYHPAQEYNVRVASRYFKGPELLVDYQMYDYSLDMWSLGCMLASMIFRREPFFHGQDNYDQLVRIAKVLGTEELYGYLKKYHIDLDPHFNDILGQHSRKRWENFIHSENRHLVSPEALDLLDKLLRYDHQQRLTAKEAMEHPYFYPVVKEQSQPCADNAVLSSGLTAAR

SEQ ID NO: 21198 - protein, 706 aa, Homo sapiens
MGGKGGGDTRGPVLFPCQLAQALSPRRAFPRELKEKGQRMSSQPAGNQTSPGATEDYSYGSWYIDEPQGGEELQPEGEVPSCHTSIPPGLYHACLASLSILVLLLLAMLVRRRQLWPDCVRGRPGLPSPVDFLAGDRPRAVPAAVFMVLLSSLCLLLPDEDALPFLTLASAPSQDGKTEAPRGAWKILGLFYYAALYYPLAACATAGHTAAHLLGSTLSWAHLGVQVWQRAECPQVPKIYKYYSLLASLPLLLGLGFLSLWYPVQLVRSFSRRTGAGSKGLQSSYSEEYLRNLLCRKKLGSSYHTSKHGFLSWARVCLRHCIYTPQPGFHLPLKLVLSATLTGTAIYQVALLLLVGVVPTIQKVRAGVTTDVSYLLAGFGIVLSEDKQEVVELVKHHLWALEVCYISALVLSCLLTFLVLMRSLVTHRTNLRALHRGAALDLSPLHRSPHPSRQAIFCWMSFSAYQTAFICLGLLVQQIIFFLGTTALAFLVLMPVLHGRNLLLFRSLESSWPFWLTLALAVILQNMAAHWVFLETHDGHPQLTNRRVLYAATFLLFPLNVLVGAMVATWRVLLSALYNAIHLGQMDLSLLPPRAATLDPGYYTYRNFLKIEVSQSHPAMTAFCSLLLQAQSLLPRTMAAPQDSLRPGEEDEGMQLLQTKDSMAKGARPGASRGRARWGLAYTLLHNPTLQVFRKTALLGANGAQP

SEQ ID NO: 21199 - protein, 217 aa, Homo sapiens
MEPSTCRTMESEEDYVEEKESEKCVKEGVTNPSNSSQQALLKADYKALKNGVPSPIMATKIPKKVIAPVDTGDLEAGRRKRRRKRRSLAINLTNCKYESVRRAAQMCGLKEVGEDEEWTLYWTDCAVSLERVMDMKRFQPLLIDGFKFDMRVYVLITSCDPLRIFTYEEGLARFATTPYMEPSHNNLDNVCMHLTNYAINKHNENFVRDGAVGSKSI

SEQ ID NO: 21200 - protein, 135 aa, Homo sapiens
MTVLEQDTQGLDGWWLCSLHGRQGIVPGNRLKILVGMYDKKPAGPGPGPPATPAQPQPGLHAPAPPASQYTPMLPNTYQPQPDSVYLVPTPSKAQQGLYQVPGPSPQFQSPPAKQTSTFSKQTPHHPFPSPATDL

SEQ ID NO: 21201 - protein, 2150 aa, Homo sapiens
MNLDSLSLALSQISYLVDNLTKKNYRASQQEIQHIVNRHGPEADRHLLRCLFSHVDFSGDGKSSGKDFHQTQFLIQECALLITKPNFISTLSYAIDNPLHYQKSLKPAPHLFAQLSKVLKLSKVQEVIFGLALLNSSSSDLRGFAAQFIKQKLPDLLRSYIDADVSGNQEGGFQDIAIEVLHLLLSHLLFGQKGAFGVGQEQIDAFLKTLRRDFPQERCPVVLAPLLYPEKRDILMDRILPDSGGVAKTMMESSLADFMQEVGYGFCASIEECRNIIVQFGVREVTAAQVARVLGMMARTHSGLTDGIPLQSISAPGSGIWSDGKDKSDGAQAHTWNVEVLIDVLKELNPSLNFKEVTYELDHPGFQIRDSKGLHNVVYGIQRGLGMEVFPVDLIYRPWKHAEGQLSFIQHSLINPEIFCFADYPCHTVATDILKAPPEDDNREIATWKSLDLIESLLRLAEVGQYEQVKQLFSFPIKHCPDMLVLALLQINTSWHTLRHELISTLMPIFLGNHPNSAIILHYAWHGQGQSPSIRQLIMHAMAEWYMRGEQYDQAKLSRILDVAQDLKALSMLLNGTPFAFVIDLAALASRREYLKLDKWLTDKIREHGEPFIQACMTFLKRRCPSILGGLAPEKDQPKSAQLPPETLATMLACLQACAGSVSQELSETILTMVANCSNVMNKARQPPPGVMPKGRPPSASSLDAISPVQIDPLAGMTSLSIGGSAAPHTQSMQGFPPNLGSAFSTPQSPAKAFPPLSTPNQTTAFSGIGGLSSQLPVGGLGTGSLTGIGTGALGLPAVNNDPFVQRKLGTSGLNQPTFQQTDLSQVWPEANQHFSKEIDDEANSYFQRIYNHPPHPTMSVDEVLEMLQRFKDSTIKREREVFNCMLRNLFEEYRFFPQYPDKELHITACLFGGIIEKGLVTYMALGLALRYVLEALRKPFGSKMYYFGIAALDRFKNRLKDYPQYCQHLASISHFMQFPHHLQEYIEYGQQSRDPPVKMQGSITTPGSIALAQAQAQAQVPAKAPLAGQVSTMVTTSTTTTVAKTVTVTRPTGVSFKKDVPPSINTTNIDTLLVATDQTERIVEPPENIQEKIAFIFNNLSQSNMTQKVEELKETVKEEFMPWVSQYLVMKRVSIEPNFHSLYSNFLDTLKNPEFNKMVLNETYRNIKVLLTSDKAAANFSDRSLLKNLGHWLGMITLAKNKPILHTDLDVKSLLLEAYVKGQQELLYVVPFVAKVLESSIRSVVFRPPNPWTMAIMNVLAELHQEHDLKLNLKFEIEVLCKNLALDINELKPGNLLKDKDRLKNLDEQLSAPKKDVKQPEELPPITTTTTSTTPATNTTCTATVPPQPQYSYHDINVYSLAGLAPHITLNPTIPLFQAHPQLKQCVRQAIERAVQELVHPVVDRSIKIAMTTCEQIVRKDFALDSEESRMRIAAHHMMRNLTAGMAMITCREPLLMSISTNLKNSFASALRTASPQQREMMDQAAAQLAQDNCELACCFIQKTAVEKAGPEMDKRLATEFELRKHARQEGRRYCDPVVLTYQAERMPEQIRLKVGGVDPKQLAVYEEFARNVPGFLPTNDLSQPTGFLAQPMKQAWATDDVAQIYDKCITELEQHLHAIPPTLAMNPQAQALRSLLEVVVLSRNSRDAIAALGLLQKAVEGLLDATSGADADLLLRYRECHLLVLKALQDGRAYGSPWCNKQITRCLIECRDEYKYNVEAVELLIRNHLVNMQQYDLHLAQSMENGLNYMAVAFAMQLVKILLVDERSVAHVTEADLFHTIETLMRINAHSRGNAPEGLPQLMEVVRSNYEAMIDRAHGGPNFMMHSGISQASEYDDPPGLREKAEYLLREWVNLYHSAAAGRDSTKAFSAFVGQMHQQGILKTDDLITRFFRLCTEMCVEISYRAQAEQQHNPAANPTMIRAKCYHNLDAFVRLIALLVKHSGEATNTVTKINLLNKVLGIVVGVLLQDHDVRQSEFQQLPYHRIFIMLLLELNAPEHVLETINFQTLTAFCNTFHILRPTKAPGFVYAWLELISHRIFIARMLAHTPQQKGWPMYAQLLIDLFKYLAPFLRNVELTKPMQILYKGTLRVLLVLLHDFPEFLCDYHYGFCDVIPPNCIQLRNLILSAFPRNMRLPDPFTPNLKSLTL

SEQ ID NO: 21202 - protein, 749 aa, Homo sapiens
MVPAWLWLLCVSVPQVTLEMQDGHVLWGPQPVLVHVKDENDQVPHFSQAIYRARLSRGTRPGIPFLFLEASDRDEPGTANSDLRFHILSQAPAQPSPDMFQLEPRLGALALSPKGSTSLDHALERTYQLLVQVKDMGDQASGHQATATVEVSIIESTWVSLEPIHLAENLKVLYPHHMAQVHWSGGDVHYHLESHPPGPFEVNAEGNLYVTRELDREAQAEYLLQVRAQNSHGEDYAAPLELHVLVMDENDNVPICPPRDPTVSIPELSPPGTEVTRLSAEDADAPGSPNSHVVYQLLSPEPEDGVEGRAFQVDPTSGSVTLGVLPLRAGQNILLLVLAMDLAGAEGGFSSTCEVEVAVTDINDHAPEFITSQIGPISLPEDVEPGTLVAMLTAIDADLEPAFRLMDFAIERGDTEGTFGLDWEPDSGHVRLRLCKNLSYEAAPSHEVVVVVQSVAKLVGPGPGPGATATVTVLVERVMPPPKLDQESYEASVPISAPAGSFLLTIQPSDPISRTLRFSLVNDSEGWLCIEKFSGEVHTAQSLQGAQPGDTYTVLVEAQDTDEPRLSASAPLVIHFLKAPPAPALTLAPVPSQYLCTPRQDHGLIVSGPSKDPDLASGHGPYSFTLGPNPTVQRDWRLQTLNGSHAYLTLALHWVEPREHIIPVVVSHNAQMWQLLVRVIVCRCNVEGQCMRKVGRMKGMPTKLSAVGILVGTLVAIGIFLILIFTHWTMSRKKDPDQPADSVPLKATV

SEQ ID NO: 21203 - protein, 203 aa, Homo sapiens
MRGRRGDRMTINIQEHMAINVCPGPIRPIRQISDYFPRGPGPEGGGGGGGEAPAHLVPLALAPPAALLGATTPEDGAEVDSYDSDDATALGTLEFDLLYDRASCTLHCSILRAKGLKPMDFNGLADPYVKLHLLPGACKANKLKTKTQRNTLNPVWNEDLTYSGITDDDITHKVLRIAVCDEDKLSHNEFIGEIRVPLRRLKP

SEQ ID NO: 21204 - protein, 786 aa, Homo sapiens
TVLALGALAGVGVGGPNICTTRGVSSCQQCLAVSPMCAWCSDEALPLGSPRCDLKENLLKDNCAPESIEFPVSEARVLEDRPLSDKGSGDSSQVTQVSPQRIALRLRPDDSKNFSIQVRQVEDYPVDIYYLMDLSYSMKDDLWSIQNLGTKLATQMRKLTSNLRIGFGAFVDKPVSPYMYISPPEALENPCYDMKTTCLPMFGYKHVLTLTDQVTRFNEEVKKQSVSRNRDAPEGGFDAIMQATVCDEKIGWRNDASHLLVFTTDAKTHIALDGRLAGIVQPNDGQCHVGSDNHYSASTTMDYPSLGLMTEKLSQKNINLIFAVTENVVNLYQNYSELIPGTTVGVLSMDSSNVLQLIVDAYGKIRSKVELEVRDLPEELSLSFNATCLNNEVIPGLKSCMGLKIGDTVSFSIEAKVRGCPQEKEKSFTIKPVGFKDSLIVQVTFDCDCACQAQAEPNSHRCNNGNGTFECGVCRCGPGWLGSQCECSEEDYRPSQQDECSPREGQPVCSQRGECLCGQCVCHSSDFGKITGKYCECDDFSCVRYKGEMCSGHGQCSCGDCLCDSDWTGYYCNCTTRTDTCMSSNGLLCSGRGKCECGSCVCIQPGSYGDTCEKCPTCPDACTFKKECVECKKFDRGALHDENTCNRYCRDEIESVKELKDTGKDAVNCTYKNEDDCVVRFQYYEDSSGKSILYVVEEPECPKGPDILVVLLSVMGAILLIGLAALLIWKLLITIHDRKEFAKFEEERARAKWDTEILLYYCSFILVHQSLESLRTEFTSKQKDGN

SEQ ID NO: 21205 - protein, 987 aa, Homo sapiens
MRCRNMFFSFKASLCGCGAATAPSLTAISCTLNCSCQSFKPGKINHRQCDQCKHGWVAHALSKLRIPPMYPTSQVEIVQSNVVFDISSLMLYGTQAIPVRLKILLDRLFSVLKQDEVLQILHALDWTLQDYIRGYVLQDASGKVLDHWSIMTSEEEVATLQQFLRFGETKSIVELMAIQEKEEQSIIIPPSTANVDIRAFIESCSHRSSSLPTPVDKGNPSSIHPFENLISNMTFMLPFQFFNPLPPALIGSLPEQYMLEQGHDQSQDPKQEVHGPFPDSSFLTSSSTPFQVEKDQCLNCPDAITKKEDSTHLSDSSSYNIVTKFERTQLSPEAKVKPERNSLGTKKGRVFCTACEKTFYDKGTLKIHYNAVHLKIKHKCTIEGCNMVFSSLRSRNRHSANPNPRLHMPMNRNNRDKDLRNSLNLASSENYKCPGFTVTSPDCRPPPSYPGSGEDSKGQPAFPNIGQNGVLFPNLKTVQPVLPFYRSPATPAEVANTPGILPSLPLLSSSIPEQLISNEMPFDALPKKKSRKSSMPIKIEKEAVEIANEKRHNLSSDEDMPLQVVSEDEQEACSPQSHRVSEEQHVQSGGLGKPFPEGERPCHRESVIESSGAISQTPEQATHNSERETEQTPALIMVPREVEDGGHEHYFTPGMEPQVPFSDYMELQQRLLAGGLFSALSNRGMAFPCLEDSKELEHVGQHALARQIEENRFQCDICKKTFKNACSVKIHHKNMHVKEMHTCTVEGCNATFPSRRSRDRHSSNLNLHQKALSQEALESSEDHFRAAYLLKDVAKEAYQDVAFTQQASQTSVIFKGTSRMGSLVYPITQVHSASLESYNSGPLSEGTILDLSTTSSMKSESSSHSSWDSDGVSEEGTVLMEDSDGNCEGSSLVPGEDEYPICVLMEKADQSLASLPSGLPITCHLCQKTYSNKGTFRAHYKTVHLRQLHKCKVPGCNTMFSSVRSRNRHSQNPNLHKSLASSPSHLQ

SEQ ID NO: 21206 - protein, 1086 aa, Homo sapiens
MACSPDAVVSPSSAFLRSGSVYEPLKSINLPRPDNETLWDKLDHYYRIVKSTLLLYQSPTTGLFPTKTCGGDQKAKIQDSLYCAAGAWALALAYRRIDDDKGRTHELEHSAIKCMRGILYCYMRQADKVQQFKQDPRPTTCLHSVFNVHTGDELLSYEEYGHLQINAVSLYLLYLVEMISSGLQIIYNTDEVSFIQNLVFCVERVYRVPDFGVWERGSKYNNGSTELHSSSVGLAKAALEAINGFNLFGNQGCSWSVIFVDLDAHNRNRQTLCSLLPRESRSHNTDAALLPCISYPAFALDDEVLFSQTLDKVVRKLKGKYGFKRFLRDGYRTSLEDPNRCYYKPAEIKLFDGIECEFPIFFLYMMIDGVFRGNPKQVQEYQDLLTPVLHHTTEGYPVVPKYYYVPADFVEYEKNNPGSQKRFPSNCGRDGKLFLWGQALYIIAKLLADELISPKDIDPVQRYVPLKDQRNVSMRFSNQGPLENDLVVHVALIAESQRLQVFLNTYGIQTQTPQQVEPIQIWPQQELVKAYLQLGINEKLGLSGRPDRPIGCLGTSKIYRILGKTVVCYPIIFDLSDFYMSQDVFLLIDDIKNALQFIKQYWKMHGRPLFLVLIREDNIRGSRFNPILDMLAALKKGIIGGVKVHVDRLQTLISGAVVEQLDFLRISDTEELPEFKSFEELEPPKHSKVKRQSSTPSAPELGQQPDVNISEWKDKPTHEILQKLNDCSCLASQAILLGILLKREGPNFITKEGTVSDHIERVYRRAGSQKLWSVVRRAASLLSKVVDSLAPSITNVLVQGKQVTLGAFGHEEEVISNPLSPRVIQNIIYYKCNTHDEREAVIQQELVIHIGWIISNNPELFSGMLKIRIGWIIHAMEYELQIRGGDKPALDLYQLSPSEVKQLLLDILQPQQNGRCWLNRRQIDGSLNRTPTGFYDRVWQILERTPNGIIVAGKHLPQQPTLSDMTMYEMNFSLLVEDTLGNIDQPQYRQIVVELLMVVSIVLERNPELEFQDKVDLDRLVKEAFNEFQKDQSRLKEIEKQDDMTSFYNTPPLGKRGTCSYLTKAVMNLLLEGEVKPNNDDPCLIS

SEQ ID NO: 21207 - protein, 336 aa, Homo sapiens
MKLLTRAGSFSRFYSLKVAPKVKATAAPAGAPPQPQDLEFTKLPNGLVIASLENYSPVSRIGLFIKAGSRYEDFSNLGTTHLLRLTSSLTTKGASSFKITRGIEAVGGKLSVTATRENMAYTVECLRGDVDILMEFLLNVTTAPEFRRWEVADLQPQLKIDKAVAFQNPQTHVIENLHAAAYRNALANPLYCPDYRIGKVTSEELHYFVQNHFTSARMALIGLGVSHPVLKQVAEQFLNMRGGLGLSGAKANYRGGEIREQNGDSLVHAAFVAESAVAGSAEANAFSVLQHVLGAGPHVKRGSNTTSHLHQAVAKATQQPFDEQAESWIPNVSGVF

SEQ ID NO: 21208 - protein, 79 aa, Homo sapiens
VGRLMNRSISCTMKNPKVEVFGYPPSPQAVVTARTFPLWSMDSSFRYEDGQVGDANINTQDPKIQKEIMRVIGTQVYTN

SEQ ID NO: 21209 - protein, 1008 aa, Homo sapiens
MMSQSGHEYDPINYMKKPLGPPPPSYTCFRCGKPGHYIKNCPTNGDKNFESGPRIKKSTGIPRSFMMEVKDPNMKGAMLTNTGKYAIPTIDAEAYAIGKKEKPPFLPEEPSSSSEEDDPIPDELLCLICKDIMTDAVVIPCCGNSYCDECIRTALLESDEHTCPTCHQNDVSPDALIANKFLRQAVNNFKNETGYTKRLRKQLPPPPPPIPPPRPLIQRNLQPLMRSPISRQQDPLMIPVTSSSTHPAPSISSLTSNQSSLAPPVSGNPSSAPAPVPDITATVSISVHSEKSDGPFRDSDNKILPAAALASEHSKGTSSIAITALMEEKGYQVPVLGTPSLLGQSLLHGQLIPTTGPVRINTARPGGGRPGWEHSNKLGYLVSPPQQIRRGERSCYRSINRGRHHSERSQRTQGPSLPATPVFVPVPPPPLYPPPPHTLPLPPGVPPPQFSPQFPPGQPPPAGYSVPPPGFPPAPANLSTPWVSSGVQTAHSNTIPTTQAPPLSREEFYREQRRLKEEEKKKSKLDEFTNDFAKELMEYKKIQKERRRSFSRSKSPYSGSSYSRSSYTYSKSRSGSTRSRSYSRSFSRSHSRSYSRSPPYPRRGRGKSRNYRSRSRSHGYHRSRSRSPPYRRYHSRSRSPQAFRGQSPNKRNVPQGETEREYFNRYREVPPPYDMKAYYGRSVDFRDPFEKERYREWERKYREWYEKYYKGYAAGAQPRPSANRENFSPERFLPLNIRNSPFTRGRREDYVGGQSHRSRNIGSNYPEKLSARDGHNQKDNTKSKEKESENAPGDGKGNKHKKHRKRRKGEESEGFLNPELLETSRKSREPTGVEENKTDSLFVLPSRDDATPVRDEPMDAESITFKSVSEKDKRERDKPKAKGDKTKRKNDGSAVSKKENIVKPAKGPQEKVDGERERSPRSEPPIKKAKEETPKTDNTKSSSSSQKDEKITGTPRKAHSKSAKEHQETKPVKEEKVKKDYSKDVKSEKLTTKEEKAKKPNEKNKPLD

SEQ ID NO: 21210 - protein, 581 aa, Homo sapiens
YESMKQDFKLGIPEYFNFAKDVLDQWTDKEKAGKKPSNPAFWWINRNGEEMRWSFEELGSLSRKFANILSEACSLQRGDRVILILPRVPEWWLANVACLRTGTVLIPGTTQLTQKDILYRLQSSKANCIITNDVLAPAVDAVASKCENLHSKLIVSENSREGWGNLKELMKVFLCHPGWSTVARSWLTATSTSLVQAILSLLSSWDYRHASDSHTCVKTKHNEIMAIFFTSGTSGYPKMTAHTHSSFGLGLSVNGRFWLDLTPSDVMWNTSDTGWAKSAWSSVFSPWIQGACVFTHHLPRFEPTSILQTLSKYPITVFCSAPTVYRMLVQNDITSYKFKSLKHCVSAGEPITPDVTEKWRNKTGLDIYEGYGQTETVLICGNFKGMKIKPGSMGKPSPAFDVKIVDVNGNVLPPGQEGDIGIQVLPNRPFGLFTHYVDNPSKTASTLRGNFYITGDRGYMDKDGYFWFVARADDVILSSGYRIGPFEVENALNEHPSVAESAVVSSPDPIRGEVVKAFVVLNPDYKSHDQEQLIKEIQEHVKKTTAPYKYPRKVEFIQELPKTISGKTKRNELRKKEWKTI

SEQ ID NO: 21211 - protein, 1154 aa, Homo sapiens
MNDTVNKTDQVDCSDLSEHNGLDREESMEVEAPVANKSGSGTSSGSHSSTAPSSSSSSSSSSGGGGSSSTGTSAITTSLPQLGDLTTLGNFSVINSNVIIENLQSTKVAVAQFSQEARCGGASGGKLAVPALMEQLLALQQQQIHQLQLIEQIRHQILLLASQNADLPTSSSPSQGTLRTSANPLSTLSSHLSQQLAAAAGLAQSLASQSASISGVKQLPPIQLPQSSSGNTIIPSNSGSSPNMNILAAAVTTPSSEKVASSAGASHVSNPAVSSSSSPAFAISSLLSPASNPLLPQQASANSVFPSPLPNIGTTAEDLNSLSALAQQRKSKPPNVTAFEAKSTSDEAFFKHKCRFCAKVFGSDSALQIHLRSHTGERPFKCNICGNRFSTKGNLKVHFQRHKEKYPHIQMNPYPVPEHLDNIPTSTGIPYGMSIPPEKPVTSWLDTKPVLPTLTTSVGLPLPPTLPSLIPFIKTEEPAPIPISHSATSPPGSVKSDSGGPESATRNLGGLPEEAEGSTLPPSGGKSEESGMVTNSVPTASSSVLSSPAADCGPAGSATTFTNPLLPLMSEQFKAKFPFGGLLDSAQASETSKLQQLVENIDKKATDPNECIICHRVLSCQSALKMHYRTHTGERPFKCKICGRAFTTKGNLKTHYSVHRAMPPLRVQHSCPICQKKFTNAVVLQQHIRMHMGGQIPNTPVPDSYSESMESDTGSFDEKNFDDLDNFSDENMEDCPEGSIPDTPKSADASQDSLSSSPLPLEMSSIAALENQMKMINAGLAEQLQASLKSVENGSIEGDVLTNDSSSVGGDMESQSAGSPAISESTSSMQALSPSNSTQEFHKSPSIEEKPQRAVPSEFANGLSPTPVNGGALDLTSSHAEKIIKEDSLGILFPFRDRGKFKNTACDICGKTFACQSALDIHYRSHTKERPFICTVCNRGFSTKGNLKQHMLTHQMRDLPSQLFEPSSNLGPNQNSAVIPANSLSSLIKTEVNGFVHVSPQDSKDTPTSHVPSGPLSSSATSPVLLPALPRRTPKQHYCNTCGKTFSSSSALQIHERTHTGEKPFACTICGRAFTTKGNLKVHMGTHMWNSTPARRGRRLSVDGPMTFLGGNPVKFPEMFQKDLAARSGSGDPSSFWNQYAAALSNGLAMKANE

SEQ ID NO: 21212 - protein, 632 aa, Homo sapiens
MTDPMMDFFDDANLFGETLEGLSDDAFVQPGPVSLVDELNLGAEFEPLHIDSLNHVQGTPTHQKMTDFEQLNQFDSIKFHHVNQSFGSPAEHVLSPHSQFNCSPIHPQNQPNGLFPDVSDGSPMWGHQTATTISNQNGSPFHQQGHSHSMHQNKSFVAHHDFALFQANEQQTQCTSLRSQQNRNNLNPGQNSLSQSKNFMNVSGPHRVNVNHPPQMTNASNSQQSISMQQFSQTSNPSAHFHKCSSHQEGNFNGPSPNMTSCSVSNSQQFSSHYSFSSNHISPNSLLQSSAVLASNHTNQTLSDFTGSNSFSPHRGIKQESTQHILNPNTSLNSNNFQILHSSHPQGNYSNSKLSPVHMNFPDPVDSGTQMGHFNDHVETNGFSSLEENLLHQVESQTEPFTGLDPEDLLQEGLLPHFDESTFGQDNSSHILDHDLDRQFTSHLVTRPSDMAQTQLQSQARSWHSSFSNHQHLHDRNHLCLQRQPPSSKKSDGSGTYTKLQNTQVRVMSEKKQRKKVESESKQEKANRIISEAIAKAKERGERNIPRVMSPENFPTASVEGKEEKKGRRMKSKPKDKDSKKTKTCSKLKEKTKIGKLIITLGKKQKRKNESSDEISDAEQMPQHTLKDQDSQ

SEQ ID NO: 21213 - protein, 681 aa, Homo sapiens
MRLWKAVVVTLAFMSVDICVTTAIYVFSHLDRSLLEDIRHFNIFDSVLDLWAACLYRSCLLLGATIGVAKNSALGPRRLRASWLVITLVCLFVGIYAMVKLLLFSEVRRPIRDPWFWALFVWTYISLGASFLLWWLLSTVRPGTQALEPGAATEAEGFPGSGRPPPEQASGATLQKLLSYTKPDVAFLVAASFFLIVAALGETFLPYYTGRAIDGIVIQKSMDQFSTAVVIVCLLAIGSSFAAGIRGGIFTLIFARLNIRLRNCLFRSLVSQETSFFDENRTGDLISRLTSDTTMVSDLVSQNINVFLRNTVKVTGVVVFMFSLSWQLSLVTFMGFPIIMMVSNIYGKYYKRLSKEVQNALARASNTAEETISAMKTVRSFANEEEEAEVYLRKLQQVYKLNRKEAAAYMYYVWGSGLTLLVVQVSILYYGGHLVISGQMTSGNLIAFIIYEFVLGDCMESVGSVYSGLMQGVGAAEKVFEFIDRQPTMVHDGSLAPDHLEGRVDFENVTFTYRTRPHTQVLQNVSFSLSPGKVTALVGPSGSGKSSCVNILENFYPLEGGRVLLDGKPISAYDHKYLHRVISLVSQEPVLFARSITDNISYGLPTVPFEMVVEAAQKANAHGFIMELQDGYSTETGEKGAQLSGGQKQRVAMARALVRNPPVLILDEATSALDAESEYLI

SEQ ID NO: 21214 - protein, 1424 aa, Homo sapiens
MSDSWVPNSASGQDPGGRRRAWAELLAGRVKREKYNPERAQKLKESAVRLLRSHQDLNALLLEVEGPLCKKLSLSKVIDCDSSEAYANHSSSFIGSALQDQASRLGVPVGILSAGMVASSVGQICTAPAETSHPVLLTVEQRKKLSSLLEFAQYLLAHSMFSRLSFCQELWKIQSSLLLEAVWHLHVQGIVSLQELLESHPDMHAVGSWLFRNLCCLCEQMEASCQHADVARAMLSDFVQMFVLRGFQKNSDLRRTVEPEKMPQVTVDVLQRMLIFALDALAAGVQEESSTHKIVRCWFGVFSGHTLGSVISTDPLKRFFSHTLTQILTHSPVLKASDAVQMQREWSFARTHPLLTSLYRRLFVMLSAEELVGHLQEVLETQEVHWQRVLSFVSALVVCFPEAQQLLEDWVARLMAQAFESCQLDSMVTAFLVVRQAALEGPSAFLSYADWFKASFGSTRGYHGCSKKALVFLFTFLSELVPFESPRYLQVHILHPPLVPGKYRSLLTDYISLAKTRLADLKVSIENMGLYEDLSSAGDITEPHSQALQDVEKAIMVFEHTGNIPVTVMEASIFRRPYYVSHFLPALLTPRVLPKVPDSRVAFIESLKRADKIPPSLYSTYCQACSAAEEKPEDAALGVRAEPNSAEEPLGQLTAALGELRASMTDPSQRDVISAQVAVISERLRAVLGHNEDDSSVEISKIQLSINTPRLEPREHMAVDLLLTSFCQNLMAASSVAPPERQGPWAALFVRTMCGRVLPAVLTRLCQLLRHQGPSLSAPHVLGLAALAVHLGESRSALPEVDVGPPAPGAGLPVPALFDSLLTCRTRDSLFFCLKFCTAAISYSLCKFSSQSRDTLCSCLSPGLIKKFQFLMFRLFSEARQPLSEEDVASLSWRPLHLPSADWQRAALSLWTHRTFREVLKEEDVHLTYQDWLHLELEIQPEADALSDTERQDFHQWAIHEHFLPESSASGGCDGDLQAACTILVNALMDFHQSSRSYDHSENSDLVFGGRTGNEDIISRLQEMVADLELQQDLIVPLGHTPSQEHFLFEIFRRRLQALTSGWSVAASLQRQRELLMYKRILLRLPSSVLCGSSFQAEQPITARCEQFFHLVNSEMRNFCSHGGALTQDITAHFFRGLLNACLRSRDPSLMVDFILAKCQTKCPLILTSALVWWPSLEPVLLCRWRRHCQSPLPRELQKLQEGRQFASDFLSPEAASPAPNPDWLSAAALHFAIQQVREENIRKQLKKLDCEREELLVFLFFFSLMGLLSSHLTSNSTTDLPKAFHVCAAILECLEKRKISWLALFQLTESDLRLGRLLLRVAPDQHTRLLPFAFYSLLSYFHEDAAIREEAFLHVAVDMYLKLVQLFVAGDTSTVSPPAGRSLELKGQAGQPRGTDNKSSSFSAAVNTSVPEKELLTRGRAAG

SEQ ID NO: 21215 - protein, 1906 aa, Homo sapiens
MVRERKCILCHIVYSSKKEMDEHMRSMLHHRELENLKGRDISHECRVCGVTEVGLSAYAKHISGQLHKDNVDAQEREDDGKGEEEEEDYFDKELIQLIKQRKEQSRQDEPSNSNQEINSDDRRPQWRREDRIPYQDRESYSQPAWHHRGPPQRDWKWEKDGFNNTRKNSFPHSLRNGGGPRGRSGWHKGVAGGSSTWFHNHSNSGGGWLSNSGAVDWNHNGTGRNSSWLSEGTGGFSSWHMNNSNGNWKSSVRSTNNWNYSGPGDKFQPGRNRNSNCQMEDMTMLWNKKSNKSNKYSHDRYNWQRQENDKLGTVATYRGPSEGFTSDKFPSEGLLDFNFEQLESQTTKQADTATSKVSGKNGSAAREKPRRWTPYPSQKTLDLQSGLKDITGNKSEMIEKPLFDFSLITTGIQEPQTDETRNSPTQKTQKEIHTGSLNHKASSDSAASFEVVRQCPTAEKPEQEHTPNKMPSLKSPLLPCPATKSLSQKQDPKNISKNTKTNFFSPGEHSNPSNKPTVEDNHGPYISKLRSSCPHVLKGNKSTFGSQKQSGDNLNDTLRKAKEVLQCHESLQNPLLSTSKSTRNYAKASRNVEESEKGSLKIEFQVHALEDESDGETSDTEKHGTKIGTLGSATTELLSGSTRTADEKEEDDRILKTSRELSTSPCNPIVRQKESELQMTSAASPHPGLLLDLKTSLEDAQVDDSIKSHVSYETEGFESASLDAELQKSDISQPSGPLLPELSKLGFPASLQRDLTRHISLKSKTGVHLPEPNLNSARRIRNISGHRKSETEKESGLKPTLRQILNASRRNVNWEQVIQQVTKKKQELGKGLPRFGIEMVPLVQNEQEALDLDGEPDLSSLEGFQWEGVSISSSPGLARKRSLSESSVIMDRAPSVYSFFSEEGTGKENEPQQMVSPSNSLRAGQSQKATMHLKQEVTPRAASLRTGERAENVATQRRHSAQLSSDHIIPLMHLAKDLNSQERSIPPSENQNSQESNGEGNCLSSSASSALAISSLADAATDSSCTSGAEQNDGQSIRKKRRATGDGSSPELPSLERKNKRRKIKGKKERSQVDQLLNISLREEELSKSLQCMDNNLLQARAALQTAYVEVQRLLMLKQQITMEMSALRTHRIQILQGLQETYEPSEHPDQVPCSLTRERRNSRSQTSIDAALLPTPFFPLFLEPPSSHVSPSPTGASLQITTSPTFQTHGSVPAPDSSVQIKQEPMSPEQDENVNAVPPSSACNVSKELLEANREISDSCPVYPVITARLSLPESTESFHEPSQELKFSVEQRNTRNRENSPSSQSAGLSSINKEGEEPTKGNSGSEACTSSFLRLSFASETPLEKEPHSPADQPEQQAESTLTSAETRGSKKKKKLRKKKSLRAAHVPENSDTEQDVLTVKPVRKVKAGKLIKGGKVTTSTWEDSRTGREQESVRDEPDSDSSLEVLEIPNPQLEVVAIDSSESGEEKPDSPSKKDIWNSTEQNPLETSRSGCDEVSSTSEIGTRYKDGIPVSVAETQTVISSIKGSKNSSEISSEPGDDDEPTEGSFEGHQAAVNAIQIFGNLLYTCSADKTVRVYNLVSRKCIGVFEGHTSKVNCLLVTQTSGKNAALYTGSSDHTIRCYNVKSRECVEQLQLEDRVLCLHSRWRILYAGLANGTVVTFNIKNNKRLEIFECHGPRAVSCLATAQEGARKLLVVGSYDCTISVRDARNGLLLRTLEGHSKTILCMKVVNDLVFSGSSDQSVHAHNIHTGELVRIYKGHNHAVTVVNILGKVMVTACLDKFVRVYELQSHDRLQVYGGHKDMIMCMTIHKSMIYTGCYDGSIQAVRLNLMQNYRCWWHGCSLIFGVVDHLKQHLLTDHTNPNFQTLKCRWKNCDAFFTARKGSKQDAAGHIERHAEDDSKIDS

SEQ ID NO: 21216 - protein, 465 aa, Homo sapiens
MENQEFLSSSAPSEVTDGQVSTEISTCSEVFQKPIVLRILDTHRELEESEDPEKHENPEEPEEVREQDQRDESEECDEPHESYEPHAPYAPHKPRDSYAPYELHGPHAAPKLLKAREPRQLRHTREPRKSREAKETELLPSAAVMISPSLITRAPPRPQLSFLGANPVSCDFVRKCFSSRKRTPNLSKPKKQWGTPDRKLFWGNQDPIRPVSQGALKAQLTKRLENLAQPKEVSCHYVPNRAQYYHSCGRESVIWEITPPALFRQPSKRIQRLSQPNGFKRQCLLNRPFSDNSARDSLRISDPSPRILQLSVAKGTDPNYHPSKKMQTKISLSTLSAIATPRIIELAHPRIKLEGLCYERQRSELPIRPVPPAAMIAKPSPRTIALAKSKSVHQDYLPDRDAHWPVSYATTHSKASPRIQELANPNKRAPVRIVYYDPDVFKTKPAALKAQCSQRIWELSQPLTR

SEQ ID NO: 21217 - protein, 203 aa, Homo sapiens
MKDSCITVMAMALLSGFFFFAPASSYNLDVRGARSFSPPRAGRHFGYRVLQVGNGVIVGAPGEGNSTGSLYQCQSGTGHCLPVTLRGSNYTSKYLGMTLATDPTDGSILFAAVQFSTSYKTEFDFSDYVKRKDPDALLKHVKHMLLLTNTFGAINYVATEVFREELGARPDATKVLIIITDGEATDSGNIDAAKDIIRYIIGV

SEQ ID NO: 21218 - protein, 627 aa, Homo sapiens
MMSLSVRPQRRLLSARVNRSQSFAGVLGSHERGPRSFPVFSPPGPPRKPPALSRVSRMFSVAHPAAKVPQPERLDLVYTALKRGLTAYLEVHQQEQEKLQGQIRESKRNSRLGFLYDLDKQVKSIERFLRRLEFHASKIDELYEAYCVQRRLRDGAYNMVRAYTTGSPGSREARDSLAEATRGHREYTESMCLLESELEAQLGEFHLRMKGLAGFARLCVGDQYEICMKYGRQRWKLRGRIEGSGKQVWDSEETIFLPLLTEFLSIKVTELKGLANHVVVGSVSCETKDLFAALPQVVAVDINDLGTIKLSLEVTWSPFDKDDQPSAASSVNKASTVTKRFSTYSQSPPDTPSLREQAFYNMLRRQEELENGTAWSLSSESSDDSSSPQLSGTARHSPAPRPLVQQPEPLPIQVAFRRPETPSSGPLDEEGAVAPVLANGHAPYSRTLSHISEASVDAALAEASVEAVGPESLAWGPSPPTHPAPTHGEHPSPVPPALDPGHSATSSTLGTTGSVPTSTDPAPSAHLDSVHKSTDSGPSELPGPTHTTTGSTYSAITTTHSAPSPLTHTTTGSTHKPIISTLTTTGPTLNIIGPVQTTTSPTHTMPSPTHTTASPTHTSTSPTHTPT

SEQ ID NO: 21219 - protein, 226 aa, Homo sapiens
MARSGSATPPARAPGAPPRSPPQRLVQDVSGPLRELRPRLCHLRKGPQGYGFNLHSDKSRPGQYIRSVDPGSPAARSGLRAQDRLIEVNGQNVEGLRHAEVVASIKAREDEARLLVVDPETDEHFKRLRVTPTEEHVEGPLPSPVTNGTSPAQLNGGSACSSRSDLPGSDKDTEDGSAWKQDPFQESGLHLSPTAAEAKEKARAMRVNKRAPQMDWNRKREIFSNF

SEQ ID NO: 21220 - protein, 586 aa, Homo sapiens
MCQVGEDYGEPAPEEPPPAPRPSREQKCVKCKEAQPVVVIRAGDAFCRDCFKAFYVHKFRAMLGKNRLIFPGEKVLLAWSGGPSSSSMVWQVLEGLSQDSAKRLRFVAGVIFVDERTPGVLTVALRSAAREKPLPKGKWPTPHSSARKHRPAERGLEGFSQVEVALQPALPGSSLSPDSFCLGFSEGAACGQSLEERSKTLAEVKPILQATGFPWHVVALEEVFSLPPSVLWCSAQELVGSEGAYKAAVDSFLQQQHVLGAGGGPGPTQGEEQPPQPPLDPQNLARPPAPAQTEALSQLFCSVRTLTAKEELLQTLRTHLILHMARAHGYSKVMTGDSCTRLAIKLMTNLALGRGAFLAWDTGFSDERHGDVVVVRPMRDHTLKEVAFYNRLFSVPSVFTPAVDTKAPEKASIHRLMEAFILRLQTQFPSTVSTVYRTSEKLVKGPRDGPAAGDSGPRCLLCMCALDVDAADSATAFGAQTSSRLSQMQSPIPLTETRTPPGPCCSPGVGWAQRCGQGACRREDPQACIEEQLCYSCRVNMKDLPSLDPLPPYILAEAQLRTQRAWGLQEIRDCLIEDSDDEAGQS

SEQ ID NO: 21221 - protein, 128 aa, Homo sapiens
MTVLEQDTQGLDGWWLCSLHGRQGIVPGNRLKILVGMYDKKPAGPGPGPPATPAQPQPGLHAPAPPASQYTPMLPNTYQPQPDSVYLVPTPSKAQQGLYQVPGPSPQFQSPPAKQTSTFSKQTPHHPF

SEQ ID NO: 21222 - protein, 507 aa, Homo sapiens; identical to SEQ ID NO: 21022

SEQ ID NO: 21223 - protein, 227 aa, Homo sapiens
MAPEATKNFLPLLDAVSRDFVSVLHRRIKKAGSGNYSGDISDDLFRFAFESITNVIFGERQGMLEEVVNPEAQRFIDAIYQMFHTSVPMLNLPPDLFRLFRTKTWKDHVAAWDVIFSKADIYTQNFYWELRQKGSVHHDYRGILYRLLGDSKMSFEDIKANVTEMLAGGVDTTSMTLQWHLYEMARNLKVQDMLRAEVLAARHQAQGDMATMLQLVPLLKASIKETL

SEQ ID NO: 21224 - protein, 687 aa, Homo sapiens
MANEEDDPVVQEIDVYLAKSLAEKLYLFQYPVRPASMTYDDIPHLSAKIKPKQQKVELEMAIDTLNPNYCRSKGEQIALNVDGACADETSTYSSKLMDKQTFCSSQTTSNTSRYAAALYRQGELHLTPLHGILQLRPSFSYLDKADAKHREREAANEAGDSSQDEAEDDVKQITVRFSRPESEQARQRRVQSYEFLQKKHAEEPWVHLHYYGLRDSRSEHERQYLLCPGSSGVENTELVKSPSEYLMMLMPPSQEEEKDKPVAPSNVLSMAQLRTLPLADQIKILMKNVKVMPFANLMSLLGPSIDSVAVLRGIQKVAMLVQGNWVVKSDILYPKDSSSPHSGVPAEVLCRGRDFVMWKFTQSRWVVRKEVATVTKLCAEDVKDFLEHMAVVRINKGWEFILPYDGEFIKKHPDVVQRQHMLWTGIQAKLEKVYNLVKETMPKKPDAQSGPAGLVCGDQRIQVAKTKAQQNHALLERELQRRKEQLRVPAVPPGVRIKEEPVSEEGEEDEEQEAEEEPMDTSPSGLHSKLANGLPLGRAAGTDSFNGHPPQGCASTPVARELKAFVEATFQRQFVLTLSELKRLFNLHLASLPPGHTLFSGISDRMLQDTVLAAGCKQILVPFPPQTAASPDEQKVFALWESGDMSDQSRLTQECGEDLSKQEVDKVLKDCCVSYGGMWYLKGTVQS

SEQ ID NO: 21225 - protein, 268 aa, Homo sapiens
DGDNILEKEVLPPIHAYGNRTECRNPQELESIRQDRDALHMEGLIVRERILGADNIDVSHPIIYRGAVYADNMEFEQCIKLWLHALHLRQKVCISTKTQCSEEDQCKINKQIYNLIHLDPRTREGFTLLHLAVNSNTPVDDFHTNDVCSFPNALVTKLLLDCGAEVNAVDNEGNSALHIIVQYNRPISDFLTLHSIIISLVEAGAHTDMTNKQNKTPLDKSTTGVSEILLKTQMKMSLKCLAARAVRANDINYQDQIPRTLEEFVGFH

SEQ ID NO: 21226 - protein, 484 aa, Homo sapiens
MESHSRAGKSRKSAKFRSISRSLMLCNAKTSDDGSSPDEKYPDPFEISLAQGKEGIFHSSVQLADTSEAGPSSVPDLALASEAAQLQAAGNDRGKTCRRIFFMKESSTASSREKPGKLEAQSSNFLFPKACHQRARSNSTSVNPYCTREIDFPMTKKSAAPTDRQPYSLCSNRKSLSQQLDCPAGKAAGTSRPTRSLSTAQLVQPSGGLQASVISNIVLMKGQAKGLGFSIVGGKDSIYGPIGIYVKTIFAGGAAAADGRLQEGDEILELNGESMAGLTHQDALQKFKQAKKGLLTLTVRTRLTAPPSLCSHLSPPLCRSLSSSTCITKDSSSFALESPSAPISTAKPNYRIMVEVSLQKEAGVGLGIGLCSVPYFQCISGIFVHTLSPGSVAHLDGRLRCGDEIVEISDSPVHCLTLNEVYTILSHCDPGPVPIIVSRHPDPQVSEQQLKEAVAQAVENTKFGKERHQWSLEDAEMELGPPGS

SEQ ID NO: 21227 - protein, 287 aa, Homo sapiens
MEMDIATFMAKMFSPPVSSGKNGPTSLASGHFTGSNVEDRSSSGSWGNGGHPSPSRNYGDGTPYDHMTSRDLGSHDNLSPPFVNSRIQSKTERGSYSSYGRESNLQGCHQQSLLGGDMDMGNPGTLSPTKPGSQYYQYSSNNPRRRPLHSSAMEVQTKKVRKVPPGLPSSVYAPSASTADYNRDSPGYPSSKPATSTFPSSFFMQDGHHSSDPWSSSSGMNQPGYAGMLGNSSHIPQSSSYCSLHPHERLSYPSHSSADINSSLPPMSTFHRSGTNHYSTSSCTPPA

SEQ ID NO: 21228 - protein, 239 aa, Homo sapiens
SAEIQQRQEELDAMTQALQEQDSAFGAVHAQMHAAVGQLGRARAETEELIRERVRQVVAHVRAQERELLEAVDARYQRDYEEMASRLGRLDAVLQRIRTGSALVQRMKCYASDQEVLDMHGFLRQALCRLRQEEPQSLQAAVRTDGFDEFKVRLQDLSSCITQGKDAAVSKKASPEAASTPRDPIDVDLPEEAERVKAQVQALGLAEAQPMAVVQSVPGAHPVPVYAFSIKGPAQSSTH

SEQ ID NO: 21229 - protein, 328 aa, Homo sapiens
MCDRNGGRRLRQWLIEQIDSSMYPGLIWENEEKSMFRIPWKHAGKQDYNQEVDASIFKAWAVFKGKFKEGDKAEPATWKTRLRCALNKSPDFEEVTDRSQLDISEPYKVYRIVPEEEQKCKLGVATAGCVNEVTEMECGRSEIDELIKEPSVDDYMGMIKRSPSPPEACRSQLLPDWWAQQPSTGVPLVTGYTTYDAHHSAFSQMVISFYYGGKLVGQATTTCPEGCRLSLSQPGLPGTKLYGPEGLELVRFPPADAIPSERQRQVTRKLFGHLERGVLLHSSRQGVFVKRLCQGRVFCSGNAVVCKGRPNKLERDEVVQVFDTSQFF

SEQ ID NO: 21230 - protein, 244 aa, Homo sapiens
MNGPADGEVDYKKKYRNLKRKLKFLIYEHECFQEELRKAQRKLLKVSRDKSFLLDRLLQYENVDEDSSDSDATASSDNSETEGTPKLSDTPAPKRKRSPPLGGAPSPSSLSLPPSTGFPLQASGVPSPYLSSLASSRYPPFPSDYLALQLPEPSPLRPKREKRPRLPRKLKMAVGPPDCPVGGPLTFPGRGSGAGVGTTLTPLPPPKMPPPTILSTVPRQMFSDAGSGDDALDGDDDLVIDIPE

SEQ ID NO: 21231 - protein, 282 aa, Homo sapiens
LKRKVAEQEERQGMKVQALARENEVLKVQLKKYVGAVQMLKREGQTAEVPNLWSVDGEVTVAEQKPGEIAEELASSYERKLIEVAEMHGELIEFNERLHRALVAKEALVSQMRQELIDLRGPVPGDLSQTSEDQSLSDFEISNRALINVWIPSVFLRGKAANAFHVYQVYIRIKDDEWNIYRRYTEFRSLHHKLQNKYPQVRAYNFPPKKAIGNKDAKFVEERRKQLQNYLRSVMNKVIQMVPEFAASPKKETLIQLMPFFVDWISLFGNGRDSSREEFSSS

SEQ ID NO: 21232 - protein, 585 aa, Homo sapiens
MEPAPARSPRPQQDPARPQEPTMPPPETPSEGRQPSPSPSPTERAPASEEEFQFLRCQQCQAEAKCPKLLPCLHTLCSGCLEASGMQCPICQAPWPLGADTPALDNVFFESLQRRLSVYRQIVDAQAVCTRCKESADFWCFECEQLLCAKCFEAHQWFLKHEARPLAELRNQSVREFLDGTRKTNNIFCSNPNHRTPTLTSIYCRGCSKPLCCSCALLDSSHSELKCDISAEIQQRQEELDAMTQALQEQDSAFGAVHAQMHAAVGQLGRARAETEELIRERVRQVVAHVRAQERELLEAVDARYQRDYEEMASRLGRLDAVLQRIRTGSALVQRMKCYASDQEVLDMHGFLRQALCRLRQEEPQSLQAAVRTDGFDEFKVRLQDLSSCITQGKDAAVSKKASPEAASTPRDPIDVDLDVSNTTTAQKRKCSQTQCPRKVIKMESEEGKEARLARSSPEQPRPSTSKAVSPPHLDGPPSPRSPVIGSEVFLPNSNHVASGAGEAEERVVVISSSEDSDAENSSSRELDDSSSESSDLQLEGPSTLRVLDENLADPQAEDRPLVFFDLKIDNESGFSWGYPHPFLI

SEQ ID NO: 21233 - protein, 568 aa, Homo sapiens
MEPAPARSPRPQQDPARPQEPTMPPPETPSEGRQPSPSPSPTERAPASEEEFQFLRCQQCQAEAKCPKLLPCLHTLCSGCLEASGMQCPICQAPWPLGADTPALDNVFFESLQRRLSVYRQIVDAQAVCTRCKESADFWCFECEQLLCAKCFEAHQWFLKHEARPLAELRNQSVREFLDGTRKTNNIFCSNPNHRTPTLTSIYCRGCSKPLCCSCALLDSSHSELKCDISAEIQQRQEELDAMTQALQEQDSAFGAVHAQMHAAVGQLGRARAETEELIRERVRQVVAHVRAQERELLEAVDARYQRDYEEMASRLGRLDAVLQRIRTGSALVQRMKCYASDQEVLDMHGFLRQALCRLRQEEPQSLQAAVRTDGFDEFKVRLQDLSSCITQGKDAAVSKKASPEAASTPRDPIDVDLDVSNTTTAQKRKCSQTQCPRKVIKMESEEGKEARLARSSPEQPRPSTSKAVSPPHLDGPPSPRSPVIGSEVFLPNSNHVASGAGEAGREVGRAVAWVLPARVWAVPLFCILAPSRKPKANRSPLFPLNKIGKVHSVRGGESGHSLPCVLP

SEQ ID NO: 21234 - protein, 236 aa, Homo sapiens
MGLHLRPYRVGLLPDGLLFLLLLLMLLADPALPAGRHPPVVLVPGDLGNQLEAKLDKPTVVHYLCSKKTESYFTIWLNLELLLPVIIDCWIDNIRLVYNKTSRATQFPDGVDVRVPGFGKTFSLEFLDPSKSSVGSYFHTMVESLVGWGYTRGEDVRGAPYDWRRAPTAAAGLEGQVYPGLRVTGCALGGRGQDPARPGFRRQQPDPSHRAPEDPGAAAVSCLHQLAAALQLHMVT

SEQ ID NO: 21235 - protein, 86 aa, Homo sapiens
MGLHLRPYRVGLLPDGLLFLLLLLMLLADPALPAGRHPPVVLVEMGFHHIGQAGLELLTASDPLTSASQSAGITGMSPCALPRSPW

SEQ ID NO: 21236 - protein, 299 aa, Homo sapiens
MTTLSPENSLSARQSASFILVKRKPPIDKTEWDSFFDESGHLAKSRDFICVNILERGLHPFVRTEAWKFLTGYFSWQSSQDERLTVDSMRRKNYKALCQMYEKIQPLLENLHRNFTETRNNIEYQQGFHEMMMLFQLMVEHDHETFWLFQFFLQKTEHSCVINIGVAKNLDMLSTLITFLDPVFAEHLKGKGAGAVQSLFPWFCFCFQRAFKSFDDVWRLWEVLLTGKPCRNFQVLVAYSMLQMVREQVLQESMGGDDILLACNNLIDLDADELISAACVVYAELIQKDVPQTLKDFFL

SEQ ID NO: 21237 - protein, 58 aa, Homo sapiens
MTVLEQDTQGLDGWWLCSLHGRQGIVPGNRLKILVGMYDKKPAGPGPGPPATPAQPQP

SEQ ID NO: 21238 - protein, 408 aa, Homo sapiens
MVLDSGAQAYDQAPPSPPTSPPSLRHRLKPSDRDGPPLYPWSQSLALPLALAVPPALQPQPEQQPFSQMLLGHRGHMRRSESTYSVNSTGRRGRGTLGRPPPGRGRNPGGGTLRPAASLPHIAKTQRDAGHIASKSPCMLVALRPTNMDRERDKFFQSHYTYNPQFEYQEPMPTAVLEKYCEASGQFIHQAVGIIEAVLEKFGTYEHFEAATGGQLLTKCQIWSIVRKYMQKEGCAGEVVVQLSEDLLSQAVMMVENSRPTLAINLTGARQYWLEGMLRHEIGTHYLRGVNNARQPWHNAEGRLRYGLRPANPTEEGLASLHSVLFRKQPFLWRAALLYYTIHRAARMSFRQLFQDLERYVQDADVRWEYCVRAKRGQTDTSLPARTRCTWTASCAFCDIARPSISRC

SEQ ID NO: 21239 - protein, 506 aa, Homo sapiens
MAALLRRLLQRERPSAASGRPVGRREANLGTDAGVAVRVRFAPSPTGFLHLGGLRTALYNYIFAKKYQGSFILRLEDTDQTRVVPGAAENIEDMLEWAGIPPDESPRRGGPAGPYQQSQRLELYAQATEALLKTGAAYPCFCSPQRLELLKKEALRNHQTPRYDNRCRNMSQEQVAQKLAKDPKPAIRFRLEQVVPAFQDLVYGWNRHEVASVEGDPVIMKSDGFPTYHLACVVDDHHMGISHVLRGSEWLVSTAKHLLLYQALGWQPPHFAHLPLLLNRDGSKLSKRQGDVFLEHFAADGFLPDSLLDIITNCGSGFAENQMGRTLPELITQFNLTQVTCHSALLDLEKLPEFNRLHLQRLVSNESQRRQLVGKLQVLVEEAFGCQLQNRDVLNPVYVERILLLRQGHICRLQDLVSPVYSYLWTRPAVGRAQLDAISEKVDVIAKRVLGLLERSSMSLTQDMLNGELKKLSEGLEGTKYSNVMKLLRMALSGQQALSSILSIQR

SEQ ID NO: 21240 - protein, 1122 aa, Homo sapiens
PTPGLHLVTMTAGNPLGSANATVEVDVQVPVSGLSIRASEPGGSFVAAGSSVPFWGQLATGTNVSWCWAVPGGSSKRGPHVTMVFPDAGTFSIRLNASNAVSWVSATYNLTAEEPIVGLVLWASSKVVAPGQLVHFQILLAAGSAVTFRLQVGGANPEVLPGPRFSHSFPRVGDHVVSVRGKNHVSWAQAQVRIVVLEAVSGLQVPNCCEPGIATGTERNFTARVQRGSRVAYAWYFSLQKVQGDSLVILSGRDVTYTPVAAGLLEIQVRAFNALGSENRTLVLEVQDAVQYVALQSGPCFTNRSAQFEAATSPSPRRVAYHWDFGDGSPGQDTDEPRAEHSYLRPGDYRVQVNASNLVSFFVAQATVTVQVLACREPEVDVVLPLQVLMRRSQRNYLEAHVDLRDCVTYQTEYRWEVYRTASCQRPGRPARVALPGVDVSRPRLVLPRLALPVGHYCFVFVVSFGDTPLTQSIQANVTVAPERLVPIIEGGSYRVWSDTRDLVLDGSESYDPNLEDGDQTPLSFHWACVASTQREAGGCALNFGPRGSSTVTIPRERLAAGVEYTFSLTVWKAGRKEEATNQTVLIRSGRVPIVSLECVSCKAQAVYEVSRSSYVYLEGRCLNCSSGSKRGRWAARTFSNKTLVLDETTTSTGSAGMRLVLRRGVLRDGEGYTFTLTVLGRSGEEEGCASIRLSPNRPPLGGSCRLFPLGAVHALTTKVHFECTGWHDAEDAGAPLVYALLLRRCRQGHCEEFCVYKGSLSSYGAVLPPGFRPHFEVGLAVVVQDQLGAAVVALNRSLAITLPEPNGSATGLTVWLHGLTASVLPGLLRQADPQHVIEYSLALVTVLNEYERALDVAAEPKHERQHRAQIRKNITETLVSLRVHTVDDIQQIAAALAQCMGPSRELVCRSCLKQTLHKLEAMMLILQAETTAGTVTPTAIGDSILNITGDLIHLASSDVRAPQPSELGAESPSRMVASQAYNLTSALMRILMRSRVLNEEPLTLAGEEIVAQGKRSDPRSLLCYGGAPGPGCHFSIPEAFSGALANLSDVVQLIFLVDSNPFPFGYISNYTVSTKLRQLRQLRCGPAPGLRRCCGHPGQQQPCGRAASAAQLYAAGRPLPV

SEQ ID NO: 21241 - protein, 1138 aa, Homo sapiens
MEEKQQIILANQDGGTVAGAAPTFFVILKQPGNGKTDQGILVTNQDACALASSVSSPVKSKGKICLPADCTVGGITVTLDNNSMWNEFYHRSTEMILTKQGRRMFPYCRYWITGLDSNLKYILVMDISPVDNHRYKWNGRWWEPSGKAEPHVLGRVFIHPESPSTGHYWMHQPVSFYKLKLTNNTLDQEGHIILHSMHRYLPRLHLVPAEKAVEVIQLNGPGVHTFTFPQTEFFAVTAYQNIQITQLKIDYNPFAKGFRDDGLNNKPQRDGKQKNSSDQEGNNISSSSGHRVRLTEGQGSEIQPGDLDPLSRGHETSGKGLEKTSLNIKRDFLGFMDTDSALSEVPQLKQEISECLIASSFEDDSRVASPLDQNGSFNVVIKEEPLDDYDYELGECPEGVTVKQEETDEETDVYSNSDDDPILEKQLKRHNKVDNPEADHLSSKWLPSSPSGVAKAKMFKLDTGKMPVVYLEPCAVTRSTVKISELPDNMLSTSRKDKSSMLAELEYLPTYIENSNETAFCLGKESENGLRKHSPDLRVVQKYPLLKEPQWKYPDISDSISTERILDDSKDSVGDSLSGKEDLGRKRTTMLKIATAAKVVNANQNASPNVPGKRGRPRKLKLCKAGRPPKNTGKSLISTKNTPVSPGSTFPDVKPDLEDVDGVLFVSFESKEALDIHAVDGTTEESSSLQASTTNDSGYRARISQLEKELIEDLKTLRHKQVIHPGLQEVGLKLNSVDPTMSIDLKYLGVQLPLAPATSFPFWNLTGTNPASPDAGFPFVSRTGKTNDFTKIKGWRGKFHSASASRNEGGNSESSLKNRSAFCSDKLDEYLENEGKLMETSMGFSSNAPTSPVVYQLPTKSTSYVRTLDSVLKKQSTISPSTSYSLKPHSVPPVSRKAKSQNRQATFSGRTKSSYKSILPYPVSPKQKYSHVILGDKVTKNSSGIISENQANNFVVPTLDENIFPKQISLRQAQQQQQQQQGSRPPGLSKSQVKLMDLEDCALWEGKPRTYITEERADVSLTTLLTAQASLKTKPIHTIIRKRAPPCNNDFCRLGCVCSSLALEKRQPAHCRRPDCMFGCTCLKRKVVLVKGGSKTKHFQRKAAHRDPVFYDTLGEEAREEEEGIREEEEQLKEKKKR

SEQ ID NO: 21242 - protein, 348 aa, Homo sapiens
MVQLAPAAAMDEVTFRSDTVLSDVHLYTPNHRHLMVRLNSVGQPVFLSQFKLLWSQDSWTDSGAKGGSHRDVHTKEPPSAETGSTGSPPGSGHAQEEDDVLGEEAQGSPHDIIRIEHTMATPLEDVGKQVWRGALLLADYILFRQDLFRGCTALELGAGTGLASIIAATMARTVYCTDVGADLLSMCQRNIALNSHLAATGGGIVRVKELDWLKDDLCTDPKVPFSWSQEEISDLYDHTTILFAAEVFYDDDLTDAVFKTLSRLAHRLKNACTAILSVEKRLNFTLRHLDVTCEAYDHFRSCLHALEQLADGKLRFVVEPVEASFPQLLVYERLQQLELWKIIAEPVT

SEQ ID NO: 21243 - protein, 3375 aa, Homo sapiens
MASERPEPEVEEAGQVFLLMKKDYRISRNVRLAWFLSHLHQTVQATPQEMLLQSEQELEVLSVLPPGWQPDEPVVPRPFLLVPSTRVTFLAWQYRFVIELDLSPSTGIVDDSTGEILFDEVFHALSRCLGGLLRPFRVPGSCIDFQPEIYVTIQAYSSIIGLQSHQVLVQGCLLDPSQREVFLQQIYEQLCLFEDKVATMLQQQYDPQSQAEDQSPDSGDLLGRKVGVSMVTADLGLVSMIRQGILALQLLPSNSSAGIIVITDGVTSVPDVAVCETLLNQLRSGTVACSFVQVGGVYSYDCSFGHVPNVELMKFIAMATFGSYLSTCPEPEPGNLGLTVYHRAFLLYSFLRSGEALNPEYYCGSQHRLFNEHLVSASSNPALALRRKKHTEKEVPADLVSTVSVRLREGYSVREVTLAKGGSQLEVKLVLLWKHNMRIEYVAMAPWPLEPEGPRVTRVEVTMEGGYDILHDVSCALRQPIRSLYRTHVIRRFWNTLQSINQTDQMLAHLQSFSSVPEHFTLPDSTKSGVPLFYIPPGSTTPVLSLQPSGSDSSHAQFAAYWKPVLSMDANSWQRWLHMHRLVLILEHDTPIPKHLHTPGSNGRYSTIQCRISHSSLTSLLRDWSSFVLVEGYSYVKLLSSAPDQPPNSFYMVRIISKAPCMVLRLGFPIGTPAPARHKIVSGLREEILRLRFPHRVQSKEPTPKVKRKGLGGAGGGSSPSKSPPVLGPQQALSDRPCLVVLHKPLDKLLIRYEKLPLDYRAPFLLTLEPPGPLPLVSGRSASSSLASLSRYLYHQRWLWSVPSGLAPALPLSAIAQLLSILTEVRLSEGFHFACSGEGIINMVLELPIQNEPPGQAAAEEKHTCVVQYILFPPHSTSTKDSFSTDDDNDVEVEALEGDSELNLVTEVWVEPQYGRVGPGPGIWKHLQDLTYSEIPQALHPRDAACIGSMLSFEYLIQLCQSKEWGPLPPEPRVSDGLDQGGDTCVHEIPFHFDLMGLLPQCQQLQMFFLLLARGAEGPLLGVHGIPKEQAVGSTQATGDSAFTSLSVGLPETLKPLISAQPPQWRCYARLVNPQHVFLTFLPATFSDVQRLAACGLEGPPQEETKPKFGDWSGAPSLKDLGGTGIKATKSHVPVLSVTLASDNAQNQGELSPPFRRDLQAYAGRQASQTESADGPRTRCPVYIYSCSLEALREQMVGMQPPQAPRDLIFRTQFLDHPSPSSAWMEPRYKEAANHCALLQEHAQRCYVRGLFRSLQQAQSVTSQDLLTAVDACEELLQEIDITPFLLALCGHTWGLPHAPPSPGPLSPGPFSSSMEEGAEPRERAILASESSIETEDLSEPEFQSTRVPGIPDPGPEISLTDVCQLRGEAHGALHSVIQEKFLEISRLHFRTVPSNPHYFFYCPPSSRREDEGPRDTVDRKISDLEFSEAELMGEEGDTSACCVVTESDPELEVEYRESRESDLGPAGLDSASLSDVDTVNPDEDSFSILGGDSPTGPESFLHDLPPLFLHLTCSVRLRGQHSSVPVCSLPTCLGQVLSSLEGPPVGGRVPLRDLSVTLDVFMLTLPLEVELPTASDPQHHRSTSESSASFPRSPGQPSSLRSDDGLGPPLPPPEEERHPGLSNLATPHRLAIETTMNEIRWLLEDEMVGALRRGGIPQSPALHRAAAHIHSSPGRSTCLRQTLPLSFVFGPERSLTQFKEEFRRLHLPGHVLLEDPDSGFFFVAAGQQPGGSHGEPSSAAWAWHSHEDRAEGIEGETLTASPQAPGSPEDSEGVPLISLPRVPQGGSQPGPSRGLSLMSSQGSVDSDHLGYDGGSSGSDSEGPNDTLGEKAPFTLRTPPGPAPPQPSLSGLPGPCLPDFWLIVRVLQDRVEVYAHARSLIREDGGPGTECRHLQQLLVRRVGEICREVNQRLLLQDLHDSHVCNSLLVAESEEDLWRSETPFHSRQRAPLPSDDYAADESCAPRGYLAATMQFVPGHFSCDVVWGTVIRVHSRLKMGPSMGVSRAIQALRSVLNAFSVVNRKNMFVYQERATKAVYYLRLLETSCSDRPWKGDALPPSLALSRSQEPIYSEEASGPRSPLDMVSSRSSDAARPVGQVDRHIQLLVHGVGQAGPEITDELVRVLCRRLDEATLDVITVMLVRNCKLTPADVEFIQPPGSLPSEVLHLALPTSCRPWLPALAWYLRQNLLIFLHSPKYTDSNSRNHFQHPLPPQGGLPDLDIYLYNKPGGQGTGGKGVACITLAFVDEGGAPLSLALWPPSSPGPPDPLREEEFEQLTQVIRCPVVVDSSSAQNGAPRLRLDVWEKGNISIVQLEEKLRGAARQALADAIIELQLLPASLCTEDTPTGSLRNGSLETKSSAGRASTFPPAPVPGEPVTPPSKAGRRSFWDMLSKTECGDLGSPKTTDDIVLDRPEDTRGRRRHKTESVRTPGGAERAPGSDSGAQRQKRRTTQLEEGEVGTLHPVFARVAQRWMEFMVQIGCASVSRSSAHMVSRFLLPSILSEFTALVTSMAGDTSVRIFEQHLGSEPEIFGPCSPGQLGPSPRPAAERHLLLLGRNFLQWRRPTQQAAKAMQRFEPGGDGSSGRNAPRQRLLLLEVVDKKLQLLTYNWAPDLGAALGRALVRLVQWQNARAHLIFCLLSQKLGLFHHYGQLDFPVRDEKEPNPFLLPTMEVETLIRSASPPLSREQGRLSGSSRGGGPLPLDTFPFDEALRDITAARPSSVLGPVPRPPDPVTYHGQQFLEIKMAERRELERQMKMENLFVTWQQRSTPATMPISAGELETLKQSSRLVHYCATAMLFDPAAWLHGPPETSGPPDGQRRHRPESGSGSREAPTSCESLDVSPPGAREEPWLKELSLAFLQQYVQYLQSIGFVLVPLRPPSPARSTSRPRAMAILGTEGRGSFSCPKTKTDGSPKSTSSPVTTYHLQRALPGGIILMELAFQGCYFCVKQFALECSRIPMGQAVNSQLSMLFTEECDKVRDLMHVHSFSYDFHLRLVHQHVLGAHLVLRHGYHLTTFLRHFLAHHPDGPHFGRNHIYQGTLELPTPLIAAHQLYNYVADHASSYHMKPLRMARPGGPEHNEYALVSAWHSSGSYLDSEGLRHQDDFDVSLLVCHCAAPFEEQGEAERHVLRLQFFVVLTSQRELFPRLTADMRRFRKPPRLPPEPEAPGSSAGSPGEASGLILAPGPAPLFPPLAAEVGMARARLAQLVRLAGGHCRRDTLWKRLFLLEPPGPDRLRLGGRLALAELEELLEAVHAKSIGDIDPQLDCFLSMTVSWYQSLIKVLLSRFPQSCRHFQSPDLGTQYLVVLNQKFTDCFVLVFLDSHLGKTSLTVVFREPFPVQPQDSESPPAQLVSTYHHLESVINTACFTLWTRLL

SEQ ID NO: 21244 - protein, 422 aa, Homo sapiens
MRKWRHREVNLPEVTQQDAVCPAPIPSPGLSAQTGLQKIWGTIHCQVCPGAPAWPGSPWHEEMGLLLLVPLLLLPGSYGLPFYNGFYYSNSANDQNLGNGHGKDLLNGVKLVVETPEETLFTYQGASVILPCRYRYEPALVSPRRVRVKWWKLSENGAPEKDVLVAIGLRHRSFGDYQGRVHLRQDKEHDVSLEIQDLRLEDYGRYRCEVIDGLEDESGLVELELRGVVFPYQSPNGRYQFNFHEGQQVCAEQAAVVASFEQLFRAWEEGLDWCNAGWLQDATVQYPIMLPRQPCGGPGLAPGVRSYGPRHRRLHRYDVFCFATALKGRVYYLEHPEKLTLTEAREACQEDDATIAKVGQLFAAWKFHGLDRCDAGWLADGSVRYPVVHPHPNCGPPEPGVRSFGFPDPQSRLYGVYCYRQH

SEQ ID NO: 21245 - protein, 218 aa, Homo sapiens
MRGRRGDRMTINIQEHMAINVCPGPIRPIRQISDYFPRGPGPEGGGGGGGEAPAHLVPLALAPPAALLGATTPEDGAEVDSYDSDDATALGTLEFDLLYDRASCTLHCSILRAKGLKPMDFNGLADPYVKLHLLPGACKANKLKTKTQRNTLNPVWNEDLTYSGITDDDITHKVLRIAVCDEDKLSHNEFIGEIRVPLRRLKPSQKKHFNICLERQVP

SEQ ID NO: 21246 - protein, 414 aa, Homo sapiens
MAALRYAGLDDTDSEDELPPGWEERTTKDGWVYYANHTEEKTQWEHPKTGKRKRVAGDLPYGWEQETDENGQVFFVDHINKRTTYLDPRLAFTVDDNPTKPTTRQRYDGSTTAMEILQGRDFTGKVVVVTGANSGIGFETAKSFALHGAHVILACRNMARASEAVSRILEEWHKAKVEAMTLDLALLRSVQHFAEAFKAKNVPLHVLVCNAATFALPWSLTKDGLETTFQVNHLGHFYLVQLLQDVLCRSAPARVIVVSSESHRFTDINDSLGKLDFSRLSPTKNDYWAMLAYNRSKLCNILFSNELHRRLSPRGVTSNAVHPGNMMYSNIHRSWWVYTLLFTLARPFTKSMQQGAATTVYCAAVPELEGLGGMYFNNCCRCMPSPEAQSEETARTLWALSERLIQERLGSQSG

SEQ ID NO: 21247 - protein, 50 aa, Homo sapiens
MTVLEQDTQGLDGWWLCSLHGRQGIVPGNRLKILVGMYDKKPAGPGPGPP

SEQ ID NO: 21248 - protein, 542 aa, Homo sapiens
MNGKRPAEPGPARVGKKGKKEVMAEFSDAVTEETLKKQVAEAWSRRTPFSHEVIVMDMDPFLHCVIPNFIQSQDFLEGLQKELMNLDFHEKYNDLYKFQQSDDLKKRREPHISTLRKILFEDFRSWLSDISKIDLESTIDMSCAKYEFTDALLCHDDELEGRRIAFILYLVPPWDRSMGGTLDLYSIDEHFQPKQIVKSLIPSWNKLVFFEVSPVSFHQVSEVLSEEKSRLSISGWFHGPSLTRPPNYFEPPIPRSPHIPQDHEILYDWINPTYLDMDYQVQIQEEFEESSEILLKEFLKPEKFTKVCEALEHGHVEWSSRGPPNKRFYEKAEESKLPEILKECMKLFRSEALFLLLSNFTGLKLHFLAPSEEDEMNDKKEAETTDITEEGTSHSPPEPENNQMAISNNSQQSNEQTDPEPEENETKKESSVPMCQGELRHWKTGHYTLIHDHSKAEFALDLILYCGCEGWEPEYGGFTSYIAKGEDEELLTVNPESNSLALVYRDRETLKFVKHINHRSLEQKKTFPNRTGFWDFSFIYYE

SEQ ID NO: 21249 - protein, 677 aa, Homo sapiens
MHHQQRMAALGTDKELSDLLDFSAMFSPPVSSGKNGPTSLASGHFTGSNVEDRSSSGSWGNGGHPSPSRNYGDGTPYDHMTSRDLGSHDNLSPPFVNSRIQSKTERGSYSSYGRESNLQGCHQQSLLGGDMDMGNPGTLSPTKPGSQYYQYSSNNPRRRPLHSSAMEVQTKKVRKVPPGLPSSLVLSPQVYAPSASTADYNRDSPGYPSSKPATSTFPSSFFMQDGHHSSDPWSSSSGMNQPGYAGMLGNSSHIPQSSSYCSLHPHERLSYPSHSSADINSSLPPMSTFHRSGTNHYSTSSCTPPANGTDSIMANRGSGAAGSSQTGDALGKALASIYSPDHTNNSFSSNPSTPVGSPPSLSAGTAVWSRNGGQASSSPNYEGPLHSLQSRIEDRLERLDDAIHVLRNHAVGPSTAMPGGHGDMHGIIGPSHNGAMGGLGSGYGTGLLSANRHSLMVGTHREDGVALRGSHSLLPNQVPVPQLPVQSATSPDLNPPQDPYRGMPPGLQGQSVSSGSSEIKSDDEGDENLQDTKSSEDKKLDDDKKDIKSITRSRSSNNDDEDLTPEQKAEREKERRMANNARERLRVRDINEAFKELGRMVQLHLKSDKPQTKLLILHQAVAVILSLEQQVRERNLNPKAACLKRREEEKVSSEPPPLSLAGPHPGMGDASNHMGQM

SEQ ID NO: 21250 - protein, 545 aa, Homo sapiens
MVPSSPAVEKQVPVEPGPDPELRSWRHLVCYLCFYGFMAQIRPGESFITPYLLGPDKNFTREQVTNEITPVLSYSYLAVLVPVFLLTDYLRYTPVLLLQGLSFVSVWLLLLLGHSVAHMQLMELFYSVTMAARIAYSSYIFSLVRPARYQRVAGYSRAAVLLGVFTSSVLGQLLVTVGRVSFSTLNYISLAFLTFSVVLALFLKRPKRSLFFNRDDRGRCETSASELERMNPGPGGKLGHALRVACGDSVLARMLRELGDSLRRPQLRLWSLWWVFNSAGYYLVVYYVHILWNEVDPTTNSARVYNGAADAASTLLGAITSFAAGFVKIRWARWSKLLIAGVTATQAGLVFLLAHTRHPSSIWLCYAAFVLFRGSYQFLVPIATFQIASSLSKELCALVFGVNTFFATIVKTIITFIVSDVRGLGLPVRKQALRMSRPRLGLCLPGPFPPQSAAPARAGMAASSAEDPGSERGPWRRAGTVAARGDPGGERGPWRREGTLAARGDPGGERGPWWREGTLAVRGDPGGERGPWRREGTLVVKGARG

SEQ ID NO: 21251 - protein, 506 aa, Homo sapiens
MADHNPDSDSTPRTLLRRVLDTADPRTPRRPRSARAGARRALLETASPRKLSGQTRTIARGRSHGARSVGRSAHIQASGHLEEQTPRTLLKNILLTAPESSILMPESVVKPVPAPQAVQPSRQESSCGSLELQLPELEPPTTLAPGLLAPGRRKQRLRLSVFQQGVDQGLSLSQEPQGNADASSLTRSLNLTFATPLQPQSVQRPGLARRPPARRAVDVGAFLRDLRDTSLAPPNIVLEDTQPFSQPMVGSPNVYHSLPCTPHTGAEDAEQAAGRKTQSSGPGLQKNSPGKPAQFLAGEAEEVNAFALGFLSTSSGVSGEDEVEPLHDGVEEAEKKMEEEASPESASSTPESLQARRHHQFLEPAPAPGAAVLSSEPAEPLLVRHPPRPRTTGPRPRQDPHKAGLSHYVKLFSFYAKMPMERKALEMVEKCLDKYFQHLCDDLEVFAAHAGRKTVKPEDLELLMRRQGLVTDQVSLHVLVERHLPLEYRQLLIPCAYSGNSVFPAQ

SEQ ID NO: 21252 - protein, 150 aa, Homo sapiens
MVKNVLERPEDQRLIYSGKLLLDHQCLRDLLPKVAESTEEPAGSNRGQYPEDSSSDGLRQREVLRNLSSPGWENISRPEAAQQAFQGLGPGFSGYTPYGWLQLSWFQQIYARQYYMQYLAATAASGAFVPPPSAQEIPVVSAPAPAPIHN

SEQ ID NO: 21253 - protein, 1111 aa, Homo sapiens
MTEFFHDCTTNERKREIEELLNNFAQQIGAWRFCLYFLSSTRNDYVMMYSLTVFENLINKMWLGVPSQDKMEIRSCLPKLLLAHHKTLPYFIRNKLCKVIVDIGRQDWPMFYHDFFTNILQLIQSPVTTPLGLIMLKTTSEELACPREDLSVARKEELRKLLLDQVQTVLGLLTGILETVWDKHSVTAATPPPSPTSGESGDLLSNLLQSPSSAKLLNQPIPILDVESEYICSLALECLAHLFSWIPLSASITPSLLTTIFHFARFGCDIRARKMASVNGSSQNCVSGQERGRLGVLAMSCINELMSKNCVPMEFEEYLLRMFQQTFYLLQKITKDNNAHTVKSRLEELDESYIEKFTDFLRLFVSVHLRRIESYSQFPVVEFLTLLFKYTFHQPTHEGYFSCLDIWTLFLDYLTSKIKSRLGDKEAVLNRYEDALVLLLTEVLNRIQFRYNQAQLEELDDETLDDDQQTEWQRYLRQSLEVVAKVMELLPTHAFSTLFPVLQDNLEVYLGLQQFIVTSGSGHRLNITAENDCRRLHCSLRDLSSLLQAVGRLAEYFIGDVFAARFNDALTVVERLVKVTLYGSQIKLYNIETAVPSVLKPDLIDVHAQSLAALQAYSHWLAQYCSEVHRQNTQQFVTLISTTMDAITPLISTKVQDKLLLSACHLLVSLATTVRPVFLISIPAVQKVFNRITDASALRLVDKAQVLVCRALSNILLLPWPNLPENEQQWPVRSINHASLISALSRDYRNLKPSAVAPQRKMPLDDTKLIIHQTLSVLEDIVENISGESTKSRQICYQSLQESVQVSLALFPAFIHQSDVTDEMLSFFLTLFRGLRVQMGVPFTEQIIQTFLNMFTREQLAESILHEGSTGCRVVEKFLKILQVVVQEPGQVFKPFLPSIIALCMEQVYPIIAERPSPDVKAELFELLFRTLHHNWRYFFKSTVLASVQRGIAEEQMENEPQFSAIMQAFGQSFLQPDIHLFKQNLFYLETLNTKQKLYHKKIFRTAMLFQFVNVLLQVLVHKSHDLLQEEIGIAIYNMASVDFDGFFAAFLPEFLTSCDGVDANQKSVLGRNFKMDRDLPSFTQNVHRLVNDLRYYRLCNDSLPPGTVKL

SEQ ID NO: 21254 - protein, 2424 aa, Homo sapiens
MSSVKRPRGRPPSSKKSDGSGTYTKLQNTQVRVMSEKKQRKKVESESKQEKANRIISEAIAKAKERGERNIPRVMSPENFPTASVEGKEEKKGRRMKSKPKDKDSKKTKTCSKLKEKTKIGKLIITLGKKQKRKNESSDEISDAEQMPQHTLKDQDSQKRRSNRQIKRKKYAEDIEGKQSEEEVKGSMKIKKNSAPLPGEQPLQLFVENPSEEDAAIVDKILSSRTVKKEISPGVMIDTEEFFVKYKNYSYLHCEWATEEQLLKDKRIQQKIKRFKLRQAQRAHFFADMEEEPFNPDYVEVDRVLEVSFCEDKDTGEPVIYYLVKWCSLPYEDSTWELKEDVDLAKIEEFEQLQASRPDTRRLDRPPSNIWKKIDQSRDYKNGNQLREYQLEGLNWLLFNWYNRRNCILADEMGLGKTIQSITFLYEILLTGIRGPFLIIAPLSTIANWEREFRTWTDINVVVYHGSLISRQMIQQYEMYFRDSQGRIIRGAYRFQAIITTFEMILGGCGELNAIEWRCVIIDEAHRLKNKNCKLLEGLKLMNLEHKVLLTGTPLQNTVEELFSLLHFLEPLRFPSESTFMQEFGDLKTEEQVQKLQAILKPMMLRRLKEDVEKKLAPKEETIIEVELTNIQKKYYRAILEKNFSFLSKGAGQTNVPNLVNTMMELRKCCNHPYLIKGAEEKILGEFRDTYNPAASDFHLQAMIQSAGKLVLIDKLLPKMKAGGHKVLIFSQMVRCLDILEDYLIHKRYLYERIDGRVRGNLRQAAIDRFSKPDSDRFVFLLCTRAGGLGINLTAADTCIIFDSDWNPQNDLQAQARCHRIGQNKAVKVYRLVTRNSYEREMFDRASLKLGLDKAVLQSMSGRESNVGGIQQLSKKEIEDLLRRGAYGAIMEEEDEGSKFCEEDIDQILLRRTKTITIESEGRGSTFAKASFVASGNRTDISLDDPNFWQKWAKKAEIDIEAISGRNSLVIDTPRIRKQTRPFSATKDELAELSEAESEGDEKPKLRRPCDRSNGYGRTECFRVEKNLLVYGWGRWREILSHGRFKRQLNEHDVEIICRALLAYCLVHYRGDEKIKGFIWDLITPTEDGQTRELQNHLGLSAPVPRGRKGKKVKTQTSSFDIQKAEWLRKYNPEQLLQDEGYKKHIKHHCNKVLLRVRMLYYLKQEVIGNECQKVFDGVDASDIDVWVPEPDHSEVPAEWWDFDADKSLLIGVFKHGYEKYNTIRADPALCFLERVGKPDEKAVAAEQRANDYMDGDVEDPEYKPAPAIFKDDIEDDVSSPGDLVIADGDGQLMEGDKVYWPTQSALTTRLRRLITAYQRTNKNRQIQQIQPTFSVPTSVMQPIYEEATLNPKMAAKIERQQRWTRREEADFYRVVSTFGVVFDPDRGQFDWTKFRAMARLHKKTDDSLEKYLYAFMSMCRRVCRLPSKEELVDPNIFIQPITEERASRTLYRIELLRKVREQALRHPQLFERLKLCHPNPDLPVWWECGPHDRDLLIGAAKHGVSRTDYHILRDPELSFMAAQRNYSQSKMAHSRTSTPLLQQYQVALSASPLTSLPRLLDAKGIILEEMKVKSENLKEEPQSSEEESMSSVETRTLIKSEPVSPKNGVLPQATGDQKSGGKCETDRRMVAARTEPLTPNPASKKPRVHKRGSESSSDSDSDSERSSCSSRSSSSSSSSSCSHSRSGSSSSSSSSCSSASSSSSSSTSSSSSSSSSSSEESDSDEEEAQKRAESTTHMKAYDEESVASLSTTQDETQDSFQMNNGTPESAYILQGGYMLAASYWPKDRVMINRLDSICQTVLKGKWPSARRSYDANTVASFYTTKLLDSPGAATEYSDPSVPTPPGAGVKEEHDQSTQMSKVKKHVREKEFTVKIKDEGGLKLTFQKQGLAQKRPFDGEDGALGQQQYLTRLRELQSASETSLVNFPKSIPVSGTSIQPTLGANGVILDNQPIVKKRRGRRKNVEGVDIFFFNRNKPPNHVSLGLTSSQISTGINPALSYTQPQGIPDTESPVPVINLKDGTRLAGDDAPKRKDLEKWLKEHPGYVEDLGAFIPRMQLHEGRPKQKRHRCRNPNKLDVNSLTGEERVQLINRRNARKVGGAFAPPLKDLCRFLKENSEYGVAPEWGDVVKQSGFLPESMYERILTGPVVREEVSRRGRRPKSGIAKATAAAAAASATSVSGNPLLANGLLPGVDLTTLQALQQNLQNLQSLQVTAGLMGMPTGLPSGGEAKNMAAMFPMLLSGMAGLPNLLGMGGLLTKPTESGTEDKKGSDSKESEGKTERTESQSSENGGENSVSSSPSTSSTAALNTAAAANPLALNPLLLSNILYPGMLLTPGLNLHIPTLSQSNTFDVQNKNSDLGSSKSVEVKEEDSRIKDQEDKGGTEPSPLNENSTDEGSEKADASSGSDSTSSSSEDSDSSNED

SEQ ID NO: 21255 - protein, 418 aa, Homo sapiens
MHPEPSEPATGGAAELDCAQEPGVEESAGDHGSAGRGGCKEEINDPKEICVGSSDTSYHSQQKQSGDNGSGGHFAHPREDREDRGPRMTKSSLQKLCKQHKLYITPALNDTLYLHFKGFDRIENLEEYTGLRCLWLQSNGIQKIENLEAQTELRCLFLQMNLLRKIENLEPLQKLDALNLSNNYIKTIENLSCLPVLNTLQMAHNHLETVEDIQHLQECLRLCVLDLSHNKLSDPEILSILESMPDLRVLNLMGNPVIRQIPNYRRTVTVRLKHLTYLDDRPVFPKDRACAEAWARGGYAAEKEERQQWESRERKKITDSIEALAMIKQRAEERKRQRESQERGEMTSSDDGENVPASAEGKEEPPGDRETRQKMELFVKESFEAKDELCPEKPSGEEPPVEAKREDGDPATVTACEG

SEQ ID NO: 21256 - protein, 498 aa, Homo sapiens
MWNFRELSENSQQAANILSGACGLQRGDRVAVMLPRVPEWWLVILGCIRAGLIFMPGTIQMKSTDILYRLQMSKAKAIVAGDEVIQEVDTVASECPSLRIKLLVSEKSCDGWLNFKKLLNEASTTHHCVETGSQEASAIYFTSGTSGLPKMAEHSYSSLGLKAKMDAGWTGLQASDIMWTISDTGWILNILGSLLESWTLGACTFVHLLPKFDPLVILKTLSSYPIKSMMGAPIVYRMLLQQDLSSYKFPHLQNCLAGGESLLPETLENWRAQTGLDIREFYGQTETGLTCMVSKTMKIKPGYMGTAASCYDVQVIDDKGNVLPPGTEGDIGIRVKPIRPIGIFSGYVENPDKTAANIRGDFWLLGDRGIKDEDGYFQFMGRADDIINSSGYRIGPSEVENALMKHPAVVETAVISSPDPVRGEVVKAFVILASQFLSHDPEQLTKELQQHVKSVTAPYKYPRKIEFVLNLPKTVTGKIQRTKLRDKEWKMSGKARAQ

SEQ ID NO: 21257 - protein, 210 aa, Homo sapiens
REIFEQHLKSLKLTQSSTFYSQRLAELTPGFSGADIANICNEAALHAAREGHTSVHTLNFEYAVERVLAGTAKKSKILSKEEQKVVAFHESGHALVGWMLEHTEAVMKVSITPRTNAALGFAQMLPRDQHLFTKEQLFERMCMALGGRASEALSFNEVTSALLCACSAEDASVSTPPSRGTGRPEEGHPHRLLHGEAVWDGTWHRAHLLP

SEQ ID NO: 21258 - protein, 451 aa, Homo sapiens
MPLQKFHYRNLLLGEHDVPLTCIEQIVTVNDHKRKQKVLGPNQKLKFNPTELIIYCKDFRIVRFRFDESGPESAKKVCLAIAHYSQPTDLQLLFAFEYVGKKYHNSANKINGIPSGDGGGGGGGGNGAGGGSSQKTPLFETYSDWDREIKRTGASGWRVCSINEGYMISTCLPEYIVVPSSLADQDLKIFSHSFVGRRMPLWCWSHSNGSALVRMALIKDVLQQRKIDQRICNAITKSHPQRSDVYKSDLDKTLPNIQEVQAAFVKLKQLCVNEPFEETEEKWLSSLENTRWLEYVRAFLKHSAELVYMLESKHLSVVLQEEEGRDLSCCVASLVQVMLDPYFRTITGFQSLIQKEWVMAGYQFLDRCNHLKRSEKESPLFLLFLDATWQLLEQYPAAFEFSETYLAVLYDSTRISLFGTFLFNSPHQRVKQSTVSRIKSCTKQDYFPSRV

SEQ ID NO: 21259 - protein, 280 aa, Homo sapiens
MRASKGSEGCQHAVTSQLVTGAGGDQTEMFSPPVSSGKNGPTSLASGHFTGSNVEDRSSSGSWGNGGHPSPSRNYGDGTPYDHMTSRDLGSHDNLSPPFVNSRIQSKTERGSYSSYGRESNLQGCHQQSLLGGDMDMGNPGTLSPTKPGSQYYQYSSNNPRRRPLHSSAMEVQTKKVRKVPPGLPSSVYAPSASTADYNRDSPGYPSSKPATSTFPSSFFMQDGHHSSDPWSSSSGMNQPGYAGMLGNSSHIPQSSSYCSLHPHERLSYPSHSSADINSS

SEQ ID NO: 21260 - protein, 184 aa, Homo sapiens
VDSAGSYISHDILHNGRKKRSAQNARSSLHYRFSAFGQELHLELKPSAILSSHFIVQVLGKDGASETQKPEVQQCFYQGFIRNDSSSSVAVSTCAGLLLAQEHNYSSPAGHHPHVLYKRTAEEKIQRYRGYPGSGRNYPGYSPSHIPHASQSRETEYHHRRLQKQHFCGRRKKCICSQASHRGH

SEQ ID NO: 21261 - protein, 462 aa, Homo sapiens
KIKELRQGLDTDAESVNLDDYNIHVIASVFKQWLRDLPNPLMTFELYEEFLRAMGLQERKETIRGVYSVIDQLSRTHLNTLERLIFHLVRIALQEDTNRMSANALAIVFAPCILRCPDTTDPLQSVQDISKTTTCVELIVVEQMNKYKARLKDISSLEFAENKAKTRLSLIRRSMKPVLIAVRFMNITRNSVSGKGRIRRGNYPGPSSPVVVRLPSVSDVSEETLTSEAAMETDITEQQQAAMQQEERVLTEQIENLQKEKEELTFEMLVLEPRASDDETLESEASIGTADSSENLNMESEYAISEKSERSLALSSLKTAGKSEPSSKLRKQLKKQQDSLDVVDSSVSSLCLSNTASSHGTRKLFQIYSKSPFYRAASGNEALGMEGPLGQTKFLEDKPQFISRGTFNPEKGKQKLKNVKNSPQKTKETPEGTVMSGRRKTVDPDCTSNQQLALFGNNEFMV

SEQ ID NO: 21262 - protein, 734 aa, Homo sapiens
MPAKGRYFLNEGEEGPDQDALYEKYQLTSQHGPLLLTLLLVAATACVALIIIAFSQGDPSRHQAILGMAFLVLAVFAALSVLMYVECLLRRWLRALALLTWACLVALGYVLVFDAWTKAACAWEQVPFFLFIVFVVYTLLPFSMRGAVAVGAVSTASHLLVLGSLMGGFTTPSVRVGLQLLANAVIFLCGNLTGAFHKHQMQDASRDLFTYTVKCIQIRRKLRIEKRQQENLLLSVLPAHISMGMKLAIIERLKEHGDRRCMPDNNFHSLYVKRHQNVSILYADIVGFTQLASDCSPKELVVVLNELFGKFDQIAKANECMRIKILGDCYYCVSGLPVSLPTHARNCVKMGLDMCQAIKQVREATGVDINMRVGIHSGNVLCGVIGLRKWQYDVWSHDVSLANRMEAAGVPGRVHITEATLKHLDKAYEVEDGHGQQRDPYLKEMNIRTYLVIDPRSQQPPPPSQHLPRPKGDAALKMRASVRMTRYLESWGAARPFAHLNHRESVSSGETHVPNGRRPKSVPQRHRRTPDRSMSPKGRSEDDSYDDEMLSAIEGLSSTRPCCSKSDDFYTFGSIFLEKGFEREYRLAPIPRARHDFACASLIFVCILLVHVLLMPRTAALGVSFGLVACVLGLVLGLCFATKFSRCCPARGTLCTISERVETQPLLRLTLAVLTIGSLLTVAIINLPLMPFQVPELPVGNETGLLAASSKTRALCEPLPHLHTVFSRLNELTS

SEQ ID NO: 21263 - protein, 802 aa, Homo sapiens
MPWLPSPGIGQYIFGDFSPDEFNQFFVTPRSSVELPPYSGTVLCGTQAVDKLPDGQEYQRIEFGVDEVIEPSDTLPRTPSYSISSTLNPQAPEFILGCTASKITPDGITKEASYGSIDCQYPGSALALDGSSNVEAEVLENDGVSGGLGQRERKKKKKRPPGYYSYLKDGGDDSISTEALVNGHANSAVPNSVSAEDAEFMGDMPPSVTPRTCNSPQNSTDSVSDIVPDSPFPGALGSDTRTAGQPEGGPGADFGQSCFPAEAGRDTLSRTAGAQPCVGTDTTENLGVANGQILESSGEGTATNGVELHTTESIDLDPTKPESASPPADGTGSASGTLPVSQPKSWASLFHDSKPSSSSPVAYVETKYSPPAISPLVSEKQVEVKEGLVPVSEDPVAIKIAELLENVTLIHKPVSLQPRGLINKGNWCYINATLQALVACPPMYHLMKFIPLYSKVQRPCTSTPMIDSFVRLMNEFTNMPVPPKPRQALGDKIVRDIRPGAAFEPTYIYRLLTVNKSSLSEKGRQEDAEEYLGFILNGLHEEMLNLKKLLSPSNEKLTISNGPKNHSVNEEEQEEQGEGSEDEWEQVGPRNKTSVTRQADFVQTPITGIFGGHIRSVVYQQSSKESATLQPFFTLQLDIQSDKIRTVQDALESLVARESVQGYTTKTKQEVEISRRVTLEKLPPVLVLHLKRFVYEKTGGCQKLIKNIEYPVDLEISKELLSPGVKNKNFKCHRTYRLFAVVYHHGNSATGGHYTTDVFQIGLNGWLRIDDQTVKVINQYQVVKPTAERTAYLLYYRRVDLL

SEQ ID NO: 21264 - protein, 264 aa, Homo sapiens
MTCWDNESILLAQSWMPRETVIFASDVRINFDKFRNCMTATVISKTIITTNPDIPEANILLNFIRENKETNVLDDEIDSYFKESINLSTIVDVYTVEQLKGKALKNEGKADPSYGILYAYISTLNIDDETTKVVRNRCSSCGYIVNEASNMCTTCNKNSLDFKSVFLSFHVLIDLTDHTGTLHSCSLTGSVAEETLGCTVHEFLAMTDEQKTALKWQFLLERSKIYLKFVLSHRARSGLKISVLSCKLADPTEASRNLSGQKHV

SEQ ID NO: 21265 - protein, 785 aa, Homo sapiens
MPKIVLNGVTVDFPFQPYKCQQEYMTKVLECLQQKVNGILESPTGTGKTLCLLCTTLAWREHLRDGISARKIAERAQGELFPDRALSSWGNAAAAAGDPIACYTDIPKIIYASRTHSQLTQVINELRNTSYRPKVCVLGSREQLCIHPEVKKQESNHLQIHLCRKKVASRSCHFYNNVEEKSLEQELASPILDIEDLVKSGSKHRVCPYYLSRNLKQQADIIFMPYNYLLDAKSRRAHNIDLKGTVVIFDEAHNVEKMCEESASFDLTPHDLASGLDVIDQVLEEQTKAAQQGEPHPEFSADSPSPGLNMELEDIAKLKSKCCPPRLLAAGWGLLLARRWVTPPRPTVILLRLEGAIDAVELPGDDSGVTKPGSYIFELFAEAQITFQTKGCILDSLDQIIQHLAGRAGVFTNTAGLQKLADIIQIVFSVDPSEGSPGSPAGLGALQSYKVHIHPDAGHRRTAQRSDAWSTTAARKRGKVLSYWCFSPGHSMHELVRQGVRSLILTSGTLAPVSSFALEMQIPFPVCLENPHIIDKHQIWVGVVPRGPDGAQLSSAFDRRFSEECLSSLGKALGNIARVVPYGLLIFFPSYPVMEKSLEFWRARDLARKMEALKPLFVEPRSKGSFSETISAYYARVAAPGSTGATFLAVCRGKASEGLDFSDTNGRGVIVTGLPYPPRMDPRVVLKMQFLDEMKGQGGAGGQFLSGQEWYRQQASRAVNQAIGRVIRHRQDYGAVFLCDHRCQRRPPGLQHPVCVEKMLSARPSRLAPSSPPGKLRVWTCMSPA

SEQ ID NO: 21266 - protein, 234 aa, Homo sapiens
MYTTNQEQLQEIEYLTKQVELLRQMNEQHAKVYEQLDVTARELEETNQKLVADSKASQQKILSLTETIECLQTNIDHLQSQVEELKSSGQGRRSPGKCDQEKPAPSFACLKELYDLRQHFVYDHVFAEKITSLQGQPSPDEEENEHLKKTVTMLQAQLSLERQKRVTMEEEYGLVLKENSELEQQLGATGAYRARALELEAEVAEMRQMLQSEHPFVNGVEKLVPDSLYVPFKE

SEQ ID NO: 21267 - protein, 80 aa, Homo sapiens
MTVLEQDTQGLDGWWLCSLHGRQGIVPGNRLKILVGMYDKKPAGPGPGPPATPAQPQPGLHAPAPPASQYTPMLPNTYQP

SEQ ID NO: 21268 - protein, 1173 aa, Homo sapiens
LTCDLEDDSDKLQEKSWKSSCNEGESSSTSYMHQRSPGGPTKLIEIISDCNWEEDRNKILSILSQHINSNMPQSLKVNGKSYPQAKLLLGQMGALHPANRLAAYITGRLRPSVLDLSTLSTVISKVASNAKVAASRKPRTLLPSTSNSKMASSSGTATNRPGKNLKAFVPAKRPIAARPSPGGVFTQFVMSKVGALQQKIPGVSTPQTLAGTQKFSIRPSPVMVVTPVVSSEPVQVCSPVTAAVTTTTPQVFLENTTAVTPMTAISDVETKETTYSSGATTTGVVEVSETNTSTSVTSTQSTATVNLTKTTGITTPVASVAFPKSLVASPSTITLPVASTASTSLVVVTAAASSSMVTTPTSSLGSVPIILSGINGSPPVSQRPENAAQIPVATPQVSPNTVKRAGPRLLLIPVQQGSPTLRPVSNTQLQGHRMVLQPVRSPSGMNLFRHPNGQIVQLLPLHQLRGSNTQPNLQPVMFRNPGSVMGIRLPAPSKPSETPPSSTSSSAFSVMNPVIQAVGSSSAVNVITQAPSLLSSGASFVSQAGTLTLRISPPEPQSFASKTGSETKITYSSGGQPVGTASLIPLQSGSFALLQLPGQKPVPSSILQHVASLQMKRESQNPDQKDETNSIKREQETKKVLQSEGEAVDPEANVIKQNSGAATSEETLNDSLEDRGDHLDEECLPEEGCATVKPSEHSCITGSHTDQDYKDVNEEYGARNRKSSKEKVAVLEVRTISEKASNKTVQNLSKVQHQKLGDVKVEQQKGFDNPEENSSEFPVTFKEESKFELSGSKVMEQQSNLQPEAKEKECGDSLEKDRERWRKHLKGPLTRKCVGASQECKKEADEQLIKETKTCQENSDVFQQEQGISDLLGKSGITEDARVLKTECDSWSRISNPSAFSIVPRRAAKSSRGNGHFQGHLLLPGEQIQPKQEKKGGRSSADFTVLDLEEDDEDDNEKTDDSIDEIVDVVSDYQSEEVDDVEKNNCVEYIEDDEEHVDIETVEELSEEINVAHLKTTAAHTQSFKQPSCTHISADEKAAERSRKAPPIPLKLKPDYWSDKLQKEAEAFAYYRRTHTANERRRRGEMRDLFEKLKITLGLLHSSKVSKSLILTRAFSEIQGLTDQADKLIGQKNLLTRKRNILIRKVSSLSGKTEEVVLKKLEYIYAKQQALEA

SEQ ID NO: 21269 - protein, 339 aa, Homo sapiens
MSASAATGVFVLSLSAIPVTYVFNHLAAQHDSWTIVGVAALILFLVALLARVLVKRKPPRDPLFYVYAVFGFTSVVNLIIGLEQDGIIDGFMTHYLREGEPYLNTAYGHMICYWDGSAHYLMYLVMVAAIAWEETYRTIGLYWVGSIIMSVVVFVPGNIVGKYGTRICPAFFLSIPYTCLPVWAGFRIYNQPSENYNYPSKVIQEAQAKDLLRRPFDLMLVVCLLLATGFCLFRGLMLAYMFYSVPYFVTALYGLVVPGCSWMPDITLIHAGGLAQAQFSHIGASLHARTAYVYRVPEEAKILFLALNIAYGVLPQLLAYRCIYKPEFFIKTKAEEKVE

SEQ ID NO: 21270 - protein, 179 aa, Homo sapiens
NFQPKMGELYMLLAAELSSCSAFFVAVALTNLEDIENAKRAYAEAVHLDKCNPLVNLNYAVLLYNQGEKKNALAQYQEMEKKVSLLKDNSSLEFDSEMVEMAQKLGAALQVGEALVWTKPVKDPKSKHQTTSTSKPASFQQPLGSNQALGQAMSSAAAYRTLPSGAGGTSQFTKPPSLP

SEQ ID NO: 21271 - protein, 279 aa, Homo sapiens
MATKRLARQLGLIRRKSIAPANGNLGRSKSKQLFDYLIVIDFESTCWNDGKHHHSQEIIEFPAVLLNTSTGQIDSEFQAYVQPQEHPILSEFCMELTGIKQAQVDEGVPLKICLSQFCKWIHKIQQQKNIIFATGISEPSASEVKLCAFVTWSDWDLGVCLEYECKRKQLLKPVFLNSWIDLRATYKLFYRRKPKGLSGALQEVGIEFSGREHSGLDDSRNTALLAWKMIRDGCVMKITRSLNKVVPKGIHAVPKLSHQQKNNPSLFMKKSLHHLIAPQ

SEQ ID NO: 21272 - protein, 984 aa, Homo sapiens
MSSAEIIGSTNLIILLEDEVFADFFNTFLSLPVFGQTPFYTVENSQWSLWPEIPCNLIAKYKGLLTWLEKCRLPFFCKTNLCFHYILCQEFISFIKSPEGAKMMRWKKADQWLLQKCIGGVRGMWRFYSYLTGSAGEELVDFWILAENILSIDEMDLEVRDYYLSLLLMLRATHLQEGSRVVTLCNMNIKSLLNLSIWHPNQSTTRREILSHMQKVALFKLQSYWLPNFYTHTKMTMAKEEACHGLMQEYETRLYSVCYTHIGGLPLNMSIKKCHHFQKRYSSRKAKRKMWQLVDPDSWSLEMDLKPDAIGMPLQETCPQEKVVIQMPSLKMASSKETRISSLEKDMHYAKISSMENKAKSHLHMEAPFETKVSTHLRTVIPIVNHSSKMTIQKAIKQSFSLGYIHLALCADACAGNPFRDHLKKLNLKVEIQLLDLWQDLQHFLSVLLNNKKNGNAIFRHLLGDRICELYLNEQIGPCLPLKSQTIQGLKELLPSGDVIPWIPKAQKEICKMLSPWYDEFLDEEDYWFLLFTTQNRFISSRQHKREFIGKEENILLYKRIQQSLELSQALADMKEMDYRQWRKIATEDLKQGGSLQVELTSPVFLTDITKMSFEELCYKNPKMAIQKISDDYKIYCEKAPKIDFKMEIIKETKTVSRSNRKMSLLKRTLVRKPSMRPRNLTEVLLNTQHLEFFREFLKERKAKIPLQFLTAVQKISIETNEKICKSLIENVIKTFFQGQLSPEEMLQCDAPIIKEIASMRHVTTSTLLTLQGHVMKSIEEKWFKDYQDLFPPHHQEVEVQSEVQISSRKPSKIVSTYLQESQKKGWMRMISFIRSFCKYRRFMLNPSKRQEFEDYLHQEMQNSKENFTTAHNTSGRSAPPSTNVRSADQENGEITLVKRRIFGHRIITVNFAINDLYFFSEMEKFNDLVSSAHMLQVNRAYNENDVILMRSKMNIIQKLFLNSDIPPKLRVLFLEGNPLLLTV

SEQ ID NO: 21273 - protein, 75 aa, Homo sapiens
MATVLKTIVLIPCIGVLEQNNFSLNRRMQKARHCGHCPEEWITYSNSCYYIGKERRTWEERVCWPVLRRTLICFL

SEQ ID NO: 21274 - protein, 382 aa, Homo sapiens
MATRRLTDAFLLLRNNSIQNRQLLAEQVSSHITSSPLHSRSIAAELDELADDRMALVSGISLDPEAAIGVTKRPPPKWVDGVDEIQYDVGRIKQKMKELASLHDKHLNRPTLDDSSEEEHAIEITTQEITQLFHRCQRAVQALPSRARACSEQEGRLLGNVVASLAQALQELSTSFRHAQSGYLKRMKNREERSQHFFDTSVPLMDDGDDNTLYHRGFTEDQLVLVEQNTLMVEEREREIRQIVQSISDLNEIFRDLGAMIVEQGTVLDRIDYNVEQSCIKTEDGLKQLHKDFSHVEGLLSQSLRLWKSYYICQGMALVSHPLGRSSSCLSPLECRVPVCNVFANRKKSERSSYTLACSVPGTGGKKNNKKSKRPAFRMLKL

SEQ ID NO: 21275 - protein, 1097 aa, Homo sapiens
MDFLRLYLPGLHQALRGALDSLGTFVSYLLGDAVPTVEREAQAAEELGVVAVGKTGKIVEEEAQEDLEGLRGSQNEGAGRLRGPGDDRRHEVGSSAVEQTWGWGDGSSHGSQAERQDSGAGETAKAARCQEPSAHLEARKKSKAGSGACQDRSGQAQERQESHEQEVNREERLRSWEQEEEEEEVRAREPGMARGAESEWTWHGETEGKAGAVGPKAAGDNREMEQGVREADAGETEEPGAEGAGKGEEVVVVEKACESTRAWGTWGPGAEPEDWGILGREEARTTPGREEARAILDGEEARTISGGEEAETASGGEEAETASGGEEAGTASGGEEAGIASGGEAGTASGGEEAGTASGGEEAGTASGGDEAWTTSGKEEADLLGVRQTEYGAVPGERLLEATGKVWVLEEEGDEEREAEVSPFPKQPQVLGTERTEEAAESQTAGREAVGGQEAGESFEGQVDLRGKEAEMRQDLGIRADRARMEELVQAEEAQEERGSSRDPVAELPSDGEAEGTADLEATPEARPEEELTGEESEAAQTSCGLLGVEWGGLTHSVTKGQGPELMGGAQTPTKQPEEREAGEVELMGVLALSKEEQERSLEAGPRHAGSVKPEASEAFPGAWENRTRKDMERGNTQEDAADGEQREEEETAGGQTLAAEAEGDRESELSEVPEAGGEGLTTQDAGCGTEEGEASVSENQELDGSTGADAGPCPSLGEAYARETEDEEAEADRTSRRGWRLQAVAVGLPDREDAQTGSVAAGIMGGDVVPHISAAGAGEALEGVLGQGWDSKEKEEAAAGEHAGGQEFGLEGSAEEEVTGRGSQVEAFESREGGPWGGRVEAEESAGAEDSCGLDPAGSQTARAEGMGAMVEAGGLLEKWTLLEEEAVGWQEREQREDSEGRCGDYHPEGEAPRLLDAEGLMVTGGRRAEAKETEPESLEHVRGQEEQPTHQAPAEAAPESVGEAETAEAMGSARGGAANSWSEAPLPGSLLDVSVPRSRVHLSRSSSQRRSRPSFRRTPAWEQQEEPPAPNPPEEELSAPEQRPLQLEEPLEPSPLRHDGTPVPARRRPLGHGFGLAHPGMMQELQARLGRPKPQ

SEQ ID NO: 21276 - protein, 1083 aa, Homo sapiens
PYKPQWCRSREAWALYLFSPQNRFRVSCQKVITHKMFDHVVLVFIFLNCVTIALERPDIDPGSTERVFLSVSNYIFTAIFVAEMMVKVVALGLLSGEHAYLQSSWNLLDGLLVLVSLVDIVVAMASAGGAKILGVLRVLRLLRTLRPLRVISRAPGLKLVVETLISSLRPIGNIVLICCAFFIIFGILGVQLFKGKFYYCEGPDTRNISTKAQCRAAHYRWVRRKYNFDNLGQALMSLFVLSSKDGWVNIMYDGLDAVGVDQQPVQNHNPWMLLYFISFLLIVSFFVLNMFVGVVVENFHKCRQHQEAEEARRREEKRLRRLERRRRSTFPSPEAQRRPYYADYSPTRRSIHSLCTSHYLDLFITFIICVNVITMSMEHYNQPKSLDEALKYCNYVFTIVFVFEAALKLVAFGFRRFFKDRWNQLDLAIVLLSLMGITLEEIEMSAALPINPTIIRIMRVLRIARVLKLLKMATGMRALLDTVVQALPQVGNLGLLFMLLFFIYAALGVELFGRLECSEDNPCEGLSRHATFSNFGMAFLTLFRVSTGDNWNGIMKDTLRECSREDKHCLSYLPALSPVYFVTFVLVAQFVLVNVVVAVLMKHLEESNKEAREDAELDAEIELEMAQGPGSARRVDADRPPLPQESPGARDAPNLVARKVSVSRMLSLPNDSYMFRPVVPASAPHPRPLQEVEMETYGAGTPLESCASLQIPLAVSSPARSGEPLHALSPRGTARSPSLSRLLCRQEAVHTDSLEGKIDSPRDTLDPAEPGEKTPVRPVTQGGSLQSPPRSPRPASVRTRKHTFGQRCVSSRPAAPGGEEAEASDPADEEVSHITSSACPWQPTAEPHGPEASPVAGGERDLRRLYSVDAQGFLDKPGRADEQWRPSAELGSGEPGEAKAWGPEAEPALGARRKKKMSPPCISVEPPAEDEGSARPSAAEGGSTTLRRRTPSCEATPHRDSLEPTEGSGAGGDPAAKGERWGQASCRAEHLTVPSFAFEPLDLGVPSGDPFLDGSHSVTPESRASSSGAIVPLEPPESEPPMPVGDPPEKRRGLYLTVPQCPLEKPGSPSATPAPGGGADDPV

SEQ ID NO: 21277 - protein, 111 aa, Homo sapiens
LVKLEKLFLGYNKIQDITELEKLDVISTLRELTVYGNPICRKMLHRHMLIFRLPNLQMLDGSPVNSDDRAKAEFHLAELQAKKNSRSNIIRMLWFEKKRGWREKGNQLRGF

SEQ ID NO: 21278 - protein, 1012 aa, Homo sapiens
MKNKLQDPSNQKCGGRKKTVSFSSMPSEKKISSANDCISFMQAGCELKKVRPNSRIYNRFFTLDTDLQALRWEPSKKDLEKAKLDISAIKEIRLGKNTETFRNNGLADQICEDCAFSILHGENYESLDLVANSADVANIWVSGLRYLVSRSKQPLDFMEGNQNTPRFMWLKTVFEAADVDGNGIMLEDTSVELIKQLNPTLKEAKIRLKFKEIQKSKEKLTTRVTEEEFCEAFCELCTRPEVYFLLVQISKNKEYLDANDLMLFLEAEQGVTHITEDICLDIIRRYELSEEGRQKGFLAIDGFTQYLLSSECDIFDPEQKKVAQDMTQPLSHYYINASHNTYLIEDQFRGPADINGYIRALKMGCRSVELDVSDGSDNEPILCNRNNMTTHVSFRSVIEVINKFAFVASEYPLILCLGNHCSLPQQKVMAQQMKKVFGNKLYTEAPLPSESYLPSPEKLKRMIIVKGKKLPSDPDVLEGEVTDEDEEAEMSRRMSVDYNGEQKQIRLCRELSDLVSICKSVQYRDFELSMKSQNYWEMCSFSETEASRIANEYPEDFVNYNKKFLSRIYPSAMRIDSSNLNPQDFWNCGCQIVAMNFQTPGPMMDLHTGWFLQNGGCGYVLRPSIMRDEVSYFSANTKGILPGVSPLALHIKIISGQNFPKPKGACAKGDVIDPYVCIEIHGIPADCSEQRTKTVQQNSDNPIFDETFEFQVNLPELAMIRFVVLDDDYIGDEFIGQYTIPFECLQPGYRHVPLRSFVGDIMEHVTLFVHIAITNRSGGGKAQKRSLSVRMGKKVREYTMLRNIGLKTIDDIFKIAVHPLREAIDMRENMQNAIVSIKELCGLPPIASLKQCLLTLSSRLITSDNTPSVSLVMKDSFPYLEPLGAIPDVQKKMLTAYDLMIQESRFLIEMADTVQEKIVQCQKAGMEFHEELHNLGAKEGLKGRKLNKATESFAWNITVLKGQGDLLKNAKNEAIENMKQIQLACLSCGLSKAPSSSAEAKSKRSLEAIEEK

SEQ ID NO: 21279 - protein, 1548 aa, Homo sapiens
MPSDFISLLSADLDLESPKSLYSRDSLKLHPSQNFHRAGLLEESVYDLLPKELQLPPSRETSVASMSQTSGGEAGSPPPAVVAADASSAPSSSSMGGACSSFTTSSSPTIYSTSVTDSKAMQVESCSSAVGVSNRGVSEKQLTSNTVQQHPSTPKRHTVLYISPPPEDLLDNSRMSCQDEGCGLESEQSCSMWMEDSPSNFSNMSTSSYNDNTEVPRKSRKRNPKQRPGVKRRDCEESNMDIFDADSAKAPHYVLSQLTTDNKGNSKAGNGTLENQKGTGVKKSPMLCGQYPVKSEGKELKIVVQPETQHRARYLTEGSRGSVKDRTQQGFPTVKLEGHNEPVVLQVFVGNDSGRVKPHGFYQACRVTGRNTTPCKEVDIEGTTVIEVGLDPSNNMTLAVDCVGILKLRNADVEARIGIAGSKKKSTRARLVFRVNIMRKDGSTLTLQTPSSPILCTQPAGVPEILKKSLHSCSVKGEEEVFLIGKNFLKGTKVIFQENVSDENSWKSEAEIDMELFHQNHLIVKVPPYHDQHITLPVSVGIYVVTNAGRSHDVQPFTYTPDPAAGALNVNVKKEISSPARPCSFEEAMKAMKTTGCNLDKVNIIPNALMTPLIPSSMIKSEDVTPMEVTAEKRSSTIFKTTKSVGSTQQTLENISNIAGNGSFSSPSSSHLPSENEKQQQIQPKAYNPETLTTIQTQDISQPGTFPAVSASSQLPNSDALLQQATQFQTRETQSREILQSDGTVVNLSQLTEASQQQQQSPLQEQAQTLQQQISSNIFPSPNSVSQLQNTIQQLQAGSFTGSTASGSSGSVDLVQQVLEAQQQLSSVLFSAPDGNENVQEQLSADIFQQVSQIQSGVSPGMFSSTEPTVHTRPDNLLPGRAESVHPQSENTLSNQQQQQQQQQQVMESSAAMVMEMQQSICQAAAQIQSELFPSTASANGNLQQSPVYQQTSHMMSALSTNEDMQMQCELFSSPPAVSGNETSTTTTQQVATPGTTMFQTSSSGDGEETGTQAKQIQNSVFQTMVQMQHSGDNQPQVNLFSSTKSMMSVQNSGTQQQGNGLFQQGNEMMSLQSGNFLQQSSHSQAQLFHPQNPIADAQNLSQETQGSLFHSPNPIVHSQTSTTSSEQMQPPMFHSQSTIAVLQGSSVPQDQQSTNIFLSQSPMNNLQTNTVAQEAFFAAPNSISPLQSTSNSEQQAAFQQQAPISHIQTPMLSQEQAQPPQQGLFQPQVALGSLPPNPMPQSQQGTMFQSQHSIVAMQSNSPSQEQQQQQQQQQQQQQQQQQSILFSNQNTMATMASPKQPPPNMIFNPNQNPMANQEQQNQSIFHQQSNMAPMNQEQQPMQFQSQSTVSSLQNPGPTQSESSQTPLFHSSPQIQLVQGSPSSQEQQVTLFLSPASMSALQTSINQQDMQQSPLYSPQNNMPGIQGATSSPQPQATLFHNTAGGTMNQLQNSPGSSQQTSGMFLFGIQNNCSQLLTSGPATLPDQLMAISQPGQPQNEGQPPVTTLLSQQMPENSPLASSINTNQNIEKIDLLVSLQNQGNNLTGSF

SEQ ID NO: 21280 - protein, 134 aa, Homo sapiens
KWRNKTGLDIYEGYGQTETVLICGNFKGMKIKPGSMGKPSPAFDVKIVDVNGNVLPPGQEGDIGIQVLPNRPFGLFTHYVVVKAFVVLNPDYKSHDQEQLIKEIQEHVKKTTAPYKYPRKVEFIQELPKTISGK

SEQ ID NO: 21281 - protein, 1068 aa, Homo sapiens
MLKPQPLQQPSQPQQPPPTQQAVARRPPGGTSPPNGGLPGPLATSAAPPGPPAAASPCLGPVAAAGSGLRRGAEGILAPQPPPPQQHQERPGAAAIGSARGQSTGKGPPQSPVFEGVYNNSRMLHFLTAVVGSTCDVKVKNGTTYEGIFKTLSSKFELAVDAVHRKASEPAGGPRREDIVDTMVFKPSDVMLVHFRNVDFNYATKDKFTDSAIAMNSKVNGEHKEKVLQRWEGGDSNSDDYDLESDMSNGWDPNEMFKFNEENYGVKTTYDSSLSSYTVPLEKDNSEEFRQRELRAAQLAREIESSPQYRLRIAMENDDGRTEEEKHSAVQRQGSGRESPSLASREGKYIPLPQRVREGPRGGVRCSSSRGGRPGLSSLPPRGPHHLDNSSPGPGSEARGINGGPSRMSPKAQRPLRGAKTLSSPSNRPSGETSVPPPPAAPPFLPVGRMYPPRSPKSAAPAPISASCPEPPIGSAVPTSSASIPVTSSVSDPGVGSISPASPKISLAPTDVKELSTKEPGRTLEPQELARIAGKVPGLQNEQKRFQLEELRKFGAQFKLQPSSSPENSLDPFPPRILKEEPKGKEKEVDGLLTSEPMGSPVSSKTESVSDKEDKPPLAPSGGTEGPEQPPPPCPSQTGSPPVGLIKGEDKDEGPVAEQVKKSTLNPNAKEFNPTKPLLSVNKSTSTPTSPGPRTHSTPSIPVLTAGQSGLYSPQYISYIPQIHMGPAVQAPQMYPYPVSNSVPGQQGKYRGAKGSLPPQRSDQHQPASAPPMMQAAAAAGPPLVAATPYSSYIPYNPQQFPGQPAMMQPMAHYPSQPVFAPMLQSNPRMLTSGSHPQAIVSSSTPQYPSAEQPTPQALYATVHQSYPHHATQLHAHQPQPATTPTGSQPQSQHAAPSPVQHQAGQAPHLGSGQPQQNLYHPGALTGTPPSLPPGPSAQSPQSSFPQPAAVYAIHHQQLPHGFTNMAHVTQAHVQTGITAAPPPHPGAPHPPQVMLLHPPQSHGGPPQGAVPQSGVPALSASTPSPYPYIGHPQGEQPGQAPGFPGGADDRILQSHPSQQLPFHPPGN

SEQ ID NO: 21282 - protein, 1068 aa, Homo sapiens
MVPLVQNEQEALDLDGEPDLSSLEGFQWEGVSISSSPGLARKRSLSESSVIMDRAPSVYSFFSEEGTGKENEPQQMVSPSNSLRAGQSQKATMHLKQEVTPRAASLRTGERAENVATQRRHSAQLSSDHIIPLMHLAKDLNSQERSIPPSENQNSQESNGEGNCLSSSASSALAISSLADAATDSSCTSGAEQNDGQSIRKKRRATGDGSSPELPSLERKNKRRKIKGKKERSQVDQLLNISLREEELSKSLQCMDNNLLQARAALQTAYVEVQRLLMLKQQITMEMSALRTHRIQILQGLQETYEPSEHPDQVPCSLTRERRNSRSQTSIDAALLPTPFFPLFLEPPSSHVSPSPTGASLQITTSPTFQTHGSVPAPDSSVQIKQEPMSPEQDENVNAVPPSSACNVSKELLEANREISDSCPVYPVITARLSLPESTESFHEPSQELKFSVEQRNTRNRENSPSSQSAGLSSINKEGEEPTKGNSGSEACTSSFLRLSFASETPLEKEPHSPADQPEQQAESTLTSAETRGSKKKKKLRKKKSLRAAHVPENSDTEQDVLTVKPVRKVKAGKLIKGGKVTTSTWEDSRTGREQESVRDEPDSDSSLEVLEIPNPQLEVVAIDSSESGEEKPDSPSKKDIWNSTEQNPLETSRSGCDEVSSTSEIGTRYKDGIPVSVAETQTVISSIKGSKNSSEISSEPGDDDEPTEGSFEGHQAAVNAIQIFGNLLYTCSADKTVRVYNLVSRKCIGVFEGHTSKVNCLLVTQTSGKNAALYTGSSDHTIRCYNVKSRECVEQLQLEDRVLCLHSRWRILYAGLANGTVVTFNIKNNKRLEIFECHGPRAVSCLATAQEGARKLLVVGSYDCTISVRDARNGLLLRTLEGHSKTILCMKVVNDLVFSGSSDQSVHAHNIHTGELVRIYKGHNHAVTVVNILGKVMVTACLDKFVRVYELQSHDRLQVYGGHKDMIMCMTIHKSMIYTGCYDGSIQAVRLNLMQNYRCWWHGCSLIFGVVDHLKQHLLTDHTNPNFQTLKCRWKNCDAFFTARKGSKQDAAGHIERHAEDDSKIDS

SEQ ID NO: 21283 - protein, 1124 aa, Homo sapiens
MSTLLDIKSSVLRQVQVCPSFRRRTEQDPGSASADPQEPATGAWKPGDGVEFFAHMRLMLKKGEGRQGLPCLEVPLRSGSPAPPEPVDPSLGLRALAPEEALLSYLQQVFGTSLEEHTEAIERVRKAKAPTYALKVSVMRAKNLLAKDPNGFSDPYCMLGILPASDATREPRAQKEQRFGFRKGSKRGGPLPAKCIQVTEVKSSTLNPVWKEHFLFEIEDVSTDQLHLDIWDHDDDVSLVEACRKLNEVIGLKGMGRYFKQIVKSARANGTAGPTEDHTDDFLGCLNIPVREVPVAGVDRWFKLEPRSSASRVQGHCHLVLKLITTQRDTAMSQRGRSGFLSHLLLLSHLLRLEHSAEEPNSSSWRGELSTPAATILCLHGAQSNLSPLQLAVLHWQVSSRHHQTCTLDYSYLLGLLEDMQAHWEEAPSLPQEQEESLADSLSAFSEFGLQLLRQLRDYFPATNSTAVHRLELLLKCLGKLQLFQPSFEICPFESELNMDIAAALKRGNREWYDRILNDKSPREQPGPQRLPGLVVLADAVYDDLQFCYSVYASLFHSILNVDVFTLTFRQLERLVAEEAWVLTEELSPKMTLEVASGLFELYLTLADLQRFWDSIPGRDSRSLALAGIHAPFLPAVKLWFQVLRDQAKWRLQGAVDMDTLEPVDASSRHSSSAATAGLCLSHIQELWVRLAWPDPAQAQGLGTQLGQDVCEATLFYTELLRKKVDTQPGAAGEAVSEALCVVLNNVELVRKAAGQALKGLAWPEGATGPEGVLPRPLLSCTQALDDDLQREAHTVTAHLTSKMVGDIRKYVQHISLSPDSIQNDEAVAPLMKYLDEKLALLNASLVKGNLSRVLEALWELLLQAILQALGANRDVSADFYSRFHFTLEALVSFFHAEGQGLPLESLRDGSYKRLKEELRLHKCSTRECIEQFYLDKLKQRTLEQNRFGRLSVRCHYEAAEQRLAVEVLHAADLLPLDANGLSDPFVIVELGPPHLFPLVRSQRTQVKTRTLHPVYDELFYFSVPAEACRRRAACVLFTVMDHDWLSTNDFAGEAALGLGGVTGVARPQVGGGARAGQPVTLHLCRPRAQVRSALRRLEGRTSKEAQEFVKKLKELEKCMEADP

SEQ ID NO: 21284 - protein, 260 aa, Homo sapiens
AFGAVHAQMHAAVGQLGRARAETEELIRERVRQVVAHVRAQERELLEAVDARYQRDYEEMASRLGRLDAVLQRIRTGSALVQRMKCYASDQEVLDMHGFLRQALCRLRQEEPQSLQAAVRTDGFDEFKVRLQDLSSCITQGKDAAVSKKASPEAASTPRDPIDVDLDVSNTTTAQKRKCSQTQCPRKVIKMESEEGKEARLARSSPEQPRPSTSKAVSPPHLDGPPSPRSPVIGSEVFLPNSNHVASGAGEAGRERNALW

SEQ ID NO: 21285 - protein, 103 aa, Homo sapiens
MTKLEYEEIALDLTPVIEELTNAGFLQTESELQELSEVLELLSAPELKSLAKTFHLVNPNGQKQQLVDAFLKLAKQRSVCTWGKNKPGIGAVILKRFCWLLLQ

SEQ ID NO: 21286 - protein, 1059 aa, Homo sapiens
MEANPAGSGAGGGGSSGIGGEDGVHFQSYPFDFLEFLNHQRFEPMELYGEHAKAVAALPCAPGPPPQPPPQPPPPQYDYPPQSTFKPKAEVPSSSSSSSSSSSSSSSSSSSSSSSSSQAKKPDPPLPPAFGAPPPPLFDAAFPTPQWGIVDLSGHQHLFGNLKRGGPASGPGVTPGLGAPAGAPGPLPAPSQTPPGPPAAAACDPTKDDKGYFRRLKYLMERRFPCGVCQKSFKQSSHLVQHMLVHSGERPYECGVCGRTYNHVSSLIRHRRCHKDVPPAAGGPPQPGPHLPPLGLPAPAASAATAAAPSTVSSGPPATPVAPAPSADGSAAPAGVGVPPPATGGGDGPFACPLCWKVFKKPSHLHQHQIIHTGEKPFSCSVCSKSFNRRESLKRHVKTHSADLLRLPCGICGKAFRDASYLLKHQAAHAGAGAGGPRPVYPCDLCGKSYSAPQSLLRHKAAHAPPAAAAEAPKDGAASAPQPPPTFPPGPYLLPPDPPTTDSEKAAAAAAAVVYGAVPVPLLGAHPLLLGGAGTSGAGGSGASVPGKTFCCGICGRGFGRRETLKRHERIHTGEKPHQCPVCGKRFRESFHLSKHHVVHTRERPYKCELCGKVFGYPQSLTRHRQVHRLQLPCALAGAAGLPSTQGTPGACGPGASGTSAGPTDGLSYACSDCGEHFPDLFHVMSHKEVHMAEKPYGCDACGKTFGFIENLMWHKLVHQAAPERLLPPAPGGLQPPDGSSGTDAASVLDNGLAGEVGAAVAALAGVSGGEDAGGAAVAGAGGGASSGPERFSCATCGQSFKHFLGLVTHKYVHLVRRTLGCGLCGQSFAGAYDLLLHRRSHRQKRGFRCPVCGKRFWEAALLMRHQRCHTEQRPYRCGVCGRGFLRSWYLRQHRVVHTGERAFKCGVCAKRFAQSSSLAEHRRLHAVARPQRCSACGKTFRYRSNLLEHQRLHLGERAYRCEHCGKGFFYLSSVLRHQRAHEPPRPELRCPACLKAFKDPGYFRKHLAAHQGGRPFRCSSCGEGFANTYGLKKHRLAHKAENLGGPGAGAGTLAGKDA

SEQ ID NO: 21287 - protein, 208 aa, Homo sapiens
MPAPIRLRELIRTIRTARTQAEEREMIQKECAAIRSSFREEDNTYRCRNVAKLLYMHMLGYPAHFGQLECLKLIASQKFTDKRIGYLGAMLLLDERQDVHLLMTNCIKNDLNHSTQFVQGLALCTLGCMGSSEMCRDLAGEVEKLLKTSNSYLRKKAALCAVHVIRKVPELMEMFLPATKNLLNEKNHGNVIWMTCLFMRHSSIFTVF

SEQ ID NO: 21288 - protein, 499 aa, Homo sapiens
MNGKRPAEPGPARVGKKGKKEVMAEFSDAVTEETLKKQVAEAWSRRTPFSHEVIVMDMDPFLHCVIPNFIQSQDFLEGLQKELMNLDFHEKYNDLYKFQQSDDLKKRREPHISTLRKILFEDFRSWLSDISKIDLESTIDMSCAKYEFTDALLCHDDELEGRRIAFILYLVPPWDRSMGGTLDLYSIDEHFQPKQIVKSLIPSWNKLVFFEVSPVSFHQHEILYDWINPTYLDMDYQVQIQEEFEESSEILLKEFLKPEKFTKVCEALEHGHVEWSSRGPPNKRFYEKAEESKLPEILKECMKLFRSEALFLLLSNFTGLKLHFLAPSEEDEMNDKKEAETTDITEEGTSHSPPEPENNQMAISNNSQQSNEQTDPEPEENETKKESSVPMCQGELRHWKTGHYTLIHDHSKAEFALDLILYCGCEGWEPEYGGFTSYIAKGEDEELLTVNPESNSLALVYRDRETLKFVKHINHRSLEQKKTFPNRTGFWDFSFIYYE

SEQ ID NO: 21289 - protein, 1076 aa, Homo sapiens
MSSAEIIGSTNLIILLEDEVFADFFNTFLSLPVFGQTPFYTVENSQWSLWPEIPCNLIAKYKGLLTWLEKCRLPFFCKTNLCFHYILCQEFISFIKSPEGGEELVDFWILAENILSIDEMDLEVRDYYLSLLLMLRATHLQEGSRVVTLCNMNIKSLLNLSIWHPNQSTTRREILSHMQKVALFKLQSYWLPNFYTHTKMTMAKEEACHGLMQEYETRLYSVCYTHIGGLPLNMSIKKCHHFQKRYSSRKAKRKMWQLVDPDSWSLEMDLKPDAIGMPLQETCPQEKVVIQMPSLKMASSKETRISSLEKDMHYAKISSMENKAKSHLHMEAPFETKVSTHLRTVIPIVNHSSKMTIQKAIKQSFSLGYIHLALCADACAGNPFRDHLKKLNLKVEIQLLDLWQDLQHFLSVLLNNKKNGNAIFRHLLGDRICELYLNEQIGPCLPLKSQTIQGLKELLPSGDVIPWIPKAQKEICKMLSPWYDEFLDEEDYWFLLFTTQNRFISSRQHKREFIGKEENILLYKRIQQSLELSQALADMKEMDYRQWRKIATEDLKQGGSLQVELTSPVFLTDITKMSFEELCYKNPKMAIQKISDDYKIYCEKAPKIDFKMEIIKETKTVSRSNRKMSLLKRTLVRKPSMRPRNLTEVLLNTQHLEFFREFLKERKAKIPLQFLTAVQKISIETNEKICKSLIENVIKTFFQGQLSPEEMLQCDAPIIKEIASMRHVTTSTLLTLQGHVMKSIEEKWFKDYQDLFPPHHQEVEVQSEVQISSRKPSKIVSTYLQESQKKGWMRMISFIRSFCKYRRFMLNPSKRQEFEDYLHQEMQNSKENFTTAHNTSGRSAPPSTNVRSADQENGEITLVKRRIFGHRIITVNFAINDLYFFSEMEKFNDLVSSAHMLQVNRAYNENDVILMRSKMNIIQKLFLNSDIPPKLRVNVPEFQKDAILAAITEGYLDRSVFHGAIMSVFPVVMYFWKRFCFWKATRSYLQYRGKKFKDRKSPPKSTDKYPFSSGGDNAILRFTLLRGIEWLQPQREAISSVQNSSSSKLTQPRLVVSAMQLHPVQGQKLSYIKKEK

SEQ ID NO: 21290 - protein, 165 aa, Homo sapiens
SHSSEAGKKDVSGPLRELRPRLCHLRKGPQGYGFNLHSDKSRPGQYIRSVDPGSPAARSGLRAQDRLIEVNGQNVEGLRHAEVVASIKAREDEARLLVVDPETDEHFKRLRVTPTEEHVEGPLPSPVTNGTSPAQLNGGSACSSRSDLPGSDKDTEEGPPSGVWD

SEQ ID NO: 21291 - protein, 507 aa, Homo sapiens
MKFKQCRCSDTGLCCLDHEGKAEVYAPSASTADYNRDSPGYPSSKPATSTFPSSFFMQDGHHSSDPWSSSSGMNQPGYAGMLGNSSHIPQSSSYCSLHPHERLSYPSHSSADINSSLPPMSTFHRSGTNHYSTSSCTPPANGTDSIMANRGSGAAGSSQTGDALGKALASIYSPDHTNNSFSSNPSTPVGSPPSLSAGTAVWSRNGGQASSSPNYEGPLHSLQSRIEDRLERLDDAIHVLRNHAVGPSTAMPGGHGDMHGIIGPSHNGAMGGLGSGYGTGLLSANRHSLMVGTHREDGVALRGSHSLLPNQVPVPQLPVQSATSPDLNPPQDPYRGMPPGLQGQSVSSGSSEIKSDDEGDENLQDTKSSEDKKLDDDKKDIKSITSNNDDEDLTPEQKAEREKERRMANNARERLRVRDINEAFKELGRMVQLHLKSDKPQTKLLILHQAVAVILSLEQQVRERNLNPKAACLKRREEEKVSSEPPPLSLAGPHPGMGDASNHMGQM

SEQ ID NO: 21292 - protein, 746 aa, Homo sapiens
MKKYRKISIGCFAMATQTSHVFHGQENMFLENHCIRRNTGRDSKKPLKQKNMNGLGQNSDNGLLVTHVNQTQDLLRLQGSETQSSDWEDSEDWLSAHSLKCQKLTLADLISQGTEVLEEGTNVVQKICFSTQIIRHFESKLSDTIEVYQERIQWLTENSKKAFGLIKGARVSILIDVSAISSGPQKEEFQKDLMSLIDEQLSHKEKLFVLSFGTNAGSLWPDPMEVSASTLQELKLWVKTLQPDGGSNLLQALKKIFTLKGLDSLVAIMRSCPDQPSEILSDYIQQSTMGRDLIIHFITYRCDDQMPPAVLKNLAEAVRGYYHCYSPKMEHYTSRDMDELLAEIQKAQSLLSHVQALQHSSPCEALTCTMEEISTEITNGPLISLLPKPPKHDAPLTIEFPNLDKTSAEWLKVNGLKAKKLSLYQVLAPNAFSPVEEFVPILQKTVSSTIHEKAMIQFEWHDGTVKNIHVDPPFLYKYQWNDYTAWIPRDLTHHSLKPTQQQLSRAMRMYERRIEWLSLASRRIWGTVCEKRVVVLLDISATNSMYIIHIQHSLRLLLEEQLSNKDCFNLIAFGSTIESWRPEMVPVSHNNLQSAWRWALNLRCRGSRNVLSALRKAVEVDFKDKDKHQSQGIYLFTGGIPDQDMPTLSAYMAEACGGCDLQLNVCLFYVGEPKMDTTPPARYASHTDTAAAYKEVTRAAGGRFHWFGDTGIYESDDINSIMSEMEKALNYSQKCAFLMASLKNHS

SEQ ID NO: 21293 - protein, 419 aa, Homo sapiens
MSAEQEKDPISLKRVRGGDSGLDGLGGPGVQLGSPDKKKRKANTQGPSFPPLSEYAPPPNPNSDHLVAANPFDDNYNTISYKPLPSSNPYLGPGYPGFGGYSTFRMPPHVPPRMSSPYCGPYSLRNQPHPFPQNPLGMGFNRPHAFNFGPHDNSSFGNPSYNNALSQNVNMPNQHFRQNPAENFSQIPPQNASQVSNPDLASNFVPGNNSNFTSPLESNHSFIPPPNTFGQAKAPPPKQDFTQGATKNTNQNSSAHPPHLNMDDTVNQSNIELKNVNRNNAVNQENSRSSSTEATNNNPANGTQNKPRQPRGAADACTTEKSNKSSLHPNRHGHSSSDPVYPCGICTNEVNDDQDAILCEASCQKWFHRICTGMTETAYGLLTAEASAVWGCDTCMADKDVQLMRTRETFGPSAVGSDA

SEQ ID NO: 21294 - protein, 1057 aa, Homo sapiens
MAAAPALKHWRTTLERVEKFVSPLYFTDCNLRGRLFGASCPVAVLSSFLTPERLPYQEAVQRDFRPAQVGDSFGPTWWTCWFRVELTIPEAWVGQEVHLCWESDGEGLVWRDGEPVQGLTKEGEKTSYVLTDRLGERDPRSLTLYVEVACNGLLGAGKGSMIAAPDPEKMFQLSRAELAVFHRDVHMLLVDLELLLGIAKGLGKDNQRSFQALYTANQMVNVCDPAQPETFPVAQALASRFFGQHGGESQHTIHATGHCHIDTAWLWPFKETVRKCARSWVTALQLMERNPEFIFACSQAQQLEWVKSRYPGLYSRIQEFACRGQFVPVGGTWVEMDGNLPSGEAMVRQFLQGQNFFLQEFGKMCSEFWLPDTFGYSAQLPQIMHGCGIRRFLTQKLSWNLVNSFPHHTFFWEGLDGSRVLVHFPPGDSYGMQGSVEEVLKTVANNRDKGRANHSAFLFGFGDGGGGPTQTMLDRLKRLSNTDGLPRVQLSSPRQLFSALESDSEQLCTWVGELFLELHNGTYTTHAQIKKGNRECERILHDVELLSSLALARSAQFLYPAAQLQHLWRLLLLNQFHDVVTGSCIQMVAEEAMCHYEDIRSHGNTLLSAAAAALCAGEPGPEGLLIVNTLPWKRIEVMALPKPGGAHSLGLTPSPGDSAQHGLCSCSSPHLTAAPAAPAACVRSARAPTDSASRPPPTKTDGSVTLDNGIIRVKLDPTGRLTSLVLVASGREAIAEGAVGNQFVLFDDVPLYWDAWDVMDYHLETRKPVLGQAGTLAVGTEGGLRGSAWFLLQISPNSRLSQEVVLDVGCPYVRFHTEVHWHEAHKFLKVEFPARVRSSQATYEIQFGHLQRPTHYNTSWDWARFEVWAHRWMDLSEHGFGLALLNDCKYGASVRGSILSLSLLRAPKAPDATADTGRHEFTYALMPHKGSFQDAGVIQAAYSLNFPLLALPAPSPAPATSWSAFSVSSPAVVLETVKQAESSPQRRSLVLRLYEAHGSHVDCWLHLSLPVQEAILCDLLERPDPAGHLTLRDNRLKLTFSPFQVLSLLLVLQPPPH

SEQ ID NO: 21295 - protein, 670 aa, Homo sapiens
MAQAVDRDTNRPLEPPSEFIVKVQDINDNPPEFLHETYHANVPERSNVGTSVIQVTASDADDPTYGNSAKLVYSILEGQPYFSVEAQTGIIRTALPNMDREAKEEYHVVIQAKDMGGHMGGLSGTTKVTITLTDVNDNPPKFPQSVYQMSVSEAAVPGEEVGRVKAKDPDIGENGLVTYNIVDGDGMESFEITTDYETQEGVIKLKKPVDFETKRAYSLKVEAANVHIDPKFISNGPFKDTVTVKISVEDADEPPMFLAPSYIHEVQENAAAGTVVGRVHAKDPDAANSPIRYSIDRHTDLDRFFTINPEDGFIKTTKPLDREETAWLNITVFAAEIHNRHQEAKVPVAIRVLDVNDNAPKFAAPYEGFICESDQTKPLSNQPIVTISADDKDDTANGPRFIFSLPPEIIHNPNFTVRDNRDNTAGVYARRGGFSRQKQDLYLLPIVISDGGIPPMSSTNTLTIKVCGCDVNGALLSCNAEAYILNAGLSTGALIAILACIVILLVIVVLFVTLRRQKKEPLIVFEEEDVRENIITYDDEGGGEEDTEAFDIATLQNPDGINGFIPRKDIKPEYQYMPRPGLRPAPNSVDVDDFINTRIQEADNDPTAPPYDSIQIYGYEGRGSVAGSLSSLESATTDSDLDYDYLQNWGPRFKKLADLYGSKDTFDDDS

SEQ ID NO: 21296 - protein, 431 aa, Homo sapiens
MALARGSRQLGALVWGACLCVLVHGQQAQPGQGSDPARWRQLIQWENNGQVYSLLNSGSEYVPAGPQRSESSSRVLLAGAPQAQQRRSHGSPRRRQAPSLPLPGRVGSDTVRGQARHPFGFGQVPDNWREVAVGDSTGMARARTSVSQQRHGGSASSVSASAFASTYRQQPSYPQQFPYPQAPFVSQYENYDPASRTYDQGFVYYRPAGGGVGAGAAAVASAGVIYPYQPRARYEEYGGGEELPEYPPQGFYPAPERPYVPPPPPPPDGLDRRYSHSLYSEGTPGFEQAYPDPGPEAAQAHGGDPRLGWYPPYANPPPEAYGPPRALEPPYLPVRSSDTPPPGGERNGAQQGRLSVGSVYRPNQNGRVTPAQTPACPGRKVEGQEQDGQAPGSGTSWGTRDHKDGGSLQTSPGRLTPGLAGERARASLRSP

SEQ ID NO: 21297 - protein, 454 aa, Homo sapiens
MAAAPGGSAQPAGPGPRLGFSTADSGVGMSGLNPGPAVPMKDHDAIKLFVGQIPRGLDEQDLKPLFEEFGRIYELTVLKDRLTGLHKGCAFLTYCARDSALKAQSALHEQKTLPGMNRPIQVKPAASEGRGEDRKLFVGMLGKQQGEEDVRRLFQPFGHIEECTVLRSPDGTSKGCAFVKFGSQGEAQAAIRGLHGSRTMAGASSSLVVKLADTDRERALRRMQQMAGHLGAFHPAPLPLGACGAYTTAILQHQAALLAAAQGPGLGPVAAVAAQMQHVAAFSLVAAPLLPAAAANSPPGSGPGTLPGLPAPIGVNGFGPLTPQTNGQPGSDTLYNNGLSPYPAQSPGVADPLQQAYAGMHHYAGPEGCNLFIYHLPQEFGDAELIQTFLPFGAVVSAKVFVDRATNQSKCFGFVSFDNPTSAQTAIQAMNGFQIGMKRLKVQLKRPKDANRPY

SEQ ID NO: 21298 - protein, 1004 aa, Homo sapiens
MPKIVLNGVTVDFPFQPYKCQQEYMTKVLECLQQKVNGILESPTGTGKTLCLLCTTLAWREHLRDGISARKIAERAQGELFPDRALSSWGNAAAAAGDPIACYTDIPKIIYASRTHSQLTQVINELRNTSYRPKVCVLGSREQLCIHPEVKKQESNHLQIHLCRKKVASRSCHFYNNVEEKSLEQELASPILDIEDLVKSGSKHRVCPYYLSRNLKQQADIIFMPYNYLLDAKSRRAHNIDLKGTVVIFDEAHNVEKMCEESASFDLTPHDLASGLDVIDQVLEEQTKAAQQGEPHPEFSADSPSPGLNMELEDIAKLKMILLRLEGAIDAVELPGDDSGVTKPGSYIFELFAEAQITFQTKGCILDSLDQIIQHLAGRAGVFTNTAGLQKLADIIQIVFSVDPSEGSPGSPAGLGALQSYKVHIHPDAGHRRTAQRSDAWSTTAARKRGKVLSYWCFSPGHSMHELVRQGVRSLILTSGTLAPVSSFALEMQIPFPVCLENPHIIDKHQIWVGVVPRGPDGAQLSSAFDRRFSEECLSSLGKALGNIARVVPYGLLIFFPSYPVMEKSLEFWRARDLARKMEALKPLFVEPRSKGSFSETISAYYARVAAPGSTGATFLAVCRGKASEGLDFSDTNGRGVIVTGLPYPPRMDPRVVLKMQFLDEMKGQGGAGGQFLSGQEWYRQQASRAVNQAIGRVIRHRQDYGAVFLCDHRFAFADARAQLPSWVRPHVRVYDNFGHVIRDVAQFFRVAERTMPAPAPRATAPSVRGEDAVSEAKSPGPFFSTRKAKSLDLHVPSLKQRSSGSPAAGDPESSLCVEYEQEPVPARQRPRGLLAALEHSEQRAGSPGEEQAHSCSTLSLLSEKRPAEEPRGGRKKIRLVSHPEEPVAGAQTDRAKLFMVAVKQELSQANFATFTQALQDYKGSDDFAALAACLGPLFAEDPKKHNLLQGFYQFVRPHHKQQFEEVCIQLTGRGCGYRPEHSIPRRQRAQPVLDPTERRRIPS

SEQ ID NO: 21299 - protein, 303 aa, Homo sapiens
ASGWRVCSINEGYMISTCLPEYIVVPSSLADQDLKIFSHSFVGRRMPLWCWSHSNGSALVRMALIKDVLQQRKIDQRICNAITKSHPQRSDVYKSDLDKTLPNIQEVQAAFVKLKQLCVNEPFEETEEKWLSSLENTRWLEYVRAFLKHSAELVYMLESKHLSVVLQEEEGRDLSCCVASLVQVMLDPYFRTITGFQSLIQKEWVMAGYQFLDRCNHLKRSEKESPLFLLFLDATWQLLEQYPAAFEFSETYLAVLYDSTRISLFGTFLFNSPHQRVKQSTDKKLYKTRLFSFTSLKFLVTIH

SEQ ID NO: 21300 - protein, 1281 aa, Homo sapiens
MSGPTDETAGDLPVKDTGLNLFGMGGLQETSTTRTMKSRQAVSRVSREELEDRFLRLHDENILLKQHARKQEDKIKRMATKLIRLVNDKKRYERVGGGPKRLGRDVEMEEMIEQLQEKVHELEKQNETLKNRLISAKQQLQTQGYRQTPYNNVQSRINTGRRKANENAGLQECPRKGIKFQDADVAETPHPMFTKYGNSLLEEARGEIRNLENVIQSQRGQIEELEHLAEILKTQLRRKENEIELSLLQLREQQATDQRSNIRDNVEMIKLHKQLVEKSNALSAMEGKFIQLQEKQRTLRISHDALMANGDELNMQLKEQRLKCCSLEKQLHSMKFSERRIEELQDRINDLEKERELLKENYDKLYDSAFSAAHEEQWKLKEQQLKVQIAQLETALKSDLTDKTEILDRLKTERDQNEKLVQENRELQLQYLEQKQQLDELKKRIKLYNQENDINADELSEALLLIKAQKEQKNGDLSFLVKVDSEINKDLERSMRELQATHAETVQELEKTRNMLIMQHKINKDYQMEVEAVTRKMENLQQDYELKVEQYVHLLDIRAARIHKLEAQLKDIAYGTKQYKFKPEIMPDDSVDEFDETIHLERGENLFEIHINKVTFSSEVLQASGDKEPVTFCTYAFYDFELQTTPVVRGLHPEYNFTSQYLVHVNDLFLQYIQKNTITLEVHQAYSTEYETIAACQLKFHEILEKSGRIFCTASLIGTKGDIPNFGTVEYWFRLRVPMDQAIRLYRERAKALGYITSNFKGPEHMQSLSQQAPKTAQLSSTDSTDGNLNELHITIRCCNHLQSRASHLQPHPYVVYKFFDFADHDTAIIPSSNDPQFDDHMYFPVPMNMDLDRYLKSESLSFYVFDDSDTQENIYIGKVNVPLISLAHDRCISGIFELTDHQKHPAGTIHVILKWKFAYLPPSGSITTEDLGNFIRSEEPEVVQRLPPASSVSTLVLAPRPKPRQRLTPVDKKVSFVDIMPHQSDVSQEGSVDEVKENTEKMQQGKDDVSLLSEGQLAEQSLASSEDETEITEDLEPEVEEDMSASDSDDCIIPGPISKNIKQSLALSPGLGCSSAISAHCNFRLPGSSDFPASASQVDGITGACHHTQPSEKIRIEIIALSLNDSQVTMDDTIQRLFVECRFYSLPAEETPVSLPKPKSGQWVYYNYSNVIYVDKENNKAKRDILKAILQKQEMPNRSLRFTVVSDPPEDEQDLECEDIGVAHVDLADMFQEGRDLIEQNIDVFDARADGEGIGKLRVTVEALHALQSVYKQYRDDLEA

SEQ ID NO: 21301 - protein, 455 aa, Homo sapiens
MDSPGYNCFVDKDKMDAAIQDLGPKELSCTELQELKQLARQGYWAQSHALRGKVYQRLIRDIPCRTVTPDASVYSDIVGKIVGKHSSSCLPLPEFVDNTQVPSYCLNARGEGAVRKILLCLANQFPDISFCPALPAVVALLLHYSIDEAECFEKACRILACNDPGRRLIDQSFLAFESSCMTFGDLVNKYCQAAHKLMVAVSEDVLQVYADWQRWLFGELPLCYFARVFDVFLVEGYKVLYRVALAILKFFHKVRAGQPLESDSVKQDIRTFVRDIAKTVSPEKLLEKAFAIRLFSRKEIQLLQMANEKALKQKGITVKQKSVSLSKRQFVHLAVHAENFRSEIVSVREMRDIWSWVPERFALCQPLLLFSSLQHGYSLARFYFQCEGHEPTLLLIKTTQKEVCGAYLSTDWSERNKFGGKLGFFGTGECFVFRLQPEVQRYEWVVIKHPELTKP

SEQ ID NO: 21302 - protein, 243 aa, Homo sapiens
MKFKNPPVNSLSLEFLTELVISLEKLENDKSFRGVILTSDRPGVFSAGLDLTEMCGRSPAHYAGYWKAVQELWLRLYQSNLVLVSAINGACPAGGCLVALTCDYRILADNPRYCIGLNETQLGIIAPFWLKDTLENTIGHRAAERALQLGLLFPPAEALQVGIVDQVVPEEQVQSTALSAIAQWMAIPDHARQLTKAMMRKATASRLVTQRDADVQNFVSFISKDSIQKSLQMYLERLKEEKG

SEQ ID NO: 21303 - protein, 56 aa, Homo sapiens
ILLGATCGLKTILTLTGVSTLGDVKNNQESDCVSKKKMVPDFYVDSIADLLPALQG

SEQ ID NO: 21304 - protein, 1397 aa, Homo sapiens
SVDCLKESPNKQQERAQSQSGVDLQEDVLVRERPRSLEDLHQKKVGRAKRESRRMRELEQAIFSLELLKVRSLGGISPSEDRRWSTELVPEGLQSPRGTPDSESSQGSLELLSYEESQKSKLESVISDEGDLQFPSPKISSSPKFDSRDNALSASNETSSAEHLKDGTMKEMVVCSSESITCKPQLKDSFISNSLPTFFYIPQQDPLKTNSQLDTSIQRNKLLENEDTAGEALTLDINRETRRYHCSGKDQIVPSLNTESSNPVLKKLEKLNTEKEERQKQLQQQNEKEMMEQIRQQTDILEKERKAFKTIEKPRIGECLVAPSSYQSKQRVERPSSLLSLNTSNKGELNVLGSLSLKDAALAQKDSSSAHLPPKDRPVTVFFERKGSPCQSSTVKELSKTDRMGTQLNVACKLSNNRISKREHFRPTQSYSHNSDDLSREGNARPIFFTPKDNMSIPLVSKEALNSKNPQLHKEDEPAWKPVKLAGPGQREVARPAHKKKARMARTRSDFLTRGTFADGEGDTEEDDYDDIIEPLLSLDQASHCELGPAPSLGQASHSDSEMTSQRFSSVDEQAKLHKTMSQGEITKLAVRQKASDSDIRPQRAKMRFWAKGKQGEKKTTRVKPTTQSEVSPLFAGTDVIPAHQFPDELAAYHPTPPLSPELPGSCRKEFKENKEPSPKAKRKRSVKISNVALDSMHWQNDSVQIIASVSDLKSMDEFLLKKVNDLDNEDSKKDTLVDVVFKKALKEFRQNIFSFYSSALAMDDGKSIRYKDLYALFEQILEKTMRLEQRDSLGESPVRVWVNTFKVFLDEYMNEFKTSDCTATKVPKTERKKRRKKETDLVEEHNGHIFKATQYSIPTYCEYCSSLIWIMDRASVCKLCKYACHKKCCLKTTAKCSKKYDPELSSRQFGVELSRLTSEDRTVPLVVEKLINYIEMHGLYTEGIYRKSGSTNKIKELRQGLDTDAESVNLDDYNIHVIASVFKQWLRDLPNPLMTFELYEEFLRAMGLQERKETIRGVYSVIDQLSRTHLNTLERLIFHLVRIALQEDTNRMSANALAIVFAPCILRCPDTTDPLQSVQDISKTTTCVELIVVEQMNKYKARLKDISSLEFAENKAKTRLSLIRRSMGKGRIRRGNYPGPSSPVVVRLPSVSDVSEETLTSEAAMETDITEQQQAAMQQEERVLTEQIENLQKEKEELTFEMLVLEPRASDDETLESEASIGTADSSENLNMESEYAISEKSERSLALSSLKTAGKSEPSSKLRKQLKKQQDSLDVVDSSVSSLCLSNTASSHGTRKLFQIYSKSPFYRAASGNEALGMEGPLGQTKFLEDKPQFISRGTFNPEKGKQKLKNVKNSPQKTKETPEGTVMSGRRKTVDPDCTSNQQLALFGNNEFMV

SEQ ID NO: 21305 - protein, 606 aa, Homo sapiens
ETLVSLRVHTVDDIQQIAAALAQCMGPSRELVCRSCLKQTLHKLEAMMLILQAETTAGTVTPTAIGDSILNITGDLIHLASSDVRAPQPSELGAESPSRMVASQAYNLTSALMRILMRSRVLNEEPLTLAGHYLSEEPEPYLAVYLHSEPRPNEHNCSASRRIRPESLQGADHRPYTFFISPGSRDPAGSYHLNLSSHFRWSALQVSVGLYTSLCQYFSEEDMVWRTEGLLPLEETSPRQAVCLTRHLTAFGASLFVPPSHVRFVFPEPTADVNYIVMLTCAVCLVTYMVMAAILHKLDQLDASRGRAIPFCGQRGRFKYEILVKTGWGRGSGTTAHVGIMLYGVDSRSGHRHLDGDRAFHRNSLDIFRIATPHSLGSVWKIRVWHDNKGLSPAWFLQHVIVRDLQTARSAFFLVNDWLSVETEANGGLVEKEVLAASDAALLRFRRLLVAELQRGFFDKHIWLSIWDRPPRSRFTRIQRATCCVLLICLFLGANAVWYGAVGDSAYSTGHVSRLSPLSVDTVAVGLVSSVVVYPVYLAILFLFRMSRSKVAGSPSPTPAGQQVLDIDSCLDSSVLDSSFLTFSGLHAEQAFVGQMKSDLFLDDSK

SEQ ID NO: 21306 - protein, 1323 aa, Homo sapiens
MKRNGSRNCLNRRSRFGSRERDWLREDVKRGCVYLYGADTTTATTTTTTSSSSSSSSSSSDLHLVLCTVETPASEICAGEGRESLYLQLHGDLVRRLEPTERPLQIVYDYLSRLGFDDPVRIQEEATNPDLGCMIRFYGEKPCHMDRLDRILLSGIYNVRKGKTQLHKWAERLVVLCGTCLIVSSVKDCQTGKMHILPLVGGKIEEVKRRQYSLAFSSAGAQAQTYHVSFETLAEYQRWQRQASKVVSQRISTVDLSCYSLEEVPEHLFYSQDITYLNLRHNFMQLERPGGLDTLYKFSQLKGLNLSHNKLGLFPILLCEISTLTELNLSCNGFHDLPSQIGNLLNLQTLCLDGNFLTTLPEELGNLQQLSSLGISFNNFSQIPEVYEKLTMLDRVVMAGNCLEVLNLGVLNRMNHIKHVDLRMNHLKTMVIENLEGNKHITHVDLRDNRLTDLDLSSLCSLEQLHCGRNQLRELTLSGFSLRTLYASSNRLTAVNVYPVPSLLTFLDLSRNLLECVPDWACEAKKIEVLDVSYNLLTEVPVRILSSLSLRKLMLGHNHVQNLPTLVEHIPLEVLDLQHNALTRLPDTLFSKALNLRYLNASANSLESLPSACTGEESLSMLQLLYLTNNLLTDQCIPVLVGHLHLRILHLANNQLQTFPASKLNKLEQLEELNLSGNKLKTIPTTIANCKRLHTLVAHSNNISIFPEILQLPQIQFVDLSCNDLTEILIPEALPATLQDLDLTGNTNLVLEHKTLDIFSHITTLKIDQKPLPTTDSTVTSTFWSHGLAEMAGQRNKLCVSALAMDSFAEGVGAVYGMFDGDRNEELPRLLQCTMADVLLEEVQQSTNDTVFMANTFLVSHRKLGMAGQKLGSSALLCYIRPDTADPASSFSLTVANVGTCQAVLCRGGKPVPLSKVFSLEQDPEEAQRVKDQKAIITEDNKVNGVTCCTRMLGCTYLYPWILPKPHISSTPLTIQDELLILGNKALWEHLSYTEAVNAVRHVQDPLAAAKKLCTLAQSYGCQDNVGAMVVYLNIGEEGCTCEMNGLTLPGPVGFASTTTIKDAPKPATPSSSSGIASEFSSEMSTSEVSSEVGSTASDEHNAGGLDTALLPRPERRCSLHPTPTSGLFQRQPSSATFSSNQSDNGLDSDDDQPVEGVITNGSKVEVEVDIHCCRGRDLENSPPLIESSPTLCSEEHARGSCFGIRRQNSVNSGMLLPMSKDRMELQKSPSTSCLYGKKLSNGSIVPLEDSLNLIEVATEVPKRKTGYFAAPTQMEPEDQFVVPHDLEEEVKEQMKQHQDSRLEPEPHEEDRTEPPEEFDTAL

SEQ ID NO: 21307 - protein, 170 aa, Homo sapiens
MALPTARPLLGSCGTPALGSLLFLLFSLGWVQPSRTLAGETGQEAAPLDGVLANPPNISSLSPRQLLGFPCAEVSGLSTERVRELAVALAQKNVKLSTEQLRCLAHRLSEPPEDLDALPLDLLLFLNPDAFSGPQACTRFFSRITKANVDLLPRGAPERQRLLPAALACW

SEQ ID NO: 21308 - protein, 498 aa, Homo sapiens
MVENERLRQEMRRCEAELQELRTKPAGPCPGCEHSQESAQLRDKLSQLQLEMAESKGMLSELNLEVQQKTDRLAEVELRLKDCLAEKAQEEERLSRRLRDSHETIASLRAQSPPVKYVIKTVEVESSKTKQALSESQARNQHLQEQVAMQRQVLKEMEQQLQSSHQLTARLRAQIAMYESELERAHGQMLEEMQSLEEDKNRAIEEAFARAQVEMKAVHENLAGVRTNLLTLQPALRTLTNDYNGLKRQVRGFPLLLQEALRSVKAEIGQAIEEVNSNNQELLRKYRRELQLRKKCHNELVRLKGNIRVIARVRPVTKEDGEGPEATNAVTFDADDDSIIHLLHKGKPVSFELDKVFSPQASQQDVFQEVQALVTSCIDGFNVCIFAYGQTGAGKTYTMEGTAENPGINQRALQLLFSEVQEKASDWEYTITVSAAEIYNEVLRDLLGKEPQEKLEIRLCPDGSGQLYVPGLTEFQVQSVDDINKVWRREPLTTATLL

SEQ ID NO: 21309 - protein, 160 aa, Homo sapiens
MLEPALEDSSSFSPLDSSLPEDIPVFTAAAAATPVPSVVLTRSPPMELQPPVSPQQSECNPVGALQELVVQKGWRLPEYTVTQESGPAHRKEFTMTCRVERFIEIGSGTSKKLAKRNAAAKMLLRVHTVPLDARDGNEVEPDDDHFSIGVGSRLDGLRNR

SEQ ID NO: 21310 - protein, 213 aa, Homo sapiens
MELCEFAFNMKKDEVCVNPYHYQRVETPVLPPVLVPRHTEIPAEFPPLDDYSHSIPENTNFPAGIEPQSNIPETPPPGYLSEDGETSDHQMNHSMDAGSPNLSPNPMSPAHNNLDLQPVTYCEPAFWCSISYYELNQRVGETFHASQPSMTVDGFTDPSNSERFCLGLLSNVNRNAAVELTRRHIGCNLKIFNNQEFAALLAQSVNQGFEAVY

SEQ ID NO: 21311 - protein, 120 aa, Homo sapiens
MTVLEQDTQGLDGWWLCSLHGRQGIVPGNRLKILVGMYDKKPAGPGPGPPATPAQPQPGLHAPAPPASQYTPMLPNTYQPQPDSVYLVPTPSKAQQGLYQVPGPSPQFQSPPAKQTSTFS

SEQ ID NO: 21312 - protein, 880 aa, Homo sapiens
MDTEGFGELLQQAEQLAAETEGISELPHVERNLQEIQQAGERLRSRTLTRTSQETADVKASVLLGSRGLDISHISQRLESLSAATTFEPLEPVKDTDIQGFLKNEKDNALLSAIEESRKRTFGMAEEYHRESMLVEWEQVKQRILHTLLASGEDALDFTQESEPSYISDVGPPGRSSLDNIEMAYARQIYIYNEKIVNGHLQPNLVDLCASVAELDDKSISDMWTMVKQMTDVLLTPATDALKNRSSVEVRMEFVRQALAYLEQSYKNYTLVTVFGNLHQAQLGGVPGTYQLVRSFLNIKLPAPLPGLQDGEVEGHPVWALIYYCMRCGDLLAASQVVNRAQHQLGEFKTWFQEYMNSKDRRLSPATENKLRLHYRRALRNNTDPYKRAVYCIIGRCDVTDNQSEVADKTEDYLWLKLNQVCFDDDGTSSPQDRLTLSQFQKQLLEDYGESHFTVNQQPFLYFQVLFLTAQFEAAVAFLFRMERLRCHAVHVALVLFELKLLLKSSGQSAQLLSHEPGDPPCLRRLNFVRLLMLYTRKFESTDPREALQYFYFLRDEKDSQGENMFLRCVSELVIESREFDMILGKLENDGSRKPGVIDKFTSDTKPIINKVASVAENKGLFEEAAKLYDLAKNADKVLELMNKLLSPVVPQISAPQSNKERLKNMALSIAERYRAQGISANKFVDSTFYLLLDLITFFDEYHSGHIDRAFDIIERLKLVPLNQESVEERVAAFRNFSDEIRHNLSEVLLATMNILFTQFKRLKGTSPSSSSRPQRVIEDRDSGLALLPRLECNDTISAHCNLYLLGSSHPPTSPSQVAGTTATPKSSPHSDYLCWNDTIPNVWGHQCEAGADGGPHELSAMLCGSLGRHTVSTSGTWAH

SEQ ID NO: 21313 - protein, 357 aa, Homo sapiens
MPECWDGEHDIETPYGLLHVVIRGSPKGNRPAILTYHDVGLNRKCSPASVSPPLPPISQSDKLCFNTFFNFEDMQEITKHFVVCHVDAPGQQVGASQFPQGYQFPSMEQLAAMLPSVVQHFGFKYVIGIGVGAGAYVLAKFALIFPDLVEGLVLVNIDPNGKGWIDWAATKLSGLTSTLPDTVLSHLFSQEELVNNTELVQSYRQQIGNVVNQANLQLFWNMYNSRRDLDINRPGTVPNAKTLRCPVMLVVGDNAPAEDGVVECNSKLDPTTTTFLKMADSGGLPQVTQPGKLTEAFKYFLQGMGYMPSASMTRLARSRTASLTSASSVDGSRPQACTHSESSEGLGQVNHTMEVSC

SEQ ID NO: 21314 - protein, 1129 aa, Homo sapiens
MSTLLDIKSSVLRQVQVCPSFRRRTEQDPGSASADPQEPATGAWKPGDGVEFFAHMRLMLKKGEGRQGLPCLEVPLRSGSPAPPEPVDPSLGLRALAPEEVDDEEALLSYLQQVFGTSLEEHTEAIERVRKAKAPTYALKVSVMRAKNLLAKDPNGFSDPYCMLGILPASDATREPRAQKEQRFGFRKGSKRGGPLPAKCIQVTEVKSSTLNPVWKEHFLFEIEDVSTDQLHLDIWDHDDDVSLVEACRKLNEVIGLKGMGRYFKQIVKSARANGTAGPTEDHTDDFLGCLNIPVREVPVAGVDRWFKLEPRSSASRVQGHCHLVLKLITTQRDTAMSQRGRSGFLSHLLLLSHLLRLEHSAEEPNSSSWRGELSTPAATILCLHGAQSNLSPLQLAVLHWQVSSRHHQTCTLDYSYLLGLLEDMQAHWEEAPSLPQEQEESLADSLSAFSEFGLQLLRQLRDYFPATNSTAVHRLELLLKCLGKLQLFQPSFEICPFESELNMDIAAALKRGNREWYDRILNDKSPREQPGPQRLPGLVVLADAVYDDLQFCYSVYASLFHSILNVDVFTLTFRQLERLVAEEAWVLTEELSPKMTLEVASGLFELYLTLADLQRFWDSIPGRDSRSLALAGIHAPFLPAVKLWFQVLRDQAKWRLQGAVDMDTLEPVDASSRHSSSAATAGLCLSHIQELWVRLAWPDPAQAQGLGTQLGQDVCEATLFYTELLRKKVDTQPGAAGEAVSEALCVVLNNVELVRKAAGQALKGLAWPEGATGPEGVLPRPLLSCTQALDDDLQREAHTVTAHLTSKMVGDIRKYVQHISLSPDSIQNDEAVAPLMKYLDEKLALLNASLVKGNLSRVLEALWELLLQAILQALGANRDVSADFYSRFHFTLEALVSFFHAEGQGLPLESLRDGSYKRLKEELRLHKCSTRECIEQFYLDKLKQRTLEQNRFGRLSVRCHYEAAEQRLAVEVLHAADLLPLDANGLSDPFVIVELGPPHLFPLVRSQRTQVKTRTLHPVYDELFYFSVPAEACRRRAACVLFTVMDHDWLSTNDFAGEAALGLGGVTGVARPQVGGGARAGQPVTLHLCRPRAQVRSALRRLEGRTSKEAQEFVKKLKELEKCMEADP

SEQ ID NO: 21315 - protein, 414 aa, Homo sapiens
MGPWSRSLSALLLLLQVSSWLCQEPEPCHPGFDAESYTFTVPRRHLERGRVLGRVNFEDCTGRQRTAYFSLDTRFKVGTDGVITVKRPLRFHNPQIHFLVYAWDSTYRKFSTKVTLNTVGHHHRPPPHQASVSGIQAELLTFPNSSPGLRRQKRDWVIPPISCPENEKGPFPKNLVQLFSHAVSSNGNAVEDPMEILITVTDQNDNKPEFTQEVFKGSVMEGALPGTSVMEVTATDADDDVNTYNAAIAYTILSQDPELPDKNMFTINRNTGVISVVTTGLDRESFPTYTLVVQAADLQGEGLSTTATAVITVTDTNDNPPIFNPTTYKGQVPENEANVVITTLKVTDADAPNTPAWEAVYTILNDDGGQFVVTTNPVNNDGILKTAKVCMVPGKMQKLASSQLFIPLSPGLGF

SEQ ID NO: 21316 - protein, 375 aa, Homo sapiens
MEEEIAALVIDNGSGMCKAGFAGDDAPRAVFPSIVGRPRHQGVMVGMGQKDSYVGDEAQSKRGILTLKYPIEHGIVTNWDDMEKIWHHTFYNELRVAPEEHPVLLTEAPLNPKANREKMTQIMFETFNTPAMYVAIQAVLSLYASGRTTGIVMDSGDGVTHTVPIYEGYALPHAILRLDLAGRDLTDYLMKILTERGYSFTTTAEREIVRDIKEKLCYVALDFEQEMATAASSSSLEKSYELPDGQVITIGNERFRCPEALFQPSFLGMESCGIHETTFNSIMKCDVDIRKDLYANTVLSGGTTMYPGIADRMQKEITALAPSTMKIKIIAPPERKYSVWIGGSILASLSTFQQMWISKQEYDESGPSIVHRKCF

SEQ ID NO: 21317 - protein, 495 aa, Homo sapiens
MVADRVEVYSRSAAPGSLGYQWLSDGSGVFEIAEASGVRTGTKIIIHLKSDCKEFSSEARVRDVVTKYSNFVSFPLYLNGRRMNTLQAIWMMDPKDVREWQHEEFYRYVAQAHDKPRYTLHYKTDAPLNIRSIFYVPDMKPSMFDVSRELGSSVALYSRKVLIQTKATDILPKWLRFIRGVVDSEDIPLNLSRELLQESALIRKLRDVLQQRLIKFFIDQSKKDAEKYAKFFEDYGLFMREGIVTATEQEVKEDIAKLLRYESSALPSGQLTSLSEYASRMRAGTRNIYYLCAPNRHLAEHSPYYEAMKKKDTEVLFCFEQFDELTLLHLREFDKKKLISVETDIVVDHYKEEKFEDRSPAAECLSEKETEELMAWMRNVLGSRVTNVKVTLRLDTHPAMVTVLEMGAARHFLRMQQLAKTQEERAQLLQPTLEINPRHALIKKLNQLRASEPGLAQLLVDQIYENAMIAAGLVDDPRAMVGRLNELLVKALERH

SEQ ID NO: 21318 - protein, 542 aa, Homo sapiens
MASNSLFSTVTPCQQNFFWDPSTSRRFSPPSSSLQPGKMSDVSPVVAAQQQQQQQQQQQQQQQQQQQQQQQEAAAAAAAAAAAAAAAAAVPRLRPPHDNRTMVEIIADHPAELVRTDSPNFLCSVLPSHWRCNKTLPVAFKVVALGEVPDGTVVTVMAGNDENYSAELRNASAVMKNQVARFNDLRFVGRSGRGKSFTLTITVFTNPPQVATYHRAIKVTVDGPREPRRHRQKLDDSKPSLFSDRLSDLGRIPHPSMRVGVPPQNPRPSLNSAPSPFNPQGQSQITDPRQAQSSPPWSYDQSYPSYLSQMTSPSIHSTTPLSSTRGTGLPAITDVPRRISDSEPSTLDSQSSTTLFLSSEEPGPSTAALPSPSSSSCEPQAFSPGPPALPPLLPPLPAASAPPGPGASRRTGRYSVVASSPEAAPRLVDWLPGCPSTISPSTRGDDKERPPPVLAPAEGPERSRAPRPSTAGREEGTVDAGTSPPPRARPAAAASLEAHVGDILVELRTMNGHLDSIARALTKLASSLGPQPEPLPDVSDAN

SEQ ID NO: 21319 - protein, 94 aa, Homo sapiens
MLSSAYISDHMKVHSQGPHHVCELCNKGFTTAAYLRIHAVKDHGLQAPRADRILCKLCSVHCKTPAQLAGHMQTHLGGAAPPVPGDAPQPQPTC

SEQ ID NO: 21320 - protein, 106 aa, Homo sapiens
MAESLRSPRRSLYKLVGSPPWKEAFRQRCLERMRNSRDRLLNRYRQAGSSGPGNSQNSFLVQEVMEEEWNALQSVENCPEDLAQLEELIDMAVLEEIQQELINQVF

SEQ ID NO: 21321 - protein, 739 aa, Homo sapiens
MQAARCPTDELSLTNCAVVNEKDFQSGQHVIVRTSPNHRYTFTLKTHPSVVPGSIAFSLPQRKWAGLSIGQEIEVSLYTFDKAKQCIGTMTIEIDFLQKKSIDSNPYDTDKMAAEFIQQFNNQAFSVGQQLVFSFNEKLFGLLVKDIEAMDPSILKGEPATGKRQKIEVGLVVGNSQVAFEKAENSSLNLIGKAKTKENRQSIINPDWNFEKMGIGGLDKEFSDIFRRAFASRVFPPEIVEQMGCKHVKGILLYGPPGCGKTLLARQIGKMLNAREPKVVNGPEILNKYVGESEANIRKLFADAEEEQRRLGANSGLHIIIFDEIDAICKQRGSMAGSTGVHDTVVNQLLSKIDGVEQLNNILVIGMTNRPDLIDEALLRPGRLEVKMEIGLPDEKGRLQILHIHTARMRGHQLLSADVDIKELAVETKNFSGAELEGLVRAAQSTAMNRHIKASTKVEVDMEKAESLQVTRGDFLASLENDIKPAFGTNQEDYASYIMNGIIKWGDPVTRVLDDGELLVQQTKNSDRTPLVSVLLEGPPHSGKTALAAKIAEESNFPFIKICSPDKMIGFSETAKCQAMKKIFDDAYKSQLSCVVVDDIERLLDYVPIGPRFSNLVLQALLVLLKKAPPQGRKLLIIGTTSRKDVLQEMEMLNAFSTTIHVPNIATGEQLLEALELLGNFKDKERTTIAQQVKGKKVWIGIKKLLMLIEMSLQMDPEYRVRKFLALLREEGASPLDFD

SEQ ID NO: 21322 - protein, 253 aa, Homo sapiens
DGSNSGNIGTLSTIPTAAPPSSTGVRKGWHEHVTQDLRSHLVHKLVQAIFPTPDPAALKDRRMENLVAYAKKVEGDMYESANSRDEYYHLLAEKIYKIQKELEEKRRSRLHKQGILGNQPALPAPGAQPPVIPQAQPVRPPRMNSFNPMSLGNVQLPQAPMGPRAASPMNHSVQMNSMGSVPGMAISPSRMPQPPNMMGAHTNNMMAQAPAQSQFLPQNQFPSSSGAMSVGMGQPPAQTGVSQVLCPTGTVAP

SEQ ID NO: 21323 - protein, 216 aa, Homo sapiens
MMEEEELEFVEELEAVLQLTPEVQLAIEQVFPSQDPLDRADFNAVEYINTLFPTEQSLANIDEVVNKIRLKIRRLDDNIRTVVRGQTNVGQDGRQALEEAQKAIQQLFGKIKDIKDKAEKSEQMVKEITRDIKQLDHAKRHLTTSITTLNHLHMLAGGVDSLEAMTRRRQYGEVANLLQGVMNVLEHFHKYMGIPQIRQLSERKPKTLQLHGLNWT

SEQ ID NO: 21324 - protein, 110 aa, Homo sapiens
MAALVRPARFVVRPLLQVVQAWDLDARRWVRALRRSPVKVVFPSGEVVEQKRAPGKQPRKAPSEASAQEQREKQPLEESASRAPSTWEESGLRYDKAYPGDRRLRDFCQA

SEQ ID NO: 21325 - protein, 217 aa, Homo sapiens
LALLLARAGLRKPESQEAAPLSGPCGRRVITSRIVGGEDAELGRWPWQGSLRLWDSHVCGVSLLSHRWALTAAHCFETDLSDPSGWMVQFGQLTSMPSFWSLQAYYTRYFVSNIYLSPRYLGNSPYDIALVKLSAPVTYTKHIQPICLQASTFEFENRTDCWVTGWGYIKEDEGSSGRHHKQLYVQPPLPQVQFPQGHLWRHGLCWQCPRREGCLLR

SEQ ID NO: 21326 - protein, 1228 aa, Homo sapiens
MSRRKQAKPQHLKSDEELLPPDGAPEHAAPGEGAEDADSGPESRSGGEETSVCEKCCAEFFKWADFLEHQRSCTKLPPVLIVHEDAPAPPPEDFPEPSPASSPSERAESEAAEEAGAEGAEGEARPVEKEAEPMDAEPAGDTRAPRPPPAAPAPPTPAYGAPSTNVTLEALLSTKVAVAQFSQGARAAGGSGAGGGVAAAAVPLILEQLMALQQQQIHQLQLIEQIRSQVALMQRPPPRPSLSPAAAPSAPGPAPSQLPGLAALPLSAGAPAAAIAGSGPAAPAAFEGAQPLSRPESGASTPGGPAEPSAPAAPSAAPAPAAPAPAPAPQSAASSQPQSASTPPALAPGSLLGAAPGLPSPLLPQTSASGVIFPNPLVSIAATANALDPLSALMKHRKGKPPNVSVFEPKASAEDPFFKHKCRFCAKVFGSDSALQIHLRSHTGERPFKCNICGNRFSTKGNLKVHFQRHKEKYPHIQMNPYPVPEYLDNVPTCSGIPYGMSLPPEKPVTTWLDSKPVLPTVPTSVGLQLPPTVPGAHGYADSPSATPASRSPQRPSPASSECASLSPGLNHVESGVSATAESPQSLLGGPPLTKAEPVSLPCTNARAGDAPVGAQASAAPTSVDGAPTSLGSPGLPAVSEQFKAQFPFGGLLDSMQTSETSKLQQLVENIDKKMTDPNQCVICHRVLSCQSALKMHYRTHTGERPFKCKICGRAFTTKGNLKTHFGVHRAKPPLRVQHSCPICQKKFTNAVVLQQHIRMHMGGQIPNTPLPEGFQDAMDSELAYDDKNAETLSSYDDDMDENSMEDDAELKDAATDPAKPLLSYAGSCPPSPPSVISSIAALENQMKMIDSVMSCQQLTGLKSVENGSGESDRLSNDSSSAVGDLESRSAGSPALSESSSSQALSPAPSNGESFRSKSPGLGAPEEPQEIPLKTERPDSPAAAPGSGGAPGRAGIKEEAPFSLLFLSRERGPSQSTPSLISSAAPTMIKMEVNGHGKAMALGEGPPLPAGVQVPAGPQTVMGPGLAPMLAPPPRRTPKQHNCQSCGKTFSSASALQIHERTHTGEKPFGCTICGRAFTTKGNLKVHMGTHMWNNAPARRGRRLSVENPMALLGGDALKFSEMFQKDLAARAMNVDPSFWNQYAAAITNGLAMKNNEISVIQNGGIPQLPVSLGGSALPPLGSMASGMDKARTGSSPPIVSLDKASSETAASRPFTRFIEDNKEIGIN

SEQ ID NO: 21327 - protein, 237 aa, Homo sapiens
VIAAVFDRDINCRRAASAAFQENVGRQGTFPHGIDILTTADYFAVGNRSNCFLVISVFIAGFPEYTQPMIDHLVTMKISHWDGVIRELAARALHNLAQQAPEFSATQVFPRLLSMTLSPDLHMRHGSILACAEVAYALYKLAAQENRPVTDHLDEQAVQGLKQIHQQLYDRQLYRGLGGQLMRQADLVIVPQMPPEHTVQGCHLSDVPMGARSCLLSGIKTIPHMSWTAGDLVALGV

SEQ ID NO: 21328 - protein, 279 aa, Homo sapiens
MKQVAPDKTCMQFSIRRPKLPSSETHPEESMYKRLGVSAWLNHLNELGQVEEEYKLRKAIFFGGIDVSIRGEVWPFLLRYYSHESTSEEREALRLQKRKEYSEIQQKRLSMTPEEHRAFWRNVQFTVDKDVVRTDRNNQFFRGEDNPNVESMRRILLNYAVYNPAVGYSQGMSDLVAPILAEVLDESDTFWCFVGLMQNTIFVSSPRDEDMEKQLLYLRELLRLTHVRFYQHLVSLGEDGLQMLFCHRWLLLCFKREFPEAEALRIWEACWAHYQGADV

SEQ ID NO: 21329 - protein, 324 aa, Homo sapiens
MSPRAGSAATGSPGRPSPTDFMQTSQTCEGLYDLSNKAASSALGRLYPPEQSLTAFRPVKKSTECLPAQAAETTAESPVSLNVVNGDPPAPTGSASLVSEAAPSSPDDSSGMGPLNLSKKSEINLAATHEPTYQGSPQAETASFSELQDLPLNLSVKDPCNTQAPRPAFPGRPRAAEPAAAVPQKTGTEGSEDGPSHPETKPGSLDGDGAPPTGPGEEAPDACAVDSSEEQKQTAAVALCQLAAYSPRNIRVGDGDAAAPEPACRQDTPTLSSMESQEAQCDLRPKGQKRTSLRDAGKSQQGAKKAKLQDTARVFTLRRRARVS

SEQ ID NO: 21330 - protein, 162 aa, Homo sapiens
MIRNWLTIFILFPLKLVEKCESSVSLTVPPVVKLENGSSTNVSLTLRPPLNATLVITFEITFRSKNITILELPDEVVVPPGVTNSSFQVTSQNVGQLTVYLHGNHSNQTGPRIRFLVIRSSAISIINQVIGWIYFVAWSISFYPQVIMNWRRKSVIGLSFDF

SEQ ID NO: 21331 - protein, 1429 aa, Homo sapiens
PGPGGGGGPSGSGSGPGSNGGLGSGGELHPRTGRLVSLSACGRTARRQQPGQEFNHGLVLSREPLRDGRVFTVRIDRKVNSWSGSIEIGVTALDPSVLDFPSSATGLKGGSWVVSGCSVLRDGRSVLEEYGQDLDQLGEGDRVGVERTVAGELRLWVNGRDCGVAATGLPPRVWAVVDLYGKCTQITVLPPEPGFSPPTPIPTPPLEPLAPTEDSALAEQGTSADEDFANMELSEVVSNTILSAYNGGLLNVNLSSPPAGEGLGSSGAATSPILTSNDALLFHEKCGTLIKLSNNNKTAERRRPLDEFNNGVVMTNRPLRDNEMFEIRIDKLVDKWSGSIEIGVTTHNPNSLEYPATMTNLQSGTIMMSGCGILTNGKGTRREYCEFSLDELQEGDHIGLTRKSNSALHFFINGIDQGVATPLTPPVVYGVVDLYGMAVKVTIVHNNNHSDRLRRNNAILRALSPEGALRRAAPAAQAEPERLLFHPNCGQKAAITHEGRTALRPHATDDFNHGVVLSSRALRDGEVFQVRIDKMVDKWAGSIEIGVTTHNPAYLQLPSTMTNLRSGTWMMTGNGVMHNGTTILDEYGHNLDRLKAGDTVGVVRREDGTLHFFVNGMTQGPAAWNVPPGVYAVVDLYGQAAQATIVDDVEVAPVPEPLPEGNNQVSPSSPSSGAGGSDLRFHQLHGSNAVITNGGRTALRHNCRSEFNDAIVISNRALRDGELFEIVIQKMVDRWSGSIEAGVTAIRPEDLEFPNTMTDIDYDTWMLSGTAIMQDGNTMRNNYGCDLDALGTGARIGMMRTAKGDLHYFINGQDQGAACSGLPPGKEVYAVVDLYGQCVQVSITNATGPMDNSLATSNTATEKSFPLHSPVAGVAHRFHSTCGKNVTLEEDGTRAVRAAGYAHGLVFSTKELRAEEVFEVKVEELDEKWAGSLRLGLTTLAPGEMGPGAGGGGPGLPPSLPELRTKTTWMVSSCEVRRDGQLQRMNYGRNLERLGVGSRVGVRRGADDTMHILVDGEDMGPAATGIAKNVWAVLDLYGPVRGVSIVSSTRLEESEGTQPPSPSSDTGSEGEEDDEGEEHGLGGQNEVGIIPTTLEFLENHGKNILLSNGNRTATRVASYNQGIVVINQPLVPQLLVQVRIDFLNRQWTSSLVLGVITCAPERLNFPASACALKRAAWLLRGRGVFHNGLKICEKFGPNLDTCPEGTILGLRLDSSGGLHLHVNGVDQGVAVPDVPQPCHALVDLYGQCEQVTIVNPEPGAASGKSAGTQGDMEKADMVDGIKESVCWGPPPAASPLKSCEYHALCSRFQELLLLPEDYFMPPPKRSLCYCESCRKLRGDEAHRRRGEPPREYALPFGWCRFNLRVNPRLEAGTLTKKWHMAYHGSNVAAVRRVLDRGELGAGTASILSCRPLKGEPGVGFEEPGENCAP

SEQ ID NO: 21332 - protein, 455 aa, Homo sapiens
SKHGWRDTDLFSQPTYCCVCAQHILQGAFCDCCGLRVDEGCLRKADKRFQCKEIMLKNDTKVLDAMPHHWIRGNVPLCSYCMVCKQQCGCQPKLCDYRCIWCQKTVHDECMKNSLKNEKCDFGEFKNLIIPPSYLTSINQMRKDKKTDYEVLASKLGKQWTPLIILANSRSGTNMGEGLLGEFRILLNPVQVFDVTKTPPIKALQLCTLLPYYSARVLVCGGDGTVGWVLDAVDDMKIKGQEKYIPQVAVLPLGTGNDLSNTLGWGTGYAGEIPVAQVLRNVMEADGIKLDRWKVQVTNKGYYNLRKPKEFTMNNYFSVGPDALMALNFHAHREKAPSLFSSRILNKAVYLFYGTKDCLVQECKDLNKKVELELDGERVALPSLEGIIVLNIGYWGGGCRLWEGMGDETYPLARHDDGLLEVVGVYGSFHCAQIQVKLANPFRIGQAHTVRVGEI

SEQ ID NO: 21333 - protein, 143 aa, Homo sapiens
RIEPNSVSLEDWLDFSSTNVEKADKQRNNSLMLKALVDRILSQTANDLRKQCDVVDTAFKNGLKDTKDARDKLADHLAKIEGNFSPSSGRAERAASQTACPAGGDPGQREHHLYRRSAVYADEEIHPTSGWGRPWGLGWGPPP

SEQ ID NO: 21334 - protein, 141 aa, Homo sapiens
MIDHLVTMKISHWDGVIRELAARALHNLAQQAPEFSATQVFPRLLSMTLSPDLHMRHGSILACAEVAYALYKLAAQENRPVTDHLDEQAVQGLKQIHQQLYDRQLYRGLGGQLMRQAVCVLIEKLSLSKMPFRGDTVIDGW

SEQ ID NO: 21335 - protein, 309 aa, Homo sapiens
SSSSDWRVPGQGLENRGEPPTPPSPAPAPAVAPGGSSESSSGRAAGDTPERKEAAGTGKKVKVRPPPLKKTFDSVDKVLSEVDFEERFAELPEFRPEEVLPSPTLQSLATSPRAILGSYRKKRKNSTDLDSAPEDPTSPKRKMRRRSSCSSEPNTPKSAKCEGDIFTFDRTEAEDVLGELEYDKVPYSSLRRTLDQRRALVMQLFQDHGFFPSAQATAAFQARYADIFPSKVCLQLKIREVRQKIMQAATPTEQPPGAEAPLPVPPPTGTAAAPAPTPSPAGGPDPTSPSSDSGTAQAAPPLPPPPESG

SEQ ID NO: 21336 - protein, 811 aa, Homo sapiens
LFLLELLTCQKDFTNYFGHLEGCGADLHKEIRDTYYQLVLFLVKAVKGFSSLNDRSLLPALSCVQTALLHLLDMGWEPNDLAFFVDIQLPDLLMKMSQENISVHDSVISQWSEEDELADAKQNSEWMDECQDGMFEAWYEKIAQEDPEKQRKMHMFIARYCDLLNVDISCDGCDEIAPWHRYRCLQCSDMDLCKTCFLGGVKPEGHGDDHEMVNMEFTCDHCQGLIIGRRMNCNVCDDFDLCYGCYAAKKYSYGHLPTHSITAHPMVTIRISDRQRLIQPYIHNYSWLLFAALALYSAHLASAEDVDGEKLDPQTRSSATTLRSQCMQLVGDCLMKAHQGKGLKALALLGVLPDGDSSLEDQALPVTVPTGASEEQLEKKAVQGAELSEAGNGKRAVHEEIRPVDFKQRNKADKGVSLSKDPSCQTQISDSPADASPPTGLPDAEDSEVSSQKPIEEKAVTPSPEQVFAECSQKRILGLLAAMLPPLKSGPTVPLIDLEHVLPLMFQVVISNAGHLNETYHLTLGLLGQLIIRLLPAEVDAAVIKVLSAKHNLFAAGDSSIVPDGWKTTHLLFSLGAVCLDSRVGLDWACSMAEILRSLNSAPLWRDVIATFTDHCIKQLPFQLKHTNIFTLLVLVGFPQVLCVGTRCVYMDNANEPHNVIILKHFTEKNRAVIVDVKTRKRKTVKDYQLVQKGGGQECGDSRAQLSQYSQHFAFIASHLLQSSMDSHCPEAVEATWVLSLALKGLYKTLKAHGFEEIRATFLQTDLLKLLVKKCSKGTGFSKTWLLRDLEVRDERDSCSSFLVQMCWPRS

SEQ ID NO: 21337 - protein, 211 aa, Homo sapiens
MGLRPMEGTFPHGIDILTTADYFAVGNRSNCFLVISVFIAGFPEYTQPMIDHLVTMKISHWDGVIRELAARALHNLAQQAPEFSATQVFPRLLSMTLSPDLHMRHGSILACAEVAYALYKLAAQENRPVTDHLDEQAVQGLKQIHQQLYDRQLYRGLGGQLMRQAVCVLIEKLSLSKMPFRGDTVIDGWQWLINDTLRHLHLISSHSRQQM

SEQ ID NO: 21338 - protein, 962 aa, Homo sapiens
MHFILDPEDPGAPQASTEGKPKHRRLRGGVVMAAPPARPDHTRLLQICLLLGVLVEIRAEQILYSVFEEQEEGSVVGNIAKDLGLAPRELAERGVRIVSRGRTQLFALNPRSGTLVTAGRIDREELCDRSPNCVTNLEILLEDTVKILRVEVEIIDVNDNPPSFGTEQREIKVAENENPGARFPLPEAFDPDVGVNSLQGYQLNSNGYFSLDVQSGADGIKYPELVLERALDREEEAVHHLVLTAFDGGDPVRSGTARILIILVDTNDNAPVFTQPEYHVSVRENVPVGTRLLTVKATDPDEGANGDVTYSFRKVRDKISQLFQLNSLSGDITILGGLDYEDSGFYDIDVEAHDGPGLRARSKVLVTVLDENDNAPEVTVTSLTSSVQESSSPGTVIALFNVHDSDSGGNGLVTCSIPDNLPFTLEKTYGNYYRLLTHRTLDREEVSEYNITVTATDQGTPPLSTETHISLQVMDINDNPPTFPHASYSAYIPENNPRGASILSMTAQDPDSGDNARITYSLAEDTFQGAPLSSYVSINSNTGILYALCSFDYEQFRDLQLLMTASDSGDPPLSSNVSLSLFVLDQNDNVPEILYPTFPTDGSTGVELAPRSADSGYLVTKVVAVDRDSGQNAWLSYSLLKSSEPGLFAVGLHTGEVRTARALLDRDALKQRLVVVVQDHGQPPLSATVTLTVAVADSIPDVLADLGSLKPSADPDDSGLTLYLVVAVAAVSCVFLAFVTVLLALKLRRWHKSRLLHAEGSRLAGVPASHFVGVDGVRAFLQTYSHEVSLTADSRKSHLIFSQPSYADTLISRESCEKSEPLLITQDLLETKGDPNLQQAPPNTDWRFSQAQRPGTSGSQNGDDTGTWPNNQFDTEMLQAMILASASEAADGSSTLGGGAGTMGLSARYGPQFTLQHVPDYRQNVYIPGSNATLTNAAGKRDGKAPAGGNGNKKKSGKKEKK

SEQ ID NO: 21339 - protein, 470 aa, Homo sapiens
MKFLLILLLQATASGALPLNSSTSLEKNNVLFGERYLEKFYGLEINKLPVTKMKYSGNLMKEKIQEMQHFLGLKVTGQLDTSTLEMMHAPRCGVPDVHHFREMPGGPVWRKHYITYRINNYTPDMNREDVDYAIRKAFQVWSNVTPLKFSKINTGMADILVVFARGAHGDFHAFDGKGGILAHAFGPGSGIGGDAHFDEDEFWTTHSGGTNLFLTAVHEIGHSLGLGHSSDPKAVMFPTYKYVDINTFRLSADDIRGIQSLYGDPKENQRLPNPDNSEPALCDPNLSFDAVTTVGNKIFFFKDRFFWLKVSERPKTSVNLISSLWPTLPSGIEAAYEIEARNQVFLFKDDKYWLISNLRPEPNYPKSIHSFGFPNFVKKIDAAVFNPRFYRTYFFVDNQYWRYDERRQMMDPGYPKLITKNFQGIGPKIDAVFYSKNKYYYFFQGSNQFEYDFLLQRITKTLKSNSWFGC

SEQ ID NO: 21340 - protein, 296 aa, Homo sapiens
MELALRRSPVPRWLLLLPLLLGLNAGAVIDWPTEEGKEVWDYVTVRKDAYMFWWLYYATNSCKNFSELPLVMWLQGGPGGSSTGFGNFEEIGPLDSDLKPRKTTWLQAASLLFVDNPVGTGFSYVNGSGAYAKDLAMVASDMMVLLKTFFSCHKEFQTVPFYIFSESYGGKMAAGIGLELYKAIQRGTIKCNFAGVALGDSWISPVDSVLSWGPYLYSMSLLEDKGLAEVSKVAEQVLNAVNKGLYREATELWGKAEMIIEQNTDGVNFYNILTKSTPTSTMESSLEFTQSHLVWF

SEQ ID NO: 21341 - protein, 244 aa, Homo sapiens
MIDHLVTMKISHWDGVIRELAARALHNLAQQAPEFSATQVFPRLLSMTLSPDLHMRHGSILACAEVAYALYKLAAQENRPVTDHLDEQAVQGLKQIHQQLYDRQLYRGLGGQLMRQAVCVLIEKLSLSKMPFRGDTVIDGWQWLINDTLRHLHLISSHSRQQMKDAAVSALAALCSEYYMKEPGEADPAIQEELITQYLAELRNPEEMTRCGFSLALGALPGFLLKGRLQQVLTGLRAVTHTSP

SEQ ID NO: 21342 - protein, 535 aa, Homo sapiens
MNRFRVSKFRHTEARPPRRESWISDIRAGTAPSCRNHIKSSCSLIAFNSDRPGVLGIVPLQGQGEDKRRVAHLGCHSDLVTDLDFSPFDDFLLATGSADRTVKLWRLPGPGQALPSAPGVVLGPEDLPVEVLQFHPTSDGILVSAAGTTVKVWDAAKQQPLTELAAHGDLVQSAVWSRDGALVGTACKDKQLRIFDPRTKPRASQSTQAHENSRDSRLAWMGTWEHLVSTGFNQMREREVKLWDTRFFSSALASLTLDTSLGCLVPLLDPDSGLLVLAGKGERQLYCYEVVPQQPALSPVTQCVLESVLRGAALVPRQALAVMSCEVLRVLQLSDTAIVPIGYHVPRKAVEFHEDLFPDTAGCVPATDPHSWWAGDNQQVQKVSLNPACRPHPSFTSCLVPPAEPLPDTAQPAVMETPVGDADASEGFSSPPSSLTSPSTPSSLGPSLSSTSGIGTSPSLRSLQSLLGPSSKFRHAQGTVLHRDSHITNLKGLNLTTPGESDGFCANKLRVAVPLLSSGGQVAVLEMREKRHREV

SEQ ID NO: 21343 - protein, 895 aa, Homo sapiens
MLLEKDVNPGGKEETPGQRPAVTETHQLAELNEKKNERLRAAFGISDSYVDGSSFDPQRRAREAKQPAPEPPKPYSLVRESSSSRSPTPKQKKKKKKKDRGRRSESSSPRRERKKSSKKKKHRSESESKKRKHRSPTPKSKRKSKDKKRKRSRSTTPAPKSRRAHRSTSADSASSSDTSRSRSRSAAAKTHTTALAGRSPSPASGRRGEGDAPFSEPGTTSTQRPSSPETATKQPSSPYEDKDKDKKEKSATRPSPSPERSSTGPEPPAPTPLLAERHGGSPQPLATTPLSQEPVNPPSEASPTRDRSPPKSPEKLPQSSSSESSPPSPQPTKVSRHASSSPESPKPAPAPGSHREISSSPTSKNRSHGRAKRDKSHSHTPSRRMGRSRSPATAKRGRSRSRTPTKRGHSRSRSPQWRRSRSAQRWGRSRSPQRRGRSRSPQRPGWSRSRNTQRRGRSRSARRGRSHSRSPATRGRSRSRTPARRGRSRSRTPARRRSRSRTPTRRRSRSRTPARRGRSRSRTPARRRSRTRSPVRRRSRSRSPARRSGRSRSRTPARRGRSRSRTPARRGRSRSRTPARRSGRSRSRTPARRGRSRSRTPRRGRSRSRSLVRRGRSHSRTPQRRGRSGSSSERKNKSRTSQRRSRSNSSPEMKKSRISSRRSRSLSSPRSKAKSRLSLRRSLSGSSPCPKQKSQTPPRRSRSGSSQPKAKSRTPPRRSRSSSSPPPKQKSKTPSRQSHSSSSPHPKVKSGTPPRQGSITSPQANEQSVTPQRRSCFESSPDPELKSRTPSRHSCSGSSPPRVKSSTPPRQSPSRSSSPQPKVKAIISPRQRSHSGSSSPSPSRVTSRTTPRRSRSVSPCSNVESRLLPRYSHSGSSSPDTKVKPETPPRQSHSG

SEQ ID NO: 21344 - protein, 723 aa, Homo sapiens
EVPEHLFYSQDITYLNLRHNFMQLERPGGLDTLYKFSQLKGLNLSHNKLGLFPILLCEISTLTELNLSCNGFHDLPSQIGNLLNLQTLCLDGNFLTTLPEELGNLQQLSSLGISFNNFSQIPEVYEKLTMLDRVVMAGNCLEVLNLGVLNRMNHIKHVDLRMNHLKTMVIENLEGNKHITHVDLRDNRLTDLDLSSLCSLEQLHCGRNQLRELTLSGFSLRTLYASSNRLTAVNVYPVPSLLTFLDLSRNLLECVPDWACEAKKIEVLDVSYNLLTEVPVRILSSLSLRKLMLGHNHVQNLPTLVEHIPLEVLDLQHNALTRLPDTLFSKALNLRYLNASANSLESLPSACTGEESLSMLQLLYLTNNLLTDQCIPVLVGHLHLRILHLANNQLQTFPASKLNKLEQLEELNLSGNKLKTIPTTIANCKRLHTLVAHSNNISIFPEILQLPQIQFVDLSCNDLTEILIPEALPATLQDLDLTGNTNLVLEHKTLDIFSHITTLKIDQKPLPTTDSTVTSTFWSHGLAEMAGQRNKLCVSALAMDSFAEGVGAVYGMFDGDRNEELPRLLQCTMADVLLEEVQQSTNDTVFMANTFLVSHRKLGMAGQKLGSSALLCYIRPDTADPASSFSLTVANVGTCQAVLCRGGKPVPLSKVFSLEQDPEEAQRVKDQKAIITEVPEDLKEFQTTDIPVHHCNFRAVLGCLCSASVLGSYAGPAPRWRRT

SEQ ID NO: 21345 - protein, 466 aa, Homo sapiens
PALEEEEAPRALSLLSLPPKKRSILGLGQARPLEFLRTCYGGSFLVHESFLYKREKAVGDKVYWTCRDHALHGCRSRAITQGQRVTVMRGHCHQPDMEGLEARRQQEKAVETLQAGQDGPGSQVDTLLRGVDSLLYRRGPGPLTLTRPRPRKRAKVEDQELPTQPEAPDEHQDMDADPGGPEFLKTPLGGSFLVYESFLYRREKAAGEKVYWTCRDQARMGCRSRAITQGRRVTVMRGHCHPPDLGGLEALRQREKRPNTAQRGSPGGPEFLKTPLGGSFLVYESFLYRREKAAGEKVYWTCRDQARMGCRSRAITQGRRVMVMRRHCHPPDLGGLEALRQREHFPNLAQWDSPDPLRPLEFLRTSLGGRFLVHESFLYRKEKAAGEKVYWMCRDQARLGCRSRAITQGHRIMVMRSHCHQPDLAGLEALRQRERLPTTAQQEDPEKIQVQLCFKTCSPESQQIYG

SEQ ID NO: 21346 - protein, 1608 aa, Homo sapiens
MYSAHRPLMPASSAASRGLGMFVWTNVEPRSVAVFPWHSLVPFLAPSQPDPSVQPSEAQQPASHPVASNQSKEPAESAAVAHERPPGGTGSADPERPPGATCPESPGPGPPHPLGVVESGKGPPPTTEEEASGPPGEPRLDSETESDHDDAFLSIMSPEIQLPLPPGKRRTQSLSALPKERDSSSEKDGRSPNKREKDHIRRPMNAFMIFSKRHRALVHQRHPNQDNRTVSKILGEWWYALGPKEKQKYHDLAFQVKEAHFKAHPDWKWCNKDRKKSSSEAKPTSLGLAGGHKETRERSMSETGTAAAPGVSSELLSVAAQTLLSSDTKAPGSSSCGAERLHTVGGPGSARPRAFSHSGVHSLDGGEVDSQALQELTQMVSGPASYSGPKPSTQYGAPGPFAAPGEGGALAATGRPPLLPTRASRSQRAASEDMTSDEERMVICEEEGDDDVIADDGFGTTDIDLKCKERVTDSESGDSSGEDPEGNKGFGRKVFSPVIRSSFTHCRPPLDPEPPGPPDPPVAFGKGYGSAPSSSASSPASSSASAATSFSLGSGTFKAQESGQGSTAGPLRPPPPGAGGPATPSKATRFLPMDPATFRRKRPESVGGLEPPGPSVIAAPPSGGGNILQTLVLPPNKEEQEGGGARVPSAPAPSLAYGAPAAPLSRPAATMVTNVVRPVSSTPVPIASKPFPTSGRAEASPNDTAGARTEMGTGSRVPGGSPLGVSLVYSDKKSAAATSPAPHLVAGPLLGTVGKAPATVTNLLVGTPGYGAPAPPAVQFIAQGAPGGGTTAGSGAGAGSGPNGPVPLGILQPGALGKAGGITQVQYILPTLPQQLQVAPAPAPAPGTKAAAPSGPAPTTSIRFTLPPGTSTNGKVLAATAPTPGIPILQSVPSAPPPKAQSVSPVQAPPPGGSAQLLPGKVLVPLAAPSMSVRGGGAGQPLPLVSPPFSVPVQNGAQPPSKIIQLTPVPVSTPSGLVPPLSPATLPGPTSQPQKVLLPSSTRITYVQSAGGHALPLGTSPASSQAGTVTSYGPTSSVALGFTSLGPSGPAFVQPLLSAGQAPLLAPGQVGVSPVPSPQLPPACAAPGGPVITAFYSGSPAPTSSAPLAQPSQAPPSLVYTVATSTTPPAATILPKGPPAPATATPAPTSPFPSATAGSMTYSLVAPKAQRPSPKAPQKVKAAIASIPVGSFEAGASGRPGPAPRQPLEPGPVREPTAPESELEGQPTPPAPPPLPETWTPTARSSPPLPPPAEERTSAKGPETMASKFPSSSSDWRVPGQGLENRGEPPTPPSPAPAPAVAPGGSSESSSGRAAGDTPERKEAAGTGKKVKVRPPPLKKTFDSVDNRVLSEVDFEERFAELPEFRPEEVLPSPTLQSLATSPRAILGSYRKKRKNSTDLDSAPEDPTSPKRKMRRRSSCSSEPNTPKSAKCEGDIFTFDRTGTEAEDVLGELEYDKVPYSSLRRTLDQRRALVMQLFQDHGFFPSAQATAAFQARYADIFPSKVCLQLKIREVRQKIMQAATPTEQPPGAEAPLPVPPPTGTAAAPAPTPSPAGGPDPTSPSSDSGTAQAAPPLPPPPESGPGQPGWEGAPQPSPPPPGPSTAATGR

SEQ ID NO: 21347 - protein, 160 aa, Homo sapiens
MAAALFVLLGFALLGTHGASGAEDLGSKILLTCSLNDSATEVTGHRWLKGGVVLKEDALPGQKTEFKVDSDDQWGEYSCVFLPEPMGTANIQLHGPPRVKAVKSSEHINEGETAMLVCKSESVPPVTDWAWYKITDSEDKALMNGSESRFFVSSSQGRSE

SEQ ID NO: 21348 - protein, 282 aa, Homo sapiens
MAAPRQIPSHIVRLKPSCSTDSSFTRTPVPTVSLASRELPVSSWQVTEPSSKNLWEQICKEYEAEQPPFPEGYKVKQEPVITVAPVEEMLFHGFSAEHYFPVSHFTMISRTPCPQDKSETINPKTCSPKEYLETFIFPVLLPGMASLLHQAKKEKCFERKRTKFIACDFLTEWLYNQNPKRAGEPFTEFFSIPFVEERLKQHPRPPIPLSLLLTEEEAALYIQSFWRACVVRCDPEIQELRQWQKKLREAKHIHQQVKIFWAKQEQKGKLLDSLSLVHSRKA

SEQ ID NO: 21349 - protein, 107 aa, Homo sapiens
MAESLRSPRRSLYKLVGSPPWKEAFRQRCLERMRNSRDRLLNRYRQAGSSGPGNSQNSFLVQEVMEEEWNALQSVENCPEDLAQLEELIDMAVLEEIQQELINQGTT

SEQ ID NO: 21350 - protein, 1938 aa, Homo sapiens
MAQKGQLSDDEKFLFVDKNFINSPVAQADWAAKRLVWVPSEKQGFEAASIKEEKGDEVVVELVENGKKVTVGKDDIQKMNPPKFSKVEDMAELTCLNEASVLHNLRERYFSGLIYTYSGLFCVVVNPYKHLPIYSEKIVDMYKGKKRHEMPPHIYAIADTAYRSMLQDREDQSILCTGESGAGKTENTKKVIQYLAVVASSHKGKKDTSITGELEKQLLQANPILEAFGNAKTVKNDNSSRFGKFIRINFDVTGYIVGANIETYLLEKSRAIRQARDERTFHIFYYMIAGAKEKMRSDLLLEGFNNYTFLSNGFVPIPAAQDDEMFQETVEAMAIMGFSEEEQLSILKVVSSVLQLGNIVFKKERNTDQASMPDNTAAQKVCHLMGINVTDFTRSILTPRIKVGRDVVQKAQTKEQADFAVEALAKATYERLFRWILTRVNKALDKTHRQGASFLGILDIAGFEIFEVNSFEQLCINYTNEKLQQLFNHTMFILEQEEYQREGIEWNFIDFGLDLQPCIELIERPNNPPGVLALLDEECWFPKATDKSFVEKLCTEQGSHPKFQKPKQLKDKTEFSIIHYAGKVDYNASAWLTKNMDPLNDNVTSLLNASSDKFVADLWKDVDRIVGLDQMAKMTESSLPSASKTKKGMFRTVGQLYKEQLGKLMTTLRNTTPNFVRCIIPNHEKRSGKLDAFLVLEQLRCNGVLEGIRICRQGFPNRIVFQEFRQRYEILAANAIPKGFMDGKQACILMIKALELDPNLYRIGQSKIFFRTGVLAHLEEERDLKITDVIMAFQAMCRGYLARKAFAKRQQQLTAMKVIQRNCAAYLKLRNWQWWRLFTKVKPLLQVTRQEEEMQAKEDELQKTKERQQKAENELKELEQKHSQLTEEKNLLQEQLQAETELYAEAEEMRVRLAAKKQELEEILHEMEARLEEEEDRGQQLQAERKKMAQQMLDLEEQLEEEEAARQKLQLEKVTAEAKIKKLEDEILVMDDQNNKLSKERKLLEERISDLTTNLAEEEEKAKNLTKLKNKHESMISELEVRLKKEEKSRQELEKLKRKLEGDASDFHEQIADLQAQIAELKMQLAKKEEELQAALARLDDEIAQKNNALKKIRELEGHISDLQEDLDSERAARNKAEKQKRDLGEELEALKTELEDTLDSTATQQELRAKREQEVTVLKKALDEETRSHEAQVQEMRQKHAQAVEELTEQLEQFKRAKANLDKNKQTLEKENADLAGELRVLGQAKQEVEHKKKKLEAQVQELQSKCSDGERARAELNDKVHKLQNEVESVTGMLNEAEGKAIKLAKDVASLSSQLQDTQELLQEETRQKLNVSTKLRQLEEERNSLQDQLDEEMEAKQNLERHISTLNIQLSDSKKKLQDFASTVEALEEGKKRFQKEIENLTQQYEEKAAAYDKLEKTKNRLQQELDDLVVDLDNQRQLVSNLEKKQRKFDQLLAEEKNISSKYADERDRAEAEAREKETKALSLARALEEALEAKEELERTNKMLKAEMEDLVSSKDDVGKNVHELEKSKRALETQMEEMKTQLEELEDELQATEDAKLRLEVNMQALKGQFERDLQARDEQNEEKRRQLQRQLHEYETELEDERKQRALAAAAKKKLEGDLKDLELQADSAIKGREEAIKQLRKLQAQMKDFQRELEDARASRDEIFATAKENEKKAKSLEADLMQLQEDLAAAERARKQADLEKEELAEELASSLSGRNALQDEKRRLEARIAQLEEELEEEQGNMEAMSDRVRKATQQAEQLSNELATERSTAQKNESARQQLERQNKELRSKLHEMEGAVKSKFKSTIAALEAKIAQLEEQVEQEAREKQAATKSLKQKDKKLKEILLQVEDERKMAEQYKEQAEKGNARVKQLKRQLEEAEEESQRINANRRKLQRELDEATESNEAMGREVNALKSKLRGPPPQETSQ

SEQ ID NO: 21351 - protein, 189 aa, Homo sapiens
MEEKGSRMVQQGNQEAAAAPDTMAQPYASAQFAPPQNGIPAEYTAPHPHPAPEYTGQTTVPEHTLNLYPPAQTHSEQSPADTSAQTVSGTATQTDDAAPTDGQPQTQPSENTENKSQPKRLHVSNIPFRFRDPDLRQMFGQFGKILDVEIIFNERGSKGFGFVTFENSADADRAREKLHGTVVEGRKIE

SEQ ID NO: 21352 - protein, 664 aa, Homo sapiens
MAEFRVRVSTGEAFGAGTWDKVSVSIVGTRGESPPLPLDNLGKEFTAGAEEDFQVTLPEDVGRVLLLRVHKAPPVLPLLGPLAPDAWFCRWFQLTPPRGGHLLFPCYQWLEGAGTLVLQEGTAKVSWADHHPVLQQQRQEELQARQEMYQWKAYNPGWPHCLDEKTVEDLELNIKYSTAKNANFYLQAGSAFAEMKIKGLLDRKGLWRSLNEMKRIFNFRRTPAAEHAFEHWQEDAFFASQFLNGLNPVLIRRCHYLPKNFPVTDAMVASVLGPGTSLQAELEKGSLFLVDHGILSGIQTNVINGKPQFSAAPMTLLYQSPGCGPLLPLAIQLSQTPGPNSPIFLPTDDKWDWLLAKTWVRNAEFSFHEALTHLLHSHLLPEVFTLATLRQLPHCHPLFKLLIPHTRYTLHINTLARELLIVPGQVVDRSTGIGIEGFSELIQRNMKQLNYSLLCLPEDIRTRGVEDIPGYYYRDDGMQIWGAVERDESVQDDRELQAWVREIFSKGFLNQESSGIPSSLETREALVQYVTMVIFTCSAKHAAVSAGQFDSCAWMPNLPPSMQLPPPTSKGLATCEGFIATLPPVNATCDVILALWLLSKEPGDQRPLGTYPDEHFTEEAPRRSIATFQSRLAQISRGIQERNQGLVLPYTYLDPPLIENSVSI

SEQ ID NO: 21353 - protein, 278 aa, Homo sapiens
MKVAPDKTCMQFSIRRPKLPSSETHPEESMYKRLGVSAWLNHLNELGQVEEEYKLRKAIFFGGIDVSIRGEVWPFLLRYYSHESTSEEREALRLQKRKEYSEIQQKRLSMTPEEHRAFWRNVQFTVDKDVVRTDRNNQFFRGEDNPNVESMRRILLNYAVYNPAVGYSQGMSDLVAPILAEVLDESDTFWCFVGLMQNTIFVSSPRDEDMEKQLLYLRELLRLTHVRFYQHLVSLGEDGLQMLFCHRWLLLCFKREFPEAEALRIWEACWAHYQGADV

SEQ ID NO: 21354 - protein, 292 aa, Homo sapiens
RQKSTYTSYPKAEPMPSASSAPPASSLYSSPVNSSAPLAEDIDPELARYLNRNYWEKKQEEARKSPTPSAPVPLTEPAAQPGEGHAAPTNVVENPLPETDSQPIPPSGGPFSESINGMHPQLLELLNQLDERRLYYEGLQDKLAQIRDARGALSALREEHREKLRRAAEEAERQRQIQLAQKLEIMRQKKQEYLEVQRQLAIQRLQEQEKERQMRLEQQKQTVQMRAQMPAFPLPYAQLQAMPAAGGVLYQPSGPASFPSTFSPAGSVEGSPMHGVYMSQPAPAAGPYPSMP

SEQ ID NO: 21355 - protein, 353 aa, Homo sapiens
MEHTHAHLAANSSLSWWSPGSACGLGFVPVVYYSLLLCLGLPANILTVIILSQLVARRQKSSYNYLLALAAADILVLFFIVFVDFLLEDFILNMQMPQVPDKIIEVLEFSSIHTSIWITVPLTIDRYIAVCHPLKYHTVSYPARTRKVIVSVYITCFLTSIPYYWWPNIWTEDYISTSVHHVLIWIHCFTVYLVPCSIFFILNSIIVYKLRRKSNFRLRGYSTGKTTAILFTITSIFATLWAPRIIMILYHLYGAPIQNRWLVHIMSDIANMLALLNTAINFFLYCFISKRFRTMAAATLKAFFKCQKQPVQFYTNHNFSITSSPWISPANSHCIKMLVYQYDKNGKPIKVSP

SEQ ID NO: 21356 - protein, 172 aa, Homo sapiens
MTATPESLFPTGDELDSSQLQMESDEVDTLKEGEDPADRMHPFLAIYELQSLKVHPLVFAPGVPVTAQVVGTERYTSGSKVGTCTLYSVRLTHGDFSWTTKKKYRHFQELHRDLLRHKVLMSLLPLARFAVAYSPARDAGNREMPSLPRAGPEGSTRHAASKQKYLENYLNR

SEQ ID NO: 21357 - protein, 186 aa, Homo sapiens
MRKLAQRIDIQMRDNRDAQHVLERDLEDKSSAQCIDEKCFNLRNTSDCISFFHGMEKIDGTISVPETWAKFSNDNIKHSQNMRANSIQLREEAEHLFETLSDQMWRQFTDTNLAFNARISEVTDVKNKLQTQLAKTLQEIFQAENTIMLLERSIMAKEGPLKVAQTRLECRTRRPNMELCRDIPQL

SEQ ID NO: 21358 - protein, 682 aa, Homo sapiens
MDSQGDWAAQEKGQRMSSQPAGNQTSPGATEDYSYGSWYIDEPQGGEELQPEGEVPSCHTSIPPGLYHACLASLSILVLLLLAMLVRRRQLWPDCVRGRPGLPSPVDFLAGDRPRAVPAAVFMVLLSSLCLLLPDEDALPFLTLASAPSQDGKTEAPRGAWKILGLFYYAALYYPLAACATAGHTAAHLLGSTLSWAHLGVQVWQRAECPQVPKIYKYYSLLASLPLLLGLGFLSLWYPVQLVRSFSRRTGAGSKGLQSSYSEEYLRNLLCRKKLGSSYHTSKHGFLSWARVCLRHCIYTPQPGFHLPLKLVLSATLTGTAIYQVALLLLVGVVPTIQKVRAGVTTDVSYLLAGFGIVLSEDKQEVVELVKHHLWALEVCYISALVLSCLLTFLVLMRSLVTHRTNLRALHRGAALDLSPLHRSPHPSRQAIFCWMSFSAYQTAFICLGLLVQQIIFFLGTTALAFLVLMPVLHGRNLLLFRSLESSWPFWLTLALAVILQNMAAHWVFLETHDGHPQLTNRRVLYAATFLLFPLNVLVGAMVATWRVLLSALYNAIHLGQMDLSLLPPRAATLDPGYYTYRNFLKIEVSQSHPAMTAFCSLLLQAQSLLPRTMAAPQDSLRPGEEDEGMQLLQTKDSMAKGARPGASRGRARWGLAYTLLHNPTLQVFRKTALLGANGAQP

SEQ ID NO: 21359 - protein, 661 aa, Homo sapiens
MLPEAGSLWLLKLLRDIQLAQFYWPILEELNVTRPEHFDFVKPEDLDGIGMGRPAQRRLSEALKRLRSGPKSKNWVYKILGGFAPEHKEPTLPSDSPRHLPEPEGGLKCLIPEGAVCRGELLGSGCFGVVHRGLWTLPSGKSVPVAVKSLRVGPEGPMGTELGDFLREVSVMMNLEHPHVLRLHGLVLGQPLQMVMELAPLGSLHARLTAPAPTPPLLVALLCLFLRQLAGAMAYLGARGLVHRDLATRNLLLASPRTIKVADFGLVRPLGGARGRYVMGGPRPIPYAWCAPESLRHGAFSSASDVWMFGVTLWEMFSGGEEPWAGVPPYLILQRLEDRARLPRPPLCSRALYSLALRCWAPHPADRPSFSHLEGLLQEAGPSEACCVRDVTEPGALRMETGDPITVIEGSPDSTIWKGQNGRTFKVGSFPASAVTLADAGGLPATRPVHRGTPARGDQHPGSIDGDRKKANLWDAPPARGQRRNMPLERMKGISRSLESVLSLGPRPTGGGSSPPEIRQARAVPQGPPGLPPRPPLSSSSPQPSQPSRERLPWPKRKPPHNHPMGMPGARKAAALSGGLLSDPELQRKIMEVELSVHGVTHQECQTALGATGGDVVSAIRNLKVDQLFHLSSRSRADCWRILEHYQWDLSAASRYVLARP

SEQ ID NO: 21360 - protein, 427 aa, Homo sapiens
MAALVVSGAAEQGGRDGPGRGRAPRGRVANQIPPEILKNPQLQAAIRVLPSNYNFEIPKTIWRIQQAQAKKVALQMPEGLLLFACTIVDILERFTEAEVMVMGDVTYGACCVDDFTARALGADFLVHYGHSCLIPMDTSAQDFRVLYVFVDIRIDTTHLLDSLRLTFPPATALALAAAQELKAEYRVSVPQCKPLSPGEILGCTSPRLSKEVEAVVYLGDGRFHLESVMIANPNVPAYRYDPYSKVLSREHYDHQRMQAARQEAIATARSAKSWGLILGTLGRQGSPKILEHLESRLRALGLSFVRLLLSEIFPSKLSLLPEVDVWVQVACPRLSIDWGTAFPKPLLTPYEAAVALRDISWQQPYPMDFYAGSSLGPWTVNHGQDRRPHAPGRPARGKVQEGSARPPSAVACEDCSCRDEKVAPLAP

SEQ ID NO: 21361 - protein, 131 aa, Homo sapiens
MSKISEAVKRARAAFSSGRTRPLQFRIQQLEALQRLIQEQEQELVGALAADLHKNEWNAYYEEVVYVLEEIEYMIQKLPEWAADEPVEKTPQTQQDELYIHSEPLGVVLVIGTWNYPFNLTIQPMVGAIAA

SEQ ID NO: 21362 - protein, 297 aa, Homo sapiens
MLLEKDVNPGGKEETPGQRPAVTETHQLAELNEKKNERLRAAFGISDSYVDGSSFDPQRRAREAKQPAPEPPKPYSLVRESSSSRSPTPKQKKKKKKKDRGRRSESSSPRRERKKSSKKKKHRSESESKKRKHRSPTPKSKRKSKDKKRKRSRSTTPAPKSRRAHRSTSADSASSSDTSRSRSRSAAAKTHTTALAGRSPSPASGRRGEGDAPFSEPGTTSTQRPSSPETATKQPSSPYEDKDKDKKEKSATRPSPSPERSSTGPEPPAPTPLLAERHGGSPQPLATTPLSQEPVNP

SEQ ID NO: 21363 - protein, 780 aa, Homo sapiens
MLGESVPAAVEQEQLGEVKLEEEEAVSPEDPRRPESRLRPEVAHQLFRCFQYQEDMGPRASLSRLRELCGHWLRPALHTKKQILELLVLEQFLSVLPPHLLGRLQGQPLRDGEEVVLLLEGIHREPSHAGPLDFSCNAGKSCPRADVTLEEKGCASQVPSHSPKKELPAEEPSVLGPSDEPPRPQPRAAQPAEPGQWRLPPSSKQPLSPGPQKTFQALQESSPQGPSPWPEESSRDQELAAVLECLTFEDVPENKAWPAHPLGFGSRTPDKEEFKQEEPKGAAWPTPILAESQADSPGVPGEPCAQSLGRGAAASGPGEDGSLLGSSEILEVKVAEGVPEPNPELQFICADCGVSFPQLSRLKAHQLRSHPAGRSFLCLCCGKSFGRSSILKLHMRTHTDERPHACHLCGHRFRQSSHLSKHLLTHSSEPAFLCAECGRGFQRRASLVQHLLAHAQDQKPPCAPESKAEAPPLTDVLCSHCGQSFQRRSSLKRHLRIHARDKDRRSSEGSGSRRRDSDRRPFVCSDCGKAFRRSEHLVAHRRVHTGERPFSCQACGRSFTQSSQLVSHQRVHTGEKPYACPQCGKRFVRRASLARHLLTHGGPRPHHCTQCGKSFGQTQDLARHQRSHTGEKPCRCSECGEGFSQSAHLARHQRIHTGEKPHACDTCGHRFRNSSNLARHRRSHTGERPYSCQTCGRSFRRNAHLRRHLATHAEPGQEQAEPPQECVECGKSFSRSCNLLRHLLVHTGARPYSCTQCGRSFSRNSHLLRHLRTHARETLY

SEQ ID NO: 21364 - protein, 1068 aa, Homo sapiens
MPHFTVVPVDGPRRGDYDNLEGLSWVDYGERAELDDSDGHGNHRESSPFLSPLEASRGIDYYDRNLALFEEELDIRPKVSSLLGKLVSYTNLTQGAKEHEEAESGEGTRRRAAEAPSMGTLMGVYLPCLQNIFGVILFLRLTWMVGTAGVLQALLIVLICCCCTLLTAISMSAIATNGVVPAGGSYFMISRSLGPEFGGAVGLCFYLGTTFAAAMYILGAIEILLTYIAPPAAIFYPSGAHDTSNATLNNMRVYGTIFLTFMTLVVFVGVKYVNKFASLFLACVIISILSIYAGGIKSIFDPPVFPVCMLGNRTLSRDQFDICAKTAVVDNETVATQLWSFFCHSPNLTTDSCDPYFMLNNVTEIPGIPGAAAGVLQENLWSAYLEKGDIVEKHGLPSADAPSLKESLPLYVVADIATSFTVLVGIFFPSVTGIMAGSNRSGDLRDAQKSIPVGTILAIITTSLVYFSSVVLFGACIEGVVLRDKYGDGVSRNLVVGTLAWPSPWVIVIGSFFSTCGAGLQSLTGAPRLLQAIAKDNIIPFLRVFGHGKVNGEPTWALLLTALIAELGILIASLDMVAPILSMFFLMCYLFVNLACAVQTLLRTPNWRPRFKYYHWALSFLGMSLCLALMFVSSWYYALVAMLIAGMIYKYIEYQGAEKEWGDGIRGLSLSAARYALLRLEEGPPHTKNWRPQLLVLLKLDEDLHVKYPRLLTFASQLKAGKGLTIVGSVIQGSFLESYGEAQAAEQTIKNMMEIEKVKGFCQVVVASKVREGLAHLIQSCGLGGMRHNSVVLGWPYGWRQSEDPRAWKTFIDTVRCTTAAHLALLVPKNIAFYPSNHERYLEGHIDVWWIVHDGGMLMLLPFLLRQHKVWRKCRMRIFTVAQMDDNSIQMKKDLAVFLYHLRLEAEVEVVEMHNSDISAYTYERTLMMEQRSQMLRQMRLTKTEREREAQLVKDRHSALRLESLYSDEEDESAVGADKIQMTWTRDKYMTETWDPSHAPDNFRELVHIKPDQSNVRRMHTAVKLNEVIVTRSHDARLVLLNMPGPPRNSEGDENCIPLWRGRQLGGG

SEQ ID NO: 21365 - protein, 1251 aa, Homo sapiens
GVGRETARPCYSLALAQLLQSFEDLPLCSILQQIQEKYDLHQVKKAMLRPALFANLFGVLALFQSGRLVKDQEALMKSVKLLQALAQYQNHLQEQPRKALVDILSEVSKATLQEILPEVLKADLNIILSSPEQLELFLLAQQKVPSKLKKLVGSVNLFSDENVPRLVNVLKMAASSVKKDRKLPAIALDLLRLALKEDKFPRFWKEVVEQGLLKMQFWPASYLCFRLLGAALPLLTKEQLHLVMQGDVIRHYGEHVCTAKLPKQFKFAPEMDDYVGTFLEGCQDDPERQLAVLVAFSSVTNQGLPVTPTFWRVVRFLSPPALQGYVAWLRAMFLQPDLDSLVDFSTNNQKKAQDSSLHMPERAVFRLRKWIIFRLVSIVDSLHLEMEEALTEQVARFCLFHSFFVTKKPTSQIPETKHPFSFPLENQAREAVSSAFFSLLQTLSTQFKQAPGQTQGGQPWTYHLVQFADLLLNHSHNVTTVTPFTAQQRQAWDRMLQTLKELEAHSAEARAAAFQHLLLLVGIHLLKSPAESCDLLGDIQTCIRKSLGEKPRRSRTKTIDPQEPPWVEVLVEILLALLAQPSHLMRQVARSVFGHICSHLTPRALQLILDVLNPETSEDENDRVVVTDDSDERRLKGAEDKSEEGEDNRSSESEEESEGEESEEEERDGDVDQGFREQLMTVLQAGKALGGEDSENEEELGDEAMMALDQSLASLFAEQKLRIQARRDEKNKLQKEKALRRDFQIRVLDLVEVLVTKQPENALVLELLEPLLSIIRRSLRSSSSKQEQDLLHKTARIFTHHLCRARRYCHDLGERAGALHAQVERLVQQAGRQPDSPTALYHFNASLYLLRVLKGNTAEGCVHETQEKQKAGTDPSHMPTGPQAASCLDLNLVTRVYSTALSSFLTKRNSPLTVPMFLSLFSRHPVLCQSLLPILVQHITGPVRPRHQACLLLQKTLSMREVRSCFEDPEWKQLMGQVLAKVTENLRVLGEAQTKAQHQQALSSLELLNVLFRTCKHEKLTLDLTVLLGVLQGQQQSLQQGAHSTGSSRLHDLYWQAMKTLGVQRPKLEKKDAKEIPSATQSPISKKRKKKGFLPETKKRKKRKSEDGTPAEDGTPAATGGSQPPSMGRKKRNRTKAKVPAQANGTPTTKSPAPGAPTRSPSTPAKSPKLQKKNQKPSQVNGAPGSPTEPAGQKQHQKALPKKGVLGKSPLSALARKKARLSLVIRSPSLLQSGAKKKAQTLRFTISSSKK

SEQ ID NO: 21366 - protein, 1118 aa, Homo sapiens
MDLGPGDAAGGGPLAPRPRRRRSLRRLFSRFLLALGSRSRPGDSPPRPQPGHCDGDGEGGFACAPGPVPAAPGSPGEERPPGPQPQLQLPAGDGARPPGAQGLKNHGNTCFMNAVVQCLSNTDLLAEFLALGRYRAAPGRAEVTEQLAALVRALWTREYTPQLSAEFKNAVSKYGSQFQGNSQHDALEFLLWLLDRVHEDLEGSSRGPVSEKLPPEATKTSENCLSPSAQLPLGQSFVQSHFQAQYRSSLTCPHCLKQSNTFDPFLCVSLPIPLRQTRFLSVTLVFPSKSQRFLRVGLAVPILSTVAALRKMVAEEGGVPADEVILVELYPSGFQRSFFDEEDLNTIAEGDNVYAFQVPPSPSQGTLSAHPLGLSASPRLAAREGQRFSLSLHSESKVLILFCNLVGSGQQASRFGPPFLIREDRAVSWAQLQQSILSKVRHLMKSEAPVQNLGSLFSIRVVGLSVACSYLSPKDSRPLCHWAVDRVLHLRRPGGPPHVKLAVEWDSSVKERLFGSLQEERAQDADSVWQQQQAHQQHSCTLDECFQFYTKEEQLAQDDAWKCPHCQVLQQGMVKLSLWTLPDILIIHLKRFCQVGERRNKLSTLVKFPLSGLNMAPHVAQRSTSPEAGLGPWPSWKQPDCLPTSYPLDFLYDLYAVCNHHGNLQAYCRNSLDGQWYSYDDSTVEPLREDEVNTRGAYILFYQKRNSIPPWSASSSMRGSTSSSLSDHWLLRLGSHAGSTRGSLLSWSSAPCPSLPQVPDSPIFTNSLCNQEKGGLEPRRLVRGVKGRSISMKAPTTSRAKQGPFKTMPLRWSFGSKEKPPGASVELVEYLESRRRPRSTSQSIVSLLTGTAGEDEKSASPRSNVALPANSEDGGRAIERGPAGVPCPSAQPNHCLAPGNSDGPNTARKLKENAGQDIKLPRKFDLPLTVMPSVEHEKPARPEGQKAMNWKESFQMGSKSSPPSPYMGFSGNSKDSRRGTSELDRPLQGTLTLLRSVFRKKENRRNERAEVSPQVPPVSLVSGGLSPAMDGQAPGSPPALRIPEGLARGLGSRLERDVWSAPSSLRLPRKASRAPRGSALGMSQRTVPGEQASYGTFQRVKYHTLSLGRKKTLPESSF

SEQ ID NO: 21367 - protein, 736 aa, Homo sapiens
MACRQRGGSWSPSGWFNAGWSTYRSISLFFALVTSGNSIDVSQLVNPAFPGTVTCDEREITVEFPSSPGTKKWHASVVDPLGLDMPNCTYILDPEKLTLRATYDNCTRRVHGGHQMTIRVMNNSAALRHGAVMYQFFCPAMQVEETQGLSASTICQKDFMSFSLPRVFSGLADDSKGTKVQMGWSIEVGDGARAKTLTLPEAMKEGFSLLIDNHRMTFHVPFNATGVTHYVQGNSHLYMVSLKLTFISPGQKVIFSSQAICAPDPVTCNATHMTLTIPEFPGKLKSVSFENQNIDVSQLHDNGIDLEATNGMKLHFSKTLLKTKLSEKCLLHQFYLASLKLTFLLRPETVSMVIYPECLCESPVSIVTGELCTQDGFMDVEVYSYQTQPALDLGTLRVGNSSCQPVFEAQSQGLVRFHIPLNGCGTRYKFEDDKVVYENEIHALWTDFPPSKISRDSEFRNDMLLNINVESLTPPVASVKLGPFTLILQSYPDNSYQQPYGENEYPLVRFLRQPIYMEVRVLNRDDPNIKLVLDDCWATSTMDPDSFPQWNVVVDGCAYDLDNYQTTFHPVGSSVTHPDHYQRFDMKAFAFVSEAHVLSSLVYFHCSALICNRLSPDSPLCSVTCPVSSRHRRATGATEAEKMTVSLPGPILLLSDDSSFRGVGSSDLKASGSSGEKSRSETGEEVGSRGAMDTKGHKTAGDVGSKAVAAVAAFAGVVATLGFIYYLYEKRTVSNH

SEQ ID NO: 21368 - protein, 292 aa, Homo sapiens
AGRTVRAETRSRAKDDIKKVMATIEKVRRWEKRWVTVGDTSLRIFKWVPVVDPQEEERRRAGGGAERSRGRERRGRGASPRGGGPLILLDLNDENSNQSFHSEGSLQKGTEPSPGGTPQPSRPVSPAGPPEGVPEEAQPPRLGQERDPGGITAGSTDEPPMLTKEEPVPELLEAETMEMMLDKKQIQAIFLFELKMGHKAVETLRNINNTLGPGTANEHIVQWWFKKFCKEDKSLEDEKHSVWPSEVDNDQLKALIEADPVKTTQEVAQELNHRPFYGRLAFEANWKGEKAQ

SEQ ID NO: 21369 - protein, 319 aa, Homo sapiens
EPPTPPSPAPAPAVAPGGSSESSSGRAAGDTPERKEAAGTGKKVKVRPPPLKKTFDSVDNRVLSEVDFEERFAELPEFRPEEVLPSPTLQSLATSPRAILGSYRKKRKNSTDLDSAPEDPTSPKRKMRRRSSCSSEPNTPKSAKCEGDIFTFDRTEAEDVLGELEYDKVPYSSLRRTLDQRRALVMQLFQDHGFFPSAQATAAFQARYADIFPSKVCLQLKIREVRQKIMQAATPTEQPPGAEAPLPVPPPTGTAAAPAPTPSPAGGPDPTSPSSDSGTAQAAPPLPPPPESGPGQPGWEGAPQPSPPPPGPSTAATGR

SEQ ID NO: 21370 - protein, 232 aa, Homo sapiens
MDYNRMNSFLEYPLCNRGPSAYSAHSAPTSFPPSSAQAVDSYASEGRYGGGLSSPAFQQNSGYPAQQPPSTLGVPFPSSAPSGYAPAACSPSYGPSQYYPLGQSEGDGGYFHPSSYGAQLGGLSDGYGAGGAGPGPYPPQHPPYGNEQTASFAPAYADLLSEDKETPCPSEPNTPTARTFDWMKVKRNPPKTGRAQMWPPLLRGPKHLCFPCSDMSWVWAGFFSFSGSGRHR

SEQ ID NO: 21371 - protein, 380 aa, Homo sapiens
MSTKVYLDLEWTDYRLSWDPAEHDGIDSLRITAESVWLPDVVLLNNNDGNFDVALDISVVVSSDGSVRWQPPGIYRSSCSIQVTYFPFDWQNCTMVFSSYSYDSSEVSLQTGLGPDGQGHQEIHIHEGTFIENGQWEIIHKPSRLIQPPGDPRGGREGQRQEVIFYLIIRRKPLFYLVNVIAPCILITLLAIFVFYLPPDAVILSVVVLNLHHRSPHTHQMPLWVRQIFIHKLPLYLRLKRPKPERDLMPEPPHCSSPGSGWGRGTDEYFIRKPPSDFLFPKPNRFQPELSAPDLRRFIDGPNRAVALLPELREVVSSISYIARQLQEQEDHDALKEDWQFVAMVVDRLFLWTFIIFTSVGTLVIFLDATYHLPPPDPFP

SEQ ID NO: 21372 - protein, 214 aa, Homo sapiens
MEEEIAALVIDNGSGMCKAGFAGDDAPRAVFPSIVGRPRHQGVMVGMGQKDSYVGDEAQSKRGILTLKYPIEHGIVTNWDDMEKIWHHTFYNELRVAPEEHPVLLTEAPLNPKANREKMTQIMFETFNTPAMYVAIQAVLSLYASGRTTGIVMDSGDGVTHTVPIYEGYALPHAILRLDLAGRDLTDYLMKILTERGYSFTTTAEREIVRDIKE

SEQ ID NO: 21373 - protein, 987 aa, Homo sapiens
MGSAEDAVKEKLLWNVKKEVKQIMEEAVTRKFVHEDSSHIIALCGAVEACLLHQLRRRAAGFLRSDKMAALFTKVGKTCPVAGEICHKVQELQQQAEGRKPSGVSQEALRRQGSASGKAPALSPQALKHVWVRTALIEKVLDKVVQYLAENCSKYYEKEALLADPVFGPILASLLVGPCALEYTKLKTADHYWTDPSADELVQRHRIRGPPTRQDSPAKRPALGIRKRHSSGSASEDRLAACARECVESLHQNSRTRLLYGKNHVLVQPKEDMEAVPGYLSLHQSAESLTLKWTPNQLMNGTLGDSELEKSVYWDYALVVPFSQVVCIHCHQQKSGGTLVLVSQDGIQRPPLHFPQGGHLLSFLSCLENGLLPRGQLEPPLWTQQGKGKVFPKLRKRSSIRSVDMEEMGTGRATDYVFRIIYPGHRHEHNAGDMIEMQGFGPSLPAWHLEPLCSQGSSCLSCSSSSSPHATPSHCSCIPDRLPLRLLCESMKRQIVSRAFYGWLAHCRHLSTVRTHLSALVHHSVIPPDRPPGASAGLTKDVWSKYQKDKKNYKELELLRQVYYGGIEHEIRKDVWPFLLGHYKFGMSKKEMEQVDAVVAARYQQVLAEWKACEVVVRQREREAHPATRTKFSSGSSIDSHVQRLIHRDSTISNDVFISVDDLEPPEPQDPEDSRPKPEQEAGPGTPGTAVVEQQHSVEFDSPDSGLPSSRNYSVASGIQSSLDEGQSVGFEEEDGGGEEGSSGPGPAAHTLREPQDPSQEKPQAGELEAGEELAAVCAAAYTIELLDTVALNLHRIDKDVQRCDRNYWYFTPPNLERLRDVMCSYVWEHLDVGYVQGMCDLLAPLLVTLDNDQLAYSCFSHLMKRMSQNFPNGGAMDTHFANMRSLIQILDSELFELMHQNGDYTHFYFCYRWFLLDFKRELLYEDVFAVWEVIWAARHISSEHFVLFIALALVEAYREIIRDNNMDFTDIIKFFNGTSLKTTCKK

SEQ ID NO: 21374 - skipped

SEQ ID NO: 21375 - protein, 252 aa, Homo sapiens
MTKEYQDLQHLDNEESDHHQLRKDSQLQEELRGLRETFSNFTASTEAQVKGLSTQGGNVGRKMKSLESQLEKQQKDLSEDHSSLLLHVKQFVSDLRSLSCQMAALQGNGSERTCCPVNWVEHERSCYWFSRSGKAWADADNYCRLEDAHLVVVTSWEEQKFVQHHIGPVNTWMGLHDQNGPWKWVDGTDYETGFKNWRPEQPDDWYGHGLGGGEDCAHFTDDGRWNDDVCQRPYRWVCETELDKASQEPPLL

SEQ ID NO: 21376 - protein, 190 aa, Homo sapiens
RPPRIPEPVHLPVVPDGRLSAASSAFSLASAGSAEGVGGAPTPKGQAAPPAPPLPSSLDPPPPPAAVEVFQRPPTLEELSPPPPAFLLFPQDEELPLPLDLPPPPPLDGDELGLPPPPPGFGPDEPSWVPASYLEKVVTLYPYTSQKDNELSFSEGTVICVTRRYSDGWCEGVSSEGTGFFPGNYVEPSC

SEQ ID NO: 21377 - protein, 590 aa, Homo sapiens
MLHEEAAQKRKGKEPGMALPQGRLTFRDVAIEFSLAEWKFLNPAQRALYREVMLENYRNLEAVDISSKRMMKEVLSTGQGNTEVIHTGMLQRHESYHTGDFCFQEIEKDIHDFEFQSQKDERNGHEASMPKIKELMGSTDRHDQRHAGNKPIKDQLGLSFHLHLPELHIFQPEEKIANQVEKSVNDASSISTSQRISCRPETHTPNNYGNNFFHSSLLTQKQEVHMREKSFQCNETGEAFNCSSFVRKHQIIHLGEKQYKFDICGKVFNEKRYLARHRRCHTSEKPYKCNECGKSFSYKSSLTCHRRCHTGEKPYKCNECGKSFSYKSSLTCHHRCHTGEKPYKCNECGKSFSYKSSLRCHRRLHTGIKPYKCNECGKMFGQNSTLVIHKAIHTGEKPYKCNECGKAFNQQSHLSRHHRLHTGEKPYKCNDCGKAFIHQSSLARHHRLHTGEKSYKCEECDRVFSQKSNLERHKIIHTGEKPYKCNECHKTFSHRSSLPCHRRLHSGEKPYKCNECGKTFNVQSHLSRHHRLHTGEKPYKCKVCDKAFMCHSYLANHTRIHSGEKPYKCNECGKAHNHLIDSSIKPCMSS

SEQ ID NO: 21378 - protein, 42 aa, Homo sapiens
TIMNNIVIWNLKTGQLLKKMHIDDSYQASVCHKAYSEMVPGR

SEQ ID NO: 21379 - protein, 482 aa, Homo sapiens
MYKMNICNKPSNKTAPEKSVWTAPAQPSGPSPELQGQRSRRNGWSWPPHPLQIVAWLLYLFFAVIGFGILVPLLPHHWVPAGYACMGAIFAGHLVVHLTAVSIDPADANVRDKSYAGPLPIFNRSQHAHVIEDLHCNLCNVDVSARSKHCSACNKCVCGFDHHCKWLNNCVGERNYRLFLHSVASALLGVLLLVLVATYVFVEFFVNPMRLRTNRHFEVLKNHTDVWFVFLPAAPVETQAPAILALAALLILLGLLSTALLGHLLCFHIYLMWHKLTTYEYIVQHRPPQEAKGVHRELESCPPKMRPIQEMEFYMRTFRHMRPEPPGQAGPAAVNANPSQFLATRGQAEPPPPSSPDTLALPPRIRPQKKRKRRVYKVRTSETSDPASGPRAPSRRSSSSTDSADASPVHAAGPAGAYHSASAESVDEIPVAQTRLGSAALAAPRGRGRQPTLARQARAPAVFVSPSSGEPRAPGGREAGLA

SEQ ID NO: 21380 - protein, 270 aa, Homo sapiens
QKQPVKAWRQDVPSEEAEPEAAGRGSQATGPPPTVGARRRPSVPQEQHSHSGFGLKGQSEKSLLQEMVPVVPGQTGSDVTVSWSPEEAEAWESENRPRAALGPVVGARRGRPPTRRRQFRDLAAEKPHSCGQCGKRFRWGSDLARHQRTHTGEKPHKCPECDKSFRSSSDLVRHQGVHTGEKPFSCSECGKSFSRSAYLADHQRIHTGEKPFGCSDCGKSFSLRSYLLDHRRVHTGERPFGCGECDKSFKQRAHLIAHQSLHAKMAQPVG

SEQ ID NO: 21381 - protein, 699 aa, Homo sapiens
MMEEEELEFVEELEAVLQLTPEVQLAIEQVFPSQDPLDRADFNAVEYINTLFPTEQSLANIDEVVNKIRLKIRRLDDNIRTVVRGQTNVGQDGRQALEEAQKAIQQLFGKIKDIKDKAEKSEQMVKEITRDIKQLDHAKRHLTTSITTLNHLHMLAGGVDSLEAMTRRRQYGEVANLLQGVMNVLEHFHKYMGIPQIRQLSERVKAAQTELGQQILADFEEAFPSQGTKRPGGPSNVLRDACLVANILDPRIKQEIIKKFIKQHLSEYLVLFQENQDVAWLDKIDRRYAWIKRQLVDYEEKYGRMFPREWCMAERIAVEFCHVTRAELAKIMRTRAKEIEVKLLLFAIQRTTNFEGFLAKRFSGCTLTDGTLKKLESPPPSTNPFLEDEPTPEMEELATEKGDLDQPKKPKAPDNPFHGIVSKCFEPHLYVYIESQDKNLGELIDRFVADFKAQGPPKPNTDEGGAVLPSCADLFVYYKKCMVQCSQLSTGEPMIALTTIFQKYLREYAWKILSGNLPKTTTSSGGLTISSLLKEKEGSEVAKFTLEELCLICNILSTAEYCLATTQQLEEKLKEKVDVSLIERINLTGEMDTFSTVISSSIQLLVQDLDAACDPALTAMSKMQWQNVEHVGDQSPYVTSVILHIKQNVPIIRDNLASTRKYFTQFCVKFANSFIPKFITHLFKCKPISMVGAEQVRWT

SEQ ID NO: 21382 - protein, 909 aa, Homo sapiens
AIPSTTPWNSCSGCWIVYMRTWRVHPEGRCRRRSSLTCPHCLKQSNTFDPFLCVSLPIPLRQTRFLSVTLVFPSKSQRFLRVGLAVPILSTVAALRKMVAEEGGVPADEVILVELYPSGFQRSFFDEEDLNTIAEGDNVYAFQVPPSPSQGTLSAHPLGLSASPRLAAREGQRFSLSLHSESKVLILFCNLVGSGQQASRFGPPFLIREDRAVSWAQLQQSILSKVRHLMKSEAPVQNLGSLFSIRVVGLSVACSYLSPKDSRPLCHWAVDRVLHLRRPGGPPHVKLAVEWDSSVKERLFGSLQEERAQDADSVWQQQQAHQQHSCTLDECFQFYTKEEQLAQDDAWKCPHCQVLQQGMVKLSLWTLPDILIIHLKRFCQVGERRNKLSTLVKFPLSGLNMAPHVAQRSTSPEAGLGPWPSWKQPDCLPTSYPLDFLYDLYAVCNHHGNLQGGHYTAYCRNSLDGQWYSYDDSTVEPLREDEVNTRGAYILFYQKRNSIPPWSASSSMRGSTSSSLSDHWLLRLGSHAGSTRGSLLSWSSAPCPSLPQVPDSPIFTNSLCNQEKGGLEPRRLVRGVKGRSISMKAPTTSRAKQGPFKTMPLRWSFGSKEKPPGASVELVEYLESRRRPRSTSQSIVSLLTGTAGEDEKSASPRSNVALPANSEDGGRAIERGPAGVPCPSAQPNHCLAPGNSDGPNTARKLKENAGQDIKLPRKFDLPLTVMPSVEHEKPARPEGQKAMNWKESFQMGSKSSPPSPYMGFSGNSKDSRRGTSELDRPLQGTLTLLRSVFRKKENRRNERAEVSPQVPPVSLVSGGLSPAMDGQAPGSPPALRIPEGLARGLGSRLERDVWSAPSSLRLPRKASRAPRGSALGMSQRTVPGEQASYGTFQRVKYHTLSLGRKKTLPESSF

SEQ ID NO: 21383 - protein, 678 aa, Homo sapiens
MAAMAPALTDAAAEAHHIRFKLAPPSSTLSPGSAENNGNANILIAANGTKRKAIAAEDPSLDFRNNPTKEDLGKLQPLVASYLCSDVTSVPSKESLKLQGVFSKQTVLKSHPLLSQSYELRAELLGRQPVLEFSLENLRTMNTSGQTALPQAPVNGLAKKLTKSSTHSDHDNSTSLNGGKRALTSSALHGGEMGGSESGDLKGGMTNCTLPHRSLDVEHTTLYSNNSTANKSSVNSMEQPALQGSSRLSPGTDSSSNLGGVKLEGKKSPLSSILFSALDSDTRITALLRRQADIESRARRLQKRLQVVQAKQVERHIQHQLGGFLEKTLSKLPNLESLRPRSQLMLTRKAEAALRKAASETTTSEGLSNFLKSNSISEELERFTASGIANLRCSEQAFDSDVTDSSSGGESDIEEEELTRADPEQRHVPLRRRSEWKWAADRAAIVSRWNWLQAHVSDLEYRIRQQTDIYKQIRANKGLIVLGEVPPPEHTTDLFLPLSSEVKTDHGTDKLIESVSQPLENHGAPIIGHISESLSTKSCGALRPVNGVINTLQPVLADHIPGDSSDAEEQLHKKQRLNLVSSSSDGTCVAARTRPVLSCKKRRLVRPNSIVPLSKKVHRNSTIRPGCDVNPSCALCGSGSINTMPPEIHYEAPLLERLSQLDSCVHPVLAFPDDVPTS

SEQ ID NO: 21384 - protein, 522 aa, Homo sapiens
MASALSYVSKFKSFVILFVTPLLLLPLVILMPAKFVRCAYVIILMAIYWCTEVIPLAVTSLMPVLLFPLFQILDSRQVCVQYMKDTNMLFLGGLIVAVAVERWNLHKRIALRTLLWVGAKPARLMLGFMGVTALLSMWISNTATTAMMVPIVEAILQQMEATSAATEAGLELVDKGKAKELPGSQVIFEGPTLGQQEDQERKRLCKAMTLCICYAASIGGTATLTGTGPNVVLLGQMNELFPDSKDLVNFASWFAFAFPNMLVMLLFAWLWLQFVYMRFNFKKSWGCGLESKKNEKAALKVLQEEYRKLGPLSFAEINVLICFFLLVILWFSRDPGFMPGWLTVAWVEGETKYVSDATVAIFVATLLFIVPSQKPKFNFRSQTEEERKTPFYPPPLLDWKVTQEKVPWGIVLLLGGGFALAKGSEASGLSVWMGKQMEPLHAVPPAAITLILSLLVAVFTECTSNVATTTLFLPIFASMVKTGVIMNIIGVFCVFLAVNTWGRAIFDLDHFPDWANVTHIET

SEQ ID NO: 21385 - protein, 144 aa, Homo sapiens
QNPFPIENRDVLGETQDFHSLATYLSQNTSSVFLDTISDFHLLLFLVTNEVMPLQDSISLLLEAVRTRNEELAQTWKRSEQWATIEQLCTSRVAGITDVYHHTWRCHLYAQLAGSSQVSMSTAPSGAPHTRPLQPCGPVSTARS

SEQ ID NO: 21386 - protein, 70 aa, Homo sapiens
RHETIRVAVCDMMEGKCPCPEPLRGVMEKSFLEYYDFYEVACKDRLHLQGQTMQVIQPLLLIAEALQLAM

SEQ ID NO: 21387 - protein, 386 aa, Homo sapiens
MRTHTDERPHACHLCGHRFRQSSHLSKHLLTHSSEPAFLCAECGRGFQRRASLVQHLLAHAQDQKPPCAPESKAEAPPLTDVLCSHCGQSFQRRSSLKRHLRIHARDKDRRSSEGSGSRRRDSDRRPFVCSDCGKAFRRSEHLVAHRRVHTGERPFSCQACGRSFTQSSQLVSHQRVHTGEKPYACPQCGKRFVRRASLARHLLTHGGPRPHHCTQCGKSFGQTQDLARHQRSHTGEKPCRCSECGEGFSQSAHLARHQRIHTGEKPHACDTCGHRFRNSSNLARHRRSHTGERPYSCQTCGRSFRRNAHLRRHLATHAEPGQEQAEPPQECVECGKSFSRSCNLLRHLLVHTGARPYSCTQCGRSFSRNSHLLRHLRTHARETLY

SEQ ID NO: 21388 - protein, 1297 aa, Homo sapiens
MVIKTDELPAAAPADSAREHGSQAGGKGRPGAAELPSVMLLNGDCPESLKKEAAAAEPPRENGLDEAGPGDETTGQEVIVIQDTGFSVKILAPGIEPFSLQVSPQEMVQEIHQVLMDREDTCHRTCFSLHLDGNVLDHFSELRSVEGLQEGSVLRVVEEPYTVREARIHVRHVRDLLKSLDPSDAFNGVDCNSLSFLSVFTDGDLGDSGKRKKGLEMDPIDCTPPEYILPGSRERPLCPLQPQNRDWKPLQCLKVLTMSGWNPPPGNRKMHGDLMYLFVITAEDRQVSITASTRGFYLNQSTAYHFNPKPASPRFLSHSLVELLNQISPTFKKNFAVLQKKRVQRHPFERIATPFQVYSWTAPQAEHAMDCVRAEDAYTSRLGYEEHIPGQTRDWNEELQTTRELPRKNLPERLLRERAIFKVHSDFTAAATRGAMAVIDGNVMAINPSEETKMQMFIWNNIFFSLGFDVRDHYKDFGGDVAAYVAPTNDLNGVRTYNAVDVEGLYTLGTVVVDYRGYRVTAQSIIPGILERDQEQSVIYGSIDFGKTVVSHPRYLELLERTSRPLKILRHQVLNDRDEEVELCSSVECKGIIGNDGRHYILDLLRTFPPDLNFLPVPGEELPEECARAGFPRAHRHKLCCLRQELVDAFVEHRYLLFMKLAALQLMQQNASQLETPSSLENGGPSSLESKSEDPPGQEAGSEEEGSSASGLAKVKELAETIAADDGTADPRSREVIRNACKAVGSISSTAFDIRFNPDIFSPGVRFPESCQDEVRDQKQLLKDAAAFLLSCQIPGLKIGIGELITRSAKHIFKTYLQGVELSGLSAAISHFLNCFLSSYPNPVAHLPADELVSKKRNKRRKNRPPGAADNTAWAVMTPQELWKNICQEAKNYFDFDLECETVDQAVETYGLQKITLLREISLKTGIQVLLKEYSFDSRHKPAFTEEDVLNIFPVVKHVNPKASDAFHFFQSGQAKVQQGFLKEGCELINEALNLFNNVYGAMHVETCACLRLLARLHYIMGDYAEALSNQQKAVLMSERVMGTEHPNTIQEYMHLALYCFASSQLSTALSLLYRARYLMLLVFGEDHPEMALLDNNIGLVLHGVMEYDLSLRFLENALAVSTKYHGPKALKVALSHHLVARVYESKAEFRSALQHEKEGYTIYKTQLGEDHEKTKESSEYLKCLTQQAVALQRTMNEIYRNGSSANIPPLKFTAPSMASVLEQLNVINGILFIPLSQKDLENLKAEVARRHQLQEASRNRDRAEEPMATEPAPAGAPGDLGSQPPAAKDPSPSVQG

SEQ ID NO: 21389 - protein, 577 aa, Homo sapiens
MTTSSIRRQMKNIVNNYSEAEIKVREATSNDPWGPSSSLMTEIADLTYNVVAFSEIMSMVWKRLNDHGKNWRHVYKALTLLDYLIKTGSERVAQQCRENIFAIQTLKDFQYIDRDGKDQGINVREKSKQLVALLKDEERLKAERAQALKTKERMAQVATGMGSNQITFGRGSSQPNLSTSHSEQEYGKAGGSPASYHGSTSPRVSSELEQARPQTSGEEELQLQLALAMSREVAEQEERLRRGDDLRLQMALEESRRDTVKIPKKKETTLLDLMDALPSSGPAAQKAEPWGPSASTNQTNPWGGPAAPASTSDPWPSFGTKPAASIDPWGVPTGATVQSVPKNSDPWAASQQPASSAGKRASDAWGAVSTTKPVSVSGSFELFSNLNGTIKDDFSEFDNLRTSKKTAESVTSLPSQNNGTTSPDPFESQPLTVASSKPSSARKTPESFLGPNAALVNLDSLVTRPAPPAQSLNPFLAPGAPATSAPVNPFQVNQPQPLTLNQLRGSPVLGTSTSFGPGPGVESMAVASMTSAAPQPALGATGSSLTPLGPAMMNMVGSVGIPPSAAQATGTTNPFLL

SEQ ID NO: 21390 - protein, 214 aa, Homo sapiens
MRRDVRILLLGEAQVGKTSLILSLVGEEFPEEVPPRAEEITIPADVTPEKVPTHIVDYSEAEQTDEELREEIHKANVVCVVYDVSEEATIEKIRTKWIPLVNGGTTQGPRVPIILVGNKSDLRSGSSMEAVLPIMSQFPEIETCVECSAKNLRNISELFYYAQKAVLHPTAPLYDPEAKQKSCFGHPLAPQALEDVKTVVCRNVAGGVREDRLT

SEQ ID NO: 21391 - protein, 1047 aa, Homo sapiens
MTILHGGFLLAEQLFHPKALAELTKSDWERVGRPIVEALREISSAAAHSQPFAWKKKALIIIWAKVLQPHPVTPSDTETRWQEDLFFSVGNMIPTINHTILFELLKSLEASGLFIQLLMALPTTICHAELERFLEHVTVDTSAEDVAFFLDVWWEVMKHKGHPQDPLLSQFSAMAHKYLPALDEFPHPPKRLRSDPDACPTMPLLAMLLRGLTQIQSRILGPGRKCCALANLADMLTVFALTEDDPQEVSATVYLDKLATVISVWNSDTQNPYHQQALAEKVKEAERDVSLTSLAKLPSETIFVGCEFLHHLLREWGEELQAVLRSSQGTSYDSYRLCDSLTSFSQNATLYLNRTSLSKEDRQVVSELAECVRDFLRKTSTVLKNRALEDITASIAMAVIQQKMDRHMEVCYIFASEKKWAFSDEWVACLGSNRALFRQPDLVLRLLETVIDVSTADRAIPESQIRQVIHLILECYADLSLPGKNKVLAGILRSWGRKGLSEKLLAYVEGFQEDLNTTFNQLTQSASEQGLAKAVASVARLVIVHPEVTVKKMCSLAVVNLGTHKFLAQILTAFPALRFVEEQGPNSSATFMVSCLKETVWMKFSTPKEEKQFLELLNCLMSPVKPQGIPVAALLEPDEVLKEFVLPFLRLDVEEVDLSLRIFIQTLEANACREEYWLQTCSPFPLLFSLCQLLDRFSKYWQLPKEKRCLSLDRKDLAIHILELLCEIVSANAETFSPDVWIKSLSWLHRKLEQLDWTVGLRLKSFFEGHFKCEVPATLFEICKLSEDEWTSQAHPGYGAGTGLLAWMECCCVSSGISERMLSLLVVDVGNPEEVRLFSKGFLVALVQVMPWCSPQEWQRLHQLTRRLLEKQLLHVPYSLEYIQFVPLLNLKPFAQELQLSVLFLRTFQFLCSHSCRDWLPLEGWNHVVKLLCGSLTRLLDSVRAIQAAGPWVQGPEQDLTQEALFVYTQVFCHALHIMAMLHPEVCEPLYVLALETLTCYETLSKTNPSVSSLLQRAHEQRFLKSIAEGIGPEERRQTLLQKMSSF

SEQ ID NO: 21392 - protein, 922 aa, Homo sapiens
MTATPESLFPTGDELDSSQLQMESDEVDTLKEGEDPADRMHPFLAIYELQSLKVHPLVFAPGVPVTAQVVGTERYTSGSKVGTCTLYSVRLTHGDFSWTTKKKYRHFQELHRDLLRHKVLMSLLPLARFAVAYSPARDAGNREMPSLPRAGPEGSTRHAASKQKYLENYLNRLLTMSFYRNYHAMTEFLEVSQLSFIPDLGRKGLEGMIRKRSGGHRVPGLTCCGRDQVCYRWSKRWLVVKDSFLLYMCLETGAISFVQLFDPGFEVQVGKRSTEARHGVRIDTSHRSLILKCSSYRQARWWAQEITELAQGPGRDFLQLHRHDSYAPPRPGTLARWFVNGAGYFAAVADAILRAQEEIFITDWWLSPEVYLKRPAHSDDWRLDIMLKRKAEEGVRVSILLFKEVELALGINSGYSKRALMLLHPNIKVMRHPDQVTLWAHHEKLLVVDQVVAFLGGLDLAYGRWDDLHYRLTDLGDSSESAASQPPTPRPDSPATPDLSHNQFFWLGKDYSNLITKDWVQLDRPFEDFIDRETTPRMPWRDVGVVVHGLPARDLARHFIQRWNFTKTTKAKYKTPTYPYLLPKSTSTANQLPFTLPGGQCTTVQVLRSVDRWSAGTLENSILNAYLHTIRESQHFLYIENQFFISCSDGRTVLNKVGDEIVDRILKAHKQGWCYRVYVLLPLLPGFEGDISTGGGNSIQAILHFTYRTLCRGEYSILHRLKAAMGTAWRDYISICGLRTHGELGGHPVSELIYIHSKVLIADDRTVIIGSANINDRSLLGKRDSELAVLIEDTETEPSLMNGAEYQAGSVILGANTRPDLDLRDPICDDFFQLWQDMAESNANIYEQIFRCLPSNATRSLRTLREYVAVEPLATVSPPLARSELTQVQGHLVHFPLKFLEDESLLPPLGSKEGMIPLEVWT

SEQ ID NO: 21393 - protein, 1071 aa, Homo sapiens
MTSPAKFKKDKEIIAEYDTQVKEIRAQLTEQMKCLDQQCELRVQLLQDLQDFFRKKAEIEMDYSRNLEKLAERFLAKTRSTKDQQFKKDQNVLSPVNCWNLLLNQVKRESRDHTTLSDIYLNNIIPRFVQVSEDSGRLFKKSKEVGQQLQDDLMKVLNELYSVMKTYHMYNADSISAQSKLKEAEKQEEKQIGKSVKQEDRQTPRSPDSTANVRIEEKHVRRSSVKKIEKMKEKRQAKYTENKLKAIKARNEYLLALEATNASVFKYYIHDLSDLIDQCCDLGYHASLNRALRTFLSAELNLEQSKHEGLDAIENAVENLDATSDKQRLMEMYNNVFCPPMKFEFQPHMGDMASQLCAQQPVQSELVQRCQQLQSRLSTLKIENEEVKKTMEATLQTIQDIVTVEDFDVSDCFQYSNSMESVKSTVSETFMSKPSIAKRRANQQETEQFYFTKMKEYLEGRNLITKLQAKHDLLQKTLGESQRTDCSLARRSSTVRKQDSSQAIPLVVESCIRFISRHGLQHEGIFRVSGSQVEVNDIKNAFERGEDPLAGDQNDHDMDSIAGVLKLYFRGLEHPLFPKDIFHDLMACVTMDNLQERALHIRKVLLVLPKTTLIIMRYLFAFLNHLSQFSEENMMDPYNLAICFGPSLMSVPEGHDQVSCQAHVNELIKTIIIQHENIFPSPRELEGPVYSRGGSMEDYCDSPHGETTSVEDSTQDVTAEHHTSDDECEPIEAIAKFDYVGRTARELSFKKGASLLLYQRASDDWWEGRHNGIDGLIPHQYIVVQDTEDGVVERSSPKSEIEVISEPPEEKVTARAGASCPSGGHVADIYLANINKQRKRPESGSIRKTFRSDSHGLSSSLTDSSSPGVGASCRPSSQPIMSQSLPKEGPDKCSISGHGSLNSISRHSSLKNRLDSPQIRKTATAGRSKSFNNHRPMDPEVIAQDIEATMNSALNELRELERQSSVKHTPDVVLDTLEPLKTSPVVAPTSEPSSPLHTQLLKDPEPAFQRSASTAGDIACAFRPVKSVKMAAPVKPPATRPKPTVFPKTNATSPGVNSSTSPQSTDKSCTV

SEQ ID NO: 21394 - protein, 349 aa, Homo sapiens
MSREVAEQEERLRRGDDLRLQMALEESRRDTVKIPKKKETTLLDLMDALPSSGPAAQKAEPWGPSASTNQTNPWGGPAAPASTSDPWPSFGTKPAASIDPWGVPTGATVQSVPKNSDPWAASQQPASSAGKRASDAWGAVSTTKPVSVSGSFELFSNLNGTIKDDFSEFDNLRTSKKTAESVTSLPSQNNGTTSPDPFESQPLTVASSKPSSARKTPESFLGPNAALVNLDSLVTRPAPPAQSLNPFLAPGAPATSAPVNPFQVNQPQPLTLNQLRGSPVLGTSTSFGPGPGVESMAVASMTSAAPQPALGATGSSLTPLGPAMMNMVGSVGIPPSAAQATGTTNPFLL

SEQ ID NO: 21395 - protein, 2514 aa, Homo sapiens
MKPMKKACTGLSGPGSGSKSPPATRAKALRRRGAGEGDKPEEEDDEAQQPQPQSGPEEAEEGEEEEAERGPGAEGPPLELHPGDPAPGPAEDPKGDGEAGRWEPSLSRKTATFKSRAPKKKYVEEHGAGSSGVAGAPEERVRTPEEASGLGVPPRPPTSTRSSSTDTASEHSADLEDEPAEACGPGPWPPGSTSGSYDLRQLRSQRVLARRGDGLFLPAVVRQVRRSQDLGVQFPGDRALTFYEGVPGAGVDVVLDATPPPGALVVGTAVCTCVEPGVAAYREGVVVEVATKPAAYKVRLSPGPSSQPGLPGSLPQPPQPLHREPEEAVWVARSSLRLLRPPWEPETMLRKPPTGPEEEQAEPGATLPPCPAALDPKQPEDAEVSKISFGGNLGTHCEEGEEKHPPALGTPALLPLPPPQLLSPPPKSPAFVGPGRPGEQPSPCQEGSQGGSRSSSVASLEKGTAPAARARTPLTAAQQKYKKGDVVCTPSGIRKKFNGKQWRRLCSRDGCMKESQRRGYCSRHLSMRTKEMEGLADSGPGGAGRPAAVAAREGSTEFDWGDETSRDSEASSVAARGDSRPRLVAPADLSRFEFDECEAAVMLVSLGSSRSGTPSFSPVSTQSPFSPAPSPSPSPLFGFRPANFSPINASPVIQRTAVRSRHLSASTPKAGVLTPPDLGPHPPPPAPRERHSSGILPTFQTNLTFTVPISPGRRKTELLPHPGALGAPGAGGGGAAPDFPKSDSLDSGVDSVSHTPTPSTPAGFRAVSPAVPFSRSRQPSPLLLLPPPAGLTSDPGPSVRRVPAVQRDSPVIVRNPDVPLPSKFPGEVGTAGEVRAGGPGRGCRETPVPPGVASGKPGLPPPLPAPVPITVPPAAPTAVAQPMPAFGLASSPFQPVAFHPSPAALLPVLVPSSYTSHPAPKKEVIMGRPGTVWTNVEPRSVAVFPWHSLVPFLAPSQPDPSVQPSEAQQPASHPVASNQSKEPAESAAVAHERPPGGTGSADPERPPGATCPESPGPGPPHPLGVVESGKGPPPTTEEEASGPPGEPRLDSETESDHDDAFLSIMSPEIQLPLPPGKRRTQSLSALPKERDSSSEKDGRSPNKREKDHIRRPMNAFMIFSKRHRALVHQRHPNQDNRTVSKILGEWWYALGPKEKQKYHDLAFQVKEAHFKAHPDWKWCNKDRKKSSSEAKPTSLGLAGGHKETRERSMSETGTAAAPGVSSELLSVAAQTLLSSDTKAPGSSSCGAERLHTVGGPGSARPRAFSHSGVHSLDGGEVDSQALQELTQMVSGPASYSGPKPSTQYGAPGPFAAPGEGGALAATGRPPLLPTRASRSQRAASEDMTSDEERMVICEEEGDDDVIADDGFGTTDIDLKCKERVTDSESGDSSGEDPEGNKGFGRKVFSPVIRSSFTHCRPPLDPEPPGPPDPPVAFGKGYGSAPSSSASSPASSSASAATSFSLGSGTFKAQESGQGSTAGPLRPPPPGAGGPATPSKATRFLPMDPATFRRKRPESVGGLEPPGPSVIAAPPSGGGNILQTLVLPPNKEEQEGGGARVPSAPAPSLAYGAPAAPLSRPAATMVTNVVRPVSSTPVPIASKPFPTSGRAEASPNDTAGARTEMGTGSRVPGGSPLGVSLVYSDKKSAAATSPAPHLVAGPLLGTVGKAPATVTNLLVGTPGYGAPAPPAVQFIAQGAPGGGTTAGSGAGAGSGPNGPVPLGILQPGALGKAGGITQVQYILPTLPQQLQVAPAPAPAPGTKAAAPSGPAPTTSIRFTLPPGTSTNGKVLAATAPTPGIPILQSVPSAPPPKAQSVSPVQAPPPGGSAQLLPGKVLVPLAAPSMSVRGGGAGQPLPLVSPPFSVPVQNGAQPPSKIIQLTPVPVSTPSGLVPPLSPATLPGPTSQPQKVLLPSSTRITYVQSAGGHALPLGTSPASSQAGTVTSYGPTSSVALGFTSLGPSGPAFVQPLLSGQAPLLAPGQVGVSPVPSPQLPPACAAPGGPVITAFYSGSPAPTSSAPLAQPSQAPPSLVYTVATSTTPPAATILPKGPPAPATATPAPTSPFPSATGSMTYSLVAPKAQRPSPKAPQKVKAAIASIPVGSFEAGASGRPGPAPRQPLEPGPVREPTAPESELEGQPTPPAPPPLPETWTPTARSSPPLPPPAEERTSAKGPETMASKFPSSSSDWRVPGQGLENRGEPPTPPSPAPAPAVAPGGSSESSSGRAAGDTPERKEAAGTGKKVKVRPPPLKKTFDSVDKVLSEVDFEERFAELPEFRPEEVLPSPTLQSLATSPRAILGSYRKKRKNSTDLDSAPEDPTSPKRKMRRRSSCSSEPNTPKSAKCEGDIFTFDRTGTEAEDVLGELEYDKVPYSSLRRTLDQRRALVMQLFQDHGFFPSAQATAAFQARYADIFPSKVCLQLKIREVRQKIMQAATPTEQPPGAEAPLPVPPPTGTAAAPAPTPSPAGGPDPTSPSSDSGTAQAAPPLPPPPESGPGQPGWEGAPQPSPPPPGPSTAATGR

SEQ ID NO: 21396 - protein, 338 aa, Homo sapiens
MAGVACLGKAADADEWCDSGLGSLGPDAAAPGGPGLGAELGPGLSWAPLVFGYVTEDGDTALHLAVIHQHEPFLDFLLGFSAGTEYMDLQNDLGQTALHLAAILGETSTVEKLYAAGAGLCVAERRGHTALHLACRVGAHACARALLQPRPRRPREAPDTYLAQGPDRTPDTNHTPVALYPDSDLEKEEEESEEDWKLQLEAENYEGHTPLHVAVIHKDVEMVRLLRDAGADLDKPEPTCGRSPLHLAVEAQAADVLELLLRAGANPAARMYGGRTPLGSAMLRPNPILARLLRAHGAPEPEGEDEKSGPCSSSSDSDSGDEGVSQEERQGSPAGGSG

SEQ ID NO: 21397 - protein, 1047 aa, Homo sapiens
MKGTRAIGSVPERSPAGVDLSLTGLPPPVSRRPGSAATTKPIVRSVSVVTGSEQKRKVLEATGPGGSQAINNLRRSNSTTQVSQPRSGSPRPTEPTDFLMLFEGSPSGKKRPASLSTAPSEKGATWNVLDDQPRGFTLPSNARSSSALDSPAGPRRKECTVALAPNFTANNRSNKGAVGNCVTTMVHNRYTPSERAPPLKSSNQTAPSLNNIIKAATCEGSESSGFGKLPKNVSSATHSARNNTGGSTGLPRRKEVTEEEAERFIHQVNQATVTIQRWYRHQVQRRGAGAARLEHLLQAKREEQRQRSGEGTLLDLHQQKEAARRKAREEKARQARRAAIQELQQKRALRAQKASTAERGPPENPRETRVPGMRQPAQELSPTPGGTAHQALKANNTGGGLPAAGPGDRCLPTSDSSPEPQQPPEDRTQDVLAQDAAGDNLEMMAPSRGSAKSRGPLEELLHTLQLLEKEPDVLPRPRTHHRGRYAWASEVTTEDDASSLTADNLEKFGKLSAFPEPPEDGTLLSEAKLQSIMSFLDEMEKSGQDQLDSQQEGWVPEAGPGPLELGSEVSTSVMRLKLEVEEKKQAMLLLQRALAQQRDLTARRVKETEKALSRQLQRQREHYEATIQRHLAFIDQLIEDKKVLSEKCEAVVAELKQEDQRCTERVAQAQAQHELEIKKLKELMSATEKARREKWISEKTKKIKEVTVRGLEPEIQKLIARHKQEVRRLKSLHEAELLQSDERASQRCLRQAEELREQLEREKEALGQQERERARQRQRAELEELRQQLEESSSALTRALRAEFEKGREEQERRHQMELNTLKQQLELERQAWEAGRTRKEEAWLLNREQELREEIRKGRDKEIELVIHRLEADMALAKEESEKAAESRIKRLRDKYEAELSELEQSERKLQERCSELKGQLGEAEGENLRLQGLVRQKERALEDAQAVNEQLSSERSNLAQVIRQEFEDRLAASEEETRQAKAELATLQARQQLELEEVHRRVKTALARKEEAVSSLRTQHEAAVKRADHLEELLEQHRRPTPSTK

SEQ ID NO: 21398 - protein, 733 aa, Homo sapiens
MSNVSEERRKRQQNIKEGLQFIQSPLSYPGTQEQYAVYLRALVRNLFNEGNDVYREHDWNNSISQYTEALNIADYAKSEEILIPKEIIEKLYINRIACYSNMGFHDKVLEDCNIVLSLNASNCKALYRKSKALSDLGRYKKAYDAVAKCSLAVPQDEHVIKLTQELAQKLGFKIRKAYVRAELSLKSVPGDGATKALNHSVEDIEPDLLTPRQEAVPVVSLPAPSFSHEVGSELASVPVMPLTSILPLQVEESALPSAVLANGGKMPFTMPEAFLDDGDMVLGDELDDLLDSAPETNETVMMNGPGSLFASENFLGISSQPRNDFGNFFGSAVTKPSSSVTPRHPLEGTHELRQACQICFVKSGPKLMDFTYHANIDHKCKKDILIGRIKNVEDKSWKKIRPRPTKTNYEGPYYICKDVAAEEECRYSGHCTFAYCQEEIDVWTLERKGAFSREAFFGGNGKINLTVFKLLQEHLGEFIFLCEKCFDHKPRMISKRNKDNSTACSHPVTKHEFEDNKCLVHILRETTVKYSKIRSFHGQCQLDLCRHEVRYGCLREDECFYAHSLVELKVWIMQNETGISHDAIAQESKRYWQNLEANVPGAQVLGNQIMPGFLNMKIKFVCAQCLRNGQVIEPDKNRKYCSAKARHSWTKDRRAMRVMSIERKKWMNIRPLPTKKQMPLQFDLCNHIASGKKCQYVGNCSFAHSPEEREVWTYMKENGIQDMEQFYELWLKS

SEQ ID NO: 21399 - protein, 1170 aa, Homo sapiens
MAEEEVAKLEKHLMLLRQEYVKLQKKLAETEKRCALLAAQANKESSSESFISRLLAIVADLYEQEQYSDLKIKVGDRHISAHKFVLAARSDSWSLANLSSTKELDLSDANPEVTMTMLRWIYTDELEFREDDVFLTELMKLANRFQLQLLRERCEKGVMSLVNVRNCIRFYQTAEELNASTLMNYCAEIIASHWDDLRKEDFSSMSAQLLYKMIKSKTEYPLHKAIKVEREDVVFLYLIEMDSQLPGKLNEADHNGDLALDLALSRRLESIATTLVSHKADVDMVDKSGWSLLHKGIQRGDLFAATFLIKNGAFVNAATLGAQETPLHLVALYSSKKHSADVMSEMAQIAEALLQAGANPNMQDSKGRTPLHVSIMAGNEYVFSQLLQCKQLDLELKDHEGSTALWLAVQHITVSSDQSVNPFEDVPVVNGTSFDENSFAARLIQRGSHTDAPDTATGNCLLQRAAGAGNEAAALFLATNGAHVNHRNKWGETPLHTACRHGLANLTAELLQQGANPNLQTEEALPLPKEAASLTSLADSVHLQTPLHMAIAYNHPDVVSVILEQKANALHATNNLQIIPDFSLKDSRDQTVLGLALWTGMHTIAAQLLGSGAAINDTMSDGQTLLHMAIQRQDSKSALFLLEHQADINVSRTQDGETALQLAIRNQLPLVVDAICTRGADMSVPDEKGNPPLWLALANNLEDIASTLVRHGCDATCWGPGPGGCLQTLLHRAIDENNEPTACFLIRSGCDVNSPRQPGANGEGEEEARDGQTPLHLAASWGLEETVQCLLEFGANVNAQDAEGRTPIHVAISSQHGVIIQLLVSHPDIHLNVRDRQGLTPFACAMTFKNNKSAEAILKRESGAAEQVDNKGRNFLHVAVQNSDIESVLFLISVHANVNSRVQDASKLTPLHLAVQAGSEIIVRNLLLAGAKVNELTKHRQTALHLAAQQDLPTICSVLLENGVDFAAVDENGNNALHLAVMHGRLNNIRVLLTECTVDAEAFNLRGQSPLHILGQYGKENAAAIFDLFLECMPGYPLDKPDADGSTVLLLAYMKGNANLCRAIVRSGARLGVNNNQGVNIFNYQVATKQLLFRLLDMLSKEPPWCDGSYCYECTARFGVTTRKHHCRHCGRLLCHKCSTKEIPIIKFDLNKPVRVCNICFDVLTLGGVS

SEQ ID NO: 21400 - protein, 730 aa, Homo sapiens
MAGSSTGGGGVGETKVIYHLDEEETPYLVKIPVPAERITLGDFKSVLQRPAGAKYFFKSMDQDFGVVKEEISDDNARLPCFNGRVVSWLVSSDNPQPEMAPPVHEPRAELAPPAPPLPPLPPERTSGIGDSRPPSFHHENLEPETETESVVSLRRERPRRRDSSEHGAGGHRTGGPSRLERHLAGYESSSTLMTSELESTSLGDSDEEDTMSRFSSSTEQSSASRLLKRHRRRRKQRPPRLERTSSFSSVTDSTMSLNIITVTLNMEKYNFLGISIVGQSNERGDGGIYIGSIMKGGAVAADGRIEPGDMLLQVNDMNFENMSNDDAVRVLRDIVHKPGPIVLTVAKCWDPSPQAYFTLPRNEPIQPIDPAAWVSHSAALTGTFPAYPGSSSMSTITSGSSLPDGCEGRGLSVHTDMASVTKAMAAPESGLEVRDRMWLKITIPNAFLGSDVVDWLYHHVEGFPERREARKYASGLLKAGLIRHTVNKITFSEQCYYVFGDLSGGCESYLVNLSLNDNDGSSGASDQDTLAPLPGATPWPLLPTFSYQYPAPHPYSPQPPPYHELSSYTYGGGSASSQHSEGSRSSGSTRSDGGAGRTGRPEERAPESKSGSGSESEPSSRGGSLRRGGEASGTSDGGPPPSRGSTGGAPNLRAHPGLHPYGPPPGMALPYNPMMVVMMPPPPPPVPPAVQPPGAPPVRDLGSVPPELTASRQSFHMAMGNPSEFFVDVM

SEQ ID NO: 21401 - protein, 666 aa, Homo sapiens
MLPEAGSLWLLKLLRDIQLAQFYWPILEELNVTRPEHFDFVKPEDLDGIGMGRPAQRRLSEALKRLRSGPKSKNWVYKILGGFAPEHKEPTLPSDSPRHLPEPEGGLKCLIPEGAVCRGELLGSGCFGVVHRGLWTLPSGKSVPVAVKSLRVGPEGPMGTELGDFLREVSVMMNLEHPHVLRLHGLVLGQPLQMVMELAPLGSLHARLTAPAPTPPLLVALLCLFLRQLAGAMAYLGARGLVHRDLATRNLLLASPRTIKVADFGLVRPLGGARGRYVMGGPRPIPYAWCAPESLRHGAFSSASDVWMFGVTLWEMFSGGEEPWAGVPPYLILQRLEDRARLPRPPLCSRALYSLALRCWAPHPADRPSFSHLEGLLQEAGPSEACCVRDVTEPGALRMETGDPITVIEGSSSFHSPDSTIWKGQNGRTFKVGSFPASAVTLADAGGLPATRPVHRGTPARGDQHPGSIDGDRKKANLWDAPPARGQRRNMPLERMKGISRSLESVLSLGPRPTGGGSSPPEIRQARAVPQGPPGLPPRPPLSSSSPQPSQPSRERLPWPKRKPPHNHPMGMPGARKAAALSGGLLSDPELQRKIMEVELSVHGVTHQECQTALGATGGDVVSAIRNLKVDQLFHLSSRSRADCWRILEHYQWDLSAASRYVLARP

SEQ ID NO: 21402 - protein, 147 aa, Homo sapiens
MELALRRSPVPRWLLLLPLLLGLNAGAVIDWPTEEGKEVWDYVTVRKDAYMFWWLYYATNSCKNFSELPLVMWLQGGPGGSSTGFGNFEEIGPFSEGPSSATLRGLPWVIPGSPLLIRCSPGDLTCTACLFSKTKVWQRCLRLQSKY

SEQ ID NO: 21403 - protein, 127 aa, Homo sapiens
MEDSGKTFSSEEEEANYWKDLAMTYKQRAENTQEELREFQEGSREYEAELETQLQQIETRNRDLLSENNRLRMELETIKEKFEVQHSEGYRQISALEDDLAQTKAIKDQLQKYIRELEQANDDLERA

SEQ ID NO: 21404 - protein, 117 aa, Homo sapiens
MTKEYQDLQHLDNEESDHHQLRKGPPPPQPLLQRLCSGPRLLLLSLGLSLLLLVVVCVIGSQNSQLQEELRGLRETFSNFTASTEAQVKGLSTQGGNVGRKMKSLESQLEKQQKDLS

SEQ ID NO: 21405 - protein, 1211 aa, Homo sapiens
MPTPRDCGRLRSRAGRSRAGAACSRGAPRAAREALDCRRCRDAGGKEVAKLEKHLMLLRQEYVKLQKKLAETEKRCALLAAQANKESSSESFISRLLAIVADLYEQEQYSDLKIKVGDRHISAHKFVLAARSDSWSLANLSSTKELDLSDANPEVTMTMLRWIYTDELEFREDDVFLTELMKLANRFQLQLLRERCEKGVMSLVNVRNCIRFYQTAEELNASTLMNYCAEIIASHWDDLRKEDFSSMSAQLLYKMIKSKTEYPLHKAIKVEREDVVFLYLIEMDSQLPGKLNEADHNGDLALDLALSRRLESIATTLVSHKADVDMVDKSGWSLLHKGIQRGDLFAATFLIKNGAFVNAATLGAQETPLHLVALYSSKKHSADVMSEMAQIAEALLQAGANPNMQDSKGRTPLHVSIMAGNEYVFSQLLQCKQLDLELKDHEGSTALWLAVQHITVSSDQSVNPFEDVPVVNGTSFDENSFAARLIQRGSHTDAPDTATGNCLLQRAAGAGNEAAALFLATNGAHVNHRNKWGETPLHTACRHGLANLTAELLQQGANPNLQTEEALPLPKEAASLTSLADSVHLQTPLHMAIAYNHPDVVSVILEQKANALHATNNLQIIPDFSLKDSRDQTVLGLALWTGMHTIAAQLLGSGAAINDTMSDGQTLLHMAIQRQDSKSALFLLEHQADINVRTQDGETALQLAIRNQLPLVVDAICTRGADMSVPDEKGNPPLWLALANNLEDIASTLVRHGCDATCWGPGPGGCLQTLLHRAIDENNEPTACFLIRSGCDVNSPRQPGANGEGEEEARDGQTPLHLAASWGLEETVQCLLEFGANVNAQDAEGRTPIHVAISSQHGVIIQLLVSHPDIHLNVRDRQGLTPFACAMTFKNNKSAEAILKRESGAAEQVDNKGRNFLHVAVQNSDIESVLFLISVHANVNSRVQDASKLTPLHLAVQAGSEIIVRNLLLAGAKVNELTKHRQTALHLAAQQDLPTICSVLLENGVDFAAVDENGNNALHLAVMHGRLNNIRVLLTECTVDAEAFNLRGQSPLHILGQYGKENAAAIFDLFLECMPGYPLDKPDADGSTVLLLAYMKGNANLCRAIVRSGARLGVNNNQGVNIFNYQVATKQLLFRLLDMLSKEPPWCDGSYCYECTARFGVTTRKHHCRHCGRLLCHKCSTKEIPIIKFDLNKPVRVCNICFDVLTLGGVS

SEQ ID NO: 21406 - protein, 1538 aa, Homo sapiens
MAAGSGGSGGSGGGPGPGPGGGGGPSGSGSGPGSNGGLGSGGELHPRTGRLVSLSACGRTARRQQPGQEFNHGLVLSREPLRDGRVFTVRIDRKVNSWSGSIEIGVTALDPSVLDFPSSATGLKGGSWVVSGCSVLRDGRSVLEEYGQDLDQLGEGDRVGVERTVAGELRLWVNGRDCGVAATGLPPRVWAVVDLYGKCTQITVLPPEPGFSPPTPIPTPPLEPLAPTEDSALAEQGTSADEDFANMELSEVVSNTILSAYNGGLLNVNLSSPPAGEGLGSSGAATSPILTSNDALLFHEKCGTLIKLSNNNKTAERRRPLDEFNNGVVMTNRPLRDNEMFEIRIDKLVDKWSGSIEIGVTTHNPNSLEYPATMTNLQSGTIMMSGCGILTNGKGTRREYCEFSLDELQEGDHIGLTRKSNSALHFFINGIDQGVATPLTPPVVYGVVDLYGMAVKVTIVHNNNHSDRLRRNNAILRALSPEGALRRAAPAAQAEPERLLFHPNCGQKAAITHEGRTALRPHATDDFNHGVVLSSRALRDGEVFQVRIDKMVDKWAGSIEIGVTTHNPAYLQLPSTMTNLRSGTWMMTGNGVMHNGTTILDEYGHNLDRLKAGDTVGVVRREDGTLHFFVNGMTQGPAAWNVPPGVYAVVDLYGQAAQATIVDDVEVAPVPEPLPEGNNQVSPSSPSSGAGGSDLRFHQLHGSNAVITNGGRTALRHNCRSEFNDAIVISNRALRDGELFEIVIQKMVDRWSGSIEAGVTAIRPEDLEFPNTMTDIDYDTWMLSGTAIMQDGNTMRNNYGCDLDALGTGARIGMMRTAKGDLHYFINGQDQGAACSGLPPEVYAVVDLYGQCVQVSITNATGPMDNSLATSNTATEKSFPLHSPVAGVAHRFHSTCGKNVTLEEDGTRAVRAAGYAHGLVFSTKELRAEEVFEVKVEELDEKWAGSLRLGLTTLAPGEMGPGAGGGGPGLPPSLPELRTKTTWMVSSCEVRRDGQLQRMNYGRNLERLGVGSRVGVRRGADDTMHILVDGEDMGPAATGIAKNVWAVLDLYGPVRGVSIVSSTRLEESEGTQPPSPSSDTGSEGEEDDEGEEHGLGGQNEVGIIPTTLEFLENHGKNILLSNGNRTATRVASYNQGIVVINQPLVPQLLVQVRIDFLNRQWTSSLVLGVITCAPERLNFPASACALKRAAWLLRGRGVFHNGLKICEKFGPNLDTCPEGTILGLRLDSSGGLHLHVNGVDQGVAVPDVPQPCHALVDLYGQCEQVTIVNPEPGAASGKSAGTQGDMEKADMVDGIKESVCWGPPPAASPLKSCEYHALCSRFQELLLLPEDYFMPPPKRSLCYCESCRKLRGDEAHRRRGEPPREYALPFGWCRFNLRVNPRLEAGTLTKKWHMAYHGSNVAAVRRVLDRGELGAGTASILSCRPLKGEPGVGFEEPGENCAPPREEQPPPVLLSPSLQYAGAETLASKVQFRDPKSQRTHQAQVAFQVCVRPGSYTPGPPSAALGEPPDPHFSPAELEWVTKEKGATLLCALLVRVE

SEQ ID NO: 21407 - protein, 156 aa, Homo sapiens
MNRFRVSKFRHTEARPPRRESWISDIRAGTAPSCRNHIKSSCSLIAFNSDRPGVLGIVPLQGQGEDKRRVAHLGCHSDLVTDLDFSPFDDFLLATGSADRTVKLWRLPGPGQAHENSRDSRLAWMGTWEHLVSTGFNQMREREVKLWDTRFFSSAL

SEQ ID NO: 21408 - protein, 998 aa, Homo sapiens
MAQVAMSTLPVEDEESSESRMVVTFLMSALESMCKELAKSKAEVACIAVYETDVFVVGTERGRAFVNTRKDFQKDFVKYCVEEEEKAAEMHKMKSTTQANRMSVDAVEIETLRKTVEDYFCFCYGKALGKSTVVPVPYEKMLRDQSAVVVQGLPEGVAFKHPENYDLATLKWILENKAGISFIIKRPFLEPKKHVGGRVMVTDADRSILSPGGSCGPIKVKTEPTEDSGISLEMAAVTVKEESEDPDYYQYNIQAGPSETDDVDEKQPLSKPLQGSHHSSEGNEGTEMEVPAEDSTQHVPSETSEDPEVEVTIEDDDYSPPSKRPKANELPQPPVPEPANAGKRKVREFNFEKWNARITDLRKQVEELFERKYAQAIKAKGPVTIPYPLFQSHVEDLYVEGLPEGIPFRRPSTYGIPRLERILLAKERIRFVIKKHELLNSTREDLQLDKPASGVKEEWYARITKLRKMVDQLFCKKFAEALGSTEAKAVPYQKFEAHPNDLYVEGLPENIPFRSPSWYGIPRLEKIIQVGNRIKFVIKRPELLTHSTTEVTQPRTNTPVKEDWNVRITKLRKQVEEIFNLKFAQALGLTEAVKVPYPVFESNPEFLYVEGLPEGIPFRSPTWFGIPRLERIVRGSNKIKFVVKKPELVISYLPPGMASKINTKALQSPKRPRSPGSNSKVPEIEVTVEGPNNNNPQTSAVRTPTQTNGSNVPFKPRGREFSFEAWNAKITDLKQKVENLFNEKCGEALGLKQAVKVPFALFESFPEDFYVEGLPEGVPFRRPSTFGIPRLEKILRNKAKIKFIIKKPEMFETAIKESTSSKSPPRKINSSPNVNTTASGVEDLNIIQVTIPDDDNERLSKVEKARQLREQVNDLFSRKFGEAIGMGFPVKVPYRKITINPGCVVVDGMPPGVSFKAPSYLEISSMRRILDSAEFIKFTVIRPFPGLVINNQLVDQSESEGPVIQESAEPSQLEVPATEEIKETDGSSQIKQEPDPTW

SEQ ID NO: 21409 - protein, 2508 aa, Homo sapiens
MARFGDEMPARYGGGGSGAAAGVVVGSGGGRGAGGSRQGGQPGAQRMYKQSMAQRARTMALYNPIPVRQNCLTVNRSLFLFSEDNVVRKYAKKITEWPPFEYMILATIIANCIVLALEQHLPDDDKTPMSERLDDTEPYFIGIFCFEAGIKIIALGFAFHKGSYLRNGWNVMDFVVVLTGILATVGTEFDLRTLRAVRVLRPLKLVSGIPSLQVVLKSIMKAMIPLLQIGLLLFFAILIFAIIGLEFYMGKFHTTCFEEGTDDIQGESPAPCGTEEPARTCPNGTKCQPYWEGPNNGITQFDNILFAVLTVFQCITMEGWTDLLYNSNDASGNTWNWLYFIPLIIIGSFFMLNLVLGVLSGEFAKERERVENRRAFLKLRRQQQIERELNGYMEWISKAEEVILAEDETDGEQRHPFDVGALRRTTIKKSKTDLLNPEEAEDQLADIASVGSPFARASIKSAKLENSTFFHKKERRMRFYIRRMVKTQAFYWTVLSLVALNTLCVAIVHYNQPEWLSDFLYYAEFIFLGLFMSEMFIKMYGLGTRPYFHSSFNCFDCGVIIGSIFEVIWAVIKPGTSFGISVLRALRLLRIFKVTKYWASLRNLVVSLLNSMKSIISLLFLLFLFIVVFALLGMQLFGGQFNFDEGTPPTNFDTFPAAIMTVFQILTGEDWNEVMYDGIKSQGGVQGGMVFSIYFIVLTLFGNYTLLNVFLAIAVDNLANAQELTKDEQEEEEAANQKLALQKAKEVAEVSPLSAANMSIAVKEQQKNQKPAKSVWEQRTSEMRKQNLLASREALYNEMDPDERWKAAYTRHLRPDMKTHLDRPLVVDPQENRNNNTNKSRAAEPTVDQRLGQQRAEDFLRKQARYHDRARDPSGSAGLDARRPWAGSQEAELSREGPYGRESDHHAREGSLEQPGFWEGEAERGKAGDPHRRHVHRQGGSRESRSGSPRTGADGEHRRHRAHRRPGEEGPEDKAERRARHREGSRPARGGEGEGEGPDGGERRRRHRHGAPATYEGDARREDKERRHRRRKENQGSGVPVSGPNLSTTRPIQQDLGRQDPPLAEDIDNMKNNKLATAESAAPHGSLGHAGLPQSPAKMGNSTDPGPMLAIPAMATNPQNAASRRTPNNPGNPSNPGPPKTPENSLIVTNPSGTQTNSAKTARKPDHTTVDIPPACPPPLNHTVVQVNKNANPDPLPKKEEEKKEEEEDDRGEDGPKPMPPYSSMFILSTTNPLRRLCHYILNLRYFEMCILMVIAMSSIALAAEDPVQPNAPRNNVLRYFDYVFTGVFTFEMVIKMIDLGLVLHQGAYFRDLWNILDFIVVSGALVAFAFTGNSKGKDINTIKSLRVLRVLRPLKTIKRLPKLKAVFDCVVNSLKNVFNILIVYMLFMFIFAVVAVQLFKGKFFHCTDESKEFEKDCRGKYLLYEKNEVKARDREWKKYEFHYDNVLWALLTLFTVSTGEGWPQVLKHSVDATFENQGPSPGYRMEMSIFYVVYFVVFPFFFVNIFVALIIITFQEQGDKMMEEYSLEKNERACIDFAISAKPLTRHMPQNKQSFQYRMWQFVVSPPFEYTIMAMIALNTIVLMMKFYGASVAYENALRVFNIVFTSLFSLECVLKVMAFGILNYFRDAWNIFDFVTVLGSITDILVTEFGNNFINLSFLRLFRAARLIKLLRQGYTIRILLWTFVQSFKALPYVCLLIAMLFFIYAIIGMQVFGNIGIDVEDEDSDEDEFQITEHNNFRTFFQALMLLFRSATGEAWHNIMLSCLSGKPCDKNSGILTRECGNEFAYFYFVSFIFLCSFLMLNLFVAVIMDNFEYLTRDSSILGPHHLDEYVRVWAEYDPAACGRIHYKDMYSLLRVISPPLGLGKKCPHRVACKRLLRMDLPVADDNTVHFNSTLMALIRTALDIKIAKGGADKQQMDAELRKEMMAIWPNLSQKTLDLLVTPHKSTDLTVGKIYAAMMIMEYYRQSKAKKLQAMREEQDRTPLMFQRMEPPSPTQEGGPGQNALPSTQLDPGGALMAHESGLKESPSWVTQRAQEMFQKTGTWSPEQGPPTDMPNSQPNSQSVEMREMGRDGYSDSEHYLPMEGQGRAASMPRLPAENQRRRGRPRGNNLSTISDTSPMKRSASVLGPKARRLDDYSLERVPPEENQRHHQRRRDRSHRASERSLGRYTDVDTGLGTDLSMTTQSGDLPSKERDQERGRPKDRKHRQHHHHHHHHHHPPPPDKDRYAQERPDHGRARARDQRWSRSPSEGREHMAHRQGSSSVSGSPAPSTSGTSTPRRGRRQLPQTPSTPRPHVSYSPVIRKAGGSGPPQQQQQQQQQQQQQAVARPGRAATSGPRRYPGPTAEPLAGDRPPTGGHSSGRSPRMERRVPGPARSESPRACRHGGARWPASGPHVSEGPPGPRHHGYYRGSDYDEADGPGSGGGEEAMAGAYDAPPPVRHASSGATGRSPRTPRASGPACASPSRHGRRLPNGYYPAHGLARPRGPGSRKGLHEPYSESDDDWC

SEQ ID NO: 21410 - protein, 328 aa, Homo sapiens
IKLTQELAQKLGFKIRKAYVRAEALNHSVEDIEPDLLTPRQEAVPVVSLPAPSFSHEVGSELASVPVMPLTSILPLQVEESALPSAVLANGGKMPFTMPEAFLDDGDMVLGDELDDLLDSAPETNETVMPSALVRGPLQTASVSPSMPFSASLLGTLPIGARYAPPPSFSEFYPPLTSSLEDFCSSLNSFSMSESKRDLSTSTSREGTPLNNSNSSLLLMNGPGSLFASENFLGISSQPRNDFGNFFGSAVTKPSSSVTPRHPLEGTHELRQACQICFVKSGPKLMDFTYHANIDHKCKKDILIGRIKNVEDKSWKKIRPRPTKTNYE

SEQ ID NO: 21411 - protein, 379 aa, Homo sapiens
MESEMLQSPLLGLGEEDEADLTDWNLPLAFMKKRHCEKIEGSKSLAQSWRMKDRMKTVSVALVLCLNVGVDPPDVVKTTPCARLECWIDPLSMGPQKALETIGANLQKQYENWQPRARYKQSLDPTVDEVKKLCTSLRRNAKEERVLFHYNGHGVPRPTVNGEVWVFNKNYTQYIPLSIYDLQTWMGSPSIFVYDCSNAGLIVKSFKQFALQREQELEVAAINPNHPLAQMPLPPSMKNCIQLAACEATELLPMIPDLPADLFTSCLTTPIKIALRWFCMQKCVSLVPGVTLDLIEKIPGRLNDRRTPLGELNWIFTAITDTIAWNVLPRDLFQKLFRQDLLVASLFRNFLLAERIMRSYNCTPVSSPRLPPTYMHAMW

SEQ ID NO: 21412 - protein, 118 aa, Homo sapiens
CSQSERQLLLYEAEALAGGPLAVLGLDVAPSTLLPSYDPDTGLVLLTGKGDTRVFLYELLPESPFFLECNSFTSPDPHKGLVLLPKTECDVREVELMRCLRLRQSSLEPVAFRLPRVR

SEQ ID NO: 21413 - protein, 276 aa, Homo sapiens
MRIPVDPSTSRRFSPPSSSLQPGKMSDVSPVVAAQQQQQQQQQQQQQQQQQQQQQQQEAAAAAAAAAAAAAAAAAVPRLRPPHDNRTMVEIIADHPAELVRTDSPNFLCSVLPSHWRCNKTLPVAFKVVALGEVPDGTVVTVMAGNDENYSAELRNASAVMKNQVARFNDLRFVGRSGRGKSFTLTITVFTNPPQVATYHRAIKVTVDGPREPRNPRQAQSSPPWSYDQSYPSYLSQMTSPSIHSTTPLSSTRGTGLPAITDVPRRISARSRYSLR

SEQ ID NO: 21414 - protein, 251 aa, Homo sapiens
MSREVAEQEERLRRGDDLRLQMALEESRRDTVKIPKKKEQTTLLDLMDALPSSGPAAQKAEPWGPSASTNQTNPWGGPAAPASTSDPWPSFGTKPAASIDPWGVPTGATVQSVPKNSDPWAASQQPASSAGKRASDAWGAVSTTKPVSVSGSFELFSNLNGTIKDDFSEFDNLRTSKKTAESVTSLPSQNNGTTSPDPFESQPLTVASSKPSSARKTPESFLGPNAALVNLDSLVTRPAPPAQSLNPFLAP

SEQ ID NO: 21415 - protein, 1399 aa, Homo sapiens
MAGGAWGRLACYLEFLKKEELKEFQLLLANKAHSRSSSGETPAQPEKTSGMEVASYLVAQYGEQRAWDLALHTWEQMGLRSLCAQAQEGAGHSPSFPYSPSEPHLGSPSQPTSTAVLMPWIHELPAGCTQGSERRVLRQLPDTSGRRWREISASLLYQALPSSPDHESPSQESPNAPTSTAVLGSWGSPPQPSLAPREQEAPGTQWPLDETSGIYYTEIREREREKSEKGRPPWAAVVGTPPQAHTSLQPHHHPWEPSVRESLCSTWPWKNEDFNQKFTQLLLLQRPHPRSQDPLVKRSWPDYVEENRGHLIEIRDLFGPGLDTQEPRIVILQGAAGIGKSTLARQVKEAWGRGQLYGDRFQHVFYFSCRELAQSKVVSLAELIGKDGTATPAPIRQILSRPERLLFILDGVDEPGWVLQEPSSELCLHWSQPQPADALLGSLLGKTILPEASFLITARTTALQNLIPSLEQARWVEVLGFSESSRKEYFYRYFTDERQAIRAFRLVKSNKELWALCLVPWVSWLACTCLMQQMKRKEKLTLTSKTTTTLCLHYLAQALQAQPLGPQLRDLCSLAAEGIWQKKTLFSPDDLRKHGLDGAIISTFLKMGILQEHPIPLSYSFIHLCFQEFFAAMSYVLEDEKGRGKHSNCIIDLEKTLEAYGIHGLFGASTTRFLLGLLSDEGEREMENIFHCRLSQGRNLMQWVPSLQLLLQPHSLESLHCLYETRNKTFLTQVMAHFEEMGMCVETDMELLVCTFCIKFSRHVKKLQLIEGRQHRSTWSPTMVVLFRWVPVTDAYWQILFSVLKVTRNLKELDLSGNSLSHSAVKSLCKTLRRPRCLLETLRLAGCGLTAEDCKDLAFGLRANQTLTELDLSFNVLTDAGAKHLCQRLRQPSCKLQRLQLVSCGLTSDCCQDLASVLSASPSLKELDLQQNNLDDVGVRLLCEGLRHPACKLIRLGKPSVMTPTEGLDTGEMSNSTSSLKRQRLGSERAASHVAQANLKLLDVSKIFPIAEIAEESSPEVVPVELLCVPSPASQGDLHTKPLGTDDDFWGPTGPVATEVVDKEKNLYRVHFPVAGSYRWPNTGLCFVMREAVTVEIEFCVWDQFLGEINPQHSWMVAGPLLDIKAEPGAVEAVHLPHFVALQGGHVDTSLFQMAHFKEEGMLLEKPARVELHHIVLENPSFSPLGVLLKMIHNALRFIPVTSVVLLYHRVHPEEVTFHLYLIPSDCSIRKELELCYRSPGEDQLFSEFYVGHLGSGIRLQVKDKKDETLVWEALVKPGDLMPATTLIPPARIAVPSPLDAPQLLHFVDQYREQLIARVTSVEVVLDKLHGQVLSQEQYERVLAENTRPSQMRKLFSLSQSWDRKCKDGLYQALKETHPHLIMELWEKGSKKGLLPLSS

SEQ ID NO: 21416 - protein, 807 aa, Homo sapiens
MRLSPAPLKLSRTPALLALALPLAAALAFSDETLDKVPKSEGYCSRILRAQGTRREGYTEFSLRVEGDPDFYKPGTSYRVTLSAAPPSYFRGFTLIALRENREGDKEEDHAGTFQIIDEEETQFMSNCPVAVTESTPRRRTRIQVFWIAPPAGTGCVILKASIVQKRIIYFQDEGSLTKKLCEQDSTFDGVTDKPILDCCACGTAKYRLTFYGNWSEKTHPKDYPRRANHWSAIIGGSHSKNYVLWEYGGYASEGVKQVAELGSPVKMEEEIRQQSDEVLTVIKAKAQWPAWQPLNVRAAPSAEFSVDRTRHLMSFLTMMGPSPDWNVGLSAEDLCTKECGWVQKVVQDLIPWDAGTDSGVTYESPNKPTIPQEKIRPLTSLDHPQSPFYDPEGGSITQVARVVIERIARKGEQCNIVPDNVDDIVADLAPEEKDEDDTPETCIYSNWSPWSACSSSTCDKGKRMRQRMLKAQLDLSVPCPDTQDFQPCMGPGCSDEDGSTCTMSEWITWSPCSISCGMGMRSRERYVKQFPEDGSVCTLPTEETEKCTVNEECSPSSCLMTEWGEWDECSATCGMGMKKRHRMIKMNPADGSMCKAETSQAEKCMMPECHTIPCLLSPWSEWSDCSVTCGKGMRTRQRMLKSLAELGDCNEDLEQVEKCMLPECPIDCELTEWSQWSECNKSCGKGHVIRTRMIQMEPQFGGAPCPETVQRKKCRIRKCLRNPSIQKLRWREARESRRSEQLKEESEGEQFPGCRMRPWTAWSECTKLCGGGIQERYMTVKKRFKSSQFTSCKDKKEIRACNVHPC

SEQ ID NO: 21417 - protein, 563 aa, Homo sapiens
MGSLSNYALLQLTLTAFLTILVQPQHLLAPVFRTLSILTNQSNCWLCEHLDNAEQPELVFVPASASTWWTYSGQWMYERVWYPQAEVQNHSTSSYRKVTWHWEASMEAQGLSFAQVRLLEGNFSLCVENKNGSGPFLGNIPKQYCNQILWFDSTDGTFMPSIDVTNESRNDDDDTSVCLGTRQCSWFAGCTNRTWNSSAVPLIGLPNTQDYKWVDRNSGLTWSGNDTCLYSCQNQTKGLLYQLFRNLFCSYGLTEAHGKWRCADASITNDKGHDGHRTPTWWLTGSNLTLSVNNSGLFFLCGNGVYKGFPPKWSGRCGLGYLVPSLTRYLTLNASQITNLRSFIHKVTPHRCTQGDTDNPPLYCNPKDNSTIRALFPSLGTYDLEKAILNISKAMEQEFSATKQTLEAHQSKVSSLASASRKDHVLDIPTTQRQTACGTVGKQCCLYINYSEEIKSNIQRLHEASENLKNVPLLDWQGIFAKVGDWFRSWGYVLLIVLFCLFIFVLIYVRVFRKSRRSLNSQPLNLALSPQQSAQLLVSETSCQVSNRAMKGLTTHQYDTSLL

SEQ ID NO: 21418 - protein, 77 aa, Homo sapiens
MDLEEFLSENGIPPSPSQHDHSPHPPGLQPASSAAPSVMDLSSRASAPLHPGIPSPNCMQSPIRPAVASKPQYTKSH

SEQ ID NO: 21419 - protein, 932 aa, Homo sapiens
MAAPTKCQLRGRLVLLCSLLGMLWEARASQIRYSVPEETEKGYIVGNISKDLALEPRELAERRVRIVSRGRTQLFSLNPRSGTLVTAGRIDREELCAQSPRCLVNFKVLVEDRVKLYGIEIEVTDINDSAPKFQAESLEVKINEIAVPGARYPLPEAIDPDVGVNSLQSYQLSPNHHFSLNVQTGDNGAINPELVLERALDREEATAHHLVLTASDGGEPRRSSTVRIHVTVLDTNDNAPVFAQRIYRVKVLENVPPGTWLLTATASDLDEGINGKVAYKFWKINEKQSLLFQLNENTGEISTAKSLDYEECSFYEMEIQAEDGGGLKGWTKVLISVEDVNDNRPEVTITSLFSPVREDAPQGTVILLFNAHDRDSGKNGQVVCSIQENLSFTLENSEEDYYRLLTAQILDREKASEYNITVTATDRGTPPLSTEIHITLQVTDINDNPPAFSQASYSVYLPENNARGTSIFSVIAYDPDSNENSRVIYSLAEDTIQGSPLSTYVSINSDTGVLYALCSFDYEQFRDLQMQVTASDSGSPPLSSNVSLRLFVLDQNDNAPEILYPALPTDGSTGVELAPRSAEPGYLVTKVVAVDRDSGQNAWLSYRLFKASEPGLFSVGLHTGEVRTARALLDRDALKQSLVVAVQDHGQPPLSATVTLTVAIADSIPDILADLGSLQIPADLEASDLTLYLVVAVAVVSCVFLTFVITLLALRLRHWHSSHLLRATSDGLAGVPTSHFVGVDGVRAFLQTYSQEFSLTADSRKSHLIFPQPNYADTLISQQSCEKNEPLCVSVDSKFPIEDTPLVPQAPPNTDWRFSQAQRPGTSGSQNGDDTGTWPNNQFDTEMLQAMILASASEAADGSSTLGGGAGTMGLSARYGPQFTLQHVPDYRQNVYIPGSNATLTNAAGKRDGKAPAGGNGNKKKSGKKEKK

SEQ ID NO: 21420 - protein, 173 aa, Homo sapiens
PIGTQQIRVGVVQFSDEPRTMFSLDTYSTKAQVLGAVKALGFAGGELANIGLALDFVVENHFTRAGGSRVEEGVPQVLVLISAGPSSDEIRYGVVALKQASVFSFGLGAQAASRAELQHIATDDNLVFTVPEFRSFGDLQEKLLPYIVGVAQRHIVLKPPTIVTQEYGLNENW

SEQ ID NO: 21421 - protein, 602 aa, Homo sapiens
MAEFRVRVSTGEAFGAGTWDKVSVSIVGTRGESPPLPLDNLGKEFTAGAEEDFQVTLPEDVGRVLLLRVHKAPPVLPLLGPLAPDAWFCRWFQLTPPRGGHLLFPCYQWLEGAGTLVLQEGTAKVSWADHHPVLQQQRQEELQARQEMYQWKAYNPGWPHCLDEKTVEDLELNIKYSTAKNANFYLQAGSAFAEMKIKGLLDRKGLWRSLNEMKRIFNFRRTPAAEHAFEHWQEDAFFASQFLNGLNPVLIRRCHYLPKNFPVTDAMVASVLGPGTSLQAELEKGSLFLVDHGILSGIQTNVINGKPQFSAAPMTLLYQSPGCGPLLPLAIQLSQTPGPNSPIFLPTDDKWDWLLAKTWVRNAEFSFHEALTHLLHSHLLPEVFTLATLRQLPHCHPLFKSTGIGIEGFSELIQRNMKQLNYSLLCLPEDIRTRGVEDIPGYYYRDDGMQIWGIPSSLETREALVQYVTMVIFTCSAKHAAVSAGQFDSCAWMPNLPPSMQLPPPTSKGLATCEGFIATLPPVNATCDVILALWLLSKEPGDQRPLGTYPDEHFTEEAPRRSIATFQSRLAQISRGIQERNQGLVLPYTYLDPPLIENSVSI

SEQ ID NO: 21422 - protein, 459 aa, Homo sapiens
MAEQGRCCDLAALGEQGGAPPWEKSLGTYIGCFSDDGHERTLKGAVFYDLRKMTVSHCQDACAERSYVYAGLEAGAECYCGNRLPAVSVGLEECNHECKGEKGSVCGAVDRLSVYRVDELQPGSRKRRTATYRGCFRLPENITHAFPSSLIQANVTVGTCSGFCSQKEFPLAILRGWECYCAYPTPRFNLRDAMDSSVCGQDPEAQRLAEYCEVYQTPVQDTRCTDRRFLPNKSKVFVALSSFPGAGNTWARHLIEHATGFYTGSYYFDGTLYNKGFKGEKDHWRSRRTICVKTHESGRREIEMFDSAILLIRNPYRSLVAEFNRKCAGHLGYAADRNWKSKEWPDFVNSYASWWSSHVLDWLKYGKRLLVVHYEELRRSLVPTLREMVAFLNVSVSEERLLCVENNKEGSFRRRGRRSHDPEPFTPEMKDLINGYIRTVDQALRDHNWTGLPREYVPR

SEQ ID NO: 21423 - protein, 126 aa, Homo sapiens
MEDSGKTFSSEEEEANYWKDLAMTYKQRAENTQEELREFQEGSREYEAELETQLQQIETRNRDLLSENNRLRMELETIKEKFEVQHSEGYRQISALEDDLAQTKAIKDQLQKYIRELEQANDDLER

SEQ ID NO: 21424 - protein, 390 aa, Homo sapiens
MATTATMATSGSARKRLLKEEDMTKVEFETSEEVDVTPTFDTMGLREDLLRGIYAYGFEKPSAIQQRAIKQIIKGRDVIAQSQSGTGKTATFSISVLQCLDIQGLLALGDYMNVQCHACIGGTNVGEDIRKLDYGQHVVAGTPGRVFDMIRRRSLRTRAIKMLVLDEADEMLNKGFKEQIYDVYRYLPPATQVVLISATLPHEILEMTNKFMTDPIRILVKRDELTLEGIKQFFVAVEREEWKFDTLCDLYDTLTITQAVIFCNTKRKVDWLTEKMREANFTVSSMHGDMPQKERESIMKEFRSGASRVLISTDVWARGLDVPQVSLIINYDLPNNRELYIHRIGRSGRYGRKGVAINFVKNDDIRILRDIEQYYSTQIDEMPMNVADLI

SEQ ID NO: 21425 - protein, 134 aa, Homo sapiens
MIDHLVTMKISHWDGVIRELAARALHNLAQQAPEFSATQVFPRLLSMTLSPDLHMRHGSILACAEVAYALYKLAAQENRPVTDHLDEQAVQGLKQIHQQLYDRQLYRGLGGQLMRQAVCVLIEKLSLSKMPFRG

SEQ ID NO: 21426 - protein, 1473 aa, Homo sapiens
MAGGAWGRLACYLEFLKKEELKEFQLLLANKAHSRSSSGETPAQPEKTSGMEVASYLVAQYGEQRAWDLALHTWEQMGLRSLCAQAQEGAGHSPSFPYSPSEPHLGSPSQPTSTAVLMPWIHELPAGCTQGSERRVLRQLPDTSGRRWREISASLLYQALPSSPDHESPSQESPNAPTSTAVLGSWGSPPQPSLAPREQEAPGTQWPLDETSGIYYTEIREREREKSEKGRPPWAAVVGTPPQAHTSLQPHHHPWEPSVRESLCSTWPWKNEDFNQKFTQLLLLQRPHPRSQDPLVKRSWPDYVEENRGHLIEIRDLFGPGLDTQEPRIVILQGAAGIGKSTLARQVKEAWGRGQLYGDRFQHVFYFSCRELAQSKVVSLAELIGKDGTATPAPIRQILSRPERLLFILDGVDEPGWVLQEPSSELCLHWSQPQPADALLGSLLGKTILPEASFLITARTTALQNLIPSLEQARWVEVLGFSESSRKEYFYRYFTDERQAIRAFRLVKSNKELWALCLVPWVSWLACTCLMQQMKRKEKLTLTSKTTTTLCLHYLAQALQAQPLGPQLRDLCSLAAEGIWQKKTLFSPDDLRKHGLDGAIISTFLKMGILQEHPIPLSYSFIHLCFQEFFAAMSYVLEDEKGRGKHSNCIIDLEKTLEAYGIHGLFGASTTRFLLGLLSDEGEREMENIFHCRLSQGRNLMQWVPSLQLLLQPHSLESLHCLYETRNKTFLTQVMAHFEEMGMCVETDMELLVCTFCIKFSRHVKKLQLIEGRQHRSTWSPTMVVLFRWVPVTDAYWQILFSVLKVTRNLKELDLSGNSLSHSAVKSLCKTLRRPRCLLETLRLAGCGLTAEDCKDLAFGLRANQTLTELDLSFNVLTDAGAKHLCQRLRQPSCKLQRLQLVSCGLTSDCCQDLASVLSASPSLKELDLQQNNLDDVGVRLLCEGLRHPACKLIRLGLDQTTLSDEMRQELRALEQEKPQLLIFSRRKPSVMTPTEGLDTGEMSNSTSSLKRQRLGSERAASHVAQANLKLLDVSKIFPIAEIAEESSPEVVPVELLCVPSPASQGDLHTKPLGTDDDFWGPTGPVATEVVDKEKNLYRVHFPVAGSYRWPNTGLCFVMREAVTVEIEFCVWDQFLGEINPQHSWMVAGPLLDIKAEPGAVEAVHLPHFVALQGGHVDTSLFQMAHFKEEGMLLEKPARVELHHIVLENPSFSPLGVLLKMIHNALRFIPVTSVVLLYHRVHPEEVTFHLYLIPSDCSIRKAIDDLEMKFQFVRIHKPPPLTPLYMGCRYTVSGSGSGMLEILPKELELCYRSPGEDQLFSEFYVGHLGSGIRLQVKDKKDETLVWEALVKPGDLMPATTLIPPARIAVPSPLDAPQLLHFVDQYREQLIARVTSVEVVLDKLHGQVLSQEQYERVLAENTRPSQMRKLFSLSQSWDRKCKDGLYQALKETHPHLIMELWEKGSKKGLLPLSS

SEQ ID NO: 21427 - protein, 623 aa, Homo sapiens
MGLYRIRVSTGASLYAGSNNQVQLWLVGQHGEAALGKRLWPARGKGPGAGDEVRFPCYRWVEGNGVLSLPEGTGRTVGEDPQGLFQKHREEELEERRKLYRWGNWKDGLILNMAGAKLYDLPVDERFLEDKRVDFEVSLAKGLADLAIKDSLNVLTCWKDLDDFNRIFWCGQSKLAERVRDSWKEDALFGYQFLNGANPVVLRRSAHLPARLVFPPGMEELQAQLEKELEGGTLFEADFSLLDGIKANVILCSQQHLAAPLVMLKLQPDGKLLPMVIQLQLPRTGSPPPPLFLPTDPPMAWLLAKCWVRSSDFQLHELQSHLLRGHLMAEVIVVATMRCLPSIHPIFKLIIPHLRYTLEINVRARTGLVSDMGIFDQIMSTGGGGHVQLLKQAGAFLTYSSFCPPDDLADRGLLGVKSSFYAQDALRLWEIIYRYVEGIVSLHYKTDVAVKDDPELQTWCREITEIGLQGAQDRGFPVSLQARDQVCHFVTMCIFTCTGQHASVHLGQLDWYSWVPNAPCTMRLPPPTTKDATLETVMATLPNFHQASLQMSITWQLGRRQPVMVAVGQHEEEYFSGPEPKAVLKKFREELAALDKEIEIRNAKLDMPYEYLRPSVVENSVAI

SEQ ID NO: 21428 - protein, 1047 aa, Homo sapiens
MTTANCGAHDELDFKLVFGEDGAPAPPPPGSRPADLEPDDCASIYIFNVDPPPSTLTTPLCLPHHGLPSHSSVLSPSFQLQSHKNYEGTCEIPESKYSPLGGPKPFECPSIQITSISPNCHQELDAHEDDLQINDPEREFLERPSRDHLYLPLEPSYRESSLSPSPASSISSRSWFSDASSCESLSHIYDDVDSELNEAAARFTLGSPLTSPGGSPGGCPGEETWHQQYGLGHSLSPRQSPCHSPRSSVTDENWLSPRPASGPSSRPTSPCGKRRHSSAEVCYAGSLSPHHSPVPSPGHSPRGSVTEDTWLNASVHGGSGLGPAVFPFQYCVETDIPLKTRKTSEDQAAILPGKLELCSDDQGSLSPARETSIDDGLGSQYPLKKDSCGDQFLSVPSPFTWSKPKPGHTPIFRTSSLPPLDWPLPAHFGQCELKIEVQPKTHHRAHYETEGSRGAVKASTGGHPVVKLLGYNEKPINLQMFIGTADDRYLRPHAFYQVHRITGKTVATASQEIIIASTKVLEIPLLPENNMSASIDCAGILKLRNSDIELRKGETDIGRKNTRVRLVFRVHIPQPSGKVLSLQIASIPVECSQRSAQELPHIEKYSINSCSVNGGHEMVVTGSNFLPESKIIFLEKGQDGRPQWEVEGKIIREKCQGAHIVLEVPPYHNPAVTAAVQVHFYLCNGKRKKSQSQRFTYTPVLMKQEHREEIDLSSVPSLPVPHPAQTQRPSSDSGCSHDSVLSGQRSLICSIPQTYASMVTSSHLPQLQCRDESVSKEQHMIPSPIVHQPFQVTPTPPVGSSYQPMQTNVVYNGPTCLPINAASSQEFDSVLFQQDATLSGLVNLGCQPLSSIPFHSSNSGSTGHLLAHTPHSVHTLPHLQSMGYHCSNTGQRSLSSPVADQITGQPSSQLQPITYGPSHSGSATTASPAASHPLASSPLSGPPSPQLQPMPYQSPSSGTASSPSPATRMHSGQHSTQAQSTGQGGLSAPSSLICHSLCDPASFPPDGATVSIKPEPEDREPNFATIGLQDITLDDGFVKAEKPLSHD

SEQ ID NO: 21429 - protein, 52 aa, Homo sapiens
MPGEQQAEEEEEEEMQEEMVLLVKGEEDEGEEKYEVVKLKIPMDNKEEAECP

SEQ ID NO: 21430 - protein, 315 aa, Homo sapiens
PAREVGDRVRVSVGLILAQLISLNEKDEEMSTKVYLDLEWTDYRLSWDPAEHDGIDSLRITAESVWLPDVVLLNNNDGNFDVALDISVVVSSDGSVRWQPPGIYRSSCSIQVTYFPFDWQNCTMVFSSYSYDSSEVSLQTGLGPDGQGHQEIHIHEGTFIGEKMGLSIFALLTLTVFLLLLADKVPETSLSVPIIIKYLMFTMVLVTFSVILSVVVLNLHHRSPHTHQMPLWVRQIFIHKLPLYLRLKRPKPERDLMPEPPHCSSPGSGWGRGTDEYFIRKPPSDFLFPKPNRFQPELSAPDLRRFIDGPNRAVA

SEQ ID NO: 21431 - protein, 164 aa, Homo sapiens
MEEEIAALVIDNGSGMCKAGFAGDDAPRAVFPSIVGRPRHQGVMVGMGQKDSYVGDEAQSKRGILTLKYPIEHGIVTNWDDMEKIWHHTFYNELRVAPEEHPVLLTEAPLNPKANREKMTQIMFETFNTPAMYVAIQAVLSLYASGRTTGIVMDSGDGVTHTVP

SEQ ID NO: 21432 - protein, 39 aa, Homo sapiens
NLGSAVKVLNSQSESSALTNQQPQNNGEVQNSKNQSVNK

SEQ ID NO: 21433 - protein, 49 aa, Homo sapiens
MKRSLNENSARSTAGCLPVPLFNQKKRNRQPLTSNPLKDDSDWAWEAVN

SEQ ID NO: 21434 - protein, 179 aa, Homo sapiens
MTEVVPSSALSEVSLRLLCHDDIDTVKHLCGDWFPIEYPDSWYRDITSNKKFFSLAATYRGAIVGMIVAEIKNRTKIHKEDGDILASNFSVDTQVAYILSLGVVKEFRKHGIESTARPTACSAASCHGRASLPRVASSTAGPCDVGWAAATRPHPSAARRARLPVHLTPSVFCKELPAI

SEQ ID NO: 21435 - protein, 159 aa, Homo sapiens
TGTLSRKSIKAPATPASATLGRPPRIPEPVHLPVVPDGRLSAASSAFSLASAGSAEGVGGAPTPKGQAAPPAPPLPSSLDPPPPPAAVEVFQRPPTLEELSPPPPAFLLFPQDEELPLPLDLPPPPPLDGDELGLPPPPPGFGPDEPSWVPASYLEKGT

SEQ ID NO: 21436 - protein, 1207 aa, Homo sapiens
MNTKDTTEVAENSHHLKIFLPKKLLECLPRCPLLPPERLRWNTNEEIASYLITFEKHDEWLSCAPKTRPQNGSIILYNRKKVKYRKDGYLWKKRKDGKTTREDHMKLKVQGMEPVSWQCLYGCYVHSSIVPTFHRRCYWLLQNPDIVLVHYLNVPALEDCGKGCSPIFCSISSDRREWLKWSREELLGQLKPMFHGIKWSCGNGTEEFSVEHLVQQILDTHPTKPAPRTHACLCSGGLGSGSLTHKCSSTKHRIISPKVEPRALTLTSIPHAHPPEPPPLIAPLPPELPKAHTSPSSSSSSSSSGFAEPLEIRPSPPTSRGGSSRGGTAILLLTGLEQRAGGLTPTRHLAPQADPRPSMSLAVVVGTEPSAPPAPPSPAFDPDRFLNSPQRGQTYGGGQGVSPDFPEAEAAHTPCSALEPAAALEPQAAARGPPPQSVAGGRRGNCFFIQDDDSGEELKGHGAAPPIPSPPPSPPPSPAPLEPSSRVGRGEALFGGPVGASELEPFSLSSFPDLMGELISDEAPSIPAPTPQLSPALSTITDFSPEWSYPEGGVKVLITGPWTEAAEHYSCVFDHIAVPASLVQPGVLRCYCPAHEVGLVSLQVAGREGPLSASVLFEYRARRFLSLPSTQLDWLSLDDNQFRMSILERLEQMEKRMAEIAAAGQVPCQGPDAPPVQDEGQGPGFEARVVVLVESMIPRSTWKGPERLAHGSPFRGMSLLHLAAAQGYARLIETLSQWRSVETGSLDLEQEVDPLNVDHFSCTPLMWACALGHLEAAVLLFRWNRQALSIPDSLGRLPLSVAHSRGHVRLARCLEELQRQEPSVEPPFALSPPSSSPDTGLSSVSSPSELSDGTFSVTSAYSSAPDGSPPPAPLPASEMTMEDMAPGQLSSGVPEAPLLLMDYEATNSKGPLSSLPALPPASDDGAAPEDADSPQAVDVIPVDMISLAKQIIEATPERIKREDFVGLPEAGASMRERTGAVGLSETMSWLASYLENVDHFPSSTPPSELPFERGRLAVPSAPSWAEFLSASTSGKMESDFALLTLSDHEQRELYEAARVIQTAFRKYKGRRLKEQQEVAAAVIQRCYRKYKQLTWIALKFALYKKMTQAAILIQSKFRSYYEQKRFQQSRRAAVLIQQHYRSYRRRPGPPHRTSATLPARNKGSFLTKKQDQAARKIMRFLRRCRHRMRELKQNQELEGLPQPGLAT

SEQ ID NO: 21437 - protein, 150 aa, Homo sapiens
VMVLLLLSLDFWSVKNVTGRLLVGLRWWNQIDEDGKSHWIFEARKVSPNSIAATEAEARIFWLGLIICPMIWIVFFFSTLFSLKLKWLALVVAGISLQAANLYGYILCKMGGNSDIGKVTASFLSQTVFQTACPGDFQKPGLEGLEIHQH

SEQ ID NO: 21438 - protein, 360 aa, Homo sapiens
MDAALLLNVEGVKKTILHGGTGELPNFITGSRVIFHFRTMKCDEERTVIDDSRQVGQPMHIIIGNMFKLEVWEILLTSMRVHEVAEFWCDTIHTGVYPILSRSLRQMAQGKDPTEWHVHTCGLANMFAYHTLGYEDLDELQKEPQPLVFVIELLQVDAPSDYQRETWNLSNHEKMKAVPVLHGEGNRLFKLGRYEEASSKYQEAIICLRNLQTKCLLKKEEYYEVLEHTSDILRHHPGIVKAYYVRARAHAEVWNEAEAKADLQKVLELEPSMQKAVRRELRLLENRMAEKQEEERLRCRNMLSQGATQPPAEPPTEPPAQSSTEPPAEPPTAPSAELSAGPPAEPATEPPPSPGHSLQH

SEQ ID NO: 21439 - protein, 326 aa, Homo sapiens
RPRLRSGSQRQPGAHGPSAHGSTMPALLERPKLSNAMARALHRHIMMERERKRQEEEEVDKMMEQKMKEEQERRKKKEMEERMSLEETKEQILKLEEKLLALQEEKHQLFLQLKKVLHEEEKRRRKEQSDLTTLTSAAYQQSLTVHTGTHLLSMQGSPGGHNRPGTLMAADRAKQMFGPQVLTTRHYVGSAAAFAGTPEHGQFQGSPGGAYGTAQPPPHYGPTQPAYSPSQQLRAPSAFPAVQYLSQPQPQPYAVHGHFQPTQTGFLQPGGALSLQKQMEHANQQTGFSDSSSLRPMHPQALHPAPGLLASPQLPVQMQPAGKTAP

SEQ ID NO: 21440 - protein, 413 aa, Homo sapiens
MSFRDLRNFTEMMRALGYPRHISMENFRTPNFGLVSEVLLWLVKRYEPQTDIPPDVDTEQDRVFFIKAIAQFMATKAHIKLNTKKLYQADGYAVKELLKITSVLYNAMKTKGMEGSEIVEEDVNKFKFDLGSKIADLKAARQLASEITSKGASLYDLLGMEVELREMRTEAIARPLEINETEKVMRIAIKEILTQVQKTKDLLNNVASDEANLEAKIEKRKLELERNRKRLETLQSVRPCFMDEYEKTEEELQKQYDTYLEKFQNLTYLEQQLEDHHRMEQERFEEAKNTLCLIQNKLKEEEKRLLKSGSNDDSDIDIQEDDESDSELEERRLPKPQTAMEMLMQGRPGKRIVGTMQGGDSDDNEDSEESEIDMEDDDDEDDDLEDESISLSPTKPNRRVRKSEPLDESDNDF

SEQ ID NO: 21441 - protein, 283 aa, Homo sapiens
DDRVYPNSTCKPRIIAPSRGSPLPVLSWANREEVWKIMLNKEKTYLRDQHFLEQHPLLQPKMRAILLDWLMEVCEVYKLHRETFYLAQDFFDRYMATQENVVKTLLQLIGISSLFIAAKLEEIYPPKLHQFAYVTDGACSGDEILTMELMIMKLLDLCVLDVDCLEFPYGILAASALYHFSSSELMQKVSGYQWCDIENCVKWMVPFAMVIRETGSSKLKHFRGVADEDAHNIQTHRDSLDLLDKARAKKAMLSEQNRASPLPSGLLTPPQSGKKQSSGPEMA

SEQ ID NO: 21442 - protein, 493 aa, Homo sapiens
MGELCRRDSALTALDEETLWEMMESHRHRIVRCICPSRLTPYLRQAKVLCQLDEEEVLHSPRLTNSAMRAGHLLDLLKTRGKNGAIAFLESLKFHNPDVYTLVTGLQPDVDFSNFSGLMETSKLTECLAGAIGSLQEELNQEKGQKEVLLRRCQQLQEHLGLAETRAEGLHQLEADHSRMKREVSAHFHEVLRLKDEMLSLSLHYSNALQEKELAASRCRSLQEELYLLKQELQRANMVSSCELELQEQSLRTASDQESGDEELNRLKEENEKLRSLTFSLAEKDILEQSLDEARGSRQELVERIHSLRERAVAAERQREQGEGECAAGPGVRAAEGARPGVLREGQCSEGDFPEPGGEGLPPQAGVRADGPGLRAAHTASPAAGRASGCAQAGSQDQGALSTGEAAAGADACHLPQRRQRLQPRQLHRVSALVGPECHVQPRAGGQLPLQQPRAPQPAVPVQAGGRGLRGRTLVFQQLPGDPGGRPGSPAGS

SEQ ID NO: 21443 - protein, 1048 aa, Homo sapiens
MNRFRVSKFRHTEARPPRRESWISDIRAGTAPSCRNHIKSSCSLIAFNSDRPGVLGIVPLQGQGEDKRRVAHLGCHSDLVTDLDFSPFDDFLLATGSADRTVKLWRLPGPGQALPSAPGVVLGPEDLPVEVLQFHPTSDGILVSAAGTTVKVWDAAKQQPLTELAAHGDLVQSAVWSRDGALVGTACKDKQLRIFDPRTKPRASQSTQAHENSRDSRLAWMGTWEHLVSTGFNQMREREVKLWDTRFFSSALASLTLDTSLGCLVPLLDPDSGLLVLAGKGERQLYCYEVVPQQPALSPVTQCVLESVLRGAALVPRQALAVMSCEVLRVLQLSDTAIVPIGYHVPRKAVEFHEDLFPDTAGCVPATDPHSWWAGDNQQVQKVSLNPACRPHPSFTSCLVPPAEPLPDTAQPAVMETPVGDADASEGFSSPPSSLTSPSTPSSLGPSLSSTSGIGTSPSLRSLQSLLGPSSKFRHAQGTVLHRDSHITNLKGLNLTTPGESDGFCANKLRVAVPLLSSGGQVAVLELRKPGRLPDTALPTLQNGAAVTDLAWDPFDPHRLAVAGEDARIRLWRVPAEGLEEVLTTPETVLTGHTEKICSLRFHPLAANVLASSSYDLTVRIWDLQAGADRLKLQGHQDQIFSLAWSPDGQQLATVCKDGRVRVYRPRSGPEPLQEGPGPKGGRGARIVWVCDGRCLLVSGFDSQSERQLLLYEAEALAGGPLAVLGLDVAPSTLLPSYDPDTGLVLLTGKGDTRVFLYELLPESPFFLECNSFTSPDPHKGLVLLPKTECDVREVELMRCLRLRQSSLEPVAFRLPRVRKEFFQDDVFPDTAVIWEPVLSAEAWLQGANGQPWLLSLQPPDMSPVSQAPREAPARRAPSSAQYLEEKSDQQKKEELLNAMVAKLGNREDPLPQDSFEGVDEDEWAKYLAQIIVMGVQVVGRAFARALRQEFAASRAAADARGRAGHRSAAASNLSGLSLQEAQQILNVSKLSPEEVQKNYEHLFKVNDKSVGGSFYLQSKVVRAKERLDEELKIQAQEDREKGQMPHT

SEQ ID NO: 21444 - protein, 247 aa, Homo sapiens
MRTEAIARPLEINETEKVMRIAIKEILTQVQKTKDLLNNVASDEANLEAKIEKRKLELERNRKRLETLQSVRPCFMDEYEKTEEELQKQYDTYLEKFQNLTYLEQQLEDHHRMEQERFEEAKNTLCLIQNKLKEEEKRLLKSGSNDDSDIDIQEDDESDSELEERRLPKPQTAMEMLMQGRPGKRIVGTMQGGDSDDNEDSEESEIDMEDDDDEDDDLEDESISLSPTKPNRRVRKSEPLDESDNDF

SEQ ID NO: 21445 - protein, 447 aa, Homo sapiens
MTPQPAGPPDGGWGWVVAAAAFAINGLSYGLLRSLGLAFPDLAEHFDRSAQDTAWISALALAVQQAASPVGSALSTRWGARPVVMVGGVLASLGFVFSAFASDLLHLYLGLGLLAGFGWALVFAPALGTLSRYFSRRRVLAVGLALTGNGASSLLLAPALQLLLDTFGWRGALLLLGAITLHLTPCGALLLPLVLPGDPPAPPRSPLAALGLSLFTRRAFSIFALGTALVGGGYFVPYVHLAPHALDRGLGGYGAALVVAVAAMGDAGARLVCGWLADQGWVPLPRLLAVFGALTGLGLWVVGLVPVVGGEESWGGPLLAAAVAYGLSAGSYAPLVFGVLPGLVGVGGVVQATGLVMMLMSLGGLLGPPLSGFLRDETGDFTASFLLSGSLILSGSFIYIGLPRALPSCGPASPPATPPPETGELLPAPQAVLLSPGGPGSTLDTTC

SEQ ID NO: 21446 - protein, 256 aa, Homo sapiens
MIDHLVTMKISHWDGVIRELAARALHNLAQQAPEFSATQVFPRLLSMTLSPDLHMRHGSILACAEVAYALYKLAAQENRPVTDHLDEQAVQGLKQIHQQLYDRQLYRGLGGQLMRQAVCVLIEKLSLSKMPFRGDTVIDGWQWLINDTLRHLHLISSHSRQQMKDAAVSALAALCSEYYMKEPGEADPAIQEELITQYLAELRNPEEMTRCGFSLALGALPGFLLKGRLQQVLTGLRAVTHTSPEDVSFAESRRDG

SEQ ID NO: 21447 - protein, 176 aa, Homo sapiens
PLEESASRAPSTWEESGLRYDKAYPGDRRLSSVMTIVKSRPFREKQGKILLEGRRLISDALKAGAVPKMFFFSRLEYLKELPVDKLKGVSLIKVKFEDIKDWSDLVTPQGIMGIFAKPDHVKMTYPKTQLQHSLPLLLICDNLRDPGNLGTILRSAAGAGCSKVLLTKGKDIKGQA

SEQ ID NO: 21448 - protein, 745 aa, Homo sapiens
MACRQRGGSWSPSGWFNAGWSTYRSISLFFALVTSGNSIDVSQLVNPAFPGTVTCDEREITVEFPSSPGTKKWHASVVDPLGLDMPNCTYILDPEKLTLRATYDNCTRRVHGGHQMTIRVMNNSAALRHGAVMYQFFCPAMQVEETQGLSASTICQKDFMSFSLPRVFSGLADDSKGTKVQMGWSIEVGDGARAKTLTLPEAMKEGFSLLIDNHRMTFHVPFNATGVTHYVQGNSHLYMVSLKLTFISPGQKVIFSSQAICAPDPVTCNATHMTLTIPEFPGKLKSVSFENQNIDVSQLHDNGIDLEATNGMKLHFSKTLLKTKLSEKCLLHQFYLASLKLTFLLRPETVSMVIYPECLCESPVSIVTGELCTQDGFMDVEVYSYQTQPALDLGTLRVGNSSCQPVFEAQSQGLVRFHIPLNGCGTRYKFEDDKVVYENEIHALWTDFPPSKISRDSEFRMTVKCSYSRNDMLLNINVESLTPPVASVKLGPFTLILQSYPDNSYQQPYGENEYPLVRFLRQPIYMEVRVLNRDDPNIKLVLDDCWATSTMDPDSFPQWNVVVDGCAYDLDNYQTTFHPVGSSVTHPDHYQRFDMKAFAFVSEAHVLSSLVYFHCSALICNRLSPDSPLCSVTCPVSSRHRRATGATEAEKMTVSLPGPILLLSDDSSFRGVGSSDLKASGSSGEKSRSETGEEVGSRGAMDTKGHKTAGDVGSKAVAAVAAFAGVVATLGFIYYLYEKRTVSNH

SEQ ID NO: 21449 - protein, 523 aa, Homo sapiens
MPPCQPQRPLLLLLLLLACQPQVPSAQVMDFLFEKWKLYGDQCHHNLSLLPPPTELVCNRTFDKYSCWPDTPANTTANISCPWYLPWHHKVQHRFVFKRCGPDGQWVRGPRGQPWRDASQCQMDGEEIEVQKEVAKMYSSFQVMYTVGYSLSLGALLLALAILGGLSKLHCTRNAIHANLFASFVLKASSVLVIDGLLRTRYSQKIGDDLSVSTWLSDGVSPPRRPQAGGWVGSQAGGHVAALTLHLYQAVAGCRVAAVFMQYGIVANYCWLLVEGLYLHNLLGLATLPERSFFSLYLGIGWGAPMLFVVPWAVVKCLFENVQCWTSNDNMGFWWILRFPVFLAILINFFIFVRIVQLLVAKLRARQMHHTDYKFRLAKSTLTLIPLLGVHEVVFAFVTDEHAQGTLRSAKLFFDLFLSSFQVPARPPAPPPGAQCATPDHPVSPGPAGGCPLLLPQQGGAVGAAAALAPLAPGQSAMGGAEHQQPQGLIFARPRPSQQGAAVWEGWWQPGFICGDPLGWWPP

SEQ ID NO: 21450 - protein, 234 aa, Homo sapiens
KKPAPAPPKPGNPPPGHPGGQSSSGTSQHPPSLSPKPPTRSPSPPTQHTGQPPGQPSAPSQLSAPRRYSSSLSPIQAPNHPPPQPPTQATPLMHTKPNSQGPPNPMALPSEHGLEQPSHTPPQTPTPPSTPPLGKQNPSLPAPQTLAGGNPETAQPHAGTLPRPRPVPKPRNRPSVPPPPQPPGVHSAGDSSLTNTAPTASKIVTGFQNRIAASFLKCTQTQPAKTCLAASCWI

SEQ ID NO: 21451 - protein, 1105 aa, Homo sapiens
NATSLSNPNPIDPSSMQRAYAALGLPYMNQPQTQLQPQVPGQQPAQPQTHQQMRTLNPLGNNPMNIPAGGITTDQQPPNLISESALPTSLGATNPLMNDGSNSGNIGTLSTIPTAAPPSSTGVRKGWHEHVTQDLRSHLVHKLVQAIFPTPDPAALKDRRMENLVAYAKKVEGDMYESANSRDEYYHLLAEKIYKIQKELEEKRRSRLHKQGILGNQPALPAPGAQPPVIPQAQPVRPPNGPLSLPVNRMQVSQGMNSFNPMSLGNVQLPQAPMGPRAASPMNHSVQMNSMGSVPGMAISPSRMPQPPNMMGAHTNNMMAQAPAQSQFLPQNQFPSSSGAMSVGMGQPPAQTGVSQGQVPGAALPNPLNMLGPQASQLPCPPVTQSPLHPTPPPASTAAGMPSLQHTTPPGMTPPQPAAPTQPSTPVSSSGQTPTPTPGSVPSATQTQSTPTVQAAAQAQVTPQPQTPVQPPSVATPQSSQQQPTPVHAQPPGTPLSQAAASIDNRVPTPSSVASAETNSQQPGPDVPVLEMKTETQAEDTEPDPGESKGEPRSEMMEEDLQGASQVKEETDIAEQKSEPMEVDEKKPEVKVEVKEEEESSSNGTASQSTSPSQPRKKIFKPEELRQALMPTLEALYRQDPESLPFRQPVDPQLLGIPDYFDIVKNPMDLSTIKRKLDTGQYQEPWQYVDDVWLMFNNAWLYNRKTSRVYKFCSKLAEVFEQEIDPVMQSLGYCCGRKYEFSPQTLCCYGKQLCTIPRDAAYYSYQNSSPKYGLLADRYHFCEKCFTEIQGENVTLGDDPSQPQTTISKDQFEKKKNDTLDPEPFVDCKECGRKMHQICVLHYDIIWPSGFVCDNCLKKTGRPRKENKFSAKRLQTTRLGNHLEDRVNKFLRRQNHPEAGEVFVRVVASSDKTVEVKPGMKSRFVDSGEMSESFPYRTKALFAFEEIDGVDVCFFGMHVQEYGSDCPPPNTRRVYISYLDSIHFFRPRCLRTAVYHEILIGYLEYVKKLGYVTGHIWACPPSEGDDYIFHCHPPDQKIPKPKRLQEWYKKMLDKAFAERIIHDYKDIFKQATEDRLTSAKELPYFEGDFWPNVLEESIKELEQEE

SEQ ID NO: 21452 - protein, 327 aa, Homo sapiens
MADVSLHRNPATLKLWNKYRISNIPSLIFLDATTGKVVCRNGLLVIRDDPEGLEFPWGPKPFREVIAGPLLRNNGQSLESSSLEGSHVGVYFSAHWCPPCRSLTRVLVESYRKIKEAGQNFEIIFVSADRSEESFKQYFSEMPWLAVPYTDEARRSRLNRLYGIQGIPTLIMLDPQGEVITRQGRVEVLNDEDCREFPWHPKPVLELSDSNAAQLNEGPCLVLFVDSEDDGESEAAKQLIQPIAEKIIAKYKAKEEEAPLLFFVAGEDDMTDSLRDYTNLPEAAPLLTILDMSARAKYVMDVEEITPAIVEAFVNDFLAEKLKPEPI

SEQ ID NO: 21453 - protein, 62 aa, Homo sapiens
VSPNSIAATEAEARIFWLGLIICPMIWIVFFFSTLFSLKLKWLACPGDFQKPGLEGLEIHQH

SEQ ID NO: 21454 - protein, 72 aa, Homo sapiens
SIRLWTSPTFQWLIPDSADTTATPTHCAYDRIVVAGMLLRGAVVPDSALPFNFQAAYGLSDQLVCVLPCTAT

SEQ ID NO: 21455 - protein, 64 aa, Homo sapiens
TFQWLIPDSADTTATPTHCAYDRIVVAGMLLRGAVVPDSALPFNFQAAYGLSDQLVCVLPCTAT

SEQ ID NO: 21456 - protein, 109 aa, Homo sapiens
MIDHLVTMKISHWDGVIRELAARALHNLAQQAPEFSATQVFPRLLSMTLSPDLHMRHGSILACAEVAYALYKLAAQENRPVTDHLDEQAVQGLKQIHQQLYDRQLYRGL

SEQ ID NO: 21457 - protein, 486 aa, Homo sapiens
MRALVLLGCLLASLLFSGQAELQVSASGGTEDVGNLLENHFSAGDASLEEKERALYADTAPQDKKLLLHYPDGREAESPKKTPASAASAGPDPEASLSNASATESPPPGERDDRDAAGPGEEKNGPPVASALPPGGAKGPVEEEWPEPSSGEGQGEEETGFGLPTEGTASGEAGGQAGGHELPEEVQEVQGDSLVQGAVAGTAEPKAEGASPHSEGDGVGPLNAEAEGSPGPGEEPAVPEGAPDVAAVGGESEPDIDTQASEGTEDQGEPGPAAEASAEPGGAQSVKAGDTEENQSPEMTEEDADEASSEEESGDGSGSEEEGGVPSEEESEEDSGDGASSEEAEGASEEATEPQEAGEPQEAREPQEGGDLQEAEESQEGGDPQEAEEPQEGGAPQEGGEPQEGGDPQEAREPQEAREPQEGAELPEATGTTSHRDRGAQPGPEELNTESMGSETLDMKAEEPEEGHQGEGESHHCCPGRDGGCK

SEQ ID NO: 21458 - protein, 164 aa, Homo sapiens
MKRSLNENSARSTAGCLPVPLFNQKKRNRQPLTSNPLKDDSGISTPSDNYDFPPLPTDWAWEAVNPELAPVMKTVDTGQIPHSVSRPLRSQDSVFNSIQSNTGRSQGGWSYRDGNKNTSLKTWNKNDFKPQCKRTNLVANDGKNSCPVSSGAQQQKQLRIPEPP

SEQ ID NO: 21459 - protein, 1018 aa, Homo sapiens
MYNGIGLPTPRGSGTNGYVQRNLSLVRGRRGERPDYKGEEELRRLEAALVKRPNPDILDHERKRRVELRCLELEEMMEEQGYEEQQIQEKVATFRLMLLEKDVNPGGKEETPGQRPAVTETHQLAELNEKKNERLRAAFGISDSYVDGSSFDPQRRAREAKQPAPEPPKPYSLVRESSSSRSPTPKQKKKKKKKDRGRRSESSSPRRERKKSSKKKKHRSESESKKRKHRSPTPKSKRKSKDKKRKRSRSTTPAPKSRRAHRSTSADSASSSDTSRSRSRSAAAKTHTTALAGRSPSPASGRRGEGDAPFSEPGTTSTQRPSSPETATKQPSSPYEDKDKDKKEKSATRPSPSPERSSTGPEPPAPTPLLAERHGGSPQPLATTPLSQEPVNPPSEASPTRDRSPPKSPEKLPQSSSSESSPPSPQPTKVSRHASSSPESPKPAPAPGSHREISSSPTSKNRSHGRAKRDKSHSHTPSRRMGRSRSPATAKRGRSRSRTPTKRGHSRSRSPQWRRSRSAQRWGRSRSPQRRGRSRSPQRPGWSRSRNTQRRGRSRSARRGRSHSRSPATRGRSRSRTPARRGRSRSRTPARRRSRSRTPTRRRSRSRTPARRGRSRSRTPARRRSRTRSPVRRRSRSRSPARRSGRSRSRTPARRGRSRSRTPARRGRSRSRTPARRSGRSRSRTPARRGRSRSRTPRRGRSRSRSLVRRGRSHSRTPQRRGRSGSSSERKNKSRTSQRRSRSNSSPEMKKSRISSRRSRSLSSPRSKAKSRLSLRRSLSGSSPCPKQKSQTPPRRSRSGSSQPKAKSRTPPRRSRSSSSPPPKQKSKTPSRQSHSSSSPHPKVKSGTPPRQGSITSPQANEQSVTPQRRSCFESSPDPELKSRTPSRHSCSGSSPPRVKSSTPPRQSPSRSSSPQPKVKAIISPRQRSHSGSSSPSPSRVTSRTTPRRSRSVSPCSNVESRLLPRYSHSGSSSPDTKVKPETPPRQSHSGSISPYPKVKAQTPPGPSLSGSKSPCPQ

SEQ ID NO: 21460 - protein, 119 aa, Homo sapiens
MSKISEAVKRARAAFSSGRTRPLQFRIQQLEALQRLIQEQEQELVGALAADLHKNEWNAYYEEVVYVLEEIEYMIQKLPEWAADEPVEKTPQTQQDELYIHSEPLGVVLVIGTWNYPFN

SEQ ID NO: 21461 - protein, 260 aa, Homo sapiens
DEDIKKIQTQISSGMTNNASLLQNYLKTWDMYREIWEINKDSFIHRYQRLNPPVSSFVADIARYTEVANNVQKEETVTNIQFVLLDCSHLKFSLVQHCNEWQNKFATLLREMAAGRLLELHTYLKENAEKISRPPQTLEELGVSLQLVDALKHDLANVETQIPPIHEQFAILEKYEVPVEDSVLEMLDSLNGEWVVFQQTLLDSKQMLKKHKEKFKTGLIHSADDFKKKAHTLLEDFEFKGARCPPANLGDRTRLGGELE

SEQ ID NO: 21462 - protein, 1041 aa, Homo sapiens
MAAMAPALTDAAAEAHHIRFKLAPPSSTLSPGSAENNGNANILIAANGTKRKAIAAEDPSLDFRNNPTKEDLGKLQPLVASYLCSDVTSVPSKESLKLQGVFSKQTVLKSHPLLSQSYELRAELLGRQPVLEFSLENLRTMNTSGQTALPQAPVNGLAKKLTKSSTHSDHDNSTSLNGGKRALTSSALHGGEMGGSESGDLKGGMTNCTLPHRSLDVEHTTLYSNNSTANKSSVNSMEQPALQGSSRLSPGTDSSSNLGGVKLEGKKSPLSSILFSALDSDTRITALLRRQADIESRARRLQKRLQVVQAKQVERHIQHQLGGFLEKTLSKLPNLESLRPRSQLMLTRKAEAALRKAASETTTSEGLSNFLKSNSISEELERFTASGIANLRCSEQAFDSDVTDSSSGGESDIEEEELTRADPEQRHVPLRRRSEWKWAADRAAIVSRWNWLQAHVSDLEYRIRQQTDIYKQIRANKGLIVLGEVPPPEHTTDLFLPLSSEVKTDHGTDKLIESVSQPLENHGAPIIGHISESLSTKSCGALRPVNGVINTLQPVLADHIPGDSSDAEEQLHKKQRLNLVSSSSDGTCVAARTRPVLSCKKRRLVRPNSIVPLSKKVHRNSTIRPGCDVNPSCALCGSGSINTMPPEIHYEAPLLERLSQLDSCVHPVLAFPDDVPTSLHFQSMLKSQWQNKPFDKIKPPKKLSLKHRAPMPGSLPDSARKDRHKLVSSFLTTAMLKHHTDMSSSSYLAATHHPPHSPLVRQLSTSSDSPAPASSSSQVTASTSQPVRRRRGESSFDINNIVIPMSVAATTRVEKLQYKEILTPSWREVDLQSLKGSPDEENEEIEDLSDAAFAALHAKCEEMERARWLWTTSVPPQRRGSRSYRSSDGRTTPQLGSANPSTPQPASPDVSSSHSLSEYSHGQSPRSPISPELHSAPLTPVARDTPRHLASEDTRCSTPELGLDEQSVQPWERRTFPLAHSPQAECEDQLDAQERAARCTRRTSGSKTGRETEAAPTSPPIVPLKSRHLVAAATAQRPTHR

SEQ ID NO: 21463 - protein, 435 aa, Homo sapiens
MEPPGPVRGPLQDSSWYEPSAELVQTRMAVSLTAAETLALQGTQGQEKMMMMGPKEEEQSCEYETRLPGNHSTSQEIFRQRFRHLRYQETPGPREALSQLRVLCCEWLRPEKHTKEQILEFLVLEQFLTILPEELQSWVRGHHPKSGEEAVTVLEDLEKGLEPEPQVPGPAHGPAQEEPWEKKESLGAAQEALSIQLQPKETQPFPKSVVTEDGPEPKDKGSLPQPPITEVESQVFSEKLATDTSTFEATSEGTLELQQRNPKAERLRWSPAQEESFRQMVVIHKEIPTGKKDHECSECGKTFIYNSHLVVHQRVHSGEKPYKCSDCGKTFKQSSNLGQHQRIHTGEKPFECNECGKAFRWGAHLVQHQRIHSGEKPYECNECGKAFSQSSYLSQHRRIHSGEKPFICKECGKAYGWCSELIRHRRVHARKEPSH

SEQ ID NO: 21464 - protein, 158 aa, Homo sapiens
MTPGALLMLLGALGAPLAPGVRGSEAEGRLREKLFSGYDSSVRPAREVGDRVRVSVGLILAQLISLNEKDEEMSTKVYLDLAVLECGGSSHPPASGGTSTSAEITAEWTDYRLSWDPAEHDGIDSLRITAESVWLPDVVLLNNNDGNFDVALDISVVV

SEQ ID NO: 21465 - protein, 1037 aa, Homo sapiens
MTTSRGSVGWTTGSAPSWMTRTEELDIRPKVSSLLGKLVSYTNLTQGAKEHEEAESGEGTRRRAAEAPSMGTLMGVYLPCLQNIFGVILFLRLTWMVGTAGVLQALLIVLICCCCTLLTAISMSAIATNGVVPAGGSYFMISRSLGPEFGGAVGLCFYLGTTFAAAMYILGAIEILLTYIAPPAAIFYPSGAHDTSNATLNNMRVYGTIFLTFMTLVVFVGVKYVNKFASLFLACVIISILSIYAGGIKSIFDPPVFPVCMLGNRTLSRDQFDICAKTAVVDNETVATQLWSFFCHSPNLTTDSCDPYFMLNNVTEIPGIPGAAAGVLQENLWSAYLEKGDIVEKHGLPSADAPSLKESLPLYVVADIATSFTVLVGIFFPSVTGIMAGSNRSGDLRDAQKSIPVGTILAIITTSLVYFSSVVLFGACIEGVVLRDKYGDGVSRNLVVGTLAWPSPWVIVIGSFFSTCGAGLQSLTGAPRLLQAIAKDNIIPFLRVFGHGKVNGEPTWALLLTALIAELGILIASLDMVAPILSMFFLMCYLFVNLACAVQTLLRTPNWRPRFKYYHWALSFLGMSLCLALMFVSSWYYALVAMLIAGMIYKYIEYQGAEKEWGDGIRGLSLSAARYALLRLEEGPPHTKNWRPQLLVLLKLDEDLHVKYPRLLTFASQLKAGKGLTIVGSVIQGSFLESYGEAQAAEQTIKNMMEIEKVKGFCQVVVASKVREGLAHLIQSCGLGGMRHNSVVLGWPYGWRQSEDPRAWKTFIDTVRCTTAAHLALLVPKNIAFYPSNHERYLEGHIDVWWIVHDGGMLMLLPFLLRQHKVWRKCRMRIFTVAQMDDNSIQMKKDLAVFLYHLRLEAEVEVVEMHNSDISAYTYERTLMMEQRSQMLRQMRLTKTEREREAQLVKDRHSALRLESLYSDEEDESAVGADKIQMTWTRDKYMTETWDPSHAPDNFRELVHIKPDQSNVRRMHTAVKLNEVIVTRSHDARLVLLNMPGPPRNSEGDENYMEFLEVLTEGLERVLLVRGGGREVITIYS

SEQ ID NO: 21466 - protein, 241 aa, Homo sapiens
MEEEIAALVIDNGSGMCKAGFAGDDAPRAVFPSIVGRPRHQDSYVGDEAQSKRGILTLKYPIEHGIVTNWDDMEKIWHHTFYNELRVAPEEHPVLLTEAPLNPKANREKMTQIMFETFNTPAMYVAIQAVLSLYASGRTTGIVMDSGDGVTHTVPIYEGYALPHAILRLDLAGRDLTDYLMKILTERGYSFTTTAEREIVRDIKEKLCYVALDFEQEMATAASSSSLEKSYELPDGQVITI

SEQ ID NO: 21467 - protein, 573 aa, Homo sapiens
MGPLQFRDVAIEFSLEEWHCLDMAQRNLYRDVMLENYRNLVFLGIVVSKPDLITHLEQGKKPSTMQRHEMVANPSVLCSHFNQDLWPEQSIKDSFQKLILRRHKKCGHDNLQLKKGCESVDKCKVHKRGYNGLNQCLTTTQSKMFQCDKHGKVFHQFSNTNRHKIRHTGKNPCKFTECGKAFNRSSTFTTHKKIHTGEKPYKCIECGKAFNRSSHLTTHKIIHTGEKRYKCEDCGKAFNRSSNLTTHKKIHTGEKPYKCEECGKAFKRSSILTTHKRIHTGEKPYKCEECGKVFKYLSSLSTHKIIHTGEKPYKCEECGKAFNWSSHLTTHKRIHTGEKPYKCEECGKGFKYSSTLTKHKIIHTGEKPYKCEECGEAFKYSCSLTAHKIIHTGKKPYKCEECGKVFKHSSPLSKHKRIHTGEKPYKCEECGKAFSRSSILTTHKIIHTGEKPYECEDCGKAFNRSSNLTKHKKIHTGEKPYKCEECGKAFKCSSILTTHKRIHTADKPYKCEECGKDFKYSSTLTRHKKIHTGGKPHKCNKCGKAFISSSNLSRHEIIHMGGNPYKCENVAKP

SEQ ID NO: 21468 - protein, 236 aa, Homo sapiens
QSAFLGPTLWDKTLPYDGDTFQLEYMDLEEFLSENGIPPSPSQHDHSPHPPGLQPASSAAPSVMDLSSRASAPLHPGIPSPNCMQSPIRPGQLLPANRNTPSPIDPDTIQVPVGYEPDPADLALSSIPGQEMFDPRKRKFSEEELKPQPMIKKARKVFIPDDLKQDDKYWARRRKNNMAAKRSRDARRLKENQIAIRASFLEKENSALRQEVADLRKELGKCKNILAKYEARHGPL

SEQ ID NO: 21469 - protein, 209 aa, Homo sapiens
MARMMRTRGMMMHNEDNSCLPVPLFNQKKRNRQPLTSNPLKDDSDWAWEAVNPELAPVMKTVDTGQIPHSVSRPLRSQDSVFNSIQSNTGRSQGGWSYRDGNKNTSLKTWNKNDFKPQCKRTNLVANDGKNSCPVSSGAQQQKQLRIPEPPNLSRNKETELLRQTHSSKISGCTMRGLDKNSALQTLKPNFQQNQYKKQMLDDIPEDNT

SEQ ID NO: 21470 - protein, 790 aa, Homo sapiens
MKAHPKEMVPLMGKRVAAPSGNPAILPEKRPAEITPTKKSAHFFLEIEGFEPNPTVAKTSPPVFSKPMDSNIRQCISGNCDDMDSPQSPQDDVTETPSNPNSPSAQLAKEEQRRKKRRLKKRIFAAVSEGCVEELVELLVELQELCRRRHDEDVPDFLMHKLTASDTGKTCLMKALLNINPNTKEIVRILLAFAEENDILGRFINAEYTEEAYEGQTALNIAIERRQGDIAALLIAAGADVNAHAKGAFFNPKYQHEGFYFGETPLALAACTNQPEIVQLLMEHEQTDITSRDSRGNNILHALVTVAEDFKTQNDFVKRMYDMILLRSGNWELETTRNNDGLTPLQLAAKMGKAEILKYILSREIKEKRLRSLSRKFTDWAYGPVSSSLYDLTNVDTTTDNSVLEITVYNTNIDNRHEMLTLEPLHTLLHMKWKKFAKHMFFLSFCFYFFYNITLTLVSYYRPREEEAIPHPLALTHKMGWLQLLGRMFVLIWAMCISVKEGIAIFLLRPSDLQSILSDAWFHFVFFIQAVLVILSVFLYLFAYKEYLACLVLAMALGWANMLYYTRGFQSMGMYSVMIQKVILHDVLKFLFVYIVFLLGFGVALASLIEKCPKDNKDCSSYGSFSDAVLELFKLTIGLGDLNIQQNSKYPILFLFLLITYVILTFVLLLNMLIALMGETVENVSKESERIWRLQRARTILEFEKMLPEWLRSRFRMGELCKVAEDDFRLCLRINEVKWTEWKTHVSFLNEDPGPVRRTDFNKIQDSSRNNSKTTLNAFEEVEEFPETSV

SEQ ID NO: 21471 - protein, 392 aa, Homo sapiens
MKQVAPDKTCMQFSIRRPKLPSSETHPEESMYKRLGVSAWLNHLNELGQVEEEYKLRKVWPFLLRYYSHESTSEEREALRLQKRKEYSEIQQKRLSMTPEEHRAFWRNVQFTVDKDVVRTDRNNQFFRGEDNPNVESMRRILLNYAVYNPAVGYSQGMSDLVAPILAEVLDESDTFWCFVGLMQNTIFVSSPRDEDMEKQLLYLRELLRLTHVRFYQHLVSLGEDGLQMLFCHRWLLLCFKREFPEAEALRIWEACWAHYQTDYFHLFICVAIVAIYGDDVIEQQLATDQMLLHFGNLAMHMNGELVLRKARSLLYQFRLLPRIPCSLHDLCKLCGSGMWDSGSMPAVECTGHHPGSESCPYGGTVEMPSPKSLREGKKGPKTPQDGFGFRR

SEQ ID NO: 21472 - protein, 871 aa, Homo sapiens
MAAGGRRRRPLRYQSLAALVEDSQWPFLFLVSDFSYGTDEYDGEGNEEQKGPPEGSETMPYIDESPTMSPQLSARSQGGGDGVSPTPPEGLAPGVEAGKGLEMRKLVLSGFLASEEIYINQLEALLLPMKPLKATATTSQPVLTIQQIETIFYKIQDIYEIHKEFYDNLCPKVQQWDSQVTMGHLFQKLASQLGVYKAFVDNYKVALETAEKCSQSNNQFQKISEELKVKGPKDSKDSHTSVTMEALLYKPIDRVTRSTLVLHDLLKHTPVDHPDYPLLQDALRISQNFLSSINEDIDPRRTAVTTPKGETRQLVKDGFLVEVSESSRKLRHVFLFTDVLLCAKLKKTSAGKHQQYDCKWYIPLADLVFPSPEESEASPQVHPFPDHELEDMKMKISALKSEIQKEKANKGQSRAIERLKKKMFENEFLLLLNSPTIPFRIHNRNGKSYLFLLSSDYERSEWREAIQKLQKKDLQAFVLSSVELQVLTGSCFKLRTVHNIPVTSNKDDDESPGLYGFLHVIVHSAKGFKQSANLYCTLEVDSFGYFVSKAKTRVFRDTAEPKWDEEFEIELEGSQSLRILCYEKCYDKTKVNKDNNEIVDKIMGKGQIQLDPQTVETKNWHTDVIEMNGIKVEFSMKFTSRDMSLKRTPSKKQTGVFGVKISVVTKRERSKVPYIVRQCVEEVEKRGIEEVGIYRISGVATDIQALKAVFDANNKDILLMLSDMDINAIAGTLKLYFRELPEPLLTDRLYPAFMEGIALSDPAAKENCMMHLLRSLPDPNLITFLFLLEHLKRVAEKEPINKMSLHNLATVFGPTLLRPSEVESKAHLTSAADIWSHDVMAQVQVLLYYLQHPPISFAELKRNTLYFSTDV

SEQ ID NO: 21473 - protein, 786 aa, Homo sapiens
MDMVENADSLQAQERKDILMKYDKGHRAGLPEDKGPEPVGINSSIDRFGILHETELPPVTAREAKKIRREMTRTSKWMEMLGEWETYKHSSKLIDRVYKGIPMNIRGPVWSVLLNIQEIKLKNPGRYQIMKERGKRSSEHIHHIDLDVRTTLRNHVFFRDRYGAKQRELFYILLAYSEYNPEVGYCRDLSHITALFLLYLPEEDAFWALVQLLASERHSLPGFHSPNGGTVQGLQDQQEHVVPKSQPKTMWHQDKEGLCGQCASLGCLLRNLIDGISLGLTLRLWDVYLVEGEQVLMPITSIALKVQQKRLMKTSRCGLWARLRNQFFDTWAMNDDTVLKHLRASTKKLTRKQGDLPPPAKREQGSLAPRPVPASRGGKTLCKGYRQAPPGPPAQFQRPICSASPPWASRFSTPCPGGAVREDTYPVGTQGVPSLALAQGGPQGSWRFLEWKSMPRLPTDLDIGGPWFPHYDFEWSCWVRAISQEDQLATCWQAEHCGEVHNKDMSWPEEMSFTANSSKIDRQKVPTEKGATGLSNLGNTCFMNSSIQCVSNTQPLTQYFISGRHLYELNRTNPIGMKGHMAKCYGDLVQELWSGTQKSVAPLKLRRTIAKYAPKFDGFQQQDSQELLAFLLDGLHEDLNRVHEKPYVELKDSDGRPDWEVAAEAWDNHLRRNRSIIVDLFHGQLRSQVKCKTCGHISVRFDPFNFLSLPLPMDSYMDLEITVIKLDGTTPVRYGLRLNMDEKYTGLKKQLRDLCGLNSEQILLAEVHDSNIKISPLHHLQMECSP

SEQ ID NO: 21474 - protein, 556 aa, Homo sapiens
MASKPAAGKSRGEKRKRVVLTLKEKIDICTRLEKGESRKALMQEYNVGMSTLYDIRAHKAQLLRFFASSDSNKALEQRRTLHTPKLEHLDRVLYEWFLGKRSEGVPVSGPMLIEKAKDFYEQMQLTEPCVFSGGWLWRFKARHGIKKLDASSEKQSADHQAAEQFCAFFRSLAAEHGLSAEQVYNADETGLFWRCLPNPTPEGGAVPGPKQGKDRLTVLMCANATGSHRLKPLAIGKCSGPRAFKGIQHLPVAYKAQGNAWVDKEIFSDWFHHIFVPSVREHFRTIGLPEDSKAVLLLDSSRAHPQEAELVSSNVFTIFLPASVASLVQPMEQGIRRDFMRNFINPPVPLQGPHARYNMNDAIFSVACAWNAVPSHVFRRAWRKLWPSVAFAEGSSSEEELEAECFPVKPHNKSFAHILELVKEGSSCPGQLRQRQAASWGVAGREAEGGRPPAATSPAEVVWSSEKTPKADQDGRGDPGEGEEVAWEQAAVAFDAVLRFAERQPCFSAQEVGQLRALRAVFRSQQQETVGLEDVVVTSPEELAIPKCCLEASTET

SEQ ID NO: 21475 - protein, 1439 aa, Homo sapiens
APVFLVSPTLLGITMLLATFLIQLERRKGVQSSGIMLTFWLVALVCALAILRSKIMTALKEDAQVDLFRDITFYVYFSLLLIQLVLSCFSDRSPLFSETIHDPNPCPESSASFLSRITFWWITGLIVRGYRQPLEGSDLWSLNKEDTSEQVVPVLVKNWKKECAKTRKQPVKVVYSSKDPAQPKESSKVDANEEVEALIVKSPQKEWNPSLFKVLYKTFGPYFLMSFFFKAIHDLMMFSGPQILKLLIKFVNDTKAPDWQGYFYTVLLFVTACLQTLVLHQYFHICFVSGMRIKTAVIGAVYRKALVITNSARKSSTVGEIVNLMSVDAQRFMDLATYINMIWSAPLQVILALYLLWLNLGPSVLAGVAVMVLMVPVNAVMAMKTKTYQVAHMKSKDNRIKLMNEILNGIKVLKLYAWELAFKDKVLAIRQEELKVLKKSAYLSAVGTFTWVCTPFLVALCTFAVYVTIDENNILDAQTAFVSLALFNILRFPLNILPMVISSIVQASVSLKRLRIFLSHEELEPDSIERRPVKDGGGTNSITVRNATFTWARSDPPTLNGITFSIPEGALVAVVGQVGCGKSSLLSALLAEMDKVEGHVAIKGSVAYVPQQAWIQNDSLRENILFGCQLEEPYYRSVIQACALLPDLEILPSGDRTEIGEKGVNLSGGQKQRVSLARAVYSNADIYLFDDPLSAVDAHVGKHIFENVIGPKGMLKNKTRILVTHSMSYLPQVDVIIVMSGGKISEMGSYQELLARDGAFAEFLRTYASTEQEQDAEENGSTVMDEEEAGVTGVSGPGKEAKQMENGMLVTDSAGKQLQRQLSSSSSYSGDISRHHNSTAELQKAEAKKEETWKLMEADKAQTGQVKLSVYWDYMKAIGLFISFLSIFLFMCNHVSALASNYWLSLWTDDPIVNGTQEHTKVRLSVYGALGISQGIAVFGYSMAVSIGGILASRCLHVDLLHSILRSPMSFFERTPSGNLVNRFSKELDTVDSMIPEVIKMFMGSLFNVIGACIVILLATPIAAIIIPPLGLIYFFVQRFYVASSRQLKRLESVSRSPVYSHFNETLLGVSVIRAFEEQERFIHQSDLKVDENQKAYYPSIVANRWLAVRLECVGNCIVLFAALFAVISRHSLSAGLVGLSVSYSLQVTTYLNWLVRMSSEMETNIVAVERLKEYSETEKEAPWQIQETAPPSSWPQVGRVEFRNYCLRYREDLDFVLRHINVTINGGEKVGIVGRTGAGKSSLTLGLFRINESAEGEIIIDGINIAKIGLHDLRFKITIIPQDPVLFSGSLRMNLDPFSQYSDEEVWTSLELAHLKDFVSALPDKLDHECAEGGENLSVGQRQLVCLARALLRKTKILVLDEATAAVDLETDDLIQSTIRTQFEDCTVLTIAHRLNTIMDYTRVIVLDKGEIQEYGAPSDLLQQRGLFYSMAKDAGLV

SEQ ID NO: 21476 - protein, 233 aa, Homo sapiens
MDLQNDLGQTALHLAAILGETSTVEKLYAAGAGLCVAERRGHTALHLACRVGAHACARALLQPRPRRPREAPDTYLAQGPDRTPDTNHTPVALYPDSDLEKEEEESEEDWKLQLEAENYEGHTPLHVAVIHKDVEMVRLLRDAGADLDKPEPTCGRSPLHLAVEAQAADVLELLLRAGANPAARMYGGRTPLGSAMLRPNPILARLLRAHGAPEPEGEDEKSGPCSSSSDSDS

SEQ ID NO: 21477 - protein, 645 aa, Homo sapiens
MRQEVCLTSFHLNWGYSDRHDMTQGLGIDADLGVRTSTPPSSARNTFMRVCVAQGWPRDPSLTSMPVFFSAGSTSSSLCEHWVSRLPGSKPASVTSAASSRRTSLASLSESVEMTGERSEDDGGFSTRPFVRSVQRQSLSSRSSVTSPLAVNENCMRPSWSLSAKLQMRSNSPSRFSGDSPIHSSASTLEKIGEAADDKVSISCFGSLRNLSSSYQEPSDSHSRREHKAVGRAPLAVMEGVFKDESDTRRLNSSVVDTQSKHSAQGDRLPPLSGPFDNNNQIAYVDQSDSVDSSPVKEVKAPSHPGSLAKKPESTTKRSPSSKGTSEPEKSLRKGRPALASQESSLSSTSPSSPLPVKVSLKPSRSRSKADSSSRGSGRHSSPAPAQPKKESSPKSQDSVSSPSPQKQKSASALTYTASSTSAKKASGPATRSPFPPGKSRTSDHSLSREGSRQSLGSDRASATSTSKPNSPRVSQARAGEGRGAGKHVRSSSMASLRSPSTSIKSGLKRDSKSEDKGLSFFKSALRQKETRRSTDLGKTALLSKKAGGSSVKSVCKNTGDDEAERGHQPPASQQPNANTTGKEQLVTKDPASAKHSLLSARKSKSSQLDSGVPSSPGGRQSAEKSSKKLSSSMQTSARPSQKPQ

SEQ ID NO: 21478 - protein, 259 aa, Homo sapiens
MPALLERPKLSNAMARALHRHIMMERERKRQEEEEVDKMMEQKMKEEQERRKKKEMEERMSLEETKEQILKLEEKLLALQEEKHQLFLQLKKVLHEEEKRRRKEQSDLTTLTSAAYQQSLTVHTGTHLLSMQGSPGGHNRPGTLMAADRAKQMFGPQVLTTRHYVGSAAAFAGTPEHGQFQGSPGGAYGTAQPPPHYGPTQPAYSPSQQLRAPSAFPAVQYLSQPQPQPYAVHGHFQPTQTGFLQPGGALSLQKQMEHA

SEQ ID NO: 21479 - protein, 176 aa, Homo sapiens
MELALRRSPVPRWLLLLPLLLGLNAGAVIDWPTEEGKEVWDYVTVRKDAYMFWWLYYATNSCKNFSELPLVMWLQLQAASLLFVDNPVGTGFSYVNGSGAYAKDLAMVASDMMVLLKTFFSCHKEFQTVPFYIFSESYGGKMAAGIGLELYKAIQRGTIKCNFAGVALGDSWISPV

SEQ ID NO: 21480 - protein, 251 aa, Homo sapiens
MGLRPMEGTFPHGIDILTTADYFAVGNRSNCFLVIRVIRELAARALHNLAQQAPEFSATQVFPRLLSMTLSPDLHMRHGSILACAEVAYALYKLAAQENRPVTDHLDEQAVQGLKQIHQQLYDRQLYRGLGGQLMRQAVCVLIEKLSLSKMPFRGDTVIDGWQWLINDTLRHLHLISSHSRQQMKDAAVSALAALCSEYYMKEPGEADPAIQEELITQYLAELRNPEEMTRCGFSLALGALPGFLLKGRLQ

SEQ ID NO: 21481 - protein, 95 aa, Homo sapiens
MVASDMMVLLKTFFSCHKEFQTVPFYIFSESYGGKMAAGIGLELYKAIQRGTIKCNFAGVALGDSWISPVDSVLSWGPYLYSMSLLEDKGLAEVS

SEQ ID NO: 21482 - protein, 840 aa, Homo sapiens
MNRFRVSKFRHTEARPPRRESWISDIRAGTAPSCRNHIKSSCSLIAFNSDRPGVLGIVPLQGQGEDKRRVAHLGCHSELAAHGDLVQSAVWSRDGALVGTACKDKQLRIFDPRTKPRASQSTQAHENSRDSRLAWMGTWEHLVSTGFNQMREREVKLWDTRFFSSALASLTLDTSLGCLVPLLDPDSGLLVLAGKGERQLYCYEVVPQQPALSPVTQCVLESVLRGAALVPRQALAVMSCEVLRVLQLSDTAIVPIGYHVPRKAVEFHEDLFPDTAGCVPATDPHSWWAGDNQQVQKVSLNPACRPHPSFTSCLVPPAEPLPDTAQPAVMETPVGDADASEGFSSPPSSLTSPSTPSSLGPSLSSTSGIGTSPSLRSLQSLLGPSSKFRHAQGTVLHRDSHITNLKGLNLTTPGESDGFCANKLRVAVPLLSSGGQVAVLELRKPGRLPDTALPTLQNGAAVTDLAWDPFDPHRLAVAGEDARIRLWRVPAEGLEEVLTTPETVLTGHTEKICSLRFHPLAANVLASSSYDLTVRIWDLQAGADRLKLQGHQDQIFSLAWSPDGQQLATVCKDGRVRVYRPRSGPEPLQEGPGPKGGRGARIVWVCDGRCLLVSGFDSQSERQLLLYEAEALAGGPLAVLGLDVAPSTLLPSYDPDTGLVLLTGKGDTRVFLYELLPESPFFLECNSFTSPDPHKGLVLLPKTECDVREVELMRCLRLRQSSLEPVAFRLPRVRKEFFQDDVFPDTAVIWEPVLSAEAWLQGANGQPWLLSLQPPDMSPVSQAPREAPARRAPSSAQYLEEKSDQQKKEELLNAMVAKLGNREDPLPQDSFEGVDEDEWD

SEQ ID NO: 21483 - protein, 1158 aa, Homo sapiens
KIDETREKVQVMSLELEDAKKKVAEFQKQCEEYLVIIVQQKREADEQQKALESLNKKDIGEIKSYGRPPAQVEIVMQAVMILRGNEPTWAEAKRQLGEQNFIKSLINFDKDNISDKVLKKIGAYCAQPDFQPDIIGRVSLAAKSLCMWVRAMELYGRLYRVVEPKRIRMNAALAQLREKQAALAEAQEKLREVAEKLEMLKKQYDEKLAQKEELRKKSEEMELKLERAGMLVSGLAGEKARWEETVQGLEEDLGYLVGDCLLAAAFLSYMGPFLTNYRDEIVNQIWIGKIWELQVPCSPSFAIDNFLCNPTKVRDWNIQGLPSDAFSTENGIIVTRGNRWALMIDPQAQALKWIKNMEGGQGLKIIDLQMSDYLRILEHAIHFGYPVLLQNVQEYLDPTLNPMLNKSVARIGGRLLMRIGDKEVEYNTNFRFYITTKLSNPHYSPETSAKTTIVNFAVKEQGLEAQLLGIVVRKERPELEEQKDSLVINIAAGKRKLKELEDEILRLLNEATGSLLDDVQLVNTLHTSKITATEVTEQLETSETTEINTDLAREAYRPCAQRASILFFVLNDMGCIDPMYQFSLDAYISLFILSIDKSHRSNKLEDRIDYLNDYHTYAVYRYTCRTLFERHKLLFSFHMCAKILETSGKLNMDEYNFFLRGGVVLDREGQMDNPCSSWLADAYWDNITELDKLTNFHGLMNSFEQYPRDWHLWYTNAAPEKAMLPGEWENACNEMQRMLIVRSLRQDRVAFCVTSFIITNLGSRFIEPPVLNMKSVLEDSTPRSPLVFILSPGVDPTSALLQLAEHMGMAQRFHALSLGQGQAPIAARLLREGVTQGHWVFLANCHLSLSWMPNLDKLVEQLQVEDPHPSFRLWLSSIPHPDFPISILQVSIKMTTEPPKGLKANMTRLYQLMSEPQFSRCSKPAKYKKLLFSLCFFHSVLLERKKFLQLGWNIIYGFNDSDFEVSENLLSLYLDEYEETPWDALKYLIAGINYGGHVTDDWDRRLLTTYINDYFCDQSLSTPFHRLSALETYFIPKDGSLASYKEYISLLPGMDPPEAFGQHPNADVASQITEAQTLFDTLLSLQPQITPTRAGGQTREEKVLELAADVKQKIPEMIDYEGTQKLLALDPSPLNVVLLQEIQRYNTLMQTILFSLTD

SEQ ID NO: 21484 - protein, 477 aa, Homo sapiens
MSSQPAGNQTSPGATEDYSYGSWYIDEPQGGEELQPEGEVPSCHTSIPPGLYHACLASLSILVLLLLAMLVRRRQLWPDCVRGRPGLPSPVDFLAGDRPRAVPAAVFMVLLSSLCLLLPDEDALPFLTLASAPSQDGKTEAPRGAWKILGLFYYAALYYPLAACATAGHTAAHLLGSTLSWAHLGVQVWQRAECPQVPKIYKYYSLLASLPLLLGLGFLSLWYPVQLVRSFSRRTGAGSKGLQSSYSEEYLRNLLCRKKLGSRMAAVEDWLLLPRILVIKRDNYQLGTAGRPWPGLGHLGSCWPFSWAPWEGGGLPGLSGAVHHTPSFEDYRIPSPAEAGAFSYTDRDGHLPGGPAAAGGRGTHYPEGEGRGHHGCLLPAGRLWNRALRGQAGGGGAGEAPSVGSGSVLHLSLGLVLLTHLPGPDALTGDTQDQPSSSAPRSCPGLESLASESPSLPPSHILLDELQCLPDSLYLPW

SEQ ID NO: 21485 - protein, 740 aa, Homo sapiens
MGELCRRDSALTALDEETLWEMMESHRHRIVRCICPSRLTPYLRQAKVLCQLDEEEVLHSPRLTNSAMRAGHLLDLLKTRGKNGAIAFLESLKFHNPDVYTLVTGLQPDVDFSNFSGLMETSKLTECLAGAIGSLQEELNQEKGQKEVLLRRCQQLQEHLGLAETRAEGLHQLEADHSRMKREVSAHFHEVLRLKDEMLSLSLHYSNALQEKELAASRCRSLQEELYLLKQELQRANMVSSCELELQEQSLRTASDQESGDEELNRLKEENEKLRSLTFSLAEKDILEQSLDEARGSRQELVERIHSLRERAVAAERQREQYWEEKEQTLLQFQKSKMACQLYREKVNALQAQVCELQKERDQAYSARDSAQREISQSLVEKDSLRRQVFELTDQVCELRTQLRQLQAEPPGVLKQEARTREPCPREKQRLVRMHAICPRDDSDCSLVSSTESQLLSDLSATSSRELVDSFRSSSPAPPSQQSLYKRVAEDFGEEPWSFSSCLEIPEGDPGALPGAKAGDPHLDYELLDTADLPQLESSLQPVSPGRLDVSESGVLMRRRPARRILSQVTMLAFQGDALLEQISVIGGNLTGIFIHRVTPGSAADQMALRPGTQIVMVDYEASEPLFKAVLEDTTLEEAVGLLRRVDGFCCLSVKVNTDGYKRLLQDLEAKVATSGDSFYIRVNLAMEGRAKGELQVHCNEVLHVTDTMFQGCGCWHAHRVNSYTMKDTAAHGTIPNYSR

SEQ ID NO: 21486 - protein, 1104 aa, Homo sapiens
MAAMAPALTDAAAEAHHIRFKLAPPSSTLSPGSAENNGNANILIAANGTKRKAIAAEDPSLDFRNNPTKEDLGKLQPLVASYLCSDVTSVPSKESLKLQGVFSKQTVLKSHPLLSQSYELRAELLGRQPVLEFSLENLRTMNTSGQTALPQAPVNGLAKKLTKSSTHSDHDNSTSLNGGKRALTSSALHGGEMGGSESGDLKGGMTNCTLPHRSLDVEHTTLYSNNSTANKSSVNSMEQPALQGSSRLSPGTDSSSNLGGVKLEGKKSPLSSILFSALDSDTRITALLRRQADIESRARRLQKRLQVVQAKQVERHIQHQLGGFLEKTLSKLPNLESLRPRSQLMLTRKAEAALRKAASETTTSEGLSNFLKSNSISEELERFTASGIANLRCSEQAFDSDVTDSSSGGESDIEEEELTRADPEQRHVPLRRRSEWKWAADRAAIVSRWNWLQAHVSDLEYRIRQQTDIYKQIRANKGLIVLGEVPPPEHTTDLFLPLSSEVKTDHGTDKLIESVSQPLENHGAPIIGHISESLSTKSCGALRPVNGVINTLQPVLADHIPGDSSDAEEQLHKKQRLNLVSSSSDGTCVAARTRPVLSCKKRRLVRPNSIVPLSKKVHRNSTIRPGCDVNPSCALCGSGSINTMPPEIHYEAPLLERLSQLDSCVHPVLAFPDDVPTSLHFQSMLKSQWQNKPFDKIKPPKKLSLKHRAPMPGSLPDSARKDRHKLVSSFLTTAKLSHHQTRPDRTHRQHLDDVGAVPMVERVTAPKAERLLNPPPPVHDPNHSKMRLRDHSSERSEVLKHHTDMSSSSYLAATHHPPHSPLVRQLSTSSDSPAPASSSSQVTASTSQPVRRRRGESSFDINNIVIPMSVAATTRVEKLQYKEILTPSWREVDLQSLKGSPDEENEEIEDLSDAAFAALHAKCEEMERARWLWTTSVPPQRRGSRSYRSSDGRTTPQLGSANPSTPQPASPDVSSSHSLSEYSHGQSPRSPISPELHSAPLTPVARDTPRHLASEDTRCSTPELGLDEQSVQPWERRTFPLAHSPQAECEDQLDAQERAARCTRRTSGSKTGRETEAAPTSPPIVPLKSRHLVAAATAQRPTHR

SEQ ID NO: 21487 - protein, 257 aa, Homo sapiens
IEQFCQEKKEMVNMRVGVHTGTVLCGILGMRRFKFDVWSNDVNLANLMEQLGVAGKVHISEATAKYLDDRYEMEDGKVIERLGQSVVADQLKGLKTYLISGQRAKESRCSCAEALLSGFEVIDGSQVSSGPRGQGTASSGNVSDLAQTVKTFDNLKTCPSCGITFAPKSEAGAEGGAPQNGCQDEHKNSTKVTSSWLLFLSVPLLAHPPKASGGPNPKTQNGLLSPPQEEKLTNSQTSLCEILQEKGRWAGVSLDQS

SEQ ID NO: 21488 - protein, 929 aa, Homo sapiens
MGNSSGWRGPAGQRRMLFLFLLSLLDQALSEPIRYAIPEELDRGSLVGNLAKDLGFGVGDLPTRNLRVIAEKKFFTVSPENGNLLVSDRIDREEICGKKSTCVLEFEMVAEKPLNFFHVTVLIQDINDNPPTFSQNITELEISELALTGATFALESAQDPDVGVNSLQQYYLSPDPHFSLIQKENLDGSRYPELVLKAPLDREEQPHHHLVLTAVDGGEPSRSCTTQIRVIVADANDNPPVFTQDMYRVNVAENLPAGSSVLKVMAIDMDEGINAEIIYAFINIGKEVRQLFKLDSKTGELTTIGELDFEERDSYTIGVEAKDGGHHTAYCKVQIDISDENDNAPEITLASESQHIQEDAELGTAVALIKTHDLDSGFNGEILCQLKGNFPFKIVQDTKNTYRLVTDGALDREQIPEYNVTITATDKGNPPLSSSKTITLHILDVNDNVPVFHQASYTVHVAENNPPGASIAHVRASDPDLGPNGLVSYYIVASDLEPRELSSYVSVSARSGVVFAQRAFDHEQLRAFELTLQARDQGSPTLSANVSLRVLVDDRNDNAPLVLYPALGPEGSALFDMVPRSAEPGYLVTKVVAVDADSGYNAWLSYHIVQASEPGLFSLGLRTGEVRTARTLGDREAARQRLLVTVRDGGQQPLSATVMLHLIFADSLQEIQPDLSDRPTPSDPQAELQFHLVVALALISVLFLLAVILAISLRLRCSSRPATEGYFQPGVCFKTVPGVLPTYSERTLPYSYNPCAASHSSNTEFKFLNIKAENAAPQDLLCDEASWFESNDNPEMPSNSGNLQKQAPPNTDWRFSQAQRPGTSGSQNGDDTGTWPNNQFDTEMLQAMILASASEAADGSSTLGGGAGTMGLSARYGPQFTLQHVPDYRQNVYIPGSNATLTNAAGKRDGKAPAGGNGNKKKSGKKEKK

SEQ ID NO: 21489 - protein, 566 aa, Homo sapiens
MHGGGPPSGDSACPLRTIKRVQFGVLSPDELKRMSVTEGGIKYPETTEGGRPKLGGLMDPRQGVIERTGRCQTCAGNMTECPGHFGHIELAKPVFHVGFLVKTMKVLRCVCFFCSKLLVDSNNPKIKDILAKSKGQPKKRLTHVYDLCKGKNICEGGEEMDNKFGVEQPEGDEDLTKEKGHGGCGRYQPRIRRSGLELYAEWKHVNEDSQEKKILLSPERVHEIFKRISDEECFVLGMEPRYARPEWMIVTVLPVPPLSVRPAVVMQGSARNQDDLTHKLADIVKINNQLRRNEQNGAAAHVIAEDVKLLQFHVATMVDNELPGLPRAMQKSGRPLKSLKQRLKGKEGRVRGNLMGKRVDFSARTVITPDPNLSIDQVGVPRSIAANMTFAEIVTPFNIDRLQELVRRGNSQYPGAKYIIRDNGDRIDLRFHPKPSDLHLQTGYKVERHMCDGDIVIFNRQPTLHKMSMMGHRVRILPWSTFRLNLSVTTPYNADFDGDEMNLHLPQSLETRAEIQELAMVPRMIVTPQSNRPVMGIVQDTLTAVRKFTKRDVFLERVCGPNGNLA

SEQ ID NO: 21490 - protein, 122 aa, Homo sapiens
MVPFGPFAFMPGKLVHTNEVTVLLGDNWFAKCSAKQAVGLVEHRKEHVRKTIDDLKKVMKNFESRVEFTEDLQKMSDAAGDIVDIREEIKCDFEFKAKHRIAHKPHSKPKTSDIFEADIAND

SEQ ID NO: 21491 - protein, 157 aa, Homo sapiens
MVTLHRMGPNLQLIEGDAKQLAGMITFTCNLAENVSSKVRQLDLAKNRLYQAIQRADDILDLKFCMDGVQTALRSEDYEQAAAHTHRYLCLDKSVIELSRQGKEGSMIDANLKLLQEAEQRLKAIVAEKFAIATKEGDLPQVERFFKIFPLLGLHEE

SEQ ID NO: 21492 - protein, 195 aa, Homo sapiens
MMAIRELKVCLLGDTGVGKSSIVCRFVQDHFDHNISPTIGASFMTKTVPCGNELHKFLIWDTAGQERFHSLAPMYYRGSAAAVIVYDITKQDSFYTLKKWVKELKEHGPENIVMAIAGNKCDLSDIREVPLKDAKEYAESIGAIVVETSAKNAINIEELFQGISRQIPPLDPHENGNNGTIKVEKPTMQASRRCC

SEQ ID NO: 21493 - protein, 1100 aa, Homo sapiens
MNNEITYYFPCQRWLAVEEDDGQLSRELLPVDESYVLPQSEEGRGGGDNNPLDNLALEQKDKSTTFSVTIKTGVKKNAGTDANVFITLFGTQDDTGMTLLKSSKTNSDKFERDSIEIFTVETLDLGDLWKVRLGHDNTGKAPGWFVDWVEVDAPSLGKCMTFPCGRWLAKNEDDGSIIRDLFHAELQTRLYTPFVPYEITLYTSDVFAAGTDANIFIIIYGCDAVCTQQKYLCTNKREQKQFFERKSASRFIVELEDVGEIIEKIRIGHNNTGMNPGWHCSHVDIRRLLPDKDGAETLTFPCDRWLATSEDDKKTIRELVPYDIFTEKYMKDGSLRQVYKEVEEPLDIVLYSVQIFTGNIPGAGTDAKVYITIYGDLGDTGERYLGKSENRTNKFERGTADTFIIEAADLGVIYKIKLRHDNSKWCADWYVEKVEIWNDTNEDEFLFLCGRWLSLKKEDGRLERLFYEKEYTGDRSSNCSSPADFWEIALSSKMADVDISTVTGPMADYVQEGPIIPYYVSVTTGKHKDAATDSRAFIFLIGEDDERSKRIWLDYPRGKRGFSRGSVEEFYVAGLDVGIIKKIEVLYEMTVWTGDVVGGGTDSNIFMTLYGINGSTEEMQLDKKKARFEREQNDTFIMEILDIAPFTKMRIRIDGLGSRPEWFLERILLKNMNTGDLTMFYYGDWLSQRKGKKTLVCEMCAVIDEEEMMEWTSYTVAVKTSDILGAGTDANVFIIIFGENGDSGTLALKQSANWNKFERNNTDTFNFPDMLSLGHLCKLRVWHDNKGIFPGWHLSYVDVKDNSRDETFHFQCDCWLSKSEGDGQTVRDFACANNKICDELEETTYEIVIETGNGGETRENVWLILEGRKNRSKEFLMENSSRQRAFRKGTTDTFEFDSIYLGDIASLCVGHLAREDRFIPKRELAWHVKTITITEMEYGNVYFFNCDCLIPLKRKRKYFKVFEVTKTTESFASKVQSLVPVKYEVIVTTGYEPGAGTDANVFVTIFGANGDTGKRELKQKMRNLFERGSTDRFFLETLELGELRKVRLEHDSSGYCSGWLVEKVEVTNTSTGVATIFNCGRWLDKKRGDGLTWRDLFPSV

SEQ ID NO: 21494 - protein, 272 aa, Homo sapiens
MAPLRFSANLSWLFPELSGLPARVRAAGSSGFEAVEVAWPYAETPEALARAAREAGLRLVLINTPPGDQEKGEMGLGAVPGRQAAFREGLEQAVRSGHCLMGRKLSVPCKGAVARGGLVYLAAFLRLDMIHLMAGRVPQGADRIAVKAEMEAVFLENLRHAAGVLAQEDLVGLLEPINTRITDPQYFLDTPQQAAAILQKVGRPNLQLQMDIFHWQIMDGNLTGNIREFLPIVGHVQVAQVPGRGEPSSPGELNFPYLFQLLEDEGYKGFVG

SEQ ID NO: 21495 - protein, 357 aa, Homo sapiens
SPERFLQLGAKVPKGALLLGPPGCGKTLLAKAVATEAQVPFLAMAGPEFVEVIGGLGAARVRSLFKEARARAPCIVYIDEIDAVGKKRSTTMSGFSNTEEEQTLNQLLVEMDGMGTTDHVIVLASTNRADILDGALMRPGRLDRHVFIDLPTLQERREIFEQHLKSLKLTQSSTFYSQRLAELTPGFSGADIANICNEAALHAAREGHTSVHTLNFEYAVERVLAGTAKKSKILSKEEQKVVAFHESGHALVGWMLEHTEAVMKVSITPRTNAALGFAQMLPRDQHLFTKEQLFERMCMALGGRASEALSFNEVTSGEEQRRGPWRGTGRPEEGHPHRLLHGEAVWDGTWHRAHLLP

SEQ ID NO: 21496 - protein, 158 aa, Homo sapiens
MTMFENVTRALARQLNPRGDLTPLDSLIDFKRFHPFCLVLRKRKSTLFWGARYVRTDYTLLDVLEPGSSPSDPTDTGNFGFKNMLDTRVEGDVDVPKTVKVKGTAGLSQNSTLEVQTLSVAPKALETVQERKLAADHPFLKEMQDQGENLYVVMEVVE

SEQ ID NO: 21497 - protein, 99 aa, Homo sapiens
PPALECRRCHVKCHRDHLDKKEDLICPCKVSYDVTSARDMLLLACSQDEQKKWVTHLVKKIPKNPPSGFVRASPRTLSTRSTANQSFRKVVKNTSGKTR

SEQ ID NO: 21498 - protein, 325 aa, Homo sapiens
MAQPYPPAQYPPPPQNGIPAEYAPPPPHPTQDYSGQTPVPTEHGMTLYTPAQTHPEQPGSEASTQPIAGTQTVPQTDEAAQTDSQPLHPSDPTEKQQPKRLHVSNIPFRFRDPDLRQMFGQFGKILDVEIIFNERGSKGFGFVTFETSSDADRAREKLNGTIVEGRKIEVNNATARVMTNKKTGNPYTNGWKLNPVVGAVYGPEFYAVTGFPYPTTGTAVAYRGAHLRGRGRAVYNTFRAAPPPPPIPTYGAVVYQDGFYGAEIYGGYAAYRYAQPAAAAAAYSDSYGRVYAAADPYHHTIGPAATYSIGTMVRSPGPPSPGCQS

SEQ ID NO: 21499 - protein, 744 aa, Homo sapiens
MPERLAEMLLDLWTPLIILWITLPPCIYMAPMNQSQVLMSGSPLELNSLGEEQRILNRSKRGWVWNQMFVLEEFSGPEPILVGRLHTDLDPGSKKIKYILSGDGAGTIFQINDVTGDIHAIKRLDREEKAEYTLTAQAVDWETSKPLEPPSEFIIKVQDINDNAPEFLNGPYHATVPEMSILGTSVTNVTATDADDPVYGNSAKLVYSILEGQPYFSIEPETAIIKTALPNMDREAKEEYLVVIQAKDMGGHSGGLSGTTTLTVTLTDVNDNPPKFAQSLYHFSVPEDVVLGTAIGRVKANDQDIGENAQSSYDIIDGDGTALFEITSDAQAQDGIIRLRKPLDFETKKSYTLKVEAANVHIDPRFSGRGPFKDTATVKIVVEDADEPPVFSSPTYLLEVHENAALNSVIGQVTARDPDITSSPIRFSIDRHTDLERQFNINADDGKITLATPLDRELSVWHNITIIATEIRNHSQISRVPVAIKVLDVNDNAPEFASEYEAFLCENGKPGQVIQTVSAMDKDDPKNGHYFLYSLLPEMVNNPNFTIKKNEDNSLSILAKHNGFNRQKQEVYLLPIIISDSGNPPLSSTSTLTIRVCGCSNDGVVQSCNVEAYVLPIGLSMGALIAILACIILLLVIVVLFVTLRRHKNEPLIIKDDEDVRENIIRYDDEGGGEEDTEAFDIATLQNPDGINGFLPRWGLPIQWWEERNPIQTCLFSRSRIPRSLLFIFFHKDTKINCITQWTT

SEQ ID NO: 21500 - protein, 1073 aa, Homo sapiens
MEERKHETMNPAHVLFDRFVQATTCKGTLKAFQELCDHLELKPKDYRSFYHKLKSKLNYWKAKALWAKLDKRGSHKDYKKGKACTNTKCLIIGAGPCGLRTAIDLSLLGAKVVVIEKRDAFSRNNVLHLWPFTIHDLRGLGAKKFYGKFCAGAIDHISIRQLQLILLKVALILGIEIHVNVEFQGLIQPPEDQENERIGWRALVHPKTHPVSEYEFEVIIGGDGRRNTLEGFRRKEFRGKLAIAITANFINRNTTAEAKVEEISGVAFIFNQKFFQELREATGIDLENIVYYKDDTHYFVMTAKKQSLLDKGVILHDYADTELLLSRENVDQEALLSYAREAADFSTQQQLPSLDFAINHYGQPDVAMFDFTCMYASENAALVREQNGHQLLVALVGDSLLEPFWPMGTGIARGFLAAMDSAWMVRSWSLGTSPLEVLAERESIYRLLPQTTPENVSKNFSQYSIDPVTRYPNINVNFLRPSQVRHLYDTGETKDIHLEMESLVNSRTTPKLTRNESVARSSKLLGWCQRQTDGYAGVNVTDLTMSWKSGLALCAIIHRYRPDLIDFDSLDEQNVEKNNQLAFDIAEKELGISPIMTGKEMASVGEPDKLSMVMYLTQFYEMFKDSLPSSDTLDLNAEEKAVLIASTRSPISFLSKLGQTISRKRSPKDKKEKDLDGAGKRRKTSQSEEEEAPRGHRGERPTLVSTLTDRRMDVAVGNQNKVKYMATQLLAKFEENAPAQSIGIRRQQREKECSRTCPKKVITLSPPPTPPPCRAHGGQQTYRDLDADNRGKQSPHHERPEPEPPRRFFVDQWELSLSLRSSARPASPSSDSLRQKYIKMYTGGVSSLAEQIANQLQRKEQPKALLDKKELGSMKKEFPQNLGGSDTCYFCQKRVYVMERLSAEGKFFHRSCFKCEYCATTLRLSAYAYDIEDGKFYCKPHYCYRLSGYAQRKRPAVAPLSGKEAKGPLQDGATTDANGRANAVASSTERTPGSLTSLFGWVARHSLGLCDKAKGMSQHLQSNISSFGQQVAQNPLDSFFMCQLLAFGVPFLYGLSEVLVQIRGEFHWQAVAQ

SEQ ID NO: 21501 - protein, 593 aa, Homo sapiens
MMEELHSLDPRRQELLEARFTGVGVSKGPLNSESSNQSLCSVGSLSDKEVETPEKKQNDQRNRKRKAEPYETSQGKGTPRGHKISDYFERRVEQPLYGLDGSAAKEATEEQSALPTLMSVMLAKPRLDTEQLAQRGAGLCFTFVSSDLTIEKISALENSKNSDLEKKEGRIDDLLRANCDLRRQIDEQQKMLEKYKERLNRCVTMSKKLLIEKSKQEKMACRDKSMQDRLRLGHFTTVRHGASFTEQWTDGYAFQNLIKQQERINSQREEIERQRKMLAKRKPPAMGQAPPATNEQKQRKSKTNGAENETLTLAEYHEQEEIFKLRLGHLKKEEAEIQAELERLERVRNLHIRELKRIHNEDNSQFKDHPTLNDRYLLLHLLGRGGFSEVYKAFDLTEQRYVAVKIHQLNKNWRDEKKENYHKHACREYRIHKELDHPRIVKLYDYFSLDTDSFCTVLEYCEGNDLDFYLKQHKLMSEKEARSIIMQIVNALKYLNEIKPPIIHYDLKPGNILLVNGTACGEIKITDFGLSKIMDDDSYNSVDGMELTSQGAGTYWYLPPECFVVGKEPPKISNKVDVWSVGVIFYQCLYGRK

SEQ ID NO: 21502 - protein, 436 aa, Homo sapiens
MAEQESLEFGKADFVLMDTVSMPEFMANLRLRFEKGRIYTFIGEVVVSVNPYKLLNIYGRDTIEQYKGRELYERPPHLFAIADAAYKAMKRRSKDTCIVISGESGAGKTEASKYIMQYIAAITNPSQRAEVERVKNMLLKSNCVLEAFGNAKTNRNDNSSRFGKYMDINFDFKGDPIGGHINNYLLEKSRVIVQQPGERSFHSFYQLLQGGSEQMLRSLHLQKSLSSYNYIHVGAQLKSSINDAAEFRVVADAMKVIGFKPEEIQTVYKILAAILHLGNLKFVVDGDTPLIENGKVVSIIAELLSTKTDMVEKALLYRTVATGRDIIDKQHTEQEASYGRDAFAKAIYERLFCWIVTRINDIIEVKNYDTTIHGKNTVIGVLDIYGFEIFDNNSFEQFCINYCNEKLQQLFIQLVLKQEQEEYQREGIPWKHVGLL

SEQ ID NO: 21503 - protein, 1267 aa, Homo sapiens
MSGPLEGADGGGDPRPGESFCPGGVPSPGPPQHRPCPGPSLADDTDANSNGSSGNESNGHESRGASQRSSHSSSSGNGKDSALLETTESSKSTNSQSPSPPSSSIAYSLLSASSEQDNPSTSGCSSEQSARARTQKELMTALRELKLRLPPERRGKGRSGTLATLQYALACVKQVQANQEYYQQWSLEEGEPCSMDMSTYTLEELEHITSEYTLQNQAAVLLRCKRDVFRGTRFSELLAPQDVGVFYGSTAPSRLPTWGTGASAGSGLRDFTQEKSVFCRIRGGPDRDPGPRYQPFRLTPYVTKIRVSDGAPAQPCCLLIAERIHSGYEAPRIPPDKRIFTTRHTPSCLFQDVDERAAPLLGYLPQDLLGAPVLLFLHPEDRPLMLAIHKKILQLAGQPFDHSPIRFCARNGEYVTMDTSWAGFVHPWSRKVAFVLGRHKVRTAPLNEDVFTPPAPSPAPSLDTDIQELSEQIHRLLLQPVHSPSPTGLCGVGAVTSPGPLHSPGSSSDSNGGDAEGPGPPAPVTFQQICKDVHLVKHQGQQLFIESRARPQSRPRLPATGTFKAKALPCQSPDPELEAGSAPVQAPLALVPEEAERKEASSCSYQQINCLDSILRYLESCNLPSTTKRKCASSSSYTTSSASDDDRQRTGPVSVGTKKDPPSAALSGEGATPRKEPVVGGTLSPLALANKAESVVSVTSQCSFSSTIVHVGDKKPPESDIIMMEDLPGLAPGPAPSPAPSPTVAPDPAPDAYRPVGLTKAVLSLHTQKEEQAFLSRFRDLGRLRGLDSSSTAPSALGCHHGPAPPSRRHHCRSKAKRSRHHQNPRAEAPCYVSHPSPVPPSTPWPTPPATTPFPAVVQPYPLPVFSPRGGPQPLPPAPTSVPPAAFPAPLVTPMVALVLPNYLFPTPSSYPYGALQTPAEGPPTPASHSPSPSLPALAPSPPHRPDSPLFNSRCSSPLQLNLLQLEELPRAEGAAVAGGPGSSAGPPPPSAEAAEPEARLAEVTESSNQDALSGSSDLLELLLQEDSRSGTGSAASGSLGSGLGSGSGSGSHEGGSTSASITRSSQSSHTSKYFGSIDSSEAEAGAARGGAEPGDQVIKYVLQDPIWLLMANADQRVMMTYQVPSRDMTSVLKQDRERLRAMQKQQPRFSEDQRRELGAVHSWVRKGQLPRALDVMACVDCGSSTQDPGHPDDPLFSELDGLGLEPMEEGGGEQGSSGGGSGEGEGCEEAQGGAKASSSQDLAMEEEEEGRSSSSPALPTAGNCTS

SEQ ID NO: 21504 - protein, 651 aa, Homo sapiens
MKNCGRRFHNEVGKFRFLNELIKVVSPKYLGDRVSEKVKTKVIELLYSWTMALPEEAKIKDAYHMLKRQGIVQSDPPIPVDRTLIPSPPPRPKNPVFDDEEKSKLLAKLLKSKNPDDLQEANKLIKSMVKEDEARIQKVTKRLHTLEEVNNNVRLLSEMLLHYSQEDSSDGDRELMKELFDQCENKRRTLFKLASETEDNDNSLGDILQASDNLSRVINSYKTIIEGQVINGEVATLTLPDSEGNSQCSNQGTLIDLAELDTTNSLSSVLAPAPTPPSSGIPILPPPPQASGPPRSRSSSQAEATLGPSSTSNALSWLDEELLCLGLADPAPNVPPKESAGNSQWHLLQREQSDLDFFSPRPGTAACGASDAPLLQPSAPSSSSSQAPLPPPFPAPVVPASVPAPSAGSSLFSTGVAPALAPKVEPAVPGHHGLALGNSALHHLDALDQLLEEAKVTSGLVKPTTSPLIPTTTPARPLLPFSTGPGSPLFQPLSFQSQGSPPKGPELSLASIHVPLESIKPSSALPVTAYDKNGFRILFHFAKECPPGRPDVLVVVVSMLNTAPLPVKSIVLQAAVPKSMKVKLQPPSGTELSPFSPIQPPAAITQVMLLANPLKEKVRLRYKLTFALGEQLSTEVGEVDQFPPVEQWGNL

SEQ ID NO: 21505 - protein, 1253 aa, Homo sapiens
AEQELGPPPSVDEAANTLMTRLGFLLGEKVTEVQPGDQYSMEVQDENQTSAITQRISPCSTLTSSTASPPASSPCSTLPPISTNATAKDCSYGAVTSPTSTLESRDSGIIATLTSYSENVERTKYAGESSKELGSGGNIKPWQSQKSSMDSCLYRVDENMTASTYSLNKIPERNLETVLSQSVQSIPLYLMPRPNSVAATSSAHLEDLAYLDEQRHTPLRTSLRMPRQSMGGARTQQDLRVRFAPYRPPDISLKPLLFEVPSITTESVFVGRDWVFHEIDAQLQSSNASVNQGVVIVGNIGFGKTAIISRLVALSCHGTRMRQIASDSPHASPKHVDANRELPLTQPPSAHSSITSGSCPGTPEMRRRQEEAMRRLASQVVAYHYCQADNAYTCLVPEFVHNVAALLCRSPQLTAYREQLLREPHLQSMLSLRSCVQDPMASFRRGVLEPLENLHKERKIPDEDFIILIDGLNEAEFHKPDYGDTIVSFLSKMIGKFPSWLKLIVTVRTSLQEITKLLPFHRIFLDRLEENEAIDQDLQAYILHRIHSSSEIQNNISLNGKMDNTTFGKLSSHLKTLSQGSYLYLKLTFDLIEKGYLVLKSSSYKVVPVSLSEVYLLQCNMKFPTQSSFDRVMPLLNVAVASLHPLTDEHIFQAINAGSIEGTLEWEDFQQRMENLSMFLIKRRDMTRMFVHPSFREWLIWREEGEKTKFLCDPRSGHTLLAFWFSRQEGKLNRQQTIELGHHILKAHIFKGLSKKVGVSSSILQGLWISYSTEGLSMALASLRNLYTPNIKVSRLLILGGANINYRTEVLNNAPILCVQSHLGYTEMVALLLEFGANVDASSESGLTPLGYAAAAGYLSIVVLLCKKRAKVDHLDKNGQCALVHAALRGHLEVVKFLIQCDWTMAGQQQGVFKKSHAIQQALIAAASMGYTEIVSYLLDLPEKDEEEVERAQINSFDSLWGETALTAAAGRGKLEVCRLLLEQGAAVAQPNRRGAVPLFSTVRQGHWQIVDLLLTHGADVNMADKQGRTPLMMAASEGHLGTVDFLLAQGASIALMDKEGLTALSWACLKGHLSVVRSLVDNGAATDHADKNGRTPLDLAAFYGDAEVVQFLVDHGAMIEHVDYSGMRPLDRAVGCRNTSVVVTLLKKGAKIGPATWAMATSKPDIMIILLSKLMEEGDMFYKKGKVKEAAQRYQYALKKFPREGFGEDLKTFRELKVSLLLNLSRCRRKMNTVRSSLRGPERGHQAVSQQP

SEQ ID NO: 21506 - protein, 1473 aa, Homo sapiens
MASEVVCGLIFRLLLPICLAVACAFRYNGLSFVYLIYLLLIPLFSEPTKTTMQGHTGRLLKSLCFISLSFLLLHIIFHITLVSLEAQHRIAPGYNCSTWEKTFRQIGFESLKGADAGNGIRVFVPDIGMFIASLTIWLLCRNIVQKPVTDEAAQSNPEFENEELAEGEKIDSEEALIYEEDFNGGDGVEGELEESTKLKMFRRLASVASKLKEFIGNMITTAGKVVVTILLGSSGMMLPSLTSSVYFFVFLGLCTWWSWCRTFDPLLFSCLCVLLAIFTAGHLIGLYLYQFQFFQEAVPPNDYYARLFGIKSVIQTDCSSTWKIIVNPDLSWYHHANPILLLVMYYTLATLIRIWLQEPLVQDEGTKEEDKALACSPIQITAGRRRSLWYATHYPTDERKLLSMTQDDYKPSDGLLVTVNGNPVDYHTIHPSLPMENGPGKADLYSTPQYRWEPSDESSEKREEEEEEKEEFEEERSREEKRSIKVHAMVSVFQFIMKQSYICALIAMMAWSITYHSWLTFVLLIWSCTLWMIRNRRKYAMISSPFMVVYGNLLLILQYIWSFELPEIKKVPGFLEKKEPGELASKILFTITFWLLLRQHLTEQKALQEKEALLSEVKIGSQENEEKDEELQDIQVEGEPKEEEEEEAKEEKQERKKVEQEEAEEEDEQDIMKVLGNLVVAMFIKYWIYVCGGMFFFVSFEGKIVMYKIIYMVLFLFCVALYQVHYEWWRKILKYFWMSVVIYTMLVLIFIYTYQFENFPGLWQNMTGLKKEKLEDLGLKQFTVAELFTRIFIPTSFLLVCILHLHYFHDRFLELTDLKSIPSKEDNTIYSHAKVNGRVYLIINRLAHPEGSLPDLTMMHLTASLEKPEVRKLAEPGEEKLEGYSEKAQKGDLGKDSEESEEDGEEEEESEEEEETSDLRNKWHLVIDRLTVLFLKFLEYFHKLQVFMWWILELHIIKIVSSYIIWVSVKEVSLFNYVFLISWAFALPYAKLRRLASSVCTVWTCVIIVCKMLYQLQTIKPENFSVNCSLPNENQTNIPFNELNKSLLYSAPIDPTEWVGLRKSSPLLVYLRNNLLMLAILAFEVTIYRHQEYYRGRNNLTAPVSRTIFHDITRLHLDDGLINCAKYFINYFFYKFGLETCFLMSVNVIGQRMDFYAMIHACWLIAVLYRRRRKAIAEIWPKYCCFLACIITFQYFICIGIPPAPCRDYPWRFKGASFNDNIIKWLYFPDFIVRPNPVFLVYDFMLLLCASLQRQIFEDENKAAVRIMAGDNVEICMNLDAASFSQHNPVPDFIHCRSYLDMSKVIIFSYLFWFVLTIIFITGTTRISIFCMGYLVACFYFLLFGGDLLLKPIKSILRYWDWLIAYNVFVITMKNILSIGACGYIGTLVHNSCWLIQAFSLACTVKGYQMPAANSPCTLPSGEAGIIWDSICFAFLLLQRRVFMSYYFLHVVADIKASQILASRWLNFSRPQL

SEQ ID NO: 21507 - protein, 588 aa, Homo sapiens
MAGPVSLRDLLMGASAWMGSESPGGSPTEGGGSAAGGPEPPWREDEICVVGIFGKTALRLNSEKFSLVNTVCDRQVFPLFRHQDPGDPGPGIRTEAGAVGEAGGAEDPGAAAGGSVRGSGAVAEGNRTEAGSQDYSLLQAYYSQESKVLYLLLTSICDNSQLLRACRALQSGEAGGGLSLPHAEAHEFWKHQEKLQCLSLLYLFSVCHILLLVHPTCSFDITYDRVFRALDGLRQKVLPLLKTAIKDCPVGKDWKLNCRPCPPRLLFLFQLNGALKVEPPRNQDPAHPDKPKKHSPKRRLQHALEDQIYRIFRKSRVLTNQSINCLFTVPANQAFVYIVPGSQEEDPVGMLLDQLRSHCTVKDPESLLVPAPLSGPRRYQVMRQHSRQQLSFHIDSSSSSSSGQLVDFTLREFLWQHVELVLSKKGFDDSVGRNPQPSHFELPTYQKWISAASKLYEVAIDGKEEDLGSPTGELTSKILSSIKVLEGFLDIDTKFSENRCQKALPMAHSAYQSNLPHNYTMTVHKNQLAQALRVYSQHARGPAFHKYAMQLHEDCYKFWSNGHQLCEERSLTDQHCVHKFHSLPKSGS

SEQ ID NO: 21508 - protein, 910 aa, Homo sapiens
MSSGLWSQEKVTSPYWEERIFYLLLQECSVTDKQTQKLLKVPKGSIGQYIQDRSVGHSRIPSAKGKKNQIGLKILEQPHAVLFVDEKDVVEINEKFTELLLAITNCEERFSLFKNRNRLSKGLQIDVGCPVKVQLRSGEEKFPGVVRFRGPLLAERTVSGIFFGVELLEEGRGQGFTDGVYQGKQLFQCDEDCGVFVALDKLELIEDDDTALESDYAGPGDTMQVELPPLEINSRVSLKVGETIESGTVIFCDVLPGKESLGYFVGVDMDNPIGNWDGRFDGVQLCSFACVESTILLHINDIIPESVTQERRPPKLAFMSRGVGDKGSSSHNKPKATGSTSDPGNRNRSELFYTLNGSSVDSQPQSKSKNTWYIDEVAEDPAKSLTEISTDFDRSSPPLQPPPVNSLTTENRFHSLPFSLTKMPNTNGSIGHSPLSLSAQSVMEELNTAPVQESPPLAMPPGNSHGLEVGSLAEVKENPPFYGVIRWIGQPPGLNEVLAGLELEDECAGCTDGTFRGTRYFTCALKKALFVKLKSCRPDSRFASLQPVSNQIERCNSLAFGGYLSEVVEENTPPKMEKEGLEIMIGKKKGIQGHYNSCYLDSTLFCLFAFSSVLDTVLLRPKEKNDVEYYSETQELLRTEIVNPLRIYGYVCATKIMKLRKILEKVEAASGFTSEEKDPEEFLNILFHHILRVEPLLKIRSAGQKVQDCYFYQIFMEKNEKVGVPTIQQLLEWSFINSNLKFAEAPSCLIIQMPRFGKDFKLFKKIFPSLELNITDLLEDTPRQCRICGGLAMYECRECYDDPDISAGKIKQFCKTCNTQVHLHPKRLNHKYNPVSLPKDLPDWDWRHGCIPCQNMELFAVLCIETSHYVAFVKYGKDDSAWLFFDSMADRDAALSDPAPTAFWCGPPVA

SEQ ID NO: 21509 - protein, 197 aa, Homo sapiens
PDQRSKFENEEFFRKLSRECEIKYTGFRDRPHEERQARFQNACRDGRSEIVSRLARGARGSLVARGRGGPGRFRTAARLLRLPELSGRRLTSYSGFKMRNQMPRAGTRGETLFLGLAAVARVGQRSTASGARTRARLNKRRALFRRRHRRRVQGICSKQTPIRKKKWSFIQGFCGHRNQSVSPVFSGQLAGRTATNT

SEQ ID NO: 21510 - protein, 2639 aa, Homo sapiens
MDGRDFAPPPHLLSERGSLGHRSAAAAARLAPAGPAAQPPAHFQPGKYFPSPLPMASHTASSRLMGSSPASSFMGSFLTSSLGSAASTHPSGPSSSPPEQAYRGSHPTTSQIWFSHSHEAPGYPRFSGSLASTFLPVSHLDHHGNSNVLYGQHRFYGTQKDNFYLRNLPPQPTLLPANHNFPSVARAAPAHPMGSCSRDRDRGEAGSLQKGPKDFDRFLVGKELGREKAGKAAEGKERPAAEEDGGKERHKLVLPVPADGHCREGGPAPRGACEGRPKHLTSCLLNTKVLNGEMGRAALASCAGGMLGRPGTGVVTSGRCAKEAAGPPEPGPAFSECLERRQMLHHTASYAGPPPPLSTAAGSFPCLQLHGGPDGLCPLQDKAPRDLKASGPTFVPSVGHLADKGRPFQAAEACAVAGEGKDRHLEGTMAPDHAAPYGVSYAHLKAEGKGERRPGGFEAALNPRLKGLDYLSSAGPEASFPGLPKSGLDKSGYFELPTSSQDCARPGHQDPLGGKAPQACCTLDKTVGKEAPAGPPGAQKVARIRHQQHLMAAEVEQGGIGAEAKRKSLELASLGYSGPHLPPWGVQAGQGTAMAISEERKAGAYLDPFGSGLQQAALLPQELPAPPDEVSAMKNLLKYSSQALVVGQKAPLVGLGGLKASCIQQEAKFLSSKGPGQSERPDCARSREHDTTHGDGEVRQPPVGIAVALARQKDTVSRSEAAYGTNTARQGRAAPAFKGGGGPRSTHALDLEAEEERTRLCDDRLGLASRELLLQDSKDRVEFARIHPPSSCPGDLAPHLMMQSGQLGGDPAPHTHPHPPWLPRTRSPSLWMGGHSYGLGHPALHQNLPPGFPASVAGPVPSVFPLPQDAPTQLVILPSEPTPHSAPHALADVMDQASLWPPMYGGRGPASHMQHPGQLPVYSRPQLLRQQELYALQQQRAAQFQRKPEDQHLDLEEPAQEKAPKSTHKPVALTPTAPGAPSPAAGPTKLPPCCHPPDPKPPASSPTPPPRPSAPCTLNVCPASSPGPGSRVRSAEEKNGEGQQSTADIITSEPVARAHSVAHAGLEFLASNDPSTSASQSFGITDLPPGYLRPMAGLGFSLPSDVHSSNLEDPETMQTTAPGAQPEPTRTFLPGEPPPCSPRSLEEPGLLSGAREATQDLAATPYPTERGPQGKAADPSPLEGLQELQCAALLEAGGPEATGQAHSTQGGAREERSREEGEQGPSSGASSQVLEQRAGSPGALEDEGEQPAPEEDELEEDELGQQSMEDSEEDCGGAPDNSHPPRALPGLDALVAATINLGDLPSDSPPDPQPPAASGPPSTVPLPHSSGIHGIALLSELADLAIQRQRSERTVPEEEEDVLAFNLQHLATLATAWSLVEAAGLDSSTAPAQPPTANPCSGPRLTPRMQILQRKDTWTPKTKPVCPLKAAIDRLDTQEVGMRVRLAELQRRYKEKQRELARLQRKHDHERDESSRSPARRGPGRPRKRKHSSSLPAPRPTGPLPRSDGKKVKAVRTSLGLLCAELRGGSGGEPAKKRSKLERSVYAGLQTASVEKAQCKKSSCQGGLAPSVAHRVAQLKPKVKSKGLPTGLSSFQQKEATPGGRIREKLSRAKSAKVSGATRHPQPKGHGSRETPRCPAQPSVAASQEAGSGYDSEDCEGLLGTEAPPREAGLLLHTGASVAVLGPSPSSVVKMEANQKAKKKKERQGLLGACRLSSPESEVKIKRRSVKAKVGTTLERAPGQRPPGALGKKKAKGKAKGSLRAEPGATPSRDALFNPSRAFACREEGSQLASERLKRATRKGTVLQPVLRRKNGALSITLATRNAKAILGKGRKLSKVKHKAGKQGKGRAVSRLLESFAVEEDFEFDDNSSFSEEEEDEEEEEEDSGPLSAEQSAALARSCAIHKEDLRDGLPVLIPKEDSLLYAGSVRTLQPPDIYSIVIEGERGNRQRIYSLEQLLQEAVLDVRPQSSRYLPPGTRVCAYWSQKSRCLYPGNVVRGASGDEDEDLDSVVVEFDDGDTGHIAVSNVRLLPPDFKIQCTEPSPALLVSSSCRRTKKVSSEAPPPSEAATPSLSPKAQDGPEALKTPGKKSISKDKAGKAELLTSGAKSPTGASDHFLGRRGSPLLSWSAVAQTKRKAVAAASKGPGVLQNLFQLNGSSKKLRAREALFPVHSVATPIFGNGFRADSFSSLASSYAPFVGGTGPGLPRGAHKLLRAKKAERVEAEKGGRRRAGGEFLVKLDHEGVTSPKNKTCKALLMGDKDFSPKLGRPLPSPSYVHPALVGKDKKGRAPIPPLPMGLALRKYAGQAEFPLPYDSDCHSSFSDEDEDGPGLAAGVPSRFLARLSVSSSSSGSSTSSSSGSVSTSSLCSSDNEDSSYSSDDEDPALLLQTCLTHPVPTLLAQPEALRSKGSGPHAHAQRCFLSRATVAGTGAGSGPSSSSKSKLKRKEALSFSKAKELSRRQRPPSVENRPKISAFLPARQLWKWSGNPTQRRGMKGKARKLFYKAIVRGEETLRVGDCAVFLSAGRPNLPYIGRIESMWESWGSNMVVKVKWFYHPEETKLGKRQCDGKNALYQSCHEDENDVQTISHKCQVVAREQYEQMARSRKCQDRQDLYYLAGTYDPTTGRLVTADGVPILC

SEQ ID NO: 21511 - protein, 263 aa, Homo sapiens
EIDLSNQSGRVSKLGNETHFLFFGLYPGTTYSFTIRASTAKGFGPPATNQFTTKISAPSMPAYELETPLNQTDNTVTVMLKPAHSRGAPVSVYQIVVEEERPRRTKKTTEILKCYPVPIHFQNASLLNSQYYFAAEFPADSLQAAQPFTIGDNKTYNGYWNTPLLPYKSYRIYFQAASRANGETKIDCVQVATKAAIIVTQLTTPYIRIAPAAGDGQLTGAATPKPVPEPEKQTDHTVKIAGVIAGILLFVIIFLGVVLVMKK

SEQ ID NO: 21512 - protein, 353 aa, Homo sapiens
MKCYDPVGKTPGSLGSSASAGQAAASAPLPLESGELSRGDLSRPEDADTSGPCCEHTQEKQSTRAPAAAPFVPFSGGGQRLGGPPGPTRPLTSSSAKLPKSLSSPGGPSKPKKSKSGQDPQQEQEQERERDPQQEQERERPVDREPVDREPVVCHPDLEERLQAWPAELPDEFFELTVDDVRRRLAQLKSERKRLEEAPLVTKAFREAQIKEKLERYPKVALRVLFPDRYVLQGFFRPSETVGDLRDFVRSHLGNPELSFYLFITPPKTVLDDHTQTLFQANLFPAALVHLGAEEPAGVYLEPGLLEHAISPSAADVLVARYMSRAAGSPSPLPAPDPAPKSEPAAEEGALVP

SEQ ID NO: 21513 - protein, 166 aa, Homo sapiens
ERGDGPICLVLAPTRELAQQVQQVAAEYCRACRLKSTCIYGGAPKGPQIRDLERGVEICIATPGRLIDFLECGKTNLRRTTYLVLDEADRMLDMGFEPQIRKIVDQIRPDRQTLMWSATWPKEVRQLAEDFLKDYIHINIGALELSANHNILQIVDVCHDVEKDEK

SEQ ID NO: 21514 - protein, 625 aa, Homo sapiens
GIGLGFMTAVCVIWFFTPPSAHKYHKLHKNLRHWNTRSLDIKEPEILKGWMNEIYNYDPETYHATLTHSVFVRLEGGTLRLSKPNKNISRRASYNEPKPEVTYISQKIYDLSDSKIYLVPKTLARKRIWNKKYPICIELGQQDDFMSKAQTDKETSEEKPPAEGSEDPKKPPRPQEGTRSSQRDQILYLFGRTGREKEEWFRRFILASKLKSEIKKSSGVSGGKPGLLPAHSRHNSPSGHLTHSRSSSKGSVEEIMSQPKQKELAGSVRQKMLLDYSVYMGRCVPQESRSPQRSPLQSAESSPTAGKKLPEVPPSEEEEQEAWVNALLGRIFWDFLGEKYWSDLVSKKIQMKLSKIKLPYFMNELTLTELDMGVAVPKILQAFKPYVDHQGLWIDLEMSYNGSFLMTLETKMNLTKLGKEPLVEALKVGEIGKEGPRAFCLADSDEESSSAGSSEEDDAPEPSGGDKQLLPGAEGYVGGHRTSKIMRFVDKITKSKYFQKATETEFIKKKIEEVSNTPLLLTVEVQECRGTLAVNIPPPPTDRVWYGFRKPPHVELKARPKLGEREVTLVHVTDWIEKKLEQEFQKVFVMPNMDDVYITIMHSAMDPRSTSCLLKDPPVEAADQP

SEQ ID NO: 21515 - protein, 487 aa, Homo sapiens
MPLPVQVFNLQGAVEPMQIDVDPQEDPQNAPDVNYVVENPSLDLEQYAASYSGLMRIERLQFIADHCPTLRVEALKMALSFVQRTFNVDMYEEIHRKLSEATRELQNAPDAIPESGVEPPALDTAWVEATRKKALLKLEKLDTDLKNYKGNSIKESIRRGHDDLGDHYLDCGDLSNALKCYSRARDYCTSAKHVINMCLNVIKVSVYLQNWSHVLSYVSKAESTPEIAEQRGERDSQTQAILTKLKCAAGLAELAARKYKQAAKCLLLASFDHCDFPELLSPSNVAIYGGLCALATFDRQELQRNVISSSSFKLFLELEPQVRDIIFKFYESKYASCLKMLDEMKDNLLLDMYLAPHVRTLYTQIRNRALIQYFSPYVSADMHRMAAAFNTTVAALEDELTQLILEGLISARVDSHSKILYARDVDQRSTTFEKSLLMGKEFQRRAKAMMLRAAVLRNQIHVKSPPREGSQGELTPANSQSRMSTNM

SEQ ID NO: 21516 - protein, 314 aa, Homo sapiens
MDEGGCSQAAPAFAEGAGLGSGAPALSGSCLLTSGRCRCHRHRTALSIHPPLARPLFWSQFLLHHSHEADSLQKEEARLPQTKEEAALLSQEFAEAWGQKAKELYEPIWQNFTDPQLRRIIGAVRTLGSANLPLAKRQQYNALLSNMSRIYSTAKVCLPNKTATCWSLDPDLTNILASSRSYAMLLFAWEGWHNAAGIPLKPLYEDFTALSNEAYKQDGFTDTGAYWRSWYNSPTFEDDLEHLYQQLEPLYLNLHAFVRRALHRRYGDRYINLRGPIPAHLLGDMWAQSWENIYDMVVPFPDKPNLDVTSTMLQ

SEQ ID NO: 21517 - protein, 340 aa, Homo sapiens
GMPPGIPPLMPGVPPLMPGMPPVMPGMPPGLHHQRKYTQSFCGENIMMPMGGMMPPGPGIPPLMPGMPPGMPPPVPRPGIPPMTQAQAVSAPGILNRPPAPTATVPAPQPPVTKPLFPSAGQMGTPVTSSSTASSNSESLSASSKALFPSTAQAQAAVQGPVGTDFKPLNSTPATTTEPPKPTFPAYTQSTASTTSTTNSTAAKPAASITSKPATLTTTSATSKLIHPDEDISLEERRAQLPKYQRNLPRPGQAPIGNPPVGPIGGMMPPQPGIPQQQGMRPPMPPHGQYGGHHQGMPGYLPGAMPPYGQGPPMVPPYQGGPPRPPMGMRPPVMSQGGRY

SEQ ID NO: 21518 - protein, 179 aa, Homo sapiens
MVPPPPGEESQTVILPPGWQSYLSPQGRRYYVNTTTNETTWERPSSSPGIPASPGSHRSSLPPTVNGYHASGTPAHPPETAHMSVRKSTGDSQNLGSSSPSKKQSKENTITINCVTFPHPDTMPEQQLLKPTEWSYCDYFWADKKDPQGNGTVAGFELLLQKQLKGKQMQKEMSEFIRE

SEQ ID NO: 21519 - protein, 305 aa, Homo sapiens
MPLLTLYLLLFWLSGYSIVTQITGPTTVNGLERGSLTVQCVYRSGWETYLKWWCRGAIWRDCKILVKTSGSEQEVKRDRVSIKDNQKNRTFTVTMEDLMKTDADTYWCGIEKTGNDLGVTVQVTIDPASTPAPTTPTSTTFTAPVTQEETSSSPTLTGHHLDNRHKLLKLSVLLPLIFTILLLLLVAASLLAWRMMKYQQKAAGMSPEQVLQPLEGDLCYADLTLQLAGTSPQKATTKLSSAQVDQVEVEYVTMASLPKEDISYASLTLGAEDQEPTYCNMGHLSSHLPGRGPEEPTEYSTISRP

SEQ ID NO: 21520 - protein, 2482 aa, Homo sapiens
MKGTDSGSCCRRRCDFGCCCRASRRAHYTPYRSGDATRTPQSPRQTPSRERRRPEPAGSWAAAAEEEEAAAAATPWMRDYFAEDDGEMVPRTSHTAAFLSDTKDRGPPVQSQIWRSGEKVPFVQTYSLRAFEKPPQVQTQALRDFEKHLNDLKKENFSLKLRIYFLEERMQQKYEASREDIYKRNIELKVEVESLKRELQDKKQHLDKTWADVENLNSQNEAELRRQFEERQQETEHVYELLENKIQLLQEESRLAKNEAARMAALVEAEKECNLELSEKLKGVTKNWEDVPGDQVKPDQYTEALAQRDKRIEELNQSLAAQERLVEQLSREKQQLLHLLEEPTSMEVQPMTEELLKQQKLNSHETTITQQSVSDSHLAELQEKIQQTEATNKILQEKLNEMSYELKCAQESSQKQDGTIQNLKETLKSRERETEELYQVIEGQNDTMAKLREMLHQSQLGQLHSSEGTSPAQQQVALLDLQSALFCSQLEIQKLQRVVRQKERQLADAKQCVQFVEAAAHESEQQKEASWKHNQELRKALQQLQEELQNKSQQLRAWEAEKYNEIRTQEQNIQHLNHSLSHKEQLLQEFRELLQYRDNSDKTLEANEMLLEKLRQRIHDKAVALERAIDEKFSALEEKEKELRQLRLAVRERDHDLERLRDVLSSNEATMQSMESLLRAKGLEVEQLSTTCQNLQWLKEEMETKFSRWQKEQESIIQQLQTSLHDRNKEVEDLSATLLCKLGPGQSEIAEELCQRLQRKERMLQDLLSDRNKQVLEHEMEIQGLLQSVSTREQESQAAAEKLVQALMERNSELQALRQYLGGRDSLMSQAPISNQQAEVTPTGRLGKQTDQGSMQIPSRDDSTSLTAKEDVSIPRSTLGDLDTVAGLEKELSNAKEELELMAKKERESQMELSALQSMMAVQEEELQVQAADMESLTRNIQIKEDLIKDLQMQLVDPEDIPAMERLTQEVLLLREKVASVESQGQEISGNRRQQLLLMLEGLVDERSRLNEALQAERQLYSSLVKFHAHPESSERDRTLQVELEGAQVLRSRLEEVLGRSLERLNRLETLAAIGGAAAGDDTEDTSTEFTDSIEEEAAHHSHQQLVKVALEKSLATVETQNPSFSPPSPMGGDSNRCLQEEMLHLRAEFHQHLEEKRKAEEELKELKAQIEEAGFSSVSHIRNTMLSLCLENAELKEQMGEAMSDGWEIEEDKEKGEVMVETVVTKEGLSESSLQAEFRKLQGKLKNAHNIINLLKEQLVLSSKEGNSKLTPELLVHLTSTIERINTELVGSPGKHQHQEEGNVTVRPFPRPQSLDLGATFTVDAHQLDNQSQPRDPGPQSAFSLPGSTQHLRSQLSQCKQRYQDLQEKLLLSEATVFAQANELEKYRVMLSESLVKQDSKQIQVDLQDLGYETCGRSENEAEREETTSPECEEHNSLKEMVLMEGLCSEQGRRGSTLASSSERKPLENQLGKQEEFRVYGKSENILVLRKDIKDLKAQLQNANKVIQNLKSRVRSLSVTSDYSSSLERPRKLRAVGTLEGSSPHSVPDEDEGWLSDGTGAFYSPGLQAKKDLESLIQRVSQLEAQLPKNGLEEKLAEELRSASWPGKYDSLIQDQARELSYLRQKIREGRGICYLITRHAKDTVKSFEDLLRSNDIDYYLGQSFREQLAQGSQLTERLTSKLSTKDHKSEKDQAGLEPLALRLSRELQEKEKVIEVLQAKLDARSLTPSSSHALSDSHRSPSSTSFLSDELEACSDMDIVSEYTHYEEKKASPSHSDSIHHSSHSAVLSSKPSSTSASQGAKAESNSNPISLPTPQNTPKEANQAHSGFHFHSIPKLASLPQAPLPSAPSSFLPFSPTGPLLLGCCETPVVSLAEAQQELQMLQKQLGESASTVPPASTATLLSNDLEADSSYYLNSAQPHSPPRGTIELGRILEPGYLGSSGKWDVMRPQKGSVSGDLSSGSSVYQLNSKPTGADLLEEHLGEIRNLRQRLEESICINDRLREQLEHRLTSTARGRGSTSNFYSQGLESIPQLCNENRVLREDNRRLQAQLSHVSREHSQETESLREALLSSRSHLQELEKELEHQKVERQQLLEDLREKQQEVLHFREERLSLQENDSRLQHKLVLLQQQCEEKQQLFESLQSELQIYEALYGNSKKGLKAYSLDACHQIPLSSDLSHLVAEVRALRGQLEQSIQGNNCLRLQLQQQLESGAGKASLSPSSINQNFPASTDPGNKQLLLQDSAVSPPVRDVGMNSPALVFPSSASSTPGSETPIINRANGLGLDTSPVMKTPPKLEGDATDGSFANKHGRHVIGHIDDYSALRQQIAEGKLLVKKIVSLVRSACSFPGLEAQGTEVLGSKGIHELRSSTSALHHALEESASLLTMFWRAALPSTHIPVLPGKVGESTERELLELRTKVSKQERLLQSTTEHLKNANQQKESMEQFIVSQLTRTHDVLKKARTNLEVKSLRALPCTPAL

SEQ ID NO: 21521 - protein, 501 aa, Homo sapiens
MVPASRSREGPENMVRIALQLDDGSRLQDSFCSGQTLWELLSHFPQIRECLQHPGGATPVCVYTRDEVTGEAALRGTTLQSLGLTGGSATIRFVMKCYDPVGKTPGSLGSSASAGQAAASAPLPLESGELSRGDLSRPEDADTSGPCCEHTQEKQSTRAPAAAPFVPFSGGGQRLGGPPGPTRPLTSSSAKLPKSLSSPGGPSKPKKSKSGQDPQQEQEQERERDPQQEQERERPVDREPVDREPVVCHPDLEERLQAWPAELPDEFFELTVDDVRRRLAQLKSERKRLEEAPLVTKAFREAQIKEKLERYPKVALRVLFPDRYVLQGFFRPSETVGDLRDFVRSHLGNPELSFYLCLSSFGRMDGRGPRCFLTRRCLLSSVITPPKTVLDDHTQTLFQANLFPAALVHLGAEEPAGVYLEPGLLEHAISPSAADVLVARYMSRAAGSPSPLPAPDPAPKSEPAAEEGALVPPEPIPGTAQPVKRSLGKVPKWLKLPASKR

SEQ ID NO: 21522 - protein, 849 aa, Homo sapiens
MTENKTVSSSSTRDDQTNIGLTCQEVKALREKAWSRTNEGNAMSQSLVLYGASKENSEGFHESKMTNTEGVNKGIYFSYPCRRHSCAVVNIPAPCVNKMISHIQDVESKIQEHLKRFETSFEEWSRTSSTKDLKEDWSVTTPVKEVKPGEKRDEKCPELKQEMETLLSEAIRLIKSLETDRADAEEALKQQRSRKNMINMKIDSWSVWKLQELPLAVQKEHEAYLSDVIELQWHLEDKANQLQHFEKQKTELEEANAKIQADIDYMNEHGPLLDSKQNQELQDLKNHYKKKMEVMDLHRKVNEELEEALEACENARLKAQQIKEEIDKDIYQDEKTIEAYKREIYQLNSLFDHYSSSVINVNTNIEEKEEEVTEAIRETKSSKNELHSLSKMLEDLRRVYDQLTWKQKSHENQYLEAVNDFYAAKKTWDIELSDVAKDFSAISLACTKLTEDNKKLEIDINKITVKTNESIRKKSKYESEIKYLTIMKLKNDKHLKNIYKEAYRIGTLFHLTKHKTDEMEDKIAEVRRKFKGREEFLKKLTQGEVAAGMVLQKKLYSIYEVQALERKELIKNRAICAMSLAELQEPLLQLEDEAERIRSLDKEHSVMLNNIIDQKDLIRRKVGKVKKKLRKKGKKTLDALIETESKRSAIFKDLEATKSKTMIFYAKINELNEELKAKEEEKKSFDQTLEILKNKFITMRFKREHAQTVFDHYMQEKKDCEERIFEEDQRFRVLLAVRQKTLQDTQKIIADSLEENLRLAQEYQQLQITFLKEKDNYFNIYDKQLSLDTSIRDKKQLCQLQRRMHTLWQEHFKLVVLFSQMRLANFQTDSQESIQKILAVQNQYDLEKE

SEQ ID NO: 21523 - protein, 232 aa, Homo sapiens
HIVKEESDTEAELALAASQPARLEERLIRDQDLGASLLPAAPQEQWRQLDSTQKEQYWDLMLETYGKMVSGGDRQENDKENLNLENHRDQELLHASCQASGEVPSQASLRGFFTEDEPGCFGEGENLPEALQNIQDEGTGEQLSPQERISEKQLGQHLPNPHSGEMSTMWLEEKRETSQKGQPRAPMAQKLPTCRECGKTFYRNSQLIFHQRTHTGETYFQCTICKKAFLRS

SEQ ID NO: 21524 - protein, 631 aa, Homo sapiens
MEYCSSGSLLSVLESPENAFGLPEDEFLVVLRCVVAGMNHLRENGIVHRDIKPGNIMRLVGEEGQSIYKLTDFGAARELDDDEKFVSVYGTEEYLHPDMYERAVLRKPQQKAFGVTVDLWSIGVTLYHAATGSLPFIPFGGPRRNKEIMYRITTEKPAGAIAGAQRRENGPLEWSYTLPITCQLSLGLQSQLVPILANILEVEQAKCWGFDQFFAETSDILQRVVVHVFSLSQAVLHHIYIHAHNTIAIFQEAVHKQTSVAPRHQEYLFEGHLCVLEPSVSAQHIAHTTASSPLTLFSTAIPKGLAFRDPALDVPKFVPKVDLQADYNTAKGVLGAGYQALRLARALLDGQELMFRGLHWVMEVLQATCRRTLEVARTSLLYLSSSLGTERFSSVAGTPEIQELKAAAELRSRLRTLAEVLSRCSQNITETQESLSSLNRELVKSRDQVHEDRSIQQIQCCLDKMNFIYKQFKKSRMRPGLGYNEEQIHKLDKVNFSHLAKRLLQVFQEECVQKYQASLVTHGKRMRVVHETRNHLRLVGCSVAACNTEAQGVQESLSKLLEELSHQLLQDRAKGAQASPPPIAPYPSPTRKDLLLHMQELCEGMKLLASDLLDNNRIIERLNRVPAPPDV

SEQ ID NO: 21525 - protein, 1656 aa, Homo sapiens
SLPLPSPQPPLPALFPAQGAGPPFPPPPPGRGEDMAAHRPVEWVQAVVSRFDEQLPIKTGQQNTHTKVSTEHNKECLINISKYKFSLVISGLTTILKNVNNMRIFGEAAEKNLYLSQLIILDTLEKCLAGQPKDTMRLDETMLVKQLLPEICHFLHTCREGNQHAAELRNSASGVLFSLSCNNFNAVFSRISTRLQELTVCSEDNVDVHDIELLQYINVDCAKLKRLLKETAFKFKALKKVAQLAVINSLEKAFWNWVENYPDEFTKLYQIPQTDMAECAEKLFDLVDGFAESTKRKAAVWPLQIILLILCPEIIQDISKDVVDENNMNKKLFLDSLRKALAGHGGSRQLTESAAIACVKLCKASTYINWEDNSVIFLLVQSMVVDLKNLLFNPSKPFSRGSQPADVDLMIDCLVSCFRISPHNNQHFKICLAQNSPSTFHYVLVNSLHRIITNSALDWWPKIDAVYCHSVELRNMFGETLHKAVQGCGAHPAIRMAPSLTFKEKVTSLKFKEKPTDLETRSYKYLLLSMVKLIHADPKLLLCNPRKQGPETQGSTAELITGLVQLVPQSHMPEIAQEAMEALLVLHQLDSIDLWNPDAPVETFWEISSQMLFYICKKLTSHQMLSSTEILKWLREILICRNKFLLKNKQADRSSCHFLLFYGVGCDIPSSGNTSQMSMDHEELLRTPGASLRKGKGNSSMDSAAGCSGTPPICRQAQTKLEVALYMFLWNPDTEAVLVAMSCFRHLCEEADIRCGVDEVSVHNLLPNYNTFMEFASVSNMMSTGRAALQKRVMALLRRIEHPTAGNTEAWEDTHAKWEQATKLILNYPKAKMEDGQAAESLHKTIVKRRMSHVSGGGSIDLSDTDSLQEWINMTGFLCALGGVCLQQRSNSGLATYSPPMGPVSERKGSMISVMSSEGNADTPVSKFMDRLLSLMVCNHEKVGLQIRTNVKDLVGLELSPALYPMLFNKLKNTISKFFDSQGQVLLTDTNTQFVEQTIAIMKNLLDNHTEGSSEHLGQASIETMMLNLVRYVRVLGNMVHAIQIKTKLCQLVEVMMARRDDLSFCQEMKFRNKMVEYLTDWVMGTSNQAADDDVKCLTRDLDQASMEAVVSLLAGLPLQPEEGDGVELMEAKSQLFLKYFTLFMNLLNDCSEVEDESAQTGGRKRGMSRRLASLRHCTVLAMSNLLNANVDSGLMHSIGLGYHKDLQTRATFMEVLTKILQQGTEFDTLAETVLADRFERLVELVTMMGDQGELPIAMALANVVPCSQWDELARVLVTLFDSRHLLYQLLWNMFSKEVELADSMQTLFRGNSLASKIMTFCFKVYGATYLQKLLDPLLRIVITSSDWQHVSFEVDPTRLEPSESLEENQRNLLQMTEKFFHAIISSSSEFPPQLRSVCHCLYQVVSQRFPQNSIGAVGSAMFLRFINPAIVSPYEAGILDKKPPPRIERGLKLMSKILQSIANHVLFTKEEHMRPFNDFVKSNFDAARRFFLDIASDCPTSDAVNHSLSFISDGNVLALHRLLWNNQEKIGQYLSSNRDHKAVGRRPFDKMATLLAYLGPPEHKPVADTHWSSLNLTSSKFEEFMTRHQVHEKEEFKALKTLSIFYQAGTSKAGNPIFYYVARRIYYPNIVKGITKHLPRNSYPTLISGFSFPLL

SEQ ID NO: 21526 - protein, 354 aa, Homo sapiens
MSNSVPLLCFWSLCYCFAAGSPVPFGPEGRLEDKLHKPKATQTEVKPSVRFNLRTSKDPEHEGCYLSVGHSQPLEDCSFNMTAKTFFIIHGWTMSGIFENWLHKLVSALHTREKDANVVVVDWLPLAHQLYTDAVNNTRVVGHSIARMLDWLQEKDDFSLGNVHLIGYSLGAHVAGYAGNFVKGTVGRITGLDPAGPMFEGADIHKRLSPDDADFVDVLHTYTRSFGLSIGIQMPVGHIDIYPNGGDFQPGCGLNDVLGSIAYGTITEVVKCEHERAVHLFVDSLVNQDKPSFAFQCTDSNRFKKGICLSCRKNRCNSIGYNAKKMRNKRNSKMYLKTRAGMPFRGNLQSLECP

SEQ ID NO: 21527 - protein, 171 aa, Homo sapiens
MRRGRCLPVFHLSRKVTSLVPESCLLILLGLVLGGIVLAVAKKAEYQLEPGTFFLFLLPPIVLDSGYFMPSRLFFDNLGAILTYAVVGTLWNAFTTGAALWGLQQAGLVGLTLPSMPSRNSVAETSVTNLLRESGSGACLDLQVIDTVRSGRDREDAVMHHLLCGGLYKPR

SEQ ID NO: 21528 - protein, 742 aa, Homo sapiens
MAGERGASAVLFDITEDRAAAEQLQQPLGLTWPVVLIWGNDAEKLMEFVYKNQKAHVRIELKEPPAWPDYDVWILMTVVGTIFVIILASVLRIRCRPRHSRPDPLQQRTAWAISQLATRRYQASCRQARGEWPDSGSSCSSAPVCAICLEEFSEGQELRVISCLHEFHRNCVDPWLHQHRTCPLCMFNITEGDSFSQSLGPSRSYQEPGRRLHLIRQHPGHAHYHLPAAYLLGPSRSAVARPPRPGPFLPSQEPGMGPRHHRFPRAAHPRAPGEQQRLAGAQHPYAQGWGLSHLQSTSQHPAACPVPLRRARPPDSSGSGESYCTERSGYLADGPASDSSSGPCHGSSSDSVVNCTDISLQGVHGSSSTFCSSLSSDFDPLVYCSPKGDPQRVDMQPSVTSRPRSLDSVVPTGETQVSSHVHYHRHRHHHYKKRFQWHGRKPGPETGVPQSRPPIPRTQPQPEPPSPDQQVTRSNSAAPSGRLSNPQCPRALPEPAPGPVDASSICPSTSSLFNLQKSSLSARHPQRKRRGGPSEPTPGSRPQDATVHPACQIFPHYTPSVAYPWSPEAHPLICGPPGLDKRLLPETPGPCYSNSQPVWLCLTPRQPLEPHPPGEGPSEWSSDTAEGRPCPYPHCQVLSAQPGEFSEGSGCGRERRLQLNISGQVKSANKGLMEAEKDTAEMTTKILNHRDSVSCWLECRNTPPLPGATPLVGRSQGGPREVLVWLRHQKGTWKAGCDGSCL

SEQ ID NO: 21529 - protein, 181 aa, Homo sapiens
MTWPVQAVRWEKIQPRQIDLLTYCNLVHGRNFTSKFPRQIVSNCSHGRWSVIVIPDVTVSDSGLYRCYLQASAGENETFVMRLTVAEGKTDNQYTLFVAGGTVLLLLFVISITTIIVIFLNRRRRRERRDLFTESWDTQKAPNNYRSPISTSQPTNQSMDDTREDIYVNYPTFSRRPKTRV

SEQ ID NO: 21530 - protein, 188 aa, Homo sapiens
LCYCFAAGSPVPFGPEGRLEDKLHKPKATQTEVKPSVRFNLRTSKDPEHEGCYLSVGHSQPLEDCSFNMTAKTFFIIHGWTMSGIFENWLHKLVSALHTREKDANVVVVDWLPLAHQLYTDAVNNTRVVGHSIARMLDWLQVLGDERESPVTSRISNPIFLRNAGHASVAMNFWSLIKIFEIKSFIEL

SEQ ID NO: 21531 - protein, 742 aa, Homo sapiens
MSGGHQLQLAALWPWLLMATLQAGFGRTGLVLAAAVESERSAEQKAIIRVIPLKMDPTGKLNLTLEGVFAGVAEITPAEGKLMQARMAGERGASAVLFDITEDRAAAEQLQQPLGLTWPVVLIWGNDAEKLMEFVYKNQKAHVRIELKEPPAWPDYDVWILMTVVGTIFVIILASVLRIRCRPRHSRPDPLQQRTAWAISQLATRRYQASCRQARGEWPDSGSSCSSAPVCAICLEEFSEGQELRVISCLHEFHRNCVDPWLHQHRTCPLCMFNITEGDSFSQSLGPSRSYQEPGRRLHLIRQHPGHAHYHLPAAYLLGPSRSAVARPPRPGPFLPSQEPGMGPRHHRFPRAAHPRAPGEQQRLAGAQHPYAQGWGLSHLQSTSQHPAACPVPLRRARPPDSSGSGESYCTERSGYLADGPASDSSSGPCHGSSSDSVVNCTDISLQGVHGSSSTFCSSLSSDFDPLVYCSPKGDPQRVDMQPSVTSRPRSLDSVVPTGETQVSSHVHYHRHRHHHYKKRFQWHGRKPGPETGVPQSRPPIPRTQPQPEPPSPDQQVTRSNSAAPSGRLSNPQCPRALPEPAPGPVDASSICPSTSSLFNLQKSSLSARHPQRKRRGGPSEPTPGSRPQDATVHPACQIFPHYTPSVAYPWSPEAHPLICGPPGLDKRLLPETPGPCYSNSQPVWLCLTPRQPLEPHPPGEGPSEWSSDTAEGRPCPYPHCQVLSAQPGSEEELEELCEQAV

SEQ ID NO: 21532 - protein, 391 aa, Homo sapiens
MVMFKKIKSFEVVFNDPEKVYGSGEKVAGRVIVEVCEVTRVKAVRILACGVAKVLWMQGSQQCKQTSEYLRYEDTLLLEDQPTGENEMVIMRPGNKYEYKFGFELPQGPLGTSFKGKYGCVDYWVKAFLDRPSQPTQETKKNFEVVDLVDVNTPDLMAPVSAKKEKKVSCMFIPDGRVSVSARIDRKGFCEGDEISIHADFENTCSRIVVPKAAIVARHTYLANGQTKVLTQKLSSVRGNHIISGTCASWRGKSLRVQKIRPSILGCNILRVEYSLLIYVSVPGSKKVILDLPLVIGSRSGLSSRTSSMASRTSSEMSWVDLNIPDTPEAPPCYMDVIPEDHRLESPTTPLLDDMDGSQDSPIFMYAPEFKFMPPPTYTEVDPCILNNNVQ

SEQ ID NO: 21533 - protein, 99 aa, Homo sapiens
AVIICIKNKEFEKASKILKKHMSKDPTTQKLRNDLLNIIREKNLAHPVIQNFSYETFQQKMLRFLESHLDDAEPYLLTIGFVSELVCILSIFLVKEAEN

SEQ ID NO: 21534 - protein, 483 aa, Homo sapiens
NIQSSASQPPRPQQGQVKLTMAQLTQLTQGHGGNQGLTVVIQGQGQTTGQLQLIPQGVTVLPGPGQQLMQAAMPNGTVQRFLFTPLATTATTASTTTTTVSTTAAGTGEQRQSKLSPQMQVHQDKTLPPAQSSSVGPAEAQPQTAQPSAQPQPQTQPQSPAQPEVQTQPEVQTQTTVSSHVPSEAQPTHAQSSKPQVAAQSQPQSNVQGQSPVRVQSPSQTRIRPSTPSQLSPGQQSQVQTTTSQPIPIQPHTSLQIPSQGQPQSQPQVVMKHNAVIEHLKQKKSMTPAEREENQRMIVCNQVMKYILDKIDKEEKQAAKKRKREESVEQKRSKQNATKLSALLFKHKEQLRAEILKKRALLDKDLQIEVQEELKRDLKIKKEKDLMQLAQATAVAAPCPPVTPAPPAPPAPPPSPPPPPAVQHTGLLSTPTLPAASQKRKREEEKDSSSKSKKKKMISTTSKETKKDTKLYCICKTPYDESK

SEQ ID NO: 21535 - protein, 176 aa, Homo sapiens
MIQEWLQVEGLRLWLQAQNDSRGAGKAPFLSPQSWPPPLPPAQSEIMKVVNLKQAILQAWKERWSDYQWAINMKKFFPKGATWDILNLADALLEQAMIGPSPNPLILSYLKYAISSQMVSYSSVLTAISKFDDFSRDLCVQALLDIMDMFCDRLSCHGKAEECIGLCRALLSALHW

SEQ ID NO: 21536 - protein, 516 aa, Homo sapiens
MDLVGVASPEPGTAAAWGPSKCPWAIPQNTISCSLADVMSEQLAKELQLEEEAAVFPEVAVAEGPFITGENIDTSSDLMLAQMLQMEYDREYDAQLRREEKKFNGDSKVSISFENYRKVHPYEDSDSSEDEVDWQDTRDDPYRPAKPVPTPKKGFIGKGKDITTKHDEVVCGRKNTARMENFAPEFQVGDGIGMDLKLSNHVFNALKQHAYSEERRSARLHEKKEHSTAEKAVDPKTRLLMYKMVNSGMLETITGCISTGKESVVFHAYGGSMEDEKEDSKVIPTECAIKVFKTTLNEFKNRDKYIKDDFRFKDRFSKLNPRKIIRMWAEKEMHNLARMQRAGIPCPTVVLLKKHILVMSFIGHDQVPAPKLKEVKLNSEEMKEAYYQTLHLMRQLYHECTLVHADLSEYNMLWHAGKVWLIDVSQSVEPTHPHGLEFLFRDCRNVSQKGGVKEALSERELFNAVSGLNITADNEADFLAEIEALEKMNEDHVQKNGRKAASFLKDDGDPPLLYDE

SEQ ID NO: 21537 - protein, 926 aa, Homo sapiens
MAQCVQSVQELIPDSFVPCVAALCSDEAERLTRLNHLSFAELLKPFSRLTSEVHMRDPNNQLHVIKNLKIAVSNIVTQPPQPGAIRKLLNDVVSGSQPAEGLVANVITAGDYDLNISATTPWFESYRETFLQSMPALDHEFLNHYLACMLVASSSEAEPVEQFSKLSQEQHRIQHNSDYSYPKWFIPNTLKYYVLLHDVSAGDEQRAESIYEEMKQKYGTQGCYLLKINSRTSNRASDEQIPDPWSQYLQKNSIQNQESYEDGPCTITSNKNSDNNLLSLDGLDNEVKDGLPNNFRAHPLQLEQSSDPSNSIDGPDHLRSASSLHETKKGNTGIIHGACLTLTDHDRIRQFIQEFTFRGLLPHIEKTIRQLNDQLISRKGLSRSLFSATKKWFSGSKVPEKSINDLKNTSGLLYPPEAPELQIRKMADLCFLVQHYDLAYSCYHTAKKDFLNDQAMLYAAGALEMAAVSAFLQPGAPRPYPAHYMDTAIQTYRDICKNMVLAERCVLLSAELLKSQSKYSEAAALLIRLTSEDSDLRSALLLEQAAHCFINMKSPMVRKYAFHMILAGHRFSKAGQKKHALRCYCQAMQVYKGKGWSLAEDHINFTIGRQSYTLRQLDNAVSAFRHILINESKQSAAQQGAFLREYLYVYKNVSQLSPDGPLPQLPLPYINSSATRVFFGHDRRPADGEKQAATHVSLDQEYDSESSQQWRELEEQVVSVVNKGVIPSNFHPTQYCLNSYSDNSRFPLAVVEEPITVEVAFRNPLKVLLLLTDLSLLWKFHPKDFSGKDNEEVKQLVTSEPEMIGAEVISEFLINGEESKVARLKLFPHHIGELHILGVVYNLGTIQGSMTVDGIGALPGCHTGKYSLSMSVRGKQDLEIQGPRLNNTKEEKTSVKYGPDRRLDPIITEEMPLLETLALAQEVNQR

SEQ ID NO: 21538 - protein, 575 aa, Homo sapiens
MLDHQEDGGEALRAWRASWRLSWEQLQPCLDRAATLASRRDLFFRQALHKARHVLEARQDLSLRPLIWAAVREGCPGPLLATLDQAGAGDPGVAARALACVADVLGCMAEGRGGLRSGPAANPEWMRPFSYLECGDLAAGVEALAQERDKWLSRPALLVRAARHYEGAGQILIRQAVMSAQHFVSTEQVELPGPGQWVVAECPARVDFSGGWSDTPPLAYELGGAVLGLAVRVDGRRPIGARARRIPEPELWLAVGPRQDEMTVKIVCRCLADLRDYCQPHAPGALLKAAFICAGIVHVHSELQLSEQLLRTFGGGFELHTWSELPHGSGLGTSSILAGTALAALQRAAGRVVGTEALIHAVLHLEQVLTTGGGWQDQVGGLMPGIKVGRSRAQLPLKVEVEEVTVPEGFVQKLNDHLLLVYTGKTRLARNLLQDVLRSWYARLPAVVQNAHSLVRQTEECAEGFRQGSLPLLGQCLTSYWEQKKLMAPGCEPLTVRRMMDVLAPHVHGQSLAGAGGGGFLYLLTKEPQQKEALEAVLAKTEGLGNYSIHLVEVDTQGLSLKLLGTEASTCCPFP

SEQ ID NO: 21539 - protein, 471 aa, Homo sapiens
MSRRVVRQSKFRHVFGQAAKADQAYEDIRVSKVTWDSSFCAVNPKFLAIIVEAGGGGAFIVLPLAKTGRVDKNYPLVTGHTAPVLDIDWCPHNDNVIASASDDTTIMVWQIPDYTPMRNITEPIITLEGHSKRVGILSWHPTARNVLLSAGGDNVIIIWNVGTGEVLLSLDDMHPDVIHSVCWNSNGSLLATTCKDKTLRIIDPRKGQVVAEQARPHEGARPLRAVFTADGKLLSTGFSRMSERQLALWDPNNFEEPVALQEMDTSNGVLLPFYDPDSSIVYLCGKGDSSIRYFEITDEPPFVHYLNTFSSKEPQRGMGFMPKRGLDVSKCEIARFYKLHERKCEPIIMTVPRKSDLFQDDLYPDTPGPEPALEADEWLSGQDAEPVLISLRDGYVPPKHRELRVTKRNILDVRPPSGPRRSQSASDAPLSQHTLETLLEEIKALRERVQAQEQRITALENMLCELVDGTD

SEQ ID NO: 21540 - protein, 632 aa, Homo sapiens
MKNCGRRFHNEVGKFRFLNELIKVVSPKYLGDRVSEKVKTKVIELLYSWTMALPEEAKIKDAYHMLKRQGIVQSDPPIPVDRTLIPSPPPRPKNPVFDDEEKSKLLAKLLKSKNPDDLQEANKLIKSMVKEDEARIQKVTKRLHTLEEVNNNVRLLSEMLLHYSQEDSSDGDRELMKELFDQCENKRRTLFKLASETEDNDNSLGDILQASDNLSRVINSYKTIIEGQVINGEVATLTLPDSEGNSQCSNQGTLIDLAELDTTNSLSSVLAPAPTPPSSGIPILPPPPQASGPPRSRSSSQAEATLGPSSTSNALSWLDEELLCLGLADPAPNVPPKESAGNSQWHLLQREQSDLDFFSPRPGTAACGASDAPLLQPSAPSSSSSQAPLPPPFPAPVVPASVPAPSAGSSLFSTGVAPALAPKVEPAVPGHHGLALGNSALHHLDALDQLLEEAKVTSGLVKPTTSPLIPTTTPARPLLPFSTGPGSPLFQPLSFQSQGSPPKGPELSLASIHVPLESIKPSSALPVTAYDKNGFRILFHFAKECPPGRPDVLVVVVSMLNTAPLPVKSIVLQAAVPKSMKVKLQPPSGTELSPFSPIQPPAAITQVMLLANPLKWQAVSYGHLGRTWNLAS

SEQ ID NO: 21541 - protein, 372 aa, Homo sapiens
MKSVLVVALLVIFQVCLCQDEVTDDYIGDNTTVDYTLFESLCSKKDVRNFKAWFLPIMYSIICFVGLLGNGLVVLTYIYFKRLKTMTDTYLLNLAVADILFLLTLPFWAYSAAKSWVFGVHFCKLIFAIYKMSFFSGMLLLLCISIDRYVAIVQAVSAHRHRARVLLISKLSCVGIWILATVLSIPELLYSDLQRSSSEQAMRCSLITEHVEAFITIQVAQMVIGFLVPLLAMSFCYLVIIRTLLQARNFERNKAIKVIIAVVVVFIVFQLPYNGVVLAQTVANFNITSSTCELSKQLNIAYDVTYSLACVRCCVNPFLYAFIGVKFRNDLFKLFKDLGCLSQEQLRQWSSCRHIRRSSMSVEAETTTTFSP

SEQ ID NO: 21542 - protein, 159 aa, Homo sapiens
MKVVNLKQAILQAWKERWSDYQWAINMKKFFPKGATWDILNLADALLEQAMIGPSPNPLILSYLKYAISSQMVSYSSVLTAISKFDDFSRDLCVQALLDIMDMFCDRLSCHGKAEECIGLCRALLSALHWLLRCTAASAERLREGLEAGTPAAGEKQLA

SEQ ID NO: 21543 - protein, 457 aa, Homo sapiens; identical to SEQ ID NO: 12260

SEQ ID NO: 21544 - protein, 740 aa, Homo sapiens
MEKLGVEPEEEGGGDDDEEDAEAWAMELADVGAAASSQGVHDQVLPTPNASSRVIVHVDLDCFYAQVEMISNPELKDKPLGVQQKYLVVTCNYEARKLGVKKLMNVRDAKEKCPQLVLVNGEDLTRYREMSYKVTELLEEFSPVVERLGFDENFVDLTEMVEKRLQQLQSDELSAVTVSGHVYNNQSINLLDVLHIRLLVGSQIAAEMREAMYNQLGLTGCAGVASNKLLAKLVSGVFKPNQQTVLLPESCQHLIHSLNHIKEIPGIGYKTAKCLEALGINSVRDLQTFSPKILEKELGISVAQRIQKLSFGEDNSPVILSGPPQSFSEEDSFKKCSSEVEAKNKIEELLASLLNRVCQDGRKPHTVRLIIRRYSSEKHYGRESRQCPIPSHVIQKLGTGNYDVMTPMVDILMKLFRNMVNVKMPFHLTLLSVCFCNLKALNTAKKGLIDYYLMPSLSTTSRSGKHSFKMKDTHMEDFPKDKETNRDFLPSGRIESTRTRESPLDTTNFSKEKDINEFPLCSLPEGVDQEVFKQLPVDIQEEILSGKSREKFQGKGSVSCPLHASRGVLSFFSKKQMQDIPINPRDHLSSSKQVSSVSPCEPGTSGFNSSSSSYMSSQKDYSYYLDNRLKDERISQGPKEPQGFHFTNSNPAVSAFHSFPNLQSEQLFSRNHTTDSHKQTVATDSHEGLTENREPDSVDEKITFPSDIDPQVFYELPEAVQKELLAEWKRAGSDFHIGHK

SEQ ID NO: 21545 - protein, 1127 aa, Homo sapiens
MTSLYGRHAEKTTDMPKPSAPKVHVQRSVSRDTIAIHFSASGEEEEEEEEEFREYFEEGLDDQSIVTGLEAKEDLYLEPQVGHDPAGPAASPVLADGLSVSQAPAILPVSKNTVKLLESPVPAAQVLSTVPLAVSPGSSSSGPLASSPSVSSLSEQKTSSSSPLSSPSKSPILSSSASTSTLSSAKPFMSLVKSLSTEVEPKESPHPARHRHLMKTLVKSLSTDTSRQESDTVSYKPPDSKLNLHLFKQFTQPRNTGGDSKTAPSSPLTSPSDTRSFFKVPEMEAKIEDTKRRLSEVIYEPFQLLSKIIGEESGSHRPKALSSSASELSNLSSLNGHLESNNNYSIKEEECDSEGDGYGSDSNIPRSDHPKSTGEPTREIELKSSQGSSLKDLGLKTSSLVLEKCSLSALVSKEDEEFCELYTEDFDLETEGESKVDKLSDIPLKPEVLAEDGVVLDSEDEVDSAVQHPELPVKTLGFFIMCVYVYLILPLPHYVSGLFLGIGLGFMTAVCVIWFFTPPSAHKYHKLHKNLRHWNTRSLDIKEPEILKGWMNEIYNYDPETYHATLTHSVFVRLEGGTLRLSKPNKNISRRASYNEPKPEVTYISQKIYDLSDSKIYLVPKTLARKRIWNKKYPICIELGQQDDFMSKAQTDKETSEEKPPAEGSEDPKKPPRPQEGTRSSQRDQILYLFGRTGREKEEWFRRFILASKLKSEIKKSSGVSGGKPGLLPAHSRHNSPSGHLTHSRSSSKGSVEEIMSQPKQKELAGSVRQKMLLDYSVYMGRCVPQESRSPQRSPLQSAESSPTAGKKLPEVPPSEEEEQEAWVNALLGRIFWDFLGEKYWSDLVSKKIQMKLSKIKLPYFMNELTLTELDMGVAVPKILQAFKPYVDHQGLWIDLEMSYNGSFLMTLETKMNLTKLGKEPLVEALKVGEIGKEGCRPRAFCLADSDEESSSAGSSEEDDAPEPSGGDKQLLPGAEGYVGGHRTSKIMRFVDKITKSKYFQKATETEFIKKKIEEVSNTPLLLTVEVQECRGTLAVNIPPPPTDRVWYGFRKPPHVELKARPKLGEREVTLVHVTDWIEKKLEQEFQKVFVMPNMDDVYITIMHSAMDPRSTSCLLKDPPVEAADQP

SEQ ID NO: 21546 - protein, 580 aa, Homo sapiens
MKKDVRILLVGEPRVGKTSLIMSLVSEEFPEEVPPRAEEITIPADVTPERVPTHIVDYSEAEQSDEQLHQEISQANVICIVYAVNNKHSIDKVTSRWIPLINERTDKDSRLPLILVGNKSDLVEYSSMETILPIMNQYTEIETCVECSAKNLKNISELFYYAQKAVLHPTGPLYCPEEKEMKPACIKALTRIFKISDQDNDGTLNDAELNFFQRICFNTPLAPQALEDVKNVVRKHISDGVADSGLTLKGFLFLHTLFIQRGRHETTWTVLRRFGYDDDLDLTPEYLFPLLKIPPDCTTELNHHAYLFLQSTFDKHDLDRDCALSPDELKDLFKVFPYIPWGPDVNNTVCTNERGWITYQGFLSQWTLTTYLDVQRCLEYLGYLGYSILTEQESQASAVTVTRDKKIDLQKKQTQRNVFRCNVIGVKNCGKSGVLQALLGRNLMRQKKIREDHKSYYAINTVYVYGQEKYLLLHDISESEFLTEAEIICDVVCLVYDVSNPKSFEYCARIFKQHFMDSRIPCLIVAAKSDLHEVKQEYSISPTDFCRKHKMPPPQAFTCNTADAPSKDIFVKLTTMAMYP

SEQ ID NO: 21547 - protein, 879 aa, Homo sapiens
MQPGATTCTEDRIQHALERCLHGLSLSRRSTSWSAGLCLNCWSLQELVSRDPGHFLILLEQILQKTREVQEKGTYDLLTPLALLFYSTVLCTPHFPPDSDLLLKAASTYHRFLTWPVPYCSICQELLTFIDAELKAPGISYQRLVRAEQGLPIRSHRSSTVTVLLLNPVEVQAEFLAVANKLSTPGHSPHSAYTTLLLHAFQATFGAHCDVPGLHCRLQAKTLAELEDIFTETAEAQELASGIGDAAEARRWLRTKLQAVGEKAGFPGVLDTAKPGKLHTIPIPVARCYTYSWSQDSFDILQEILLKEQELLQPGILGDDEEEEEEEEEVEEDLETDGHCAERDSLLSTSSLASHDSTLSLASSQASGPALSRHLLTSFVSGLSDGMDSGYVEDSEESSSEWPWRRGSQERRGHRRPGQKFIRIYKLFKSTSQLVLRRDSRSLEGSSDTALPLRRAGSLCSPLDEPVSPPSRAQRSRSLPQPKLGTQLPSWLLAPASRPQRRRPFLSGDEDPKASTLRVVVFGSDRISGKVARAYSNLRRLENNRPLLTRFFKLQFFYVPVKRSHGTSPGACPPPRSQTPSPPTDSPRHASPGELGTTPWEESTNDISHYLGMLDPWYERNVLGLMHLPPEVLCQSLKAEAQALEGSPTQLPILADMLLYYCRFAARPVLLQVYQTELTFITGEKTTEIFIHSLELGHSAATRAIKASGPGSKRLGIDGDREAVPLTLQIIYSKGAISGRSRWSNLEKVCTSVNLNKACRKQEELDSSMEALTLNLTEVVKRQNSKSKKGFNQISTSQIKVDKVQIIGSNSCPFAVCLDQDERKILQSVVRCEVSPCYKPEKSDLSSPPQTPPDLPAQAAPDLCSLLCLPIMTFSGALP

SEQ ID NO: 21548 - protein, 637 aa, Homo sapiens
MNVRDAKEKCPQLVLVNGEDLTRYREMSYKVTELLEEFSPVVERLGFDENFVDLTEMVEKRLQQLQSDELSAVTVSGHVYNNQSINLLDVLHIRLLVGSQIAAEMREAMYNQLGLTGCAGVASNKLLAKLVSGVFKPNQQTVLLPESCQHLIHSLNHIKEIPGIGYKTAKCLEALGINSVRDLQTFSPKILEKELGISVAQRIQKLSFGEDNSPVILSGPPQSFSEEDSFKKCSSEVEAKNKIEELLASLLNRVCQDGRKPHTVRLIIRRYSSEKHYGRESRQCPIPSHVIQKLGTGNYDVMTPMVDILMKLFRNMVNVKMPFHLTLLSVCFCNLKALNTAKKGLIDYYLMPSLSTTSRSGKHSFKMKDTHMEDFPKDKETNRDFLPSGRIESTRTRESPLDTTNFSKEKDINEFPLCSLPEGVDQEVFKQLPVDIQEEILSGKSREKFQGKGSVSCPLHASRGVLSFFSKKQMQDIPINPRDHLSSSKQVSSVSPCEPGTSGFNSSSSSYMSSQKDYSYYLDNRLKDERISQGPKEPQGFHFTNSNPAVSAFHSFPNLQSEQLFSRNHTTDSHKQTVATDSHEGLTENREPDSVDEKITFPSDIDPQVFYELPEAVQKELLAEWKRAGSDFHIGHK

SEQ ID NO: 21549 - protein, 844 aa, Homo sapiens
KKKRKVEPPTPQEPGPAKVAVTSSSSSSSSSSSIPSAEKVPTTKSTLWQEEMRTKDQPDGSSLSPAQSPSQSQPPAASSLREPGLESKEEESAMSSDRMDCGRKVRVESGYFSLEKTKQDLKAEEQQLPPPLSPPSPSTPNHRRSQVIEKFEALDIEKAEHMETNAVGPSPSSDTRQGRSEKRAFPRKRPDLLNFKKGWLTKQYEDGQWKKHWFVLADQSLRYYRDSVAEEAADLDGEIDLSACYDVTEYPVQRNYGFQIHTKEGEFTLSAMTSGIRRNWIQTIMKHVHPTTAPDVTSSLPEEKNKSSCSFETCPRPTEKQEAELGEPDPEQKRSRARERRREGRSKTFDWAEFRPIQQALAQERVGGVGPADTHEPLRPEAEPGELERERARRREERRKRFGMLDATDGPGTEDAALRMEVDRSPGLPMSDLKTHNVHVEIEQRWHQVETTPLREEKQVPIAPVHLSSEDGGDRLSTHELTSLLEKELEQSQKEASDLLEQNRLLQDQLRVALGREQSAREGYVLQATCERGFAAMEETHQKKIEDLQRQHQRELEKLREEKDRLLAEETAATISAIEAMKNAHREEMERELEKSQRSQISSVNSDVEALRRQYLEELQSVQRELEVLSEQYSQKCLENAHLAQALEAERQALRQCQRENQELNAHNQELNNRLAAEITRLRTLLTGDGGGEATGSPLAQGKDAYELEVLLRVKESEIQYLKQEISSLKDELQTALRDKKYASDKYKDIYTELSIAKAKADCDISRLKEQLKAATEALGEKSPDSATVSGYDIMKSKSNPDFLKKDRSCVTRQLRNIRSKSLKEGLTVQERLKLFESRDLKKD

SEQ ID NO: 21550 - protein, 799 aa, Homo sapiens
MPERLAEMLLDLWTPLIILWITLPPCIYMAPMNQSQVLMSGSPLELNSLGEEQRILNRSKRGWVWNQMFVLEEFSGPEPILVGRLHTDLDPGSKKIKYILSGDGAGTIFQINDVTGDIHAIKRLDREEKAEYTLTAQAVDWETSKPLEPPSEFIIKVQDINDNAPEFLNGPYHATVPEMSILGTSVTNVTATDADDPVYGNSAKLVYSILEGQPYFSIEPETAIIKTALPNMDREAKEEYLVVIQAKDMGGHSGGLSGTTTLTVTLTDVNDNPPKFAQSLYHFSVPEDVVLGTAIGRVKANDQDIGENAQSSYDIIDGDGTALFEITSDAQAQDGIIRLRKPLDFETKKSYTLKVEAANVHIDPRFSGRGPFKDTATVKIVVEDADEPPVFSSPTYLLEVHENAALNSVIGQVTARDPDITSSPIRFSIDRHTDLERQFNINADDGKITLATPLDRELSVWHNITIIATEIRNHSQISRVPVAIKVLDVNDNAPEFASEYEAFLCENGKPGQVIQTVSAMDKDDPKNGHYFLYSLLPEMVNNPNFTIKKNEDNSLSILAKHNGFNRQKQEVYLLPIIISDSGNPPLSSTSTLTIRVCGCSNDGVVQSCNVEAYVLPIGLSMGALIAILACIILLLVIVVLFVTLRRHKNEPLIIKDDEDVRENIIRYDDEGGGEEDTEAFDIATLQNPDGINGFLPRKDIKPDLQFMPRQGLAPVPNGVDVDEFINVRLHEADNDPTAPPYDSIQIYGYEGRGSVAGSLSSLESTTSDSDQNFDYLSDWGPRFKRLGELYSVGESDKET

SEQ ID NO: 21551 - protein, 843 aa, Homo sapiens
MTLDMDAVLSDFVRSTGAEPGLARDLLEGKNWDVNAALSDFEQLRQVHAGNLPPSFSEGSGGSRTPEKGFSDREPTRPPRPILQRQDDIVQEKRLSRGISHASSSIVSLARSHVSSNGGGGGSNEHPLEMPICAFQLPDLTVYNEDFRSFIERDLIEQSMLVALEQAGRLNWWVSVDPTSQRLLPLATTGDGNCLLHAASLGMWGFHDRDLMLRKALYALMEKGVEKEALKRRWRWQQTQQNKESGLVYTEDEWQKEWNELIKLASSEPRMHLGTNGANCGGVESSEEPVYESLEEFHVFVLAHVLRRPIVVVADTMLRDSGGEAFAPIPFGGIYLPLEVPASQCHRSPLVLAYDQAHFSALVSMEQKENTKEQAVIPLTDSEYKLLPLHFAVDPGKGWEWGKDDSDNVRLASVILSLEVKLHLLHSYMNVKWIPLSSDAQAPLAQPESPTASAGDEPRSTPESGDSDKESVGSSSTSNEGGRRKEKSKRDREKDKKRADSVANKLGSFGKTLGSKLKKNMGGLMHSKGSKPGGVGTGLGGSSGTETLEKKKKNSLKSWKGGKEEAAGDGPVSEKPPAESVGNGGSKYSQEVMQSLSILRTAMQGEGKFIFVGTLKMGHRHQYQEEMIQRYLSDAEERFLAEQKQKEAERKIMNGGIGGGPPPAKKPEPDAREEQPTGPPAESRAMAFSTGYPGDFTIPRPSGGGVHCQEPRRQLAGGPCVGGLPPYATFPRQCPPGRPYPHQDSIPSLEPGSHSKDGLHRGALLPPPYRVADSYSNGYREPPEPDGWAGGLRGLPPTQTKCKQPNCSFYGHPETNNFCSCCYREELRRREREPDGELLVHRF

SEQ ID NO: 21552 - protein, 598 aa, Homo sapiens
MTMRSAVFKAAAAPAGGNPEQRLDYERAAALGGPEDEPGAAEAHFLPRHRKLKEPGPPLASSQGGSPAPSPAGCGGKGRGLLLPAGAAPGQQEESWGGSVPLPCPPPATKQAGIGGEPAAAGAGCSPRPKYQAVLPIQTGSLVAAAKEPTPWAGDKGGAASPAATASDPAGPPPLPLPGPPPLAPTATAGTLAASEGRWKSMRKSPLGGGGGSGASSQAACLKQILLLQLDLIEQQQQQLQAKEKEIEELKSERDTLLARIERMERRMQLVKKDNEKERHKLFQGYETEEREETELSEKIKLECQPELSETSQTLPPKPFSCGRSGKGHKRKSPFGSTERKTPVKKLAPEFSKVKTKTPKHSPIKEEPCGSLSETVCKRELRSQETPEKPRSSVDTPPRLSTPQKGPSTHPKEKAFSSEIEDLPYLSTTEMYLCRWHQPPPSPLPLRESSPKKEETVAIPSWRDHSVEPLRDPNPSDLLENLDDSVFSKRHAKLELDEKRRKRWDIQRIREQRILQRLQLRMYKKKGIQESEPEVTSFFPEPDDVESLMITPFLPVVAFGRPLPKLTPQNFELPWLDERSRCRLEIQKKQTPHRTCRK

SEQ ID NO: 21553 - protein, 669 aa, Homo sapiens
KDVIMQDFPAEIFLQRPKIVQSLLSLLKLAFGDGKHRLALQSVSCLQQLCMYLRNRLNFHRDPGFFSNKHDTVSQNSSLSYCHEARGTHHSQNPSPGSSSPRPSVVGRTGQRPRGDGQDWDAASSSGSSSHAHVNSRISVHSPLDMGHIDLPELETEDTLELQFQQLSLPQFCVSILESAVPLLRTGSRQVIIRVLELLTEDMTLIGEAISTDIWDDSSLFGIDMKEKLLLVLGALGETMCYHKSSISLEQPEVMLVHHRMAFISISLFAVRLLQTLLPVEKASEFLSEPMSTALFLLSLDMPISLEYPNIHEAVVAYLEQLNSENYSIYKRTAEAVYSIECTCNFLSDIGKEGEKNLLELVELADQALRSFSYHQHFPLIKEIISICSKIWKSAQASPLLQGESQKVLLHMLSHPLPRVKAETYHCCLEITKECLGVHNVTKPVSSLCNGIHFLLHPKVLYEISVFGIQEPESEVNTAAKAILLYLLQGRLMMTALTWNKFIESLCPVIPILQGYADTEDPLGNCILLLSKASSDTEEMLPCTTRLKSMLRLLLVKKPSVRSLALKLLAFHLTSEEGADTKRPLIDARVLSRVTDLFIGKKPIELRLDDRRELVIKLETVEKVYEIFTSDDVDLVLRKSAAEQLAVIMQGCRMFGTTMPHTLEEGFMW

SEQ ID NO: 21554 - protein, 631 aa, Homo sapiens
MSHQEGSTDGLPDLGTESLFSSPEEQSGAVAATEASSDIDIATSELSVTVTGDGSDSRDGGFPNDASTENRSSDQESASEDIELESLEDFEHFLMSGESLFHYPLVGEEETEREEEDEEIQEEGGEEEEEEEEEEEEEEEEEEEEEEQPRAGPQGSGGNHEQYSLEEDQALEEWVSSETSALPRPRWQVVTALHQRQLGSRPRFVYEACGARAFVQRFRLQYRLADHVGCVNTVHFNQRGTRLASSGDDLKVIVWDWVRQRPVLNFESGHTNNVFQAKFLPNCGDSTLAMCARDGQVRVAELINASYFNNTKCVAQHRGPAHKLALEPDSPYKFLTSGEDAVVFTIDLRQDRPASKVVVTRENDKKVGLYTITVNPANTYQFAVGGQDQFVRIYDQRKIDKKENNGVLKKFTPHHLVNCDFPTNITCVVYSHDGTELLASYNDDDIYLFNSSHSDGAQYSKRFKGHRNNTTVKGVNFYGPRSEFVVSGSDCGHIFFWEKSSCQIIQFLKGSREGTINCLEPHPYLPVLACSGLDHDVKIWTPTAKAATELTGLKKVIKKNKWERDEDSLHHGSLFDQYMLWFLLRHVTQRGRHQDWRSGEAEFPDEESDESSSTSETSEEEVQDRVQCMPS

SEQ ID NO: 21555 - protein, 611 aa, Homo sapiens
MEELDGEPTVTLIPGVNSKKNQMYFDWGPGEMLVCETSFNKKEKSEMVPSCPFIYIIRKDVDVYSQILRKLFNESHGIFLGLQRIDEELTGKSRKSQLVRVSKNYRSVIRACMEEMHQVAIAAKDPANGRQFSSQVSILSAMELIWNLCEILFIEVAPAGPLLLHLLDWVRLHVCEVDSLSADVLGSENPSKHDSFWNLPGNTQTLTELELKWQHWHEECERYLQDSTFATSPHLESLLKIMLGDEAALLEQKELLSNWYHFLVTRLLYSNPTVKPIDLHYYAQSSLDLFLGGESSPEPLDNILLAAFEFDIHQVIKECSIALSNWWFVAHLTDLLDHCKLLQSHNLYFGSNMREFLLLEYASGLFAHPSLWQLGVDYFDYCPELGRVSLELHIERIPLNTEQKALKVLRICEQRQMTEQVRSICKILAMKAVRNNRLGSALSWSIRAKDAAFATLVSDRFLRDYCERGCFSDLDLIDNLGPAMMLSDRLTFLGKYREFHRMYGEKRFADAASLLLSLMTSRIAPRSFWMTLLTDALPLLEQKQVIFSAEQTYELMRCLEDLTSRRPVHGESDTEQLQDDDIETTKVEMLRLSLARNLARAIIREGSLEGS

SEQ ID NO: 21556 - protein, 251 aa, Homo sapiens
MSPTPPLFSLPEARTRFTKSTREALNNKNIKPLLSTFSQVPGSENEKKCTLDQAFRGILEEEIINHSSCENVLAIISLAIGGVTEGICTASTPFVLLGDVLDCLPLDQCDTIFTFVEKNVATWKSNTFYSAGKNYLLRMCNDLLRRLSKSQNTVFCGRIQLFLARLFPLSEKSGLNLQSQFNLENVTVFNTNEQESTLGQKHTEDREEGMDVEEGEMGDEEAPTTWITSGTLCNAMRRFHGKLFSSILKKF

SEQ ID NO: 21557 - protein, 976 aa, Homo sapiens
MEMALRGVRKVLCVAEKNDAAKGIADLLSNGRMRRREGLSKFNKIYEFDYHLYGQNVTMVMTSVSGHLLAHDFQMQFRKWQSCNPLVLFEAEIEKYCPENFVDIKKTLERETRQCQALVIWTDCDREGENIGFEIIHVCKAVKPNLQVLRARFSEITPHAVRTACENLTEPDQRVSDAVDVRQELDLRIGAAFTRFQTLRLQRIFPEVLAEQLISYGSCQFPTLGFVVERFKAIQAFVPEIFHRIKVTHDHKDGIVEFNWKRHRLFNHTACLVLYQLCVEDPMATVVEVRSKPKSKWRPQALDTVELEKLASRKLRINAKETMRIAEKLYTQGYISYPRTETNIFPRDLNLTVLVEQQTPDPRWGAFAQSILERGGPTPRNGNKSDQAHPPIHPTKYTNNLQGDEQRLYEFIVRHFLACCSQDAQGQETTVEIDIAQERFVAHGLMILARNYLDVYPYDHWSDKILPVYEQGSHFQPSTVEMVDGETSPPKLLTEADLIALMEKHGIGTDATHAEHIETIKARMYVGLTPDKRFLPGHLGMGLVEGYDSMGYEMSKPDLRAELEADLKLICDGKKDKFVVLRQQVQKYKQVFIEAVAKAKKLDEALAQYFGNGTELAQQEDIYPAMPEPIRKCPQCNKDMVLKTKKNGGFYLSCMGFPECRSAVWLPDSVLEASRDSSVCPVCQPHPVYRLKLKFKRGSLPPTMPLEFVCCIGGCDDTLREILDLRFSGGPPRASQPSGRLQANQSLNRMDNSQHPQPADSRQTGSSKALAQTLPPPTAAGESNSVTCNCGQEAVLLTVRKEGPNRGRQFFKCNGGSCNFFLWADSPNPGAGGPPALAYRPLGASLGCPPGPGIHLGGFGNPGDGSGSGTSCLCSQPSVTRTVQKDGPNKGRQFHTCAKPREQQCGFFQWVDENTAPGTSGAPSWTGDRGRTLESEARSKRPRASSSDMGSTAKKPRKCSLCHQPGHTRPFCPQNR

SEQ ID NO: 21558 - protein, 263 aa, Homo sapiens
MEDIQTNAELKSTQEQSVPAESAAVLNDYSLTKSHEMENVDSGEGPANEDEDIGDDSMKVKDEYSERDENVLKSEPMGNAEEPEIPYSYSREYNEYENIKLERHVVSFDSSRPTSGKMNCDVCGLSCISFNVLMVHKRSHTGERPFQCNQCGASFTQKGNLLRHIKLHTGEKPFKCHLCNYACQRRDALTGHLRTHSVEKPYKCEFCGRSYKQRSSLEEHKERCRTFLQSTDPGDTGTGWGWVELSHLGIRLQDLNVPWCRLH

SEQ ID NO: 21559 - protein, 603 aa, Homo sapiens
MKLRLPASPETHLDMLRHLYQGCQVVQGNLELTYLPTNASLSFLQDIQEVQGYVLIAHNQVRQVPLQRLRIVRGTQLFEDNYALAVLDNGDPLNNTTPVTGASPGGLRELQLRSLTEILKGGVLIQRNPQLCYQDTILWKDIFHKNNQLALTLIDTNRSRACHPCSPMCKGSRCWGESSEDCQSLTRTVCAGGCARCKGPLPTDCCHEQCAAGCTGPKHSDCLACLHFNHSGICELHCPALVTYNTDTFESMPNPEGRYTFGASCVTACPYNYLSTDVGSCTLVCPLHNQEVTAEDGTQRCEKCSKPCARVCYGLGMEHLREVRAVTSANIQEFAGCKKIFGSLAFLPESFDGDPASNTAPLQPEQLQVFETLEEITGYLYISAWPDSLPDLSVFQNLQVIRGRILHNGAYSLTLQGLGISWLGLRSLRELGSGLALIHHNTHLCFVHTVPWDQLFRNPHQALLHTANRPEDECVGEGLACHQLCARGHCWGPGPTQCVNCSQFLRGQECVEECRVLQGLPREYVNARHCLPCHPECQPQNGSVTCFGPEADQCVACAHYKDPPFCVARCPSGVKPDLSYMPIWKFPDEEGACQPCPINCTHS

SEQ ID NO: 21560 - protein, 388 aa, Homo sapiens
MAWGLEAQDDPPAERTKNVCKDVETNIDSESTLIQGISEERDGMMSHGQLKSVPQRTDFPETRNVEKHQDIPTVKNIQGKVPRIPCARKPFICEECGKSFSYFSYYARHQRIHTGEKPFECSECGKAFNGNSSLIRHQRIHTGERPYQCEECGRAFNDNANLIRHQRIHSGDRPYYCTECGNSFTSSSEFVIHQRIHTGEKPYECNECGKAFVGNSPLLRHQKIHTGEKPYECNECGKSFGRTSHLSQHQRIHTGEKPYSCKVCGQAFNFHTKLTRHQRIHSEEKPFDCVDCGKAFSAQEQLKRHLRIHTQESSYVCDECGKALTSKRNLHQHQRIHTGEKPYECSKYEKAFGTSSQLGHLEHVYSGEKPVLDICRFGLPEFFTPFYW

SEQ ID NO: 21561 - protein, 980 aa, Homo sapiens
DPLRCCLAVGARAGVVPSQLRVHRLTATSAEITWVPGNSNLAHAIYLNGEECPPASPSTYWATFCHLRPGTPYQAQVEAQLPPQGPWEPGWERLEQRAATLQFTTLPAGPPDAPLDVQIEPGPSPGILIISWLPVTIDAAGTSNGVRVTGYAIYADGQKIMEVASPTAGSVLVELSQLQLLQVCREVVVRTMSPHGESADSIPAPITPALAPASLPARVSCPSPHPSPEARAPLASASPGPGDPSSPLQHPAPLGTQEPPGAPPASPSREMAKGSHEDPPAPCSQEEAGAAVLGTSEERTASTSTLGEKDPGPAAPSLAKQEAEWTAGEACPASSSTQGARAQQAPNTEMCQGGDPGSGLRPRAEKEDTAELGVHLVNSLVDHGRNSDLSDIQEEEEEEEEEEEEELGSRTCSFQKQVAGNSIRENGAKSQPDPFCETDSDEEILEQILELPLQQFCSKKLFSIPEEEEEEEEDEEEEKSGAGCSSRDPGPPEPALLGLGCDSGQPRRPGQCPLSPESSRAGDCLEDMPGLVGGSSRRRGGGSPEKPPSRRRPPDPREHCSRLLSNNGPQASGRLGPTRERGGLPVIEGPRTGLEASGRGRLGPSRRCSRGRALEPGLASCLSPKCLEISIEYDSEDEQEAGSGGISITSSCYPGDGEAWGTATVGRPRGPPKANSGPKPYPRLPAWEKGEPERRGRSATGRAKEPLSRATETGEARGQDGSGRRGPQKRGVRVLRPSTAELVPARSPSETLAYQHLPVRIFVALFDYDPVSMSPNPDAGEEELPFREGQILKVFGDKDADGFYQGEGGGRTGYIPCNMVAEVAVDSPAGRQQLLQRGYLSPDILLEGSAHTTGPPPKPRRSKKAESEGPAQPCPGPPKLVPSADLKAPHSMVAAFDYNPQESSPNMDVEAELPFRAGDVITVFGGMDDDGFYYGELNGQRGLVPSNFLEGPGPEAGGLDREPRTPQAESQRTRRRRVQC

SEQ ID NO: 21562 - protein, 84 aa, Homo sapiens
MGDRERNKKRLLELLRAPDTGNAHCADCGAADPDWASYKLGIFICLNCCGVHRNFPDISRVKSVRLDFWDDSIVEGLKGTMDSS

SEQ ID NO: 21563 - protein, 443 aa, Homo sapiens
MQPSEMVMNPKQVFLSVLIFGVAGLLLFMYLQVWIEEQHTGRVEKRREQKVTSGWGPVKYLRPVPRIMSTEKIQEHITNQNPKFHMPEDVREKKENLLLNSERSTRLLTKTSHSQGGDQALSKSTGSPTEKLIEKRQGAKTVFNKFSNMNWPVDIHPLNKSLVKDNKWKKTEETQEKRRSFLQEFCKKYGGVSHHQSHLFHTVSRIYVEDKHKILYCEVPKAGCSNWKRILMVLNGLASSAYNISHNAVHYGKHLKKLDSFDLKGIYTRLNTYTKAVFVRDPMERLVSAFRDKFEHPNSYYHPVFGKAIIKKYRPNACEEALINGSGVKFKEFIHYLLDSHRPVGMDIHWEKVSKLCYPCLINYDFVGKFETLEEDANYFLQMIGAPKELKFPNFKDRHSSDERTNAQVVRQYLKDLTRTERQLIYDFYYLDYLMFNYTTPFL

SEQ ID NO: 21564 - protein, 194 aa, Homo sapiens
VNEEVAKLRRRLMELISLVQEVERNVEAVRNAKDERVREIRNAVEMMIARLDTQLKNKLITLMGQKTSLTQETELLESLLQEVEHQGASCFWKKWCQGRIYTLRSCSKSELISKSSEILMMFQQVHRKPMASFVTTPVPPDFTSELVPSYDSATFVLENFSTLRQRADPVYSPPLQVSGLCWRLKVYPDGNGVV

SEQ ID NO: 21565 - protein, 242 aa, Homo sapiens
LSHIVKEESDTEAELALAASQPARLEERLIRDQDLGASLLPAAPQWRQLDSTQKEQYWDLMLETYGKMVSGGISHPKSDLTNSIEFGEELAGIYLHVNEKIPRPTCIGDRQENDKENLNLENHRDQELLHASCQASGEVPSQASLRGFFTEDEPGCFGEGENLPEALQNIQDEGTGEQLSPQERISEKQLGQHLPNPHSGEMSTMWLEEKRETSQKGQPRAPMAQKLPTCRECGKTFYRNSQ

SEQ ID NO: 21566 - protein, 438 aa, Homo sapiens
MAPSRDRLLHFGFKATMFSNSDEAVINKKLPKELLLRIFSFLDVVTLCRCAQVSRAWNVLALDGSNWQRIDLFDFQRDIEGRVVENISKRCGGFLRKLSLRGCLGVGDNALRTFAQNCRNIEVLNLNGCTKTTDATCTSLSKFCSKLRHLDLASCTSITNMSLKALSEGCPLLEQLNISWCDQVTKDGIQALVRGCGGLKALFLKGCTQLEDEALKYIGAHCPELVTLNLQTCLQITDEGLITICRGCHKLQSLCASGCSNITDAILNALGQNCPRLRILEVARCSQLTDVGFTTLARNCHELEKMDLEECVQITDSTLIQLSIHCPRLQVLSLSHCELITDDGIRHLGNGACAHDQLEVIELDNCPLITDASLEHLKSCHSLERIELYDCQQITRAGIKRLRTHLPNIKVHAYFAPVTPPPSVGGSRQRFCRCCIIL

SEQ ID NO: 21567 - protein, 727 aa, Homo sapiens
MESEDTKKTQEMKTDLNLLLECLKYQMDNAFSQKEALVTIHSICQQNSNASVYFREIGGLMFVKNLAKSSEHSMVKEAALYTLGAIAEKNVYCQQTLCTSELFEDLTWFLSNDSNINLKRMSVYVILVLVSNNRTGQTLVRETGCITVLSRLFRTVISKHELDLSDKNVFQSYQLWSSVCSTLCVCVNNPQNDENQMFCCSLFPHANEWLKNCTTPEIIRPICSFIGLTLANNTYVQKYFVSVGGLDVLSQVLMQLESDSHETLSSAKLAVVVTKTVDACIADNPTFGIVLSKYHIVSKLLALLLHESLDSGEKFSIMLTLGHCTEDCEENQYDLFKNNGLPLMIQALTESQNEELNKAATFVLHNCKKITEKLSLSLGEYPFDENETQQLKDISVKENNLEEHWRKAKEILHRIEQLEREGNEEEIQRENYQDNISSMNISIQNTWKHLHADRIGRGSKAEDEDKSHSRQLQSYKSHGVMSKACTNDDQMKTPLKSANPVHACYRESEQNKTLYKAKSSCNQNLHEETTFEKNFVSQSSDHVFKHPVHIAKNIKQQLPVTDPFTLCSDIINKEVVSFLATPSCSEMLTYRCSGCIAVEKSLNSRNFSKLLHSCPYQCDRHKVIVEAEDRYKSELRKSLICNKKILLTPRRRQRLSNESTTPGGIKKRRIRKNFTEEEVNYLFNGVKKMGNHWNSILWSFPFQQGRKAVDLAHKYHKLTKHPTCAAS

SEQ ID NO: 21568 - protein, 614 aa, Homo sapiens
MKAGRFEADEGTSVRFGAPRFGGSRAGPLSGKKFGNPGEKLVKKKWNLDELPKFEKNFYQEHPDLARRTAQEVETYRRSKEITVRGHNCPKPVLNFYEANFPANVMDVIARQNFTEPTAIQAQGWPVALSGLDMVGVAQTGSGKTLSYLLPAIVHINHQPFLERGDGPICLVLAPTRELAQQVQQVAAEYCRACRLKSTCIYGGAPKGPQIRDLERGVEICIATPGRLIDFLECGKTNLRRTTYLVLDEADRMLDMGFEPQIRKIVDQIRPDRQTLMWSATWPKEVRQLAEDFLKDYIHINIGALELSANHNILQIVDVCHDVEKDEKLIRLMEEIMSEKENKTIVFVETKRRCDELTRKMRRDGWPAMGIHGDKSQQERDWVLNEFKHGKAPILIATDVASRGLDVEDVKFVINYDYPNSSEDYIHRIGRTARSTKTGTAYTFFTPNNIKQVSDLISVLREANQAINPKLLQLVEDRGSGRSRGRGGMKDDRRDRYSAGKRGGFNTFRDRENYDRGYSSLLKRDFGAKTQNGVYSAANYTNGSFGSNFVSAGIQTSFRTGNPTGTYQNGYDSTQQYGSNVPNMHNGMNQQAYAYPATAAAPMIGYPMPTGYSQ

SEQ ID NO: 21569 - protein, 138 aa, Homo sapiens
QEELKRLHRAQIIQRQLQQVEERQRRLEERGVAVEKALRGEADYWGESYYSDLIDLHLGGMYGSACADTNPADALSPPTLPSPCSQKQGEINPITKWQKHRPFSSSKQSSVLISPLPTCAPEEDLSLLLLPGVVFNFL

SEQ ID NO: 21570 - protein, 282 aa, Homo sapiens
LDMETTYSVATVCHPNGSCLQLEPDLTNVMATSRKYEDLLWAWEGWRDKAGRAILQFYPKYVELINQAARLNGYVDAGDSWRSMYETPSLEQDLERLFQELQPLYLNLHAYVRRALHRHYGAQHINLEGPIPAHLLGNMWAQTWSNIYDLVVPFPSAPSMDTTEAMLKQGWTPRRMFKEADDFFTSLGLLPVPPEFWNKSMLEKPTDGREVVCHASAWDFYNEHDINFLMKMALDKIAFIPFSYLVDQWRWRVFDGSITKENYNQEWWSLRLKYQGLCPPVP

SEQ ID NO: 21571 - protein, 500 aa, Homo sapiens
MVLAGLIRKLGHQLAEIRERALKSILCKIEHNLICYADLIQERQLFLHLLEWFNFPSVPMKEEVLNLLSRLVKYPPAVQHLVDVGAVEFLSKLRSNVEPNLQAEIDGILDGLFLLPSEVPALSSASYQTNQTELSKNPEILTGYFPQDKSNFQQMEVPPRPVVNQTVKCLKFSTFPWLPLTTTDRHVLSSNESSLRSSNHTLIWNTCELLKDVIMQDFPAEIFLQRPKIVQSLLSLLKLAFGDGKHRLALQSVSCLQQLCMYLRNRLNFHRDPGFFSNKHDTVSQNSSLSYCHEARGTHHSQNPSPGSSSPRPSVVGRTGQRPRGDGQDWDAASSSGSSSHAHVNSRISVHSPLDMGHIDLPELETEDTLELQFQQLSLPQFCVSILESAVPLLRTGSRQVIIRVLELLTEDMTLIGEAISTDIWDDSSLFGIDMKEKLLLVLGALGETMCYHKSSISLEQPEVMLVHHRMAFISISLFAVRLLQTLLPVEKLLWPIWNS

SEQ ID NO: 21572 - protein, 271 aa, Homo sapiens
VAIDGKEEDLGSPTGELTSKILSSIKVLEGFLDIDTKFSENRCQKALPMAHSAYQSNLPHNYTMTVHKNQLAQALRVYSQHARGPAFHKYAMQLHEDCYKFWSNGHQLCEERSLTDQHCVHKFHSLPKSGEKPEADRNPPVLYHNSRARSTGACNCGRKQAPRDDPFDIKAANYDFYQLLEEKCCGKLDHINFPVFEPSTPDPAPAKNESSPAPPDSDADKLKEKEPQTQGESTSLSLALSLGQSTDSLGSARPTTMSGILPRKTRNHPST

SEQ ID NO: 21573 - protein, 194 aa, Homo sapiens
MLRLQKRLASSVLRCGKKKVWLDPNETNEIANANSRQQIRKLIKDGLIIRKPVTVHSRARCRKNTLARRKGRHMGIGKRKGTANARMPEKVTWMRRMRILRRLLRRYRESKKIDRHMYHSLYLKVKGNVFKNKRILMEHIHKLKADKARKKLLADQAEARRSKTKEARKRREERLQAKKEEIIKTLSKEEETKK

SEQ ID NO: 21574 - protein, 247 aa, Homo sapiens
MSGLGRSRRGGRSRVDQEERWSLSCRKEQGKFYDHLLRDCISCASICGQHPKQCAYFCENKLRSPVNLPPELRRQRSGEVENNSDNSGRYQGLEHRGSEASPALPGLKLSADQVALVYSTLGLCLCAVLCCFLVAVACFLKKRGDPCSCQPRSRPRQSPAKSSQDHAMEAGSPVSTSPEPVETCSFCFPECRAPTQESAVTPGTPDPTCAGRWGCHTRTTVLQPCPHIPDSGLGIVCVPAQEGGPGA

SEQ ID NO: 21575 - protein, 425 aa, Homo sapiens
MPERLAEMLLDLWTPLIILWITLPPCIYMAPMNQSQVLMSGSPLELNSLGEEQRILNRSKRGWVWNQMFVLEEFSGPEPILVGRLHTDLDPGSKKIKYILSGDGAGTIFQINDVTGDIHAIKRLDREEKAEYTLTAQAVDWETSKPLEPPSEFIIKVQDINDNAPEFLNGPYHATVPEMSILGTSVTNVTATDADDPVYGNSAKLVYSILEGQPYFSIEPETAIIKTALPNMDREAKEEYLVVIQAKDMGGHSGGLSGTTTLTVTLTDVNDNPPKFAQSLYHFSVPEDVVLGTAIGRVKANDQDIGENAQSSYDIIDGDGTALFEITSDAQAQDGIIRLRKPLDFETKKSYTLKVEAANVHIDPRFSGRGPFKDTATVKIVVEDADEPPVFSSPTYLLEVHENAALNSVIGQVTARDPDITSSPI

SEQ ID NO: 21576 - protein, 867 aa, Homo sapiens
MPAGLTEPAGAAPPAAVSASGTVTMAPAGALPVRVESTPVALGAVTKAPVSVCVEPTASQPLRSPVGTLVTKVAPVSAPPKVSSGPRLPAPQIVAVKAPNTTTIQFPANLQLPPGTVLIKSNSGPLMLVSPQQTVTRAETTSNITSRPAVPANPQTVKICTVPNSSSQLIKKVAVTPVKKLAQIGTTVVTTVPKPSSVQSVAVPTSVVTVTPGKPLNTVTTLKPSSLGASSTPSNEPNLKAENSAAVQINLSPTMLENVKKCKNFLAMLIKLACSGSQSPEMGQNVKKLVEQLLDAKIEAEEFTRKLYVELKSSPQPHLVPFLKKSVVALRQLLPNSQSFIQQCVQQTSSDMVIATCTTTVTTSPVVTTTVSSSQSEKSIIVSGATAPRTVSVQTLNPLAGPVGAKAGVVTLHSVGPTAATGGTTAGTGLLQTSKPLVTSVANTVTTVSLQPEKPVVSGTAVTLSLPAVTFGETSGAAICLPSVKPVVSSAGTTSDKPVIGTPVQIKLAQPGPVLSQPAGIPQAVQVKQLFSLFQVVQQPSGGNEKQVTTISHSSTLTIQKCGQKTMPVNTIIPTSQFPPASILKQITLPGNKILSLQASPTQKNRIKENVTSCFRDEDDINDVTSMAGVNLNEENACILATNSELVGTLIQSCKDEPFLFIGALQKRILDIGKKHDITELNSDAVNLISQATQERLRGLLEKLTAIAQHRMTTYKASENYILCSDTRSQLKFLEKLDQLEKQRKDLEEREMLLKAAKSRSNKEDPEQLRLKQKAKELQQLELAQIQHRDANLTALAAIGPRKKRPLESGIEGLKDNLLASGTSSLTATKQLHRPRITRICLRDLIFCMEQEREMKYSRALYLALLK

SEQ ID NO: 21577 - protein, 168 aa, Homo sapiens
MGAASGRRGPGLLLPLPLLLLLPPQPALALDPGLQPGNFSADEAGAQLFAQSYNSSAEQVLFQSVAASWAHDTNITAENARRQEEAALLSQEFAEAWGQKAKELYEPIWQNFTDPQLRRIIGAVRTLGSANLPLAKRQQISPTSWLPREATPCSCLPGRAGTTLRASR

SEQ ID NO: 21578 - protein, 1091 aa, Homo sapiens
MQVHERNKDGSQSGSRMEDWKMKDTQKCSQCEEGFDFPEDLQKHIAECHPECSPNEDRAALQCVYCHELFVEETSLMNHMEQVHSGEKKNSCSICSESFHTVEELYSHMDSHQQPESCNHSNSPSLVTVGYTSVSSTTPDSNLSVDSSTMVEAAPPIPKSRGRKRAAQQTPDMTGPSSKQAKVTYSCIYCNKQLFSSLAVLQIHLKTMHLDKPEQAHICQYCLEVLPSLYNLNEHLKQVHEAQDPGLIVSAMPAIVYQCNFCSEVVNDLNTLQEHIRCSHGFANPAAKDSNAFFCPHCYMGFLTDSSLEEHIRQVHCDLSGSRFGSPVLGTPKEPVVEVYSCSYCTNSPIFNSVLKLNKHIKENHKNIPLALNYIHNGKKSRALSPLSPVAIEQTSLKMMQAVGGAPARPTGEYICNQCGAKYTSLDSFQTHLKTHLDTVLPKLTCPQCNKEFPNQESLLKHVTIHFMITSTYYICESCDKQFTSVDDLQKHLLDMHTFVFFRCTLCQEVFDSKVSIQLHLAVKHSNEKKVYRCTSCNWDFRNETDLQLHVKHNHLENQGKVHKCIFCGESFGTEVELQCHITTHSKKYNCKFCSKAFHAIILLEKHLREKHCVFETKTPNCGTNGASEQVQKEEVELQTLLTNSQESHNSHDGSEEDVDTSEPMYGCDICGAAYTMETLLQNHQLRDHNIRPGESAIVKKKAELIKGNYKCNVCSRTFFSENGLREHMQTHLGPVKHYMCPICGERFPSLLTLTEHKVTHSKSLDTGNCRICKMPLQSEEEFLEHCQMHPDLRNSLTGFRCVVCMQTVTSTLELKIHGTFHMQKTGNGSAVQTTGRGQHVQKLYKCASCLKEFRSKQDLVKLDINGLPYGLCAGCVNLSKSASPGINVPPGTNRPGLGQNENLSAIEGKGKVGGLKTRCSSCNVKFESESELQNHIQTIHRELVPDSNSTQLKTPQVSPMPRISPSQSDEKKTYQCIKCQMVFYNEWDIQVHVANHMIDEGLNHECKLCSQTFDSPAKLQCHLIEHSFEGMGGTFKCPVCFTVFVQANKLQQHIFSAHGQEDKIYDCTQCPQKFFFQTELQNHTMTQHSS

SEQ ID NO: 21579 - protein, 250 aa, Homo sapiens
PDEEGACQPCPINCTHSPLTSIISAVVGILLVVVLGVVFGILIKRRQQKIRKYTMRRLLQETELVEPLTPSGAMPNQAQMRILKETELRKVKVLGSGAFGTVYKGIWIPDGENVKIPVAIKVLRENTSPKANKEILDEAYVMAGVGSPYVSRLLGICLTSTVQLVTQLMPYGCLLDHVRENRGRLGSQDLLNWCMQIAKGMSYLEDVRLVHRDLAARNVLVKSPNHVKITDFGLARLLDIDETEYHADGG

SEQ ID NO: 21580 - protein, 1388 aa, Homo sapiens
DLELKLKDKNTLFTRILNGQEQRMKIDREFALWLKDCHEKYDKQIKFTLFKGVITRPDLPSKKQGPWATYAAIEWDGKIYKAGQLVKTIKTLPLFYGSIVRFFLYGDHDGEVYATGGEVQIAMEPQALYDEVRTVPIAKLDRTVAEKAVKKYVEDEMARLPDRLSVTWPEGDELLPNEVRPAGTPIGALRIEILNKKGEAMQKLPGTSHGGSKKLLVELKVILHSSSGNKEIISHISQHGGKWPYWFKKMENIQKLGNYTLKLQVVLNESNADTYAGRPLPSKAIKFSVKEGKPEKFSFGLLDLPFRVGVPFNIPLEFQDEFGHTSQLVTDIQPVLEASGLSLHYEEITKGPNCVIRGVTAKGPVNSCQGKNYNLKVTLPGLKEDSQILKIRLLPGHPRRLKVKPDSEILVIENGTAFPFQVEVLDESDNITAQPKLIVHCKFSGAPNLPVYVVDCSSSGTSILTGSAIQVQNIKKDQTLKARIEIPSCKDVAPVEKTIKLLPSSHVARLQIFSVEGQKAIQIKHQDEVNWIAGDIMHNLIFQMYDEGEREINITSALAEKIKVNWTPEINKEHLLQGLLPDVQVPTSVKDMRYCQVSFQDDHVSLESAFTVRPLPDEPKHLKCEMKGGKTVQMGQELQGEVVIIITDQYGNQIQAFSPSSLSSLSIAGVGLDSSNLKTTFQENTQSISVRGIKFIPGPPGNKDLCFTWREFSDFIRVQLISGPPAKLLLIDWPELKESIPVINGRDLQNPIIVQLCDQWDNPAPVQHVKISLTKASNLKLMPSNQQHKTDEKGRANLGVFSVFAPRGEHTLQVKAIYNKSIIEGPIIKLMILPDPEKPVRLNVKYDKDASFLAGGLFTDFMISVISEDDSIIKNINPARISMKMWKLSTSGNRPPANAETFSCNKIKDNDKEDGCFYFRDKVIPNKVGTYCIQFGFMMDKTNILNSEQVIVEVLPNQPVKLVPKIKPPTPAVSNVRSVASRTLVRDLHLSITDDYDNHTGIDLVGTIIATIKGSNEEDTDTPLFIGKVRTLEFPFVNGSAEIMSLVLAESSPGRDSTEYFIVFEPRLPLLSRTLEPYILPFMFYNDVKKQQQMAALTKEKDQLSQSIVMYKSLFEASQQLLNEMKCQVEEARLKEAQLRNELKIHNIDIPTTQQVPHIEALLKRKLSEQEELKKKPRRSCTLPNYTKGSGDVLGKIAHLAQIEDDRAAMVISWHLASDMDCVVTLTTDAARRIYDETQGRQQVLPLDSIYKKTLPDWKRSLPHFRNGKLYFKPIGDPVFARDLLTFPDNVEHCETVFGMLLGDTIILDNLDAANHYRKEVVKITHCPTLLTRDGDRIRSNGKFGGLQNKAPPMDKLRGMVFGAPVPKQCLILGEQIVHACVPSYSGG

SEQ ID NO: 21581 - protein, 234 aa, Homo sapiens
MKVLLLTGLGALFFAYYWDDNFDPGGLDYLVLNHIGGAPAGTRARSPQATRWLMQVNFVSYVQLTSRALPSLTDSKGSLVVVSSLLGRVPTSFSTPYSAAKFALDGFFGSLRRELDVQDVNVAITMCVLGLRDRASAAEAVRSSTSRPRQPEHRGVPLQSQTAMFLPPTVPGARTLTETPLRGWPQPKMKSSRQKSKTEKNDGHLEPVTAWEVQVPRVRRLCRGLARPHLFGHD

SEQ ID NO: 21582 - protein, 846 aa, Homo sapiens
MLHDARDRQKFFSDVQYLRDMQHKVDSEYQACLRRQEYRRDPNEKKRDQFWGQETSFERSRFSSRSSSKQSSSEEDALTEPRSSIKISAFKCDSKLPAIDQTSVKQKHKSTMTVRKAEKVDPSEPSPAESEPTWWNKPETDLGGPSGWCSLGKKGPMSRSIPPCEADQAPMVLLRKRKPNLRRFTVSPESHSPRASGDRSRQKQQWPAKVPVPRGADQVVQQEGLMCNTKLKRPNQERRNLVPSSQPMTENAPDRAKKGDPSAPSQSELHPALSQAFQGKNSPQVLSEFSGPPLTPTTVGGPRKASFRFRDEDFYSILSLNSRRESDDTEEETQSEECLWVGVRSPCSPSHHKRSRFGGTSTPQAKNKNFEENAENCRGHSSRRSEPSHGSLRISNAMEPATERPSAGQRLSQDPGLPDRESATEKDRGGSENAKKSPLSWDTKSEPRQEVGVNAENVWSDCISVEHRPGTHDSEGYWKDYLNSSQNSLDYFISGRPISPRSSVNSSYNPPASFMHSALRDDIPVDLSMSSTSVHSSDSEGNSGFHVCQPLSPIRNRTPFASAENHNYFPVNSAHEFAVREAEDTTLTSQPQGAPLYTDLLLNPQGNLSLVDSSSSSPSRMNSEGHLHVSGSLQENTPFTFFAVSHFPNQNDNGSRMAASGFTDEKETSKIKADPEKLKKLQESLLEEDSEEEGDLCRICQIAGGSPSNPLLEPCGCVGSLQFVHQECLKKWLKVKITSGADLGAVKTCEMCKQGLLVDLGDFNMIEFYQKHQQSQAQNELMNSGLYLVLLLHLYEQRFAELMRLNHNQVERERLSRNYPQPRTEENENSELGDGNEGSISQSQVV

SEQ ID NO: 21583 - protein, 541 aa, Homo sapiens
MNCYLLLRFMLGIPLLWPCLGATENSQTKKVKQPVRSHLRVKRGWVWNQFFVPEEMNTTSHHIGQLRSDLDNGNNSFQYKLLGAGAGSTFIIDERTGDIYAIQKLDREERSLYILRAQVIDIATGRAVEPESEFVIKVSDINDNEPKFLDEPYEAIVPEMSPEGTLVIQVTASDADDPSSGNNARLLYSLLQGQPYFSVEPTTGVIRISSKMDRELQDEYWVIIQAKDMIGQPGALSGTTSVLIKLSDVNDNKPIFKESLYRLTVSESAPTGTSIGTIMAYDNDIGENAEMDYSIEEDDSQTFDIITNHETQEGIVILKKKVDFEHQNHYGIRAKVKNHHVPEQLMKYHTEASTTFIKIQVEDVDEPPLFLLPYYVFEVFEETPQGSFVGVVSATDPDNRKSPIRYSITRSKVFNINDNGTITTSNSLDREISAWYNLSITATEKYNIEQISSIPLYVQVLNINDHAPEFSQYYETYVCENAGSGQVIQTISAVDRDESIEEHHFYFNLSVEDTNNSSFTIIDNQELVLTFKKNLSSTSPS

SEQ ID NO: 21584 - protein, 150 aa, Homo sapiens
PKVVTEEEVNRMLTPSEFLKEMSLTTEQRLAKTRLMCRPQIIELLDMGETTHQKFSGIDLDQALFQPFPSEIIFQNYTPCEVYEVPLILRNNDKIPRLVKVVEESSPYFKVISPKDIGHKVAPGVPSIFRILFTPEENKAFLYRTSYWNS

SEQ ID NO: 21585 - protein, 2777 aa, Homo sapiens
MASEVVCGLIFRLLLPICLAVACAFRYNGLSFVYLIYLLLIPLFSEPTKTTMQGHTGRLLKSLCFISLSFLLLHIIFHITLVSLEAQHRIAPGYNCSTWEKTFRQIGFESLKGADAGNGIRVFVPDIGMFIASLTIWLLCRNIVQKPVTDEAAQSNPEFENEELAEGEKIDSEEALIYEEDFNGGDGVEGELEESTKLKMFRRLASVASKLKEFIGNMITTAGKVVVTILLGSSGMMLPSLTSSVYFFVFLGLCTWWSWCRTFDPLLFSCLCVLLAIFTAGHLIGLYLYQFQFFQEAVPPNDYYARLFGIKSVIQTDCSSTWKIIVNPDLSWYHHANPILLLVMYYTLATLIRIWLQEPLVQDEGTKEEDKALACSPIQITAGRRRSLWYATHYPTDERKLLSMTQDDYKPSDGLLVTVNGNPVDYHTIHPSLPMENGPGKADLYSTPQYRWEPSDESSEKREEEEEEKEEFEEERSREEKRSIKVHAMVSVFQFIMKQSYICALIAMMAWSITYHSWLTFVLLIWSCTLWMIRNRRKYAMISSPFMVVYGNLLLILQYIWSFELPEIKKVPGFLEKKEPGELASKILFTITFWLLLRQHLTEQKALQEKEALLSEVKIGSQENEEKDEELQDIQVEGEPKEEEEEEAKEEKQERKKVEQEEAEEEDEQDIMKVLGNLVVAMFIKYWIYVCGGMFFFVSFEGKIVMYKIIYMVLFLFCVALYQVHYEWWRKILKYFWMSVVIYTMLVLIFIYTYQFENFPGLWQNMTGLKKEKLEDLGLKQFTVAELFTRIFIPTSFLLVCILHLHYFHDRFLELTDLKSIPSKEDNTIYSHAKVNGRVYLIINSIKKKLPIHQNELAHPEGSLPDLTMMHLTASLEKPEVRKLAEPGEEKLEGYSEKAQKGDLGKDSEESEEDGEEEEESEEEEETSDLRNKWHLVIDRLTVLFLKFLEYFHKLQVFMWWILELHIIKIVSSYIIWVSVKEVSLFNYVFLISWAFALPYAKLRRLASSVCTVWTCVIIVCKMLYQLQTIKPENFSVNCSLPNENQTNIPFNELNKSLLYSAPIDPTEWVGLRKSSPLLVYLRNNLLMLAILAFEVTIYRHQEYYRGRNNLTAPVSRTIFHDITRLHLDDGLINCAKYFINYFFYKFGLETCFLMSVNVIGQRMDFYAMIHACWLIAVLYRRRRKAIAEIWPKYCCFLACIITFQYFICIGIPPAPCRDYPWRFKGASFNDNIIKWLYFPDFIVRPNPVFLVYDFMLLLCASLQRQIFEDENKAAVRIMAGDNVEICMNLDAASFSQHNPVPDFIHCRSYLDMSKVIIFSYLFWFVLTIIFITGTTRISIFCMGYLVACFYFLLFGGDLLLKPIKSILRYWDWLIAYNVFVITMKNILSIGACGYIGTLVHNSCWLIQAFSLACTVKGYQMPAANSPCTLPSGEAGIIWDSICFAFLLLQRRVFMSYYFLHVVADIKASQILASRGAELFQATIVKAVKARIEEEKKSMDQLKRQMDRIKARQQKYKKGKERMLSLTQEPGEGQDMQKLSEEDDEREADKQKAKGKKKQWWRPWVDHASMVRSGDYYLFETDSEEEEEEELKKEDEEPPRRSAFQFVYQAWITDPKTALRQRHKEKKRSAREERKRRRKGSKEGPVEWEDREDEPIKKKSDGPDNIIKRIFNILKFTWVLFLATVDSFTTWLNSISREHIDISTVLRIERCMLTREIKKGNVPTRESIHMYYQNHIMNLSRESGLDTIDEHPGAASGAQTAHRMDSLDSHDSISSEPTQCTMLYSRQGTTETIEEVEAEQEEEAGSTAPEPREAKEYEATGYDVGAMGAEEASLTPEEELTQFSTLDGDVEAPPSYSKAVSFEHLSFGSQDDSAGKNRMAVSPDDSRTDKLGSSILPPLTHELTASELLLKKMFHDDELEESEKFYVGQPRFLLLFYAMYNTLVARSEMVCYFVIILNHMVSASMITLLLPILIFLWAMLSVPRPSRRFWMMAIVYTEVAIVVKYFFQFGFFPWNKNVEVNKDKPYHPPNIIGVEKKEGYVLYDLIQLLALFFHRSILKCHGLWDEDDMTESGMAREESDDELSLGHGRRDSSDSLKSINLAASVESVHVTFPEQQTAVRRKRSGSSSEPSQRSSFSSNRSQRGSTSTRNSSQKGSSVLSIKQKGKRELYMEKLQEHLIKAKAFTIKKTLEIYVPIKQFFYNLIHPEYSAVTDVYVLMFLADTVDFIIIVFGFWAFGKHSAAADITSSLSEDQVPGPFLVMVLIQFGTMVVDRALYLRKTVLGKVIFQVILVFGIHFWMFFILPGVTERKFSQNLVAQLWYFVKCVYFGLSAYQIRCGYPTRVLGNFLTKSYNYVNLFLFQGFRLVPFLTELRAVMDWVWTDTTLSLSSWICVEDIYAHIFILKCWRESEKRYPQPRGQKKKKVVKYGMGGMIIVLLICIVWFPLLFMSLIKSVAGVINQPLDVSVTITLGGYQPIFTMSAQQSQLKVMDQQSFNKFIQAFSRDTGAMQFLENYEKEDITVAELEGNSNSLWTISPPSKQKMIHELLDPNSSFSVVFSWSIQRNLSLGAKSEIATDKLSFPLKNITRKNIAKMIAGNSTESSKTPVTIEKIYPYYVKAPSDSNSKPIKQLLSENNFMDITIILSRDNTTKYNSEWWVLNLTGNRIYNPNSQALELVVFNDKVSPPSLGFLAGYGIMGLYASVVLVIGKFVREFFSGISHSIMFEELPNVDRILKLCTDIFLVRETGELELEEDLYAKLIFLYRSPETMIKWTREKTN

SEQ ID NO: 21586 - protein, 1224 aa, Homo sapiens
MVGVLAMAAAAAPPPVKDCEIEPCKKRKKDDDTSTCKTITKYLSPLGKTRDRVFAPPKPSNILDYFRKTSPTNEKTQLGKECKIKSPESVPVDSNKDCTTPLEMFSNVEFKKKRKRVNLSHQLNNIKTENEAPIEISSDDSKEDYSLNNDFVESSTSVLRYKKQVEVLAENIQDTKSQPNTMTSLQNSKKVNPKQGTTKNDFKKLRKRKCRDVVDLSESLPLAEELNLLKKDGKDTKQMENTTSHANSRDNVTEAAQLNDSIITVSYEEFLKSHKENKVEEIPDSTMSICVPSETVDEIVKSGYISESENSEISQQVRFKTVTVLAQVHPIPPKKTGKIPRIFLKQKQFEMENSLSDPENEQTVQKRKSNVVIQEEELELAVLEAGSSEAVKPKCTLEERQQFMKAFRQPASDALKNGVKKSSDKQKDLNEKCLYEVGRDDNSKKIMENSGIQMVSKNGNLQLHTDKGSFLKEKNKKLKKKNKKTLDTGAIPGKNREGNTQKKETTFFLKEKQYQNRMSLRQRKTEFFKSSTLFNNESLVYEDIANDDLLKVSSLCNNNKLSRKTSIPVKDIKLTQSKAESEASLLNVSTPKSTRRSGRISSTPTTETIRGIDSDDVQDNSQLKASTQKAANLSEKHSLYTAELITVPFDSESPIRMKFTRISTPKKSKKKSNKRSEKSEATDGGFTSQIRKASNTSKNISKAKQLIEKAKALHISRSKVTEEIAIPLRRSSRHQTLPERKKLSETEDSVIIIDSSPTALKHPEKNQKKLQCLNDVLGKKLNTSTKNVPGKMKVAPLFLVRKAQKAADPVPSFDESSQDTSEKSQDCDVQCKAKRDFLMSGLPDLLKRQIAKKAAALDVYNAVSTSFQRVVHVQQKDDGCCLWHLKPPSCPLLTKFKELNTKVIDLSKCGIALGEFSTLNSKLKSGNSAAVFMRTRKEFTEEVRNLLLEEIRWSNPEFSLKKYFPLLLKKQIEHQVLSSECHSKQELEADVSHKETKRKLVEAENSKSKRKKPNEYSKNLEKTNRKSEELSKRNNSSGIKLDSSKDSGTEDMLWTEKYQPQTASELIGNELAIKKLHSWLKDWKRRAELEERQNLKGKRDEKHEDFSGGIDFKGSSDDEEESRLCNTVLITGPTGVGKTAAVYACAQELGFKIFEVNASSQRSGRQILSQLKEATQSHQVDKQGVNSQKPCFFNSYYIGKSPKKISSPKKVVTSPRKVPPPSPK

SEQ ID NO: 21587 - protein, 483 aa, Homo sapiens
MNLDSIHRLIEETQIFQMQQSSIKSRGDMVAPASPPRDTCNTCFPLHGLQSHAAHNFCAHSYNTNKWDICEELRLRELEEVKARAAQMEKTMRWWSDCTANWREKWSKVRAERNSAREEGRQLRIKLEMAMKELSTLKKKQSLPPQKEALEAKVTQDLKLPGFVEESCEHTDQFQLSSQMHESIREYLVKRQFSTKEDTNNKEQGVVIDSLKLSEEMKPNLDGVDLFNNGGSGNGETKTGLRLKAINLPLENEVTEISALQVHLDEFQKILWKEREMRTALEKEIERLESALSLWKWKYEELKESKPKNVKEFDILLGQHNDEMQELSGNIKEESKSQNSKDRVICELRAELERLQAENTSEWDKREILEREKQGLERENRRLKIQVKEMEELLDKKNRLSANSQSPDFKMSQIDLQEKNQELLNLQHAYYKLNRQYQANIAELTHANNRVDQNEAEVKKLRLRVEELKQGLNQKEDEVLLYE

SEQ ID NO: 21588 - protein, 346 aa, Homo sapiens
MRGKTFRFEMQRDLVSFPLSPAVRVKLVSAGFQTAEELLEVKPSELSKEVGISKAEALETLQIIRRECLTNKPRYAGTSESHKKCTALELLEQEHTQGFIITFCSALDDILGGGVPLMKTTEICGAPGVGKTQLCMQLAVDVQIPECFGGVAGEAVFIDTEGSFMVDRVVDLATACIQHLQLIAEKHKGEEHRKALEDFTLDNILSHIYYFRCRDYTELLAQVYLLPDFLSEHSKVRLVIVDGIAFPFRHDLDDLSLRTRLLNGLAQQMISLANNHRLAVILTNQMTTKIDRNQALLVPALGESWGHAATIRLIFHWDRKQRLATLYKSPSQKECTVLFQIKVSII

SEQ ID NO: 21589 - protein, 115 aa, Homo sapiens
TTLARNCHELEKMDLEECVQITDSTLIQLSIHCPRLQVLSLSHCELITDDGIRHLGNGACAHDQLEVIELDNCPLITDASLEHLKSCHSLERIELYDCQQITRAGIKRLRVKMAT

SEQ ID NO: 21590 - protein, 191 aa, Homo sapiens
MSSAMLVTCLPDPSSSFREDAPRPPVPGEEGETPPCQPGVGKGQVTKPMPVSSNTRRNEDGLGEPEGRASPDSPLTRWTKSLHSLLGDQDGAYLFRTFLEREKCVDTLDFWFACNGFRQMNLKDTKTLRVAKAIYKRYIENNSIVSKQLKPATKTYIRDGIKKQQIDSIMFDQAQTEIQSVMEENAYQMFL

SEQ ID NO: 21591 - protein, 163 aa, Homo sapiens
MADTDPRVRVEKLVKYLDPNDLGRINFKDFCRGVFAMKGCEELLKDVLSVESAGTLPCAPEIPDCVEQGSEVTGPTFADGELIPREPGFFPEDEEEAMTLAPPEGPQELYTDSPMESTQSLEGSVGSPAEKDGGLGGLFLPEDKSLVHTPSMTTSDLSTHSTT

SEQ ID NO: 21592 - protein, 227 aa, Homo sapiens
ESPKSLYSRESVYDLLPKELQLPPSRETSVASMSQTSGGEAGSPPPAVVAADASSAPSSSSMGGACSSFTTSSSPTIYSTSVTDSKAMQVESCSSAVGNNMPGIQGATSSPQPQATLFHNTAGGTMNQLQNSPGSSQQTSGMFLFGIQNNCSQLLTSGPATLPDQLMAISQPGQPQNEGQPPVTTLLSQQMPENSPLASSINTNQNIEKIDLLVSLQNQGNNLTGSF

SEQ ID NO: 21593 - protein, 370 aa, Homo sapiens
MNVAAKYRMASLYVGDLHADVTEDLLFRKFSTVGPVLSIRICRDQVTRRSLGYAYVNFLQLADAQKALDTMNFDIIKGKSIRLMWSQRDAYLRRSGIGNVFIKNLDKSIDNKTLYEHFSAFGKILSSKVMSDDQGSKGYAFVHFQNQSAADRAIEEMNGKLLKGCKVFVGRFKNRKDREAELRSKASEFTNVYIKNFGGDMDDERLKDVFSKYGKTLSVKVMTDSSGKSKGFGFVSFDSHEAAKKAVEEMNGRDINGQLIFVGRAQKKVERQAELKQMFEQLKRERIRGCQGVKLYIKNLDDTIDDEKLRNEFSSFGSISRVKVMQEEGQSKGFGLICFSSPEDATKAMTEMNGRILGSKPLSIALAQRH

SEQ ID NO: 21594 - protein, 476 aa, Homo sapiens
MPERLAEMLLDLWTPLIILWITLPPCIYMAPMNQSQVLMSGSPLELNSLGEEQRILNRSKRGWVWNQMFVLEEFSGPEPILVGRLHTDLDPGSKKIKYILSGDGAGTIFQINDVTGDIHAIKRLDREEKAEYTLTAQAVDWETSKPLEPPSEFIIKVQDINDNAPEFLNGPYHATVPEMSILGTSVTNVTATDADDPVYGNSAKLVYSILEGQPYFSIEPETAIIKTALPNMDREAKEEYLVVIQAKDMGGHSGGLSGTTTLTVTLTDVNDNPPKFAQSLYHFSVPEDVVLGTAIGRVKANDQDIGENAQSSYDIIDGDGTALFEITSDAQAQDGIIRLRKPLDFETKKSYTLKVEAANVHIDPRFSGRGPFKDTATVKIVVEDADEPPVFSSPTYLLEVHENAALNSVIGQVTARDPDITSSPIRFSIDRHTDLERQFNINADDGKITLATPLDRELSVWHNITIIATEISHSNC

SEQ ID NO: 21595 - protein, 1815 aa, Homo sapiens
MMDSENKPENDEDEKINKEAQDLTKLSSHNEDGGPVSDVIASFPENSMGKRGFSESSNSDSVVIGEDRNKHASKRRKLDEAEPLKSGKQGICRLETSESSVTEGGIALDETGKETFLSDCTVGGTCLPNALSPSCNFSTIDVVSLKTDTEKTSAQEMVSLDLERESPFPPKEISVSCTIGNVDTVLKCSICGHLFSSCSDLEKHAESHMQQPKEHTCCHCSHKAESSSALHMHIKQAHGPQKVFSCDLCGFQCSEENLLNAHYLGKTHLRRQNLAARGGFVQILTKQPFPKKSRTMATKNVHSKPRTSKSIAKNSDSKGLRNVGSTFKDFRGSISKQSGSSSELLVEMMPSRNTLSQEVEIVEEHVTSLGLAQNPENQSRKLDTLVTSEGLLEKLESTKNTLQAAHGNSVTSRPRPERNILVLGNSFRRRSSTFTLKGQAKKRFNLLGIKRGTSETQRMYMKHLRTQMKTHDAESVLKHLEACSSVQRVCVTTSETQEAEQGQGSARPPDSGLHSLTVKPASGSQTLCACTDCGQVATNRTDLEIHVKRCHAREMKFYCRTCDFSSMSRRDLDEHLHSNQHQQTASVLSCQCCSFISLDEINLRDHMKEKHNMHFLCTPCNLFFLSEKDVEEHKATEKHINSLVQPKTLQSSNSDLVLQTLPLSTLESENAKESMDDSGKASQEEPLKSRVSHGNEVRHSSKPQFQCKKCFYKTRSSTVLTRHIKLRHGQDYHFLCKACNLYSLSKEGMEKHIKRSKHLENAKKNNIGLSFEECIERVCIGANDKKEEFDVSGNGRIEGHIGVQLQEHSYLEKGMLASEELSQSGGSTKDDELASTTTPKRGRPKGNISRTCSHCGLLASSITNLTVHIRRKHSHQYSYLCKVCKYYTVTKGDMERHCATKKHKGRVEIEASGKHSSDIIVGPEGGSLEAGKKNAGSAVTMSDEHANKPAESPTSVLEKPDRGNSIEAEVENVFHSLDGEVNSHLLDKKEQISSEPEDFAQPGDVYSQRDVTGTGENKCLHCEFSAHSSASLELHVKRKHTKEFEFYCMACDYYAVTRREMTRHAATEKHKMKRQSYLNSANVEAGSADMSKNIIMPEEEHQQNSEEFQIISGQPSDTLKSRNAADCSILNENTNLDMSKVLCAADSVEVETEEESNFNEDHSFCETFQQAPVKDKVRKPEEMMSLTMSSNYGSPSRFQNENSGSSALNCETAKKNHEISNDAGELRVHCEGEGGNAGDGGGVVPHRHLCPVTLDGERSAESPVLVVTRITREQGNLESGGQNRVARGHGLEDLKGVQEDPVLGNKEILMNSQHETEFILEEDGPASDSTVESSDVYETIISIDDKGQAMYSFGRFDSSIIRIKNPEDGELIDQSEEGLIATGVRISELPLKDCAQGVKKKKSEGSSIGESTRIRCDDCGFLADGLSGLNVHIAMKHPTKEKHFHCLLCGKSFYTESNLHQHLASAGHMRNEQASVEELPEGGATFKCVKCTEPFDSEQNLFLHIKGQHEELLREVNKYIVEDTEQINREREENQGNVCKYCGKMCRSSNSMAFLAHIRTHTGSKPFKCKICHFATAQLGDARNHVKRHLGMREYKCHVCGVAFVMKKHLNTHLLGKHGVGTPKERKFTCHLCDRSFTEKWALNNHMKLHTGEKPFKCTWPTCHYSFLTASAMKDHYRTHTGEKSFLCDLCGFAGGTRHALTKHRRQHTGEKPFKCDECNFASTTQSHLTRHKRVHTGEKPYRCPWCDYRSNCAENIRKHILHTGKHEGVKMYNCPKCDYGTNVPVEFRNHLKEQHPDIENPDLAYLHAGKGQKL

SEQ ID NO: 21596 - protein, 700 aa, Homo sapiens
MDLWNLSWFLFLDALLVISGLATPENFDVDGGMDQDIFDINEGLGLDLFEGDIRLDRAQIRNSIIGEKYRWPHTIPYVLEDSLEMNAKGVILNAFERYRLKTCIDFKPWAGETNYISVFKGSGCWSSVGNRRVGKQELSIGANCDRIATVQHEFLHALGFWHEQSRSDRDDYVRIMWDRILSGREHNFNTYSDDISDSLNVPYDYTSVMHYSKTAFQNGTEPTIVTRISDFEDVIGQRMDFSDSDLLKLNQLYNCSSSLSFMDSCSFELENVCGMIQSSGDNADWQRVSQVPRGPESDHSNMGQCQGSGFFMHFDSSSVNVGATAVLESRTLYPKRGFQCLQFYLYNSGSESDQLNIYIREYSADNVDGNLTLVEEIKEIPTGSWQLYHVTLKVTKKFRVVFEGRKGSGASLGGLSIDDINLSETRCPHHIWHIRNFTQFIGSPNGTLYSPPFYSSKGYAFQIYLNLAHVTNAGIYFHLISGANDDQLQWPCPWQQATMTLLDQNPDIRQRMSNQRSITTDPFMTTDNGNYFWDRPSKVGTVALFSNGTQFRRGGGYGTSAFITHERLKSRDFIKGDDVYILLTVEDISHLNSTQIQLTPAPSVQDLCSKTTCKNDGVCTVRDGKAECRCQSGEDWWYMGERCEKRGSTRDTIVIAVSSTVAVFALMLIITLVSVYCTRKKYRERMSSNRPNLTPQNHAF

SEQ ID NO: 21597 - protein, 1011 aa, Homo sapiens
MTLLKSSKTNSDKFERDSIEIFTVETLDLGDLWKVRLGHDNTGKAPGWFVDWVEVDAPSLGKCMTFPCGRWLAKNEDDGSIIRDLFHAELQTRLYTPFVPYEITLYTSDVFAAGTDANIFIIIYGCDAVCTQQKYLCTNKREQKQFFERKSASRFIVELEDVGEIIEKIRIGHNNTGMNPGWHCSHVDIRRLLPDKDGAETLTFPCDRWLATSEDDKKTIRELVPYDIFTEKYMKDGSLRQVYKEVEEPLDIVLYSVQIFTGNIPGAGTDAKVYITIYGDLGDTGERYLGKSENRTNKFERGTADTFIIEAADLGVIYKIKLRHDNSKWCADWYVEKVEIWNDTNEDEFLFLCGRWLSLKKEDGRLERLFYEKEYTGDRSSNCSSPADFWEIALSSKMADVDISTVTGPMADYVQEGPIIPYYVSVTTGKHKDAATDSRAFIFLIGEDDERSKRIWLDYPRGKRGFSRGSVEEFYVAGLDVGIIKKIELGHDGASPESCWLVEELCLAVPTQGTKYMLNCNCWLAKDRGDGITSRVFDLLDAMVVNIGVKVLYEMTVWTGDVVGGGTDSNIFMTLYGINGSTEEMQLDKKKARFEREQNDTFIMEILDIAPFTKMRIRIDGLGSRPEWFLERILLKNMNTGDLTMFYYGDWLSQRKGKKTLVCEMCAVIDEEEMMEWTSYTVAVKTSDILGAGTDANVFIIIFGENGDSGTLALKQSANWNKFERNNTDTFNFPDMLSLGHLCKLRVWHDNKGIFPGWHLSYVDVKDNSRDETFHFQCDCWLSKSEGDGQTVRDFACANNKICDELEETTYEIVIETGNGGETRENVWLILEGRKNRSKEFLMENSSRQRAFRKGTTDTFEFDSIYLGDIASLCVGHLAREDRFIPKRELAWHVKTITITEMEYGNVYFFNCDCLIPLKRKRKYFKVFEVTKTTESFASKVQSLVPVKYEVIVTTGYEPGAGTDANVFVTIFGANGDTGKRELKQKMRNLFERGSTDRFFLETLELGELRK

SEQ ID NO: 21598 - protein, 592 aa, Homo sapiens
MALPEEAKIKDAYHMLKRQGIVQSDPPIPVDRTLIPSPPPRPKNPVFDDEEKSKLLAKLLKSKNPDDLQEANKLIKSMVKEDEARIQKVTKRLHTLEEVNNNVRLLSEMLLHYSQEDSSDGDRELMKELFDQCENKRRTLFKLASETEDNDNSLGDILQASDNLSRVINSYKTIIEGQVINGEVATLTLPDSEGNSQCSNQGTLIDLAELDTTNSLSSVLAPAPTPPSSGIPILPPPPQASGPPRSRSSSQAEATLGPSSTSNALSWLDEELLCLGLADPAPNVPPKESAGNSQWHLLQREQSDLDFFSPRPGTAACGASDAPLLQPSAPSSSSSQAPLPPPFPAPVVPASVPAPSAGSSLFSTGVAPALAPKVEPAVPGHHGLALGNSALHHLDALDQLLEEAKVTSGLVKPTTSPLIPTTTPARPLLPFSTGPGSPLFQPLSFQSQGSPPKGPELSLASIHVPLESIKPSSALPVTAYDKNGFRILFHFAKECPPGRPDVLVVVVSMLNTAPLPVKSIVLQAAVPKSMKVKLQPPSGTELSPFSPIQPPAAITQVMLLANPLKKQVLSFLGKACLQPWGQAILLTTSCLA

SEQ ID NO: 21599 - protein, 307 aa, Homo sapiens
MGVFPEAATKPLLSMGWCGKSLSACGSAGAPVLEDTCRRQDFNPCEYDLKFQRSVLDLSLQWRFANLPNNAKLEMVPASRSREGPENMVRIALQLDDGSRLQDSFCSGQTLWELLSHFPQIRECLQHPGGATPVCVYTRDEVTGEAALRGTTLQSLGLTGGSATIRFVMKCYDPVGKTPGSLGSSASAGQAAASAPLPLESGELSRGDLSRPEDADTSGPCCEHTQEKQSTRAPAAAPFVPFSGGGQRLGGPPGPTRPLTSSSAKLPKSLSSPGGPSKPKKSKSGQDPQQEQEQERERDPQQEQERE

SEQ ID NO: 21600 - protein, 1465 aa, Homo sapiens
MRGLGTCLATLAGLLLTAAGETFSGGCLFDEPYSTCGYSQSEGDDFNWEQVNTLTKPTSDPWMPSGSFMLVNASGRPEGQRAHLLLPQLKENDTHCIDFHYFVSSKSNSPPGLLNVYVKVNNGPLGNPIWNISGDPTRTWNRAELAISTFWPNFYQVIFEVITSGHQGYLAIDEVKVLGHPCTRTPHFLRIQNVEVNAGQFATFQCSAIGRTVAGDRLWLQGIDVRDAPLKEIKVTSSRRFIASFNVVNTTKRDAGKYRCMIRTEGGVGISNYAELVVKEPPVPIAPPQLASVGATYLWIQLNANSINGDGPIVAREVEYCTASGSWNDRQPVDSTSYKIGHLDPDTEYEISVLLTRPGEGGTGSPGPALRTRTKCADPMRGPRKLEVVEVKSRQITIRWEPFGYNVTRCHSYNLTVHYCYQVGGQEQVREEVSWDTENSHPQHTITNLSPYTNVSVKLILMNPEGRKESQELIVQTDEDLPGAVPTESIQGSTFEEKIFLQWREPTQTYGVITLYEITYKAVSSFDPEIDLSNQSGRVSKLGNETHFLFFGLYPGTTYSFTIRASTAKGFGPPATNQFTTKISAPSMPAYELETPLNQTDNTVTVMLKPAHSRGAPVSVYQIVVEEERPRRTKKTTEILKCYPVPIHFQNASLLNSQYYFAAEFPADSLQAAQPFTIGDNKTYNGYWNTPLLPYKSYRIYFQAASRANGETKIDCVQVATKGAATPKPVPEPEKQTDHTVKIAGVIAGILLFVIIFLGVVLVMKKRKLAKKRKETMSSTRQEMTVMVNSMDKSYAEQGTNCDEAFSFMDTHNLNGRSVSSPSSFTMKTNTLSTSVPNSYYPDPFVPTAILVPINDETHTMASDTSSLVQSHTYKKREPADVPYQTGQLHPAIRVADLLQHITQMKCAEGYGFKEEYESFFEGQSAPWDSAKKDENRMKNRYGNIIAYDHSRVRLQTIEGDTNSDYINGNYIDGYHRPNHYIATQGPMQETIYDFWRMVWHENTASIIMVTNLVEVGRVKCCKYWPDDTEIYKDIKVTLIETELLAEYVIRTFAVEKRGVHEIREIRQFHFTGWPDHGVPYHATGLLGFVRQVKSKSPPSAGPLVVHCSAGAGRTGCFIVIDIMLDMAEREGVVDIYNCVRELRSRRVNMVQTEEQYVFIHDAILEACLCGDTSVPASQVRSLYYDMNKLDPQTNSSQIKEEFRTLNMVTPTLRVEDCSIALLPRNHEKNRCMDILPPDRCLPFLITIDGESSNYINAALMDSYKQPSAFIVTQHPLPNTVKDFWRLVLDYHCTSVVMLNDVDPAQLCPQYWPENGVHRHGPIQVEFVSADLEEDIISRIFRIYNAARPQDGYRMVQQFQFLGWPMYRDTPVSKRSFLKLIRQVDKWQEEYNGGEGRTVVHCLNGGGRSGTFCAISIVCEMLRHQRTVDVFHAVKTLRNNKPNMVDLLDQYKFCYEVALEYLNSG

SEQ ID NO: 21601 - protein, 231 aa, Homo sapiens
FPELYFNVDNGYLEGLVRGLKAGVLSQADYLNLVQCETLEAAFFQDCISEQDLDEMNIEIIRNTLYKAYLESFYKFCTLLGGTTADAMCPILEFEADRRAFIITINSFGTELSKEDRAKLFPHCGRLYPEGLAQLARADDYEQVKNVADYYPEYKLLFEGAGSNPGDKTLEDRFFEHEVKLNKLAFLNQFHFGVFYAFVKLKEQECRNIVWIAECIAQRHRAKIDNYIPIF

SEQ ID NO: 21602 - protein, 619 aa, Homo sapiens
MKRLLAAAGKGVRGPEPPNPFSERVYTEKDYGTIYFGDLGKIHTAASRGQVQKLEKMTVGKKPVNLNKRDMKKRTALHWACVNGHAEVVTFLVDRKCQLNVLDGEGRTPLMKALQCEREACANILIDAGADLNYVDVYGNTALHYAVYSENLLMVATLLSYGAVIEVQNKASLTPLLLAIQKRSKQTVEFLLTKNANANAFNESKCTALMLAICEGSSEIVGMLLQQNVDVFAEDIHGITAERYAAACGVNYIHQQLLEHIRKLPKNPQNTNPEGTSTGTPDEAAPLAERTPDTAESLLEKTPDEAARLVEGTSAKIQCLGKATSGKFEQSTEETPRKILRPTKETSEKFSWPAKERSRKITWEEKETSVKTECVAGVTPNKTEVLEKGTSNMIACPTKETSTKASTNVDVSSVEPIFSLFGTRTIENSQCTKVEEDFNLATKIISKSAAQNYTCLPDATYQKDIKTINHKIEDQMFPSESKREEDEEYSWDSGSLFESSAKTQVCIPESMYQKVMEINREVEELPEKPSAFKPAVEMQKTVPNKAFELKNEQTLRAAQMFPSESKQKDDEENSWDSESPCETVSQKDVYLPKATHQKEFDTLSGKLEAYLWKESFSSK

SEQ ID NO: 21603 - protein, 468 aa, Homo sapiens
IAAMASLLWGGDAGAAESERLNSHFSNLSQPRKNLWGIKSTAVRNIDGSINNINEDDEEDVVDLAANSLLNKLIHQSLVESSHRVEVLQKDPSSPLYSVKTFEELRLKEELLKGIYAMGFNRPSKIQEMALPMMLAHPPQNLIAQSQSGTGKTAAFVLAMLSRVNALELFPQCLCLAPTYELALQTGRVVEQMGKFCVDVQVMYAIRGNRIPRGTDITKQIIIGTPGTVLDWCFKLKLIDLTKIRVFVLDEADVMIDTQGFSDHSIRIQRALPSECQMLLFSATFEDSVWHFAERIIPDPNVIKLRKEELTLNNIRQYYVLCEHRKDKYQALCNIYGSITIGQAIIFCQTRRNAKWLTVEMIQDGHQVSLLSGELTVEQRASIIQRFRDGKEKVLITTNVCARGIDVKQVTIVVNFDLPVKQGEEPDYETYLHRIGRTGRFGKKGLAFNMIEVDELPSLMKIQDHFSK

SEQ ID NO: 21604 - protein, 156 aa, Homo sapiens
MSKLPRELTRDLERSLPAVASLGSSLSHSQSLSSHLLPPPEKRRAISDVRRTFCLFVTFDLLFISLLWIIELNTNTGIRKNLEQEIIQYNFKTSFFDIFVLAFFRFSGLLLGYAVLRLRHWSRRWCPVHSSLSRSSSLSCSAKGHLATCSPSSLLS

SEQ ID NO: 21605 - protein, 976 aa, Homo sapiens
MHSLALQNTLHERTWSDEKNLMQQELRSLKQNIFLFYVKLRWLLKHWRQGKQMEEEGEEFTEGEHPETLSRLGELGVQGGHQADGPDHDSDRGCGFPVGEHSPHSRVQIGDHSLRLQTADRGQPHKQVVENQQLFSAFKALLEDFRAELREDERARLRLQQQYASDKAAWDVEWAVLKCRLEQNCCGYPRINIEEETLGFTRLPAGSTVKTLKSLGLQRLELEEKTENKLGELGSSAESKGALKKEREVHQKLLADSHSLVMDLRWQIHHSEKNWNREKVELLDRLDRDRQEWERQKKEFLWRIEQGSLRMPRPVAMWPCADADSIPFEDRPLSKLKESDRCSASENLYLDALSLDDEPEEPPAHRPEREFRNRLPEEEENHKGNLQRAVSVSSMSEFQRLMDISPFLPEKGLPSTSSKEDVTPPLSPDDLKYIEEFNKSWDYTPNRGHNGGGPDLWADRTEVGRAGHEDSTEPFPDSSWYLTTSVTMTTDTMTSPEHCQKQPLRSHVLTEQSGLRVLHSPPAVRRVDSITAAGGEGPFPTSRARGSPGDTKGGPPEPMLSRWPCTSPRHSRDYVEGARRPLDSPLCTSLGFASPLHSLEMSKNLSDDMKEVAFSVRNAICSGPGELQVKDMACQTNGSRTMGTQTVQTISVGLQTEALRGSGVTSSPHKCLTPKAGGGATPVSSPSRSLRSRQVAPAIEKVQAKFERTCCSPKYGSPKLQRKPLPKADQPNNRTSPGMAQKGYSESAWARSTTTRESPVHTTINDGLSSLFNIIDHSPVVQDPFQKGLRAGSRSRSAEPRPELGPGQETGTNSRGRSPSPIGVGSEMCREEGGEGTPVKQDLSAPPGYTLTENVARILNKKLLEHALKEERRQAAHGPPGLHSDSHSLGDTAEPGPMEELPCSALAPSLEPCFSRPERPANRRPPSRWAPHSPTASQPQSPGDPTSLEEHGGEEPPEEQPHRDASLHGLSQYNSL

SEQ ID NO: 21606 - protein, 143 aa, Homo sapiens
MSFSLAPFLSPQSWPPPLPPAQSEIMKVVNLKQAILQAWKERWSDYQWAINMKKFFPKGATWDILNLADALLEQAMIGPSPNPLILSYLKYAISSQMVSYSSVLTAISKFDDFSRDLCVQALLDIMDMFCDRLSCHGKAEECI

SEQ ID NO: 21607 - protein, 469 aa, Homo sapiens
MLPPWTLGLLLLATVRGKEVCYGQLGCFSDEKPWAGTLQRPVKLLPWSPEDIDTRFLLYTNENPNNFQLITGTEPDTIEASNFQLDRKTRFIIHGFLDKAEDSWPSDMCKKMFEVEKVNCICVDWRHGSRAMYTQAVQNIRVVGAETAFLIQALSTQLGYSLEDVHVIGHSLGAHTAAEAGRRLGGRVGRITGLDPAGPCFQDEPEEVRLDPSDAVFVDVIHTDSSPIVPSLGFGMSQKVGHLDFFPNGGKEMPGCKKNVLSTITDIDGIWEGIGGFVSCNHLRSFEYYSSSVLNPDGFLGYPCASYDEFQESKCFPCPAEGCPKMGHYADQFKGKTSAVEQTFFLNTGESGNFTSURYKISVTLSGKEKVNGYIRIALYGSNENSKQYEIFKGSLKPDASHTCAIDVDFNVGKIQKVKFLWNKRGINLSEPKLGASQITVQSGEDGTEYNFCSSDTVEENVLQSLYPC

SEQ ID NO: 21608 - protein, 45 aa, Homo sapiens
MAAPSPSGGGGSGGGSGSGTPGPVGSPAPGHPAVSSMQENSVNSG

SEQ ID NO: 21609 - protein, 532 aa, Homo sapiens
MPERLAEMLLDLWTPLIILWITLPPCIYMAPMNQSQVLMSGSPLELNSLGEEQRILNRSKRGWVWNQMFVLEEFSGPEPILVGRLHTDLDPGSKKIKYILSGDGAGTIFQINDVTGDIHAIKRLDREEKAEYTLTAQAVDWETSKPLEPPSEFIIKVQDINDNAPEFLNGPYHATVPEMSILGTSVTNVTATDADDPVYGNSAKLVYSILEGQPYFSIEPETAIIKTALPNMDREAKEEYLVVIQAKDMGGHSGGLSGTTTLTVTLTDVNDNPPKFAQSLYHFSVPEDVVLGTAIGRVKANDQDIGENAQSSYDIIDGDGTALFEITSDAQAQDGIIRLRKPLDFETKKSYTLKVEAANVHIDPRFSGRGPFKDTATVKIVVEDADEPPVFSSPTYLLEVHENAALNSVIGQVTARDPDITSSPIRFSIDRHTDLERQFNINADDGKITLATPLDRELSVWHNITIIATEIRNHSQISRVPVAIKVLDVNDNAPEFASEYEAFLCENGKPGQVNISMLLMLNMFVYNCLIFD

SEQ ID NO: 21610 - protein, 138 aa, Homo sapiens
MSFSLAPFLSPQSWPPPLPPAQSEIMKVVNLKQAILQAWKERWSDYQWAINMKKFFPKGATWDILNLADALLEQAMIGPSPNPLILSYLKYAISSQFDDFSRDLCVQALLDIMDMFCDRLSCHGKAEECIGLCRALLS

SEQ ID NO: 21611 - protein, 994 aa, Homo sapiens
MPVRRGHVAPQNTYLDTIIRKFEGQSRKFLIANAQMENCAIIYCNDGFCELFGYSRVEVMQQPCTCDFLTGPNTPSSAVSRLAQALLGAEECKVDILYYRKDASSFRCLVDVVPVKNEDGAVIMFILNFEDLAQLLAKCSSRSLSQRLLSQSFLGSEGSHGRPGGPGPGTGRGKYRTISQIPQFTLNFVEFNLEKHRSSSTTEIEIIAPHKVVERTQNVTEKVTQVLSLGADVLPEYKLQAPRIHRWTILHYSPFKAVWDWLILLLVIYTAVFTPYSAAFLLSDQDESRRGACSYTCSPLTVVDLIVDIMFVVDIVINFRTTYVNTNDEVVSHPRRIAVHYFKGWFLIDMVAAIPFDLLIFRTGSDETTTLIGLLKTARLLRLVRVARKLDRYSEYGAAVLFLLMCTFALIAHWLACIWYAIGNVERPYLEHKIGWLDSLGVQLGKRYNGSDPASGPSVQDKYVTALYFTFSSLTSVGFGNVSPNTNSEKVFSICVMLIGSLMYASIFGNVSAIIQRLYSGTARYHTQMLRVKEFIRFHQIPNPLRQRLEEYFQHAWSYTNGIDMNAVLKGFPECLQADICLHLHRALLQHCPAFSGAGKGCLRALAVKFKTTHAPPGDTLVHLGDVLSTLYFISRGSIEILRDDVVVAILGKNDIFGEPVSLHAQPGKSSADVRALTYCDLHKIQRADLLEVLDMYPAFAESFWSKLEVTFNLRDAAGGLHSSPRQAPGSQDHQGFFLSDNQSGSPHELGPQFPSKGYSLLGPGSQNSMGAGPCAPGHPDAAPPLSISDASGLWPELLQEMPPRHSPQSPQEDPDCWPLKLGSRLEQLQAQMNRLESRVSSDLSRILQLLQKPMPQGHASYILEAPASNDLALVPIASETTSPGPRLPQGFLPPAQTPSYGDLDDCSPKHRNSSPRMPHLAVATDKTLAPSSEQEQPEGLWPPLASPLHPLEVQGLICGPCFSSLPEHLGSVPKQLDFQRHGSDPGFAGSWGH

SEQ ID NO: 21612 - protein, 1258 aa, Homo sapiens
MDLRGLRPVPGGYFPENVKAMTSLRWLKLNRTGLCYLPEELAALQKLEHLSVSHNNLTTLHGELSSLPSLRAIVARANSLKNSGVPDDIFKLDDLSVLDLSHNQLTECPRELENAKNMLVLNLSHNSIDTIPNQLFINLTDLLYLDLSENRLESLPPQMRRLVHLQTLVLNGNPLLHAQLRQLPAMTALQTLHLRSTQRTQSNLPTSLEGLSNLADVDLSCNDLTRVPECLYTLPSLRRLNLSSNQITELSLCIDQWVHVETLNLSRNQLTSLPSAICKLSKLKKLYLNSNKLDFDGLPSGIGKLTNLEEFMAANNNLELVPESLCRCPKLRKLVLNKNHLVTLPEAIHFLTEIEVLDVRENPNLVMPPKPADRAAEWYNIDFSLQNQLRLAGASPATVAAAAAAGSGPKDPMARKMRLRRRKDSAQDDQAKQVLKGMSDVAQEKNKKQEESADARAPSGKVRRWDQGLEKPRLDYSEFFTEDVGQLPGLTIWQIENFVPVLVEEAFHGKFYEADCYIVLKTFLDDSGSLNWEIYYWIGGEATLDKKACSAIHAVNLRNYLGAECRTVREEMGDESEEFLQVFDNDISYIEGGTASGFYTVEDTHYVTRMYRVYGKKNIKLEPVPLKGTSLDPRFVFLLDRGLDIYVWRGAQATLSSTTKARLFAEKINKNERKGKAEITLLVQGQELPEFWEALGGEPSEIKKHVPEDFWPPQPKLYKVGLGLGYLELPQINYKLSVEHKQRPKVELMPRMRLLQSLLDTRCVYILDCWSDVFIWLGRKSPRLVRAAALKLGQELCGMLHRPRHATVSRSLEGTEAQVFKAKFKNWDDVLTVDYTRNAEAVLQSPGLSGKVKRDAEKKDQMKADLTALFLPRQPPMSLAEAEQLMEEWNEDLDGMEGFVLEGKKFARLPEEEFGHFYTQDCYVFLCRYWVPVEYEEEEKKEDKEEKAEGKEGEEATAEAEEKQPEEDFQCIVYFWQGREASNMGWLTFTFSLQKKFESLFPGKLEVVRMTQQQENPKFLSHFKRKFIIHRGKRKAVQGAQQPSLYQIRTNGSALCTRCIQINTDSSLLNSEFCFILKVPFESEDNQGIVYAWVGRASDPDEAKLAEDILNTMFDTSYSKQVINEGEEPENFFWVGIGAQKPYDDDAEYMKHTRLFRCSNEKGYFAVTEKCSDFCQDDLADDDIMLLDNGQEVYMWVGTQTSQVEIKLSLKACQVYIQHMRSKEHERPRRLRLVRKGNEQHAFTRCFHAWSAFCKALA

SEQ ID NO: 21613 - protein, 248 aa, Homo sapiens
MSGLGRSRRGGRSRVDQEERWSLSCRKEQGKFYDHLLRDCISCASICGQHPKQCAYFCENKLRSPVNLPPELRRQRSGEVENNSDNSGRYQGLEHRGSEASPALPGLKLSADQVALVYSTLGLCLCAVLCCFLVAVACFLKKRGDPCSCQPRSRPRQSPAKSSQDHAMEAGSPVSTSPEPVETCSFCFPECRAPTQESAVTPGTPDPTCAGRKTKPPPVLTAGNCGVHRPPPETSTGSPRGQRLLWTQ

SEQ ID NO: 21614 - protein, 177 aa, Homo sapiens
TAGHLIGLYLYQFQFFQEAVPPNDYYARLFGIKSVIQTDCSSTWKIIVNPDLSWYHHANPILLLVMYYTLATLIRIWLQEPLVQDEGTKEEDKALACSPIQITAGRRRSLWYATHYPTDERKGLLVTVNGNPVDYHTIHPSLPMENGPGKADLYSTPQYRWEPSDESSEKREEEEEE

SEQ ID NO: 21615 - protein, 601 aa, Homo sapiens
MSVMLAKPRLDTEQLAQRGAGLCFTFVSAQQNSPSSTGSGNTEHSCSSQKQISIQHRQTQSDLTIEKISALENSKNSDLEKKEGRIDDLLRANCDLRRQIDEQQKMLEKYKERLNRCVTMSKKLLIEKSKQEKMACRDKSMQDRLRLGHFTTVRHGASFTEQWTDGYAFQNLIKQQERINSQREEIERQRKMLAKRKPPAMGQAPPATNEQKQRKSKTNGAENETLTLAEYHEQEEIFKLRLGHLKKEEAEIQAELERLERVRNLHIRELKRIHNEDNSQFKDHPTLNDRYLLLHLLGRGGFSEVYKAFDLTEQRYVAVKIHQLNKNWRDEKKENYHKHACREYRIHKELDHPRIVKLYDYFSLDTDSFCTVLEYCEGNDLDFYLKQHKLMSEKEARSIIMQIVNALKYLNEIKPPIIHYDLKPGNILLVNGTACGEIKITDFGLSKIMDDDSYNSVDGMELTSQGAGTYWYLPPECFVVGKEPPKISNKVDVWSVGVIFYQCLYGRKPFGHNQSQQDILQENTILKATEVQFPPKPVVTPEAKAFIRRCLAYRKEDRIDVQQLACDPYLLPHIRKSVSTSSPAGAAIASTSGASNNSSSN

SEQ ID NO: 21616 - protein, 182 aa, Homo sapiens
MPQTRSQAQATISFPKRKLSRALNKAKNSSDAKLEPTNVQTVTCSPRVKALPLSPRKRLGDDNLCNTPHLPPCSPPKQGKKENGPPHSHTLKGRRLVFDNQLTIKSPSKRELAKVHQNKILSSVRKSQEITTNSEQRCPLKKESACVRLFKQEGTCYQQAKLVLNTAVPDRLPAREREMDVI

SEQ ID NO: 21617 - protein, 365 aa, Homo sapiens
MSTVEEDSDTVTVETVNSVTLTQDTEGNLILHCPQNVSENDQSFEVTMTATTEVADDEVTEGTVTQIQILQNEQLDEISPLGNEEVSAVSQAWFTTKEDKDSLTNKGHKWKQGMWSKEEIDILMNNIERYLKARGIKDATEIIFEMSKDERKDFYRTIAWGLNRPLFAVYRRVLRMYDDRNHVGKYTPEEIEKLKELRIKHGNDWATIGAALGRSASSVKDRCRLMKDTCNTGKWTEEEEKRLAEVVHELTSTEPGDIVTQGVSWAAVAERVGTRSEKQCRSKWLNYLNWKQSGGTEWTKEDEINLILRIAELDVADENDINWDLLAEGWSSVRSPQWLRSKWWTIKRQIANHKDVSFPVCSMFR

SEQ ID NO: 21618 - protein, 89 aa, Homo sapiens
IDVSQSVEPTHPHGLEFLFRDCRNVSQFFQKGGVKEALSERELFNAVSGLNITADNEADFLAEVTATPCKDDGDARISANSCLSMGLSC

SEQ ID NO: 21619 - protein, 144 aa, Homo sapiens
FVYHESGKEIVDWFNALRAARLQYLKMAFPELPESELVPFLTRNYLKQGFMEKTGPKQKEPFKKRWFALDCHERRLLYYKNPLDAFEQGQVFLGNKEQGYEAYEDLPKGIRGNRWKAGLTIVTPERRFVLTCPTASTESGRSSR

SEQ ID NO: 21620 - protein, 312 aa, Homo sapiens
MAQPYPPAQYPPPPQNGIPAEYAPPPPHPTQDYSGQTPVPTEHGMTLYTPAQTHPEQPGSEASTQPIAGTQTVPQTDEAAQTDSQPLHPSDPTEKQQPKRLHVSNIPFRFRDPDLRQMFGQFGKILDVEIIFNERGSKGFGFVTFETSSDADRAREKLNGTIVEGRKIEVNNATARVMTNKKTGNPYTNGWKLNPVVGAVYGPEFYAVTGFPYPTTGTAVAYRGAHLRGRGRAVYNTFRAAPPPPPIPTYGAVVYQDGFYGAEIYGGYAAYRYAQPAAAAAAYSDSYGRVYAAADPYHHTIGPAATYSIGTM

SEQ ID NO: 21621 - protein, 503 aa, Homo sapiens
MDLVGVASPEPGTAAAWGPSKCPWAIPQNTISCSLADVMSEQLAKELQLEEEAAVFPEVADLMLAQMLQMEYDREYDAQLRREEKKFNGDSKVSISFENYRKVHPYEDSDSSEDEVDWQDTRDDPYRPAKPVPTPKKGFIGKGKDITTKHDEVVCGRKNTARMENFAPEFQVGDGIGMDLKLSNHVFNALKQHAYSEERRSARLHEKKEHSTAEKAVDPKTRLLMYKMVNSGMLETITGCISTGKESVVFHAYGGSMEDEKEDSKVIPTECAIKVFKTTLNEFKNRDKYIKDDFRFKDRFSKLNPRKIIRMWAEKEMHNLARMQRAGIPCPTVVLLKKHILVMSFIGHDQVPAPKLKEVKLNSEEMKEAYYQTLHLMRQLYHECTLVHADLSEYNMLWHAGKVWLIDVSQSVEPTHPHGLEFLFRDCRNVSQFFQKGGVKEALSERELFNAVSGLNITADNEADFLAEIEALEKMNEDHVQKNGRKAASFLKDDGDPPLLYDE

SEQ ID NO: 21622 - protein, 180 aa, Homo sapiens
IKAFTALRFLSEPSDAVTMRGGNVLLDCSAESDRGVPVIKWKKDGIHLALGMDERKQQLSNGSLLIQNILHSRHHKPDEGLYQCEASLGDSGSIISRTAKVAVAGANIRILPRRSTSSCAAVWKMYPRALEYAQNSIWEGLVTVQSFPFYIYRDIVYFQMISRKLNCSDSVILNDLMIFI

SEQ ID NO: 21623 - protein, 1055 aa, Homo sapiens
MELAALCRWGLLLALLPPGAASTQVCTGTDMKLRLPASPETHLDMLRHLYQGCQVVQGNLELTYLPTNASLSFLQDIQEVQGYVLIAHNQVRQVPLQRLRIVRGTQLFEDNYALAVLDNGDPLNNTTPVTGASPGGLRELQLRSLTEILKGGVLIQRNPQLCYQDTILWKDIFHKNNQLALTLIDTNRSRACHPCSPMCKGSRCWGESSEDCQSLTRTVCAGGCARCKGPLPTDCCHEQCAAGCTGPKHSDCLACLHFNHSGICELHCPALVTYNTDTFESMPNPEGRYTFGASCVTACPYNYLSTDVGSCTLVCPLHNQEVTAEDGTQRCEKCSKPCARVCYGLGMEHLREVRAVTSANIQEFAGCKKIFGSLAFLPESFDGDPASNTAPLQPEQLQVFETLEEITGYLYISAWPDSLPDLSVFQNLQVIRGRILHNGAYSLTLQGLGISWLGLRSLRELGSGLALIHHNTHLCFVHTVPWDQLFRNPHQALLHTANRPEDECVGEGLACHQLCARGHCWGPGPTQCVNCSQFLRGQECVEECRVLQGLPREYVNARHCLPCHPECQPQNGSVTCFGPEADQCVACAHYKDPPFCVARCPSGVKPDLSYMPIWKFPDEEGACQPCPINCTHSCVDLDDKGCPAEQRASPLTSIISAVVGILLVVVLGVVFGILIKRRQQKIRKYTMRRLLQETELVEPLTPSGAMPNQAQMRILKETELRKVKVLGSGAFGTVYKGIWIPDGENVKIPVAIKVLRENTSPKANKEILDEAYVMAGVGSPYVSRLLGICLTSTVQLVTQLMPYGCLLDHVRENRGRLGSQDLLNWCMQIAKGMSYLEDVRLVHRDLAARNVLVKSPNHVKITDFGLARLLDIDETEYHADGGKVPIKWMALESILRRRFTHQSDVWSYGVTVWELMTFGAKPYDGIPAREIPDLLEKGERLPQPPICTIDVYMIMVKCWMIDSECRPRFRELVSEFSRMARDPQRFVVIQNEDLGPASPLDSTFYRSLLEDDDMGDLVDAEEYLVPQQGFFCPDPAPGAGGMVHHRHRSSSTRNM

SEQ ID NO: 21624 - protein, 656 aa, Homo sapiens
MAGERGASAVLFDITEDRAAAEQLQQPLGLTWPVVLIWGNDAEKLMEFVYKNQKAHVRIELKEPPAWPDYDVWILMTVVGTIFVIILASVLRIRCRPRHSRPDPLQQRTAWAISQLATRRYQASCRQARGEWPDSGSSCSSAPVCAICLEEFSEGQELRVISCLHEFHRNCVDPWLHQHRTCPLCMFNITEGDSFSQSLGPSRSYQEPGRRLHLIRQHPGHAHYHLPAAYLLGPSRSAVARPPRPGPFLPSQEPGMGPRHHRFPRAAHPRAPGEQQRLAGAQHPYAQGWGLSHLQSTSQHPAACPVPLRRARPPDSSGSGESYCTERSGYLADGPASDSSSGPCHGSSSDSVVNCTDISLQGVHGSSSTFCSSLSSDFDPLVYCSPKGDPQRVDMQPSVTSRPRSLDSVVPTGETQVSSHVHYHRHRHHHYKKRFQWHGRKPGPETGVPQSRPPIPRTQPQPEPPSPDQQVTRSNSAAPSGRLSNPQCPRALPEPAPGPVDASSICPSTSSLFNLQKSSLSARHPQRKRRGGPSEPTPGSRPQDATVHPACQIFPHYTPSVAYPWSPEAHPLICGPPGLDKRLLPETPGPCYSNSQPVWLCLTPRQPLEPHPPGEGPSEWSSDTAEGRPCPYPHCQVLSAQPGSEEELEELCEQAV

SEQ ID NO: 21625 - protein, 432 aa, Homo sapiens
MSRRVVRQSKFRHVFGQAAKADQAYEDIRVSKVTWDSSFCAVNPKFLAIIVEAGGGGAFIVLPLAKTGRVDKNYPLVTGHTAPVLDIDWCPHNDNVIASASDDTTIMVWQIPDYTPMRNITEPIITLEGHSKRVGILSWHPTARNVLLSAGGDNVIIIWNVGTGEVLLSLDDMHPDVIHSVCWNSNGSLLATTCKDKTLRIIDPRKGQVVANNFEEPVALQEMDTSNGVLLPFYDPDSSIVYLCGKGDSSIRYFEITDEPPFVHYLNTFSSKEPQRGMGFMPKRGLDVSKCEIARFYKLHERKCEPIIMTVPRKSDLFQDDLYPDTPGPEPALEADEWLSGQDAEPVLISLRDGYVPPKHRELRVTKRNILDVRPPSGPRRSQSASDAPLSQQHTLETLLEEIKALRERVQAQEQRITALENMLCELVDGTD

SEQ ID NO: 21626 - protein, 625 aa, Homo sapiens
TMTVYQIPIHSEQRRGKHQPWQSPERPLSRLSPERSSDSESNENEPHLPHGVSQRRGVRDSSLVVAFICKLHLKRGNFLVLKAKEMGLPVGTAAIAPIIAAVKDGKSITHEGREILAEELCTPPDPGAAFVVVECPDESFIQPICENATFQRYQQWMERFGPDTQHLVLNENCASVHNLRSHKIQTQLNLIHPDIFPLLTSFRCKKEGPTLSVPMVQGECLLKYQLRPRREWQRDAIITCNPEEFIVEALQLPNFQQSVQEYRRSAQDGPAPAEKRSQYPEIIFLGTGSAIPMKIRNVSATLVNISPDTSLLLDCGEGTFGQLCRHYGDQVDRVLGTLAAVFVSHLHADHHTGLPSILLQRERALASLGKPLHPLLVVAPNQLKAWLQQYHNQCQEVLHHISMIPAKCLQEGAEISSPAVERLISSLLRTCDLEEFQTCLVRHCKHAFGCALVHTSGWKVVYSGDTMPCEALVRMGKDATLLIHEATLEDGLEEEAVEKTHSTTSQAISVGMRMNAEFIMLNHFSQRYAKVPLFSPNFSEKVGVAFDHMKVCFGDFPTMPKLIPPLKALFAGDIEEMEERREKRELRQVRAALLSRELAGGLEDGEPQQKRAHTEEPQAKKVRAQ

SEQ ID NO: 21627 - protein, 183 aa, Homo sapiens
QKTGNGSAVQTTGRGQHVQKLYKCASCLKEFRSKQDLVKLDINGLPYGLCAGCVNLSKSASPGINVPPGTNRPGLGQNENLSAIEGKGKVGGLKTRCSSCNVKFESESELQNHIQTIHRELVPDSNSTQLKTPQVSPMPRISPSQSDEKKTYQCIKCQMVFYNEWDIQVHVANHMIDSKTKDL

SEQ ID NO: 21628 - protein, 192 aa, Homo sapiens
MSSAMLVTCLPDPSSSFREDAPRPPVPGEEGETPPCQPGVGKGQVTKPMPVSSNTRRNEDGLGEPEGRASPDSPLTRWTKSLHSLLGDQDGAYLFRTFLEREKCVDTLDFWFACNGFRQMNLKDTKTLRVAKAIYKRYIENNSIVSKQLKPATKTYIRDGIKKQQIDSIMFDQAQTEIQSVMEENAYQMFLT

SEQ ID NO: 21629 - protein, 1381 aa, Homo sapiens
MRDPNNQLHVIKNLKIAVSNIVTQPPQPGAIRKLLNDVVSGSQPAEGLVANVITAGDYDLNISATTPWFESYRETFLQSMPALDHEFLNHYLACMLVASSSEAEPVEQFSKLSQEQHRIQHNSDYSYPKWFIPNTLKYYVLLHDVSAGDEQRAESIYEEMKQKYGTQGCYLLKINSRTSNRASDEQIPDPWSQYLQKNSIQNQESYEDGPCTITSNKNSDNNLLSLDGLDNEVKDGLPNNFRAHPLQLEQSSDPSNSIDGPDHLRSASSLHETKKGNTGIIHGACLTLTDHDRIRQFIQEFTFRGLLPHIEKTIRQLNDQLISRKGLSRSLFSATKKWFSGSKVPEKSINDLKNTSGLLYPPEAPELQIRKMADLCFLVQHYDLAYSCYHTAKKDFLNDQAMLYAAGALEMAAVSAFLQPGAPRPYPAHYMDTAIQTYRDICKNMVLAERCVLLSAELLKSQSKYSEAAALLIRLTSEDSDLRSALLLEQAAHCFINMKSPMVRKYAFHMILAGHRFSKAGQKKHALRCYCQAMQVYKGKGWSLAEDHINFTIGRQSYTLRQLDNAVSAFRHILINESKQSAAQQGAFLREYLYVYKNVSQLSPDGPLPQLPLPYINSSATRVFFGHDRRPADGEKQAATHVSLDQEYDSESSQQWRELEEQVVSVVNKGVIPSNFHPTQYCLNSYSDNSRFPLAVVEEPITVEVAFRNPLKVLLLLTDLSLLWKFHPKDFSGKDNEEVKQLVTSEPEMIGAEVISEFLINGEESKVARLKLFPHHIGELHILGVVYNLGTIQGSMTVDGIGALPGCHTGKYSLSMSVRGKQDLEIQGPRLNNTKEEKTSVKYGPDRRLDPIITEEMPLLEVFFIHFPTGLLCGEIRKAYVEFVNVSKCPLTGLKVVSKRPEFFTFGGNTAVLTPLSPSASENCSAYKTVVTDATSVCTALISSASSVDFGIGTGSQPEVIPVPLPDTVLLPGASVQLPMWLRGPDEEGVHEINFLFYYESVKKQPKIRHRILRHTAIICTSRSLNVRATVCRSNSLENEEGRGGNMLVFVDVENTNTSEAGVKEFHIVQVSSSSKHWKLQKSVNLSENKDTKLASREKGKFCFKAIRCEKEEAATQSSEKYTFADIIFGNEQIISSASPCADFFYRSLSSELKKPQAHLPVHTEKQSTEDAVRLIQKCSEVDLNIVILWKAYVVEDSKQLILEGQHHVILRTIGKEAFSYPQKQEPPEMELLKFFRPENITVSSRPSVEQLSSLIKTSLHYPESFNHPFHQKSLCLVPVTLLLSNCSKADVDVIVDLRHKTTSPEALEIHGSFTWLGQTQYKLQLKSQEIHSLQLKACFVHTGVYNLGTPRVFAKLSDQVTVFETSQQNSMPALIIISNV

SEQ ID NO: 21630 - protein, 102 aa, Homo sapiens
MDIEFECTVSGKPVPTVNWMKNGDVVIPSDYFQIVGGSNLRILGVVKSDEGFYQCVAENEAGNAQTSAQLIVPKPAIPSSSVLPSAPRDVVPVLVSSRFVRL

SEQ ID NO: 21631 - protein, 460 aa, Homo sapiens
MRITTGIYCLYLCNFIDGVLTLNAENTNYAYQVPNFHKCEICLLSFPKESQFQRHMRDHERNDKPHRCDQCPQTFNVEFNLTLHKCTHSGEDPTCPVCNKKFSRVASLKAHIMLHEKEENLICSECGDEFTLQSQLAVHMEEHRQELAGTRQHACKACKKEFETSSELKEHMKTHYKIRVSSTRSYNRNIDRSGFTYSCPHCGKTFQKPSQLTRHIRIHTGERPFKCSECGKAFNQKGALQTHMIKHTGEKPHACAFCPAAFSQKGNLQSHVQRVHSEVKNGPTYNCTECSCVFKSLGSLNTHISKMHMGGPQNSTSSTETAHVLTATLFQTLPLQQTEAQATSASSQPSSQAVSDVIQQLLELSEPAPVESGQSPQPGQQLSITVGINQDILQQALENSGLSSIPAAAHPNDSCHAKTSAPHAQNPDVSSVSNEQTDPTDAEQEKEQESPEKLDKKEKK

SEQ ID NO: 21632 - protein, 390 aa, Homo sapiens
MLSFSRDRLPSGRRVSGKCPPPPLGMAVGRGGSGCPEEGSGRKLELLESQLPAERAREEAGPSVRRPRDKLHKPKATQTEVKPSVRFNLRTSKDPEHEGCYLSVGHSQPLEDCSFNMTAKTFFIIHGWTMSGIFENWLHKLVSALHTREKDANVVVVDWLPLAHQLYTDAVNNTRVVGHSIARMLDWLQEKDDFSLGNVHLIGYSLGAHVAGYAGNFVKGTVGRITGLDPAGPMFEGADIHKRLSPDDADFVDVLHTYTRSFGLSIGIQMPVGHIDIYPNGGDFQPGCGLNDVLGSIAYGTITEVVKCEHERAVHLFVDSLVNQDKPSFAFQCTDSNRFKKGICLSCRKNRCNSIGYNAKKMRNKRNSKMYLKTRAGMPFRGNLQSLECP

SEQ ID NO: 21633 - protein, 419 aa, Homo sapiens
HLKQKKSMTPAEREENQRMIVCNQVMKYILDKIDKEEKQAAKKRKREESVEQKRSKQNATKLSALLFKHKEQLRAEILKKRALLDKDLQIEVQEELKRDLKIKKEKDLMQLAQATAVAAPCPPVTPAPPAPPAPPPSPPPPPAVQHTGLLSTPTLPAASQKRKREEEKDSSSKSKKKKMISTTSKETKKDTKLYCICKTPYDESKFYIGCDLCTNWYHGECVGITEKEAKKMDVYICNDCKRAQEGSSEELYCICRTPYDESQFYIGCDRCQNWYHGRCVGILQSEAELIDEYVCPQCQSTEDAMTVLTPLTEKDYEGLKRVLRSLQAHKMAWPFLEPVDPNDAPDYYGVIKEPMDLATMEERVQRRYYEKLTEFVADMTKIFDNCRYYNPSDSPFYQCAEVLESFFVQKLKGFKASRL

SEQ ID NO: 21634 - protein, 929 aa, Homo sapiens
MKGLSGSRSHHHGVTCDSACDSLSHHSDRKPYLLSPVEHHPADHPYYTQRNSFQAECVGPFSDPLASSTFPRRHYTSQQELKDECALVPRTLATKANRIPANLLDQFERQLPLSRDGYHTLQYKRTAVEHRSDSPGRIRHLVHSVQKLFTKSHSLEGPSKGSVNGGKASPDEAQAARYGKRSKSKERRAEPKARPSTSPGWWSSDDNLDGDMCIYHAPSGVMTMGRCPDRSASQYFLEAYNTISEQAVKASRSNNDVKCSTCANLPVSLDTPLLKKSAWSSTLTVSRAREVYQKASVNMDQAMVKSESCQQERSCQYLQVPQDEWTGYTPRGKDDEIPCRRMRSGSYIKAMGDEDSGDSDTSPKPSPKVAARRESYLKATQPSLTELTTLKISNEHSPKLQIRSHSYLRAVSEVSINRSLDSLDPAGLLTSPKFRSRNESYMRAMSTISQVSEMEVNGQFESVCESVFSELESQAVEALDLPMPGCFRMRSHSYVRAIEKGCSQDDECVSLRSSSPPRTTTTVRTIQSSTVSSCITTYKKTPPPVPPRTTTKPFISITAQSSTESAQDAYMDGQGQRGDIISQSGLSNSTESLDSMKALTAAIEAANAQIHGPASQHMGNNTATVTTTTTIATVTTEDRKKDHFKKNRCLSIGIQVDDAEEPDKTGENKAPSKFQSVGVQVEEEKCFRRFTRSNSVTTAVQADLDFHDNLENSLESIEDNSCPGPMARQFSRDASTSTVSIQGSGNHYHACAADDDFDTDFDPSILPPPDPWIDSITEDPLEAVQRSVCHRDGHWFLKLLQAERDRMEGWCQQMEREERENNLPEDILGKIRTAVGSAQLLMAQKFYQFRELCEENLNPNAHPRPTSQDLAGFWDMLQLSIENISMKFDELHQLKANNWKQMDPLDKKVEQCRFCMVHLKTCTNTGQSK

SEQ ID NO: 21635 - protein, 336 aa, Homo sapiens
MSNMENSFDDVSCLSPQNLGSSSPSKKQSKENTITINCVTFPHPDTMPEQQLLKPTEWSYCDYFWADKKDPQGNGTVAGFELLLQKQLKGKQMQKEMSEFIRERIKIEEDYAKNLAKLSQNSLASQEEGSLGEAWAQVKKSLADEAEVHLKFSAKLHSEVEKPLMNFRENFKKDMKKCDHHIADLRKQLASRYASVEKARKALTERQRDLEMKTQQLEIKLSNKTEEDIKKARRKSTQAGDDLMRCVDLYNQAQSKWFEEMVTTTLELERLEVERVEMIRQHLCQYTQLRHETDMFNQSTVEPVDQLLRKVDPAKDRELWVREHKTGNIRPVDMEI

SEQ ID NO: 21636 - protein, 91 aa, Homo sapiens
ASPLRTSRSRPHPPSIGHPAVVLTSYRSTAERKLLPLLKPPKPTRVRQDATIFGDPPQPDLDLLSEDGIQTGDSPDEAPQNTPPATVEGRY

SEQ ID NO: 21637 - protein, 217 aa, Homo sapiens
MWPLTQNEECTVTGFLRDKLQYRSRLQYMKHYFPINYKISVPYEGVFRIANVTRLQRAQVSERELRYLWVLVSLSATESVQDVLLEGHPSWKYLQEVETLLLNVQQGLTDVEVSPKVESVLSLLNAPGPNLKLVRPKALLDNCFRVMELLYCSCCKQSSVLNWQDCEVPSPQSCSPEPSLQYAATQLYPPPPWSPSSPPHSTGSVRPVRAQGEGLLP

SEQ ID NO: 21638 - protein, 565 aa, Homo sapiens
MEVGSEEEKWEKLDAEFDHFVVDMKPFVLKLPHRTERQRCALWIRKLCEPSGTGAGIMGRKNRNLYAKLLLHMLKRGALEGPFTHRPEPGTLKILPSYMSIYFDEPNPARAKGSSPEGLPAWVLGELETSEHKLNESWKLSSGEDNTLVQSPTDVYSREQYTGKLRVRSHSLSPTHREDGQNITPKICEVYSKKSPVSLDDSDIEARLNSWNLGIENPRYLRQKPIPVSLMTPKFSLRKSSSFHDDHFLSRIREKELDMKTKMMEAKFHEEKLKLQQKHDADVQKILERKNNEIEELKTLYRSKQHETEETIRKLEKKVQTLIRDCQVIRETKEDQIAELKKICEQSTESLNNDWEKKLHNAVAEMEQEKFDLQKQHTENIQELLEDTNVRLNKMESEYMAQTQSTNHMIKELEARVQQLTGEAENSNLQRQKLIQEKAELERCYQITCSELQEVKARRNTLHKEKDHLVNDYEQNMKLLQTKYDADINLLKQEHALSASKASSMIEELEQNVCQLKQQLQESELQRKQQLRDQENKFQMEKSHLKHIYEKKAHDLQSELDKGKE

SEQ ID NO: 21639 - protein, 276 aa, Homo sapiens
MDYPTLLLALLHVYRALCEEVLWHTSVPFAENMSLECVYPSMGILTQVEWFKIGTQQDSIAIFSPTHGMVIRKPYAERVYFLNSTMASNNMTLFFRNASEDDVGYYSCSLYTYPQGTWQKVIQVVQSDSFEAAVPSNSHIVSEPGKNVTLTCQPQMTWPVQAVRWEKIQPRQIDLLTYCNLVHGRNFTSKFPRQIVSNCSHGRWSVIVIPDVTVSDSGLYRCYLQASAGENETFVMRLTVAEGKTDNQYTLFVAGGTVLLLLFVISITTIIVIFLN

SEQ ID NO: 21640 - protein, 1007 aa, Homo sapiens [sequence omitted]

SEQ ID NO: 21641 - protein, 716 aa, Homo sapiens
MAPQKHGGGGGGGSGPSAGSGGGGFGGSAAVAAATASGGKSGGGSCGGGGSYSASSSSSAAAAAGAAVLPVKKPKMEHVQADHELFLQAFEKPTQIYRFLRTRNLIAPIFLHRTLTYMSHRNSRTNIKSLSAHLQLTFTGFFHKNDKPSPNSENEQNSVTLEVLLVKVCHKKRKDVSCPIRQVPTGKKQVPLNPDLNQTKPGNFPSLAVSSNEFEPSNSHMVKSYSLLFRVTRPGRREFNGMINGETNENIDVNEELPARRKRNREDGEKTFVAQMTVFDKNRRLQLLDGEYEVAMQEMEECPISKKRATWETILDGKRLPPFETFSQGPTLQFTLRWTGETNDKSTAPIAKPLATRNSESLHQENKPGSVKPTQTIAVKESLTTDLQTRKEKDTPNENRQKLRIFYQFLYNNNTRQQTEARDDLHCPWCTLNCRKLYSLLKHLKLCHSRFIFNYVYHPKGARIDVSINECYDGSYAGNPQDIHRQPGFAFSRNGPVKRTPITHILVCRPKRTKASMSEFLESEDGEVEQQRTYSSGHNRLYFHSDTCLPLRPQEMEVDSEDEKDPEWLREKTITQIEEFSDVNEGEKEVMKLWNLHVMKHGFIADNQMNHACMLFVENYGQKIIKKNLCRNFMLHLVSMHDFNLISIMSIDKAVTKLREMQQKLEKGESASPANEEITEEQNGTANGFSEINSKEKALETDSVSGVSKQSKKQKL

SEQ ID NO: 21642 - protein, 461 aa, Homo sapiens
MTMRSAVFKAAAAPAGGNPEQRLDYERAAALGGPEDEPGAAEAHFLPRHRKLKEPGPPLASSQGGSPAPSPAGCGGKGRGLLLPAGAAPGQQEESWGGSVPLPCPPPATKQAGIGGEPAAAGAGCSPRPKYQAVLPIQTGSLVAAAKEPTPWAGDKGGAASPAATASDPAGPPPLPLPGPPPLAPTATAGTLAASEGRWKSMRKSPLGGGGGSGASSQAACLKQILLLQLDLIEQQQQQLQAKEKEIEELKSERDTLLARIERMERRMQLVKKDNEKERHKLFQGYETEEREETELSEKIKLECQPELSETSQTLPPKPFSCGRSGKGHKRKSPFGSTERKTPVKKLAPEFSKVKTKTPKHSPIKEEPCGSLSETVCKRELRSQETPEKPRSSVDTPPRLSTPQKGPSTHPKEKAFSSEIEDLPYLSTTEMYLCRWHQPPPSPLPLRESSPKKEETVASKA

SEQ ID NO: 21643 - protein, 3795 aa, Homo sapiens
MVVSAGPWSSEKAEMNILEINETLRPQLAEKKQQFRSLKEKCFLTQLAGFLANRQKKYKYEECKDLIKFMLRNERQFKEEKLAEQLKQAEELRQYKVLVHSQERELTQLREKLREGRDASRSLYEHLQALLTPDEPDKSQGQDLQEQLAEGCRLAQHLVQKLSPENDEDEDEDVQVEEAEKVLESSAPREVQKAEESKVPEDSLEECAITCSNSHGPCDSNQPHKNIKITFEEDEVNSTLVVDRESSHDECQDALNILPVPGPTSSATNVSMVVSAGPLSSEKAEMNILEINEKLRPQLAEKKQQFRNLKEKCFLTQLSGFLANQQKKYKYEECKDLIKFMLRNERQFKEEKLAEQLKQAEELRQYKVLVHAQERELTQLKEKLREGRDASRSLNEHLQALLTPYEPDKSQGQDLQEQLAEGCRLAQHLVQKLSPENDNDDDEDVQVEVAEKVQKSSAPREMQKAEEKEVPEDSLEECAITYSNSHGSYDSNQPHRKTKITFEEDKVDSTLIGSSSHVEWEDAVHIIPENESDDEEEEEKGPVSPRNLQESEEEEVPQESWDEGYSTLSIPPEMLASYQSYSSTFHSLEEQQVCMAVDIGRHRWDQVKKEDQEATGPRLSRELLDEKGPEVLQDSQDRCYSTPSGCLELTDSCQPYRSAFYILEQQRVGLAIDMDEIEKYQEVEEDQDPSCPRLSRELLDEKEPEVLQDSLDRCYSTPSGYLELPDLGQPYSSAVYSLEEQYLGLALDVDRIKKDQEEEEDQGPPCPRLSRELLEVVEPEVLQDSLDRCYSTPSSCLEQPDSCQPYGSSFYALEEKHVGFSLDVGEIEKKGKGKKRRGRRSKKERRRGRKEGEEDQNPPCPRLSRELLDEKGPEVLQDSLDRCYSTPSGCLELTDSCQPYRSAFYVLEQQRVGFAFDMDEIEKYQEVEEDQDPSCPRLSRELLDEKEPEVLQDSLDRCYSTPSGYLELPDLGQPYSSAVYSLEEQYLGLALDVDRIKKDEEEEEDQDPPCPRLSRELLEVVEPEVLQDSLDRCYSTPSSCLEQPDSCQPYGSSFYALEENHVGFSLDVGEIEKKGKGKKRRGRRSKKERRRGRKEGEEDQNPPCPRLSRELLEEKGPEVLQDSLDRCYSTPSGCLELTDSCQPYRSAFYVLEQQRVGFAVDMDEIEKYQEVEEDQDPSCPRLSRELLDEKEPEVLQDSLDRCYSTPSGYLELPDLGQPYSSAVYSLEEQYLGLALDVDRIKKDEEEEEDQDPPCPRLSRELLEVVEPEVLQDSLDRCYSTPSSCLEQPDSCQPYGSSFYALEEKHVGFSLDVGEIEKKGKGKKRRGRRSKKERRRGRKEGEEDQNPPCPRLSRELLEEKGPEVLQDSLDRCYSTPSGCLELTDSCQPYRSAFYVLEQQRVGFAVDMDEIEKYQEVEEDQDPSCPRLSRELLDEKEPEVLQDSLDRCYSTPSGYLELPDLGQPYSSAVYSLEEQYLGLALDVDRIKKDEEEEEDQDPPCPRLSRELLEVVEPEVLQDSLDRCYSTPSSCLEQPDSCQPYGSSFYALEEKHVGFSLDVGEIEKKGKGKKRRGRRSKKERRRGRKEGEEDQNPPCPRLSRELLDEKGPEVLQDSLDRCYSTPSGCLELTDSCQPYRSAFYVLEQQHVGLAVDMDEIEKYQEVEEDQDPSCPRLSRELLDEKEPEVLQDSLDRCYSTPSGYLELPDLGQPYSSAVYSLEEQYLGLALDVDRIKKDQEEEEDQGPPCPRLSRELLEVVEPEVLQDSLDRCYSTPSSCLEQPDSCQPYGSSFYALEEKHVGFSLDVGEIEKKGKGKKRRGRRSKKERRRGRKEGEEDQNPPCPRLSRELLDEKGPEVLQDSLDRCYSTPSGCLELTDSCQPYRSAFYVLEQQHVGLAVDMDEIEKYQEVEEDQDPSCPRLSRELLDEKEPEVLQDSLDRCYSTPSGYLELPDLGQPYSSAVYSLEEQYLGLALDVDRIKKDQEEEEDQGPPCPRLSRELLEVVEPEVLQDSLDRCYSTPSSCLEQPDSCQPYGSSFYALEEKHVGFSLDVGEIEKKGKGKKRRGRRSKKERRRGRKEGEEDQNPPCPRLSRELLDEKGPEVLQDSLDRCYSTPSGCLELTDSCQPYRSAFYVLEQQHVGLAVDMDEIEKYQEVEEDQDPSCPRLSRELLDEKEPEVLQDSLDRCYSTPSGYLELPDLGQPYSSAVYSLEEQYLGLALDVDRIKKDQEEEEDQGPPCPRLSRELLEVVEPEVLQDSLDRCYSTPSSCLEQPDSCQPYGSSFYALEEKHVGFSLDVGEIEKKGKGKKRRGRRSKKERRRGRKEGEEDQNPPCPRLSRELLDEKGPEVLQDSLDRCYSTPSGCLELTDSCQPYRSAFYVLEQQHVGLAVDMDEIEKYQEVEEDQDPSCPRLSRELLDEKEPEVLQDSLDRCYSTPSGYLELPDLGQPYSSAVYSLEEQYLGLALDVDRIKKDQEEEEDQDPPCPRLSRELLEVVEPEVLQDSLDRCYSTPSSCLEQPDSCQPYGSSFYALEEKHVGFSLDVGEIEKKGKGKKRRGRRSKKERRRGRKEGEEDQNPPCPRLSRELLDEKGPEVLQDSLDRCYSTPSGCLELTDSCQPYRSAFYVLEQQHVGLAVDMDEIEKYQEVEEDQDPSCPRLSRELLDEKEPEVLQDSLDRCYSTPSGYLELPDLGQPYSSAVYSLEEQYLGLALDVDRIKKDQEEEEDQGPPCPRLSRELLEVVEPEVLQDSLDRCYSTPSSCLEQPDSCQPYGSSFYALEEKHVGFSLDVGEIEKKGKGKKRRGRRSKKERRRGRKEGEEDQNPPCPRLSRELLDEKGPEVLQDSLDRCYSTPSGCLELTDSCQPYRSAFYVLEQQHVGLAVDMDEIEKYQEVEEDQDPSCPRLSRELLDEKEPEVLQDSLDRCYSTPSGYLELPDLGQPYSSAVYSLEEQYLGLALDVDRIKKDQEEEEDQGPPCPRLSRELLEVVEPEVLQDSLDRCYSTPSSCLEQPDSCQPYGSSFYALEEKHVGFSLDVGEIEKKGKGKKRRGRRSKKERRRGRKEGEEDQNPPCPRLSRELLDEKGPEVLQDSLDRCYSTPSGCLELTDSCQPYRSAFYVLEQQHVGLAVDMDEIEKYQEVEEDQDPSCPRLSRELLDEKEPEVLQDSLDRCYSTPSGYLELPDLGQPYSSAVYSLEEQYLGLALDVDRIKKDEEEEEDQDPPCPRLSRELLEVVEPEVLQDSLDRCYSTPSSCLEQPDSCQPYGSSFYALEEKHVGFSLDVGEIEKKGKGKKRRGRRSKKERRRGRKEGEEDQNPPCPRLSRELLDEKGPEVLQDSLDRCYSTPSGYLELTDSCQPYRSAFYVLEQQHVGLAVDMDEIEKYQEVEEDQDPSCPRLSRELLDEKEPEVLQDSLDRCYSTPSGYLELPDLGQPYSSAVYSLEEQYLGLALDVDRIKKDQEEEEDQGPPCPRLSRELLEVVEPEVLQDSLDRCYSTPSSCLEQPDSCQPYGSSFYALEEKHVGFSLDVGEIEKKGKGKKRRGRRSKKERRRGRKEGEEDQNPPCPRLSRELLDEKGPEVLQDSLDRCYSTPSGCLELCDSCQPYRSAFYVLEQQRVGLAVDMDEIEKYQEVEEDQDPSCPRLSRELLDEKEPEVLQDSLDRCYSTPSGYLELPDLGQPYSSAVYSLEEQYLGLALDVDKIEKKGKGKKRRGRRSKKERRRGRKEGEEDQNPPCPRLNGVLMEVEEREVLQDSLDRCYSTPSMYFELPDSFQHYRSVFYSFEEQHISFALYVDNRFFTLTVTSLHLVFQMGVIFPQ

SEQ ID NO: 21644 - protein, 328 aa, Homo sapiens
MAQPYPPAQYPPPPQNGIPAEYAPPPPHPTQDYSGQTPVPTEHGMTLYTPAQTHPEQPGSEASTQPIAGTQTVPQTDEAAQTDSQPLHPSDPTEKQQPKRLHVSNIPFRFRDPDLRQMFGQFGKILDVEIIFNERGSKVNNATARVMTNKKTGNPYTNGWKLNPVVGAVYGPEFYAVTGFPYPTTGTAVAYRGAHLRGRGRAVYNTFRAAPPPPPIPTYGAALEQTLVKMPVPWAGLAPCPLPPQQTPEPAYPTSPAFPPLSCPFASRVVYQDGFYGAEIYGGYAAYRYAQPAAAAAAYSDSYGRVYAAADPYHHTIGPAATYSIGTM

SEQ ID NO: 21645 - protein, 735 aa, Homo sapiens
MAADSREEKDGELNVLDDILTEVPEQDDELYNPESEQDKNEKKGSKRKSDRMESTDTKRQKPSVHSRQLVSKPLSSSVSNNKRIVSTKGKSATEYKNEEYQRSERNKRLDADRKIRLSSSASREPYKNQPEKTCVRKRDPERRAKSPTPDGSERIGLEVDRRASRSSQSSKEEVNSEEYGSDHETGSSGSSDEQGNNTENEEEGVEEDVEEDEEVEEDAEEDEEVDEDGEEEEEEEEEEEEEEEEEEEEYEQDERDQKEEGNDYDTRSEASDSGSESVSFTDGSVRSGSGTDGSDEKKKERKRARGISPIVFDRSGSSASESYAGSEKKHEKLSSSVRAVRKDQTSKLKYVLQDARFFLIKSNNHENVSLAKAKGVWSTLPVNEKKLNLAFRSARSVILIFSVRESGKFQGFARLSSESHHGGSPIHWVLPAGMSAKMLGGVFKIDWICRRELPFTKSAHLTNPWNEHKPVKIGRDGQEIELECGTQLCLLFPPDESIDLYQVIHKMRHKRRMHSQPRSRGRPSRREPVRDVGRRRPEDYDIHNSRKKPRIDYPPEFHQRPGYLKDPRYQEVDSFTNLIPNRRFSGVRRDVFLNGSYNDYVREFHNMGPPPPWQGMPPYPGMEQPPHHPYYQHHAPPPQAHPPYSGHHPVPHEARYRDKRVHDYDMRVDDFLRRTQAVVSGRRSRPRERDRERERDRPRDNRRDRERDRGRDRERERERLCDRDRDRGERGRYRR

SEQ ID NO: 21646 - protein, 193 aa, Homo sapiens
MRLQKRLASSVLRCGKKKVWLDPNETNEIANANSRQQIRKLIKDGLIIRKPVTVHSRARCRKNTLARRKGRHMGIGKRKGTANARMPEKVTWMRRMRILRRLLRRYRESKKIDRHMYHSLYLKVKGNVFKNKRILMEHIHKLKADKARKKLLADQAEARRSKTKEARKRREERLQAKKEEIIKTLSKEEETKK

SEQ ID NO: 21647 - protein, 470 aa, Homo sapiens
MVPASRSREGPENMVRIALQLDDGSRLQDSFCSGQTLWELLSHFPQIRECLQHPGGATPVCVYTRDEVTGEAALRGTTLQSLGLTGGSATIRFVMKCYDPVGKTPGSLGSSASAGQAAASAPLPLESGELSRGDLSRPEDADTSGPCCEHTQEKQSTRAPAAAPFVPFSGGGQRLGGPPGPTRPLTSSSAKLPKSLSSPGGPSKPKKSKSGQDPQQEQEQERERDPQQEQERERPVDREPVDREPVVCHPDLEERLQAWPAELPDEFFELTVDDVRRRLAQLKSERKRLEEAPLVTKAFREAQIKEKLERYPKTESLSVAQAGVSGAISAHCKLRLPGSSGSPASASQVAGISGGSEGPVPRPLRPTGLLPPQRDSGGLARLREEPPGEPRAVILPVHHPSKNSPGRPHADPLSGEPLPGRSGALGSRGAGRCLPGAWPAGACHLPICGRCAGGQVHVQGRRVPFPIASP

SEQ ID NO: 21648 - protein, 716 aa, Homo sapiens
MQSTANYLWHTDDLLGQGATASVYKARNKKSGELVAVKVFNTTSYLRPREVQVREFEVLRKLNHQNIVKLFAVEETGGSRQKVLVMEYCSSGSLLSVLESPENAFGLPEDEFLVVLRCVVAGMNHLRENGIVHRDIKPGNIMRLVGEEGQSIYKLTDFGAARELDDDEKFVSVYGTEEYLHPDMYERAVLRKPQQKAFGVTVDLWSIGVTLYHAATGSLPFIPFGGPRRNKEIMYRITTEKPAGAIAGAQRRENGPLEWSYTLPITCQLSLGLQSQLVPILANILEVEQAKCWGFDQFFAETSDILQRVVVHVFSLSQAVLHHIYIHAHNTIAIFQEAVHKQTSVAPRHQEYLFEGHLCVLEPSVSAQHIAHTTASSPLTLFSTAIPKGLAFRDPALDVPKFVPKVDLQADYNTAKGVLGAGYQALRLARALLDGQELMFRGLHWVMEVLQATCRRTLEVARTSLLYLSSSLGTERFSSVAGTPEIQELKAAAELRSRLRTLAEVLSRCSQNITETQESLSSLNRELVKSRDQVHEDRSIQQIQCCLDKMNFIYKQFKKSRMRPGLGYNEEQIHKLDKVNFSHLAKRLLQVFQEECVQKYQASLVTHGKRMRVVHETRNHLRLVGCSVAACNTEAQGVQESLSKLLEELSHQLLQDRAKGAQASPPPIAPYPSPTRKDLLLHMQELCEGMKLLASDLLDNNRIIERLNRVPAPPDV

SEQ ID NO: 21649 - protein, 1138 aa, Homo sapiens
MGEEGPPSLEYIQAKDLFPPKELVKEEENLQVPFTVLQGEGVEFLGRAADALIAISNYRLHIKFKDSVINVPLRMIDSVESRDMFQLHISCKDSKVVRCHFSTFKQCQEWLSRLSRATARPAKPEDLFAFAYHAWCLGLTEEDQHTHLCQPGEHIRCRQEAELARMGFDLQNVWRVSHINSNYKLCPSYPQKLLVPVWITDKELENVASFRSWKRIPVVVYRHLRNGAAIARCSQPEISWWGWRNADDEYLVTSIAKACALDPGTRATGGSLSTGNNDTSEACDADFDSSLTACSGVESTAAPQKLLILDARSYTAAVANRAKGGGCECEEYYPNCEVVFMGMANIHAIRNSFQYLRAVCSQMPDPSNWLSALESTKWLQHLSVMLKAAVLVANTVDREGRPVLVHCSDGWDRTPQIVALAKILLDPYYRTLEGFQVLVESDWLDFGHKFGDRCGHQENVEDQNEQCPVFLQWLDSVHQLLKQFPCLFEFNEAFLVLHPVCHVRALHLWTAVYLPASSPCTLGEENMDLYLSPVAQSQEFSGRSLDRLPKTRSMDDLLSACDTSSPLTRTSSDPNLNNHCQEVRVGLEPWHSNPEGSETSFVDSGVGGPQQTVGEVGLPPPLPSSQKDYLSNKPFKSHKSCSPSYKLLNTAVPREMKSNTSDPEIKVLEETKGPAPDPSAQDELGRTLDGIGEPPEHCPETEAVSALSKVISNKCDGVCNFPESSQNSPTGTPQQAQPDSMLGVPSKCVLDHSLSTVCNPPSAACQTPLDPSTDFLNQDPSGSVASISHQEQLSSVPDLTHGEEDIGKRGNNRNGQLLENPRFGKMPLELVRKPISQSQISEFSFLGSNWDSFQGMVTSFPSGEATPRRLLSYGCCSKRPNSKQMRATGPCFGGQWAQREGVKSPVCSSHSNGHCTGPGGKNQMWLSSHPKQVSSTKPVPLNCPSPVPPLYLDDDGLPFPTDVIQHRLRQIEAGYKQEVEQLRRQVRELQMRLDIRHCCAPPAEPPMDYEDDFTCLKESDGSDTEDFGSDHSEDCLSEASWEPVDKKETEVTRWVPDHMASHCYNCDCEFWLAKRRHHCRNCGNVFCAGCCHLKLPIPDQQLYDPVLVCNSCYEHIQVSRARELMSQQLKKPIATASS

SEQ ID NO: 21650 - protein, 5207 aa, Homo sapiens
MECPSCQHVSKEETPKFCSQCGERLPPAAPIADSENNNSTMASASEGEMECGQELKEEGGPCLFPGSDSWQENPEEPCSKASWTVQESKKKKRKKKKKGNKSASSELASLPLSPASPCHLTLLSNPWPQDTALPHSQAQQSGPTGQPSQPPGTATTPLEGDGLSAPTEVGDSPLQAQALGEAGVATGSEAQSSPQFQDHTEGEDQDASIPSGGRGLSQEGTGPPTSAGEGHSRTEDAAQELLLPESKGGSSEPGTELQTTEQQAGASASMAVDAVAEPANAVKGAGKEMKEKTQRMKQPPATTPPFKTHCQEAETKTKDEMAAAEEKVGKNEQGEPEDLKKPEGKNRSAAAVKNEKEQKNQEADVQEVKASTLSPGGGVTVFFHAIISLHFPFNPDLHKVFIRGGEEFGESKWDSNICELHYTRDLGHDRVLVEGIVCISKKHLDKYIPYKYVIYNGESFEYEFIYKHQQKKGEYVNRCLFIKSSLLGSGDWHQYYDIVYMKPHGRLQKVMNHITDGPRKDLVKGKQIAAALMLDSTFSILQTWDTINLNSFFTQFEQFCFVLQQPMIYEGQAQLWTDLQYREKEVKRYLWQHLKKHVVPLPDGKSTDFLPVDCPVRSKLKTGLIVLFVVEKIELLLEGSLDWLCHLLTSDASSPDEFHRDLSHILGIPQSWRLYLVNLCQRCMDTRTYTWLGALPVLHCCMELAPRHKDAWRQPEDTWAALEGLSFSPFREQMLDTSSLLQFMREKQHLLSIDEPLFRSWFSLLPLSHLVMYMENFIEHLGRFPAHILDCLSGIYYRLPGLEQVLNTQDVQDVQNVQNILEMLLRLLDTYRDKIPEEALSPSYLTVCLKLHEAICSSTKLLKFYELPALSAEIVCRMIRLLSLVDSAGQRDETGNNSVQTVFQGTLAATKRWLREVFTKNMLTSSGASFTYVKEIEVWRRLVEIQFPAEHGWKESLLGDMEWRLTKEEPLSQITAYCNSCWDTKGLEDSVAKTFEKCIIEAVSSACQSQTSILQGFSYSDLRKFGIVLSAVITKSWPRTADNFDDILKHLLTLADVKHVFRLCGTDEKILANVTEDAKRLIAVADSVLTKVVGDLLSGTILVGQLELIIKHKNQFLDIWQLREKSLSPQDEQCAVEEALDWRREELLLLKKEKRCVDSLLKMCGNVKHLIQVDFGVLAVRHSQDLSSKRLNDTVTVRLSTSSNSQRATHYHLSSQVQEMAGKIDLLRDSHIFQLFWREAAEPLSEPKEDQEAAELLSEPEEESERHILELEEVYDYLYQPSYRKFIKLHQDLKSGEVTLAEIDVIFKDFVNKYTDLDSELKIMCTVDHQDQRDWIKDRVEQIKEYHHLHQAVHAAKVILQVKESLGLNGDFSVLNTLLNFTDNFDDFRRETLDQINQELIQAKKLLQDISEARCKGLQALSLRKEFICWVREALGGINELKVFVDLASISAGENDIDVDRVACFHDAVQGYASLLFKLDPSVDFSAFMKHLKKLWKALDKDQYLPRKLCDSARNLEWLKTVNESHGSVERSSLTLATAINQRGIYVIQAPKGGQKISPDTVLHLILPESPGSHEESREYSLEEVKELLNKLMLMSGKKDRNNTEVERFSEVFCSVQRLSQAFIDLHSAGNMLFRTWIAMAYCSPKQGVSLQMDFGLDLVTELKEGGDVTELLAALCRQMEHFLDSWKRFVTQKRMEHFYLNFYTAEQLVYLSTELRKQPPSDAALTMLSFIKSNCTLRDVLRASVGCGSEAARYRMRRVMEELPLMLLSEFSLVDKLRIIMEQSMRCLPAFLPDCLDLETLGHCLAHLAGMGGSPVERCLPRGLQVGQPNLVVCGHSEVLPAALAVYMQTPSQPLPTYDEVLLCTPATTFEEVALLLRRCLTLGSLGHKVYSLLFADQLSYEVARQAEELFHNLCTQQHREDYQLVMVCDGDWEHCYLPSAFSQHKVFVTPQAPLEAIQAYLAGHYRVPKQTLSAAAVFNDRLCVGIVASERAGVGKSLYVKRLHDKMKMQLNVKNVPLKTIRLIDPQVDESRVLGALLPFLDAQYQKVPVLFHLDVTSSVQTGIWVFLFKLLILQYLMDINGKMWLRNPCHLYIVEILERRTSVPSRSSSALRTRVPQFSFLDIFPKVTCRPPKEVIDMELSALRSDTEPGMDLWEFCSETFQRPYQYLRRFNQNQDLDTFQYQEGSVEGTPEECLQHFLFHCGVINPSWSELRNFARFLNYQLRDCEASLFCNPSFIGDTLRGFKKFVVTFMIFMARDFATPSLHTSDQSPGKHMVTMDGVREEDLAPFSLRKRWESEPHPYVFFNDDHTTMTFIGFHLQPNINGSVDAISHLTGKVIKRDVMTRDLYQGLLLQRVPFNVDFDKLPRHKKLERLCLTLGIPQATDPDKTYELTTDNMLKILAIEMRFRCGIPVIIMGETGCGKTRLIKFLSDLRRGGTNADTIKLVKVHGGTTADMIYSRVREAENVAFANKDQHQLDTILFFDEANTTEAISCIKEVLCDHMVDGQPLAEDSGLHIIAACNPYRKHSEEMICRLESAGLGYRVSMEETADRLGSIPLRQLVYRVHALPPSLIPLVWDFGQLSDVAEKLYIQQIVQRLVESISLDENGTRVITEVLCASQGFMRKTEDECSFVSLRDVERCVKVFRWFHEHSAMLLAQLNAFLSKSSVSKNHTERDPVLWSLMLAIGVCYHASLEKKDSYRKAIARFFPKPYDDSRLLLDEITRAQDLFLDGVPLRKTIAKNLALKENVFMMVVCIELKIPLFLVGKPGSSKSLAKTIVADAMQGPAAYSDLFRSLKQVHLVSFQCSPHSTPQGIISTFRQCARFQQGKDLQQYVSVVVLDEVGLAEDSPKMPLKTLHPLLEDGCIEDDPAPHKKVGFVGISNWALDPAKMNRGIFVSRGSPNETELIESAKGICSSDILVQDRVQGYFASFAKAYETVCKRQDKEFFGLRDYYSLIKMVFAAAKASNRKPSPQDIAQAVLRNFSGKDDIQALDIFLANLPEAKCSEEVSPMQLIKQNIFGPSQKVPGGEQEDAESRYLLVLTKNYVALQILQQTFFEGDQQPEIIFGSGFPKDQEYTQLCRNINRVKICMETGKMVLLLNLQNLYESLYDALNQYYVHLGGQKYVDLGLGTHRVKCRVHPNFRLIVIEEKDVVYKHFPIPLINRLEKHYLDINTVLEKWQKSIVEELCAWVEKFINVKAHHFQKRHKYSPSDVFIGYHSDACASVVLQVIERQGPRALTEELHQKVSEEAKSILLNCATPDAVVRLSAYSLGGFAAEWLSQEYFHRQRHNSFADFLQAHLHTADLERHAIFTEITTFSRLLTSHDCEILESEVTGRAPKPTLLWLQQFDTEYSFLKEVRNCLTNTAKCKILIFQTDFEDGIRSAQLIASAKYSVINEINKIRENEDRIFVYFITKLSRVGRGTAYVGFHGGLWQSVHIDDLRRSTLMVSDVTRLQHVTISQLFAPGDLPELGLEHRAEDGHEEAMETEASTSGEVAEVAEEAMETESSEKVGKETSELGGSDVSILDTTRLLRSCVQSAVGMLRDQNESCTRNMRRVVLLLGLLNEDDACHASFLRVSKMRLSVFLKKQEESQFHPLEWLAREACNQDALQEAGTFRHTLWKRVQGAVTPLLASMISFIDRDGNLELLTRPDTPPWARDLWMFIFSDTMLLNIPLVMNNERHKGEMAYIVVQNHMNLSENASNNVPFSWKIKDYLEELWVQAQYITDAEGLPKKFVDIFQQTPLGRFLAQLHGEPQQELLQCYLKDFILLTMRVSTEEELKFLQMALWSCTRKLKAASEAPEEEVSLPWVHLAYQRFRSRLQNFSRILTIYPQVLHSLMEARWNHELAGCEMTLDAFAAMACTEMLTRNTLKPSPQAWLQLVKNLSMPLELICSDEHMQGSGSLAQAVIREVRAQWSRIFSTALFVEHVLLGTESRVPELQGLVTEHVFLLDKCLRENSDVKTHGPFEAVMRTLCECKETASKTLSRFGIQPCSICLGDAKDPVCLPCDHVHCLRCLRAWFASEQMICPYCLTALPDEFSPAVSQAHREAIEKHARFRQMCNSFFVDLVSTICFKDNAPPEKEVIESLLSLLFVQKGRLRDAAQRHCEHTKSLSPFNDVVDKTPVIRSVILKLLLKYSFHDVKDYIQEYLTLLKKKAFITEDKTELYMLFINCLEDSILEKTSAYSRNDELNHLEEEGRFLKAYSPASRGREPANEASVEYLQEVARIRLCLDRAADFLSEPEGGPEMAKEKQCYLQQVKQFCIRVENDWHRVYLVRKLSSQRGMEFVQGLSKPGRPHQWVFPKDVVKQQGLRQDHPGQMDRYLVYGDEYKALRDAVAKAVLECKPLGIKTALKACKTPQSQQSAYFLLTLFREVAILYRSHNASLHPTPEQCEAVSKFIGECKILSPPDISRFATSLVDNSVPLLRAGPSDSNLDGTVTEMAIHAAAVLLCGQNELLEPLKNLAFSPATMAHAFLPTMPEDLLAQARRWKGLERVHWYTCPNGHPCSVGECGRPMEQSICIDCHAPIGGIDHKPRDGFHLVKDKADRTQTGHVLGNPQRRDVVTCDRGLPPVVFLLIRLLTHLALLLGASQSSQALINIIKPPVRDPKGFLQQHILKDLEQLAKMLGHSADETIGVVHLVLRRLLQEQHQLSSRRLLNFDTELSTKEMRNNWEKEIAAVISPELEHLDKTLPTMNNLISQDKRISSNPVAKIIYGDPVTFLPHLPRKSVVHCSKIWSCRKRITVEYLQHIVEQKNGKERVPILWHFLQKEAELRLVKFLPEILALQRDLVKQFQNVQQVEYSSIRGFLSKHSSDGLRQLLHNRITVFLSTWNKLRRSLETNGEINLPKDYCSTDLDLDTEFEILLPRRRGLGLCATALVSYLIRLHNEIVYAVEKLSKENNSYSVDAAEVTELHVISYEVERDLTPLILSNCQYQVEEGRETVQEFDLEKIQRQIVSRFLQGKPRLSLKGIPTLVYRHDWNYEHLFMDIKNKMAQDSLPSSVISAISGQLQSYSDACEVLSVVEVTLGFLSTAGGDPNMQLNVYTQDILQMGDQTIHVLKALNRCQLKHTIALWQFLSAHKSEQLLRLHKEPFGEISSRYKADLSPENAKLLSTFLNQTGLDAFLLELHEMIILKLKNPQTQTEERFRPQWSLRDTLVSYMQTKESEILPEMASQFPEEILLASCVSVWKTAAVLKWNREMR

SEQ ID NO: 21651 - protein, 625 aa, Homo sapiens
MKKDVRILLVGEPRVGKTSLIMSLVSEEFPEEVPPRAEEITIPADVTPERVPTHIVDYSEAEQSDEQLHQEISQANVICIVYAVNNKHSIDKVTSRWIPLINERTDKDSRLPLILVGNKSDLVEYSSMETILPIMNQYTEIETCVECSAKNLKNISELFYYAQKAVLHPTGPLYCPEEKEMKPACIKALTRIFKISDQDNDGTLNDAELNFFQRICFNTPLAPQALEDVKNVVRKHISDGVADSGLTLKGFLFLHTLFIQRGRHETTWTVLRRFGYDDDLDLTPEYLFPLLKIPPDCTTELNHHAYLFLQSTFDKHDLDRDCALSPDELKDLFKVFPYIPWGPDVNNTVCTNERGWITYQGFLSQWTLTTYLDVQRCLEYLGYLGYSILTEQESQASAVTVTRDKKIDLQKKQTQRNVFRCNVIGVKNCGKSGVLQALLGRNLMRQKKIREDHKSYYAINTVYVYGQEKYLLLHDISESEFLTEAEIICDVVCLVYDVSNPKSFEYCARIFKQHFMDSRIPCLIVAAKSDLHEVKQEYSISPTDFCRKHKMPPPQAFTCNTADAPSKDIFVKLTTMAMYPHARLRCMCTCNRCTFCICQNFLNSDLLQSVKNKIFTAVLNRIISA

SEQ ID NO: 21652 - protein, 387 aa, Homo sapiens
MGDRERNKKRLLELLRAPDTGNAHCADCGAADPDWASYKLGIFICLNCCGVHRNFPDISRVKSVRLDFWDDSIVEVAVVLQFMIHNGNLRVKAKFEARVPAFYYIPQANDCLVLKEQWIRAKYERREFMADGETISLPGNREGFLWKRGRDNSQFLRRKFVLLAREGLLKYFTKEQGKSPKAVISIKDLNATFQTEKIGHPHGLQITYRRDGHTRNLFVYHESGKEIVDWFNALRAARLQYLKMAFPELPESELVPFLTRNYLKQGFMEKTGPKQKEPFKKRWFALDCHERRLLYYKNPLDAFEQGQVFLGNKEQGYEAYEDLPKGIRGNRWKAGLTIVTPERRFVLTCPSEKEQQEWLESLRGVLSSPLTPLNRLTASTESGRSSR

SEQ ID NO: 21653 - protein, 207 aa, Homo sapiens
HFQNASLLNSQYYFAAEFPADSLQAAQPFTIGDNKTYNGYWNTPLLPYKSYRIYFQAASRANGETKIDCVQVATKGAATPKPVPEPEKQTDHTVKIAGVIAGILLFVIIFLGVVLVMKKRKLAKKRKETMSSTRQEMTVMVNSMDKSYAEQGTNCDEAFSFMDTHNLNGRSVSSPSSFTMKTNTLSTSVPNSYYPDPFVPTAILELL

SEQ ID NO: 21654 - protein, 739 aa, Homo sapiens
MGQGWATAGLPSLLFLLLCYGHPLLVPSQEASQQVTVTHGTSSQATTSSQTTTHQATAHQTSAQSPNLVTDEAEASKFVEEYDRTSQVVWNEYAEANWNYNTNITTETSKILLQKNMQIANHTLKYGTQARKFDVNQLQNTTIKRIIKKVQDLERAALPAQELEEYNKILLDMETTYSVATVCHPNGSCLQLEPDLTNVMATSRKYEDLLWAWEGWRDKAGRAILQFYPKYVELINQAARLNGYVDAGDSWRSMYETPSLEQDLERLFQELQPLYLNLHAYVRRALHRHYGAQHINLEGPIPAHLLGNMWAQTWSNIYDLVVPFPSAPSMDTTEAMLKQGWTPRRMFKEADDFFTSLGLLPVPPEFWNKSMLEKPTDGREVVCHASAWDFYNGKDFRIKQCTTVNLEDLVVAHHEMGHIQYFMQYKDLPVALREGANPGFHEAIGDVLALSVSTPKHLHSLNLLSSEGGSDEHDINFLMKMALDKIAFIPFSYLVDQWRWRVFDGSITKENYNQEWWSLRLKYQGLCPPVPRTQGDFDPGAKFHIPSSVPYIRYFVSFIIQFQFHEALCQAAGHTGPLHKCDIYQSKEAGQRLATAMKLGFSRPWPEAMQLITGQPNMSASAMLSYFKPLLDWLRTENELHGEKLGWPQYNWTPNSDDFYNETETKIFLQFYDQTGIWDHGAPHLLPPSQARGTREAPVYMSKRAASSGPPGSPKLPPAAQGHGEVPVHDLLWHPGPPV

SEQ ID NO: 21655 - protein, 333 aa, Homo sapiens
MGDRERNKKRLLELLRAPDTGNAHCADCGAADPDWASYKLGIFICLNCCGVHRNFPDISRVKSVRLDFWDDSIVEFMIHNGNLRVKAKFEARVPAFYYIPQANDCLVLKEQWIRAKYERREFMADGETISLPGNREGFLWKRGRDNSQFLRRKFVLLAREGLLKYFTKEQGKSPKAVISIKDLNATFQTEKIGHPHGLQITYRRDGHTRNLFVYHESGKLVPFLTRNYLKQGFMEKTGPKQKEPFKKRWFALDCHERRLLYYKNPLDAFEQGQVFLGNKEQGYEAYEDLPKGIRGNRWKAGLTIVTPERRFVLTCPSEKEQQEWLESLRGVLS

SEQ ID NO: 21656 - protein, 358 aa, Homo sapiens
MAQPYPPAQYPPPPQNGIPAEYAPPPPHPTQDYSGQTPVPTEHGMTLYTPAQTHPEQPGSEASTQPIAGTQTVPTDEAAQTDSQPLHPSDPTEKQQPKRLHVSNIPFRFRDPDLRQMFGQFGKILDVEIIFNERGSKGFGFVTFETSSDADRAREKLNGTIVEGRKIEVNNATARVMTNKKTGNPYTNGWKLNPVVGAVYGPEFYAVTGFPYPTTGTAVAYRGAHLRGRGRAVYNTFRAAPPPPPIPTYGAALEQTLVKMPVPWAGLAPCPLPPQQTPEPAYPTSPAFPPLSCPFASRVVYQDGFYGAEIYGGYAAYRYAQPAAAAAAYSDSYGRVYAAADPYHHTIGPAATYSIGTM

SEQ ID NO: 21657 - protein, 138 aa, Homo sapiens
MEPAAGSSMEPSADWLATAAARGRVEEVRALLEAGALPNAPNSYGRRPIQVMMMGSARVAELLLLHGAEPNCADPATLTRPVHDAAREGFLDTLVVLHRAGARLDVRDAWGRLPVDLAEELGHRDVARHPRLKEPERL

SEQ ID NO: 21658 - protein, 693 aa, Homo sapiens
MVLLRKRKPNLRRFTVSPESHSPRASGDRSRQKQQWPAKVPVPRGADQVVQQEGLMCNTKLKRPNQERRNLVPSSQPMTENAPDRAKKGDPSAPSQSELHPALSQAFQGKNSPQVLSEFSGPPLTPTTVGGPRKASFRFRDEDFYSILSLNSRRESDDTEEETQSEECLWVGVRSPCSPSHHKRSRFGGTSTPQAKNKNFEENAENCRGHSSRRSEPSHGSLRISNAMEPATERPSAGQRLSQDPGLPDRESATEKDRGGSENAKKSPLSWDTKSEPRQEVGVNAENVWSDCISVEHRPGTHDSEGYWKDYLNSSQNSLDYFISGRPISPRSSVNSSYNPPASFMHSALRDDIPVDLSMSSTSVHSSDSEGNSGFHVCQPLSPIRNRTPFASAENHNYFPVNSAHEFAVREAEDTTLTSQPQGAPLYTDLLLNPQGNLSLVDSSSSSPSRMNSEGHLHVSGSLQENTPFTFFAVSHFPNQNDNGSRMAASGFTDEKETSKIKADPEKLKKLQESLLEEDSEEEGDLCRICQIAGGSPSNPLLEPCGCVGSLQFVHQECLKKWLKVKITSGADLGAVKTCEMCKQGLLVDLGDFNMIEFYQKHQQSQAQNELMNSGLYLVLLLHLYEQRFAELMRLNHNQVERERIRSWEMEMKAAFLKARSSSKEANCGARRRPLPPALLSTSPSASLPPPLY

SEQ ID NO: 21659 - protein, 165 aa, Homo sapiens
MWLPQLDLMRVISAKSQGYSIVTQITGPTTVNGLERGSLTVQCVYRSGWETYLKWWCRGAIWRDCKILVKTSGSEQEVKRDRVSIKDNQKNRTFTVTMEDLMKTDADTYWCGIEKTGNDLGVTVQVTIDPAPVTQEETSSSPTLTGHHLDNRYCSPWRATSAMQT

SEQ ID NO: 21660 - protein, 137 aa, Homo sapiens
MSGADRSPNAGAAPDSAPGQAAVASAYQRFEPRAYLRNNYAPPRGDLCNPNGVGPWKLRCLAQTFATGEVSGRTLIDIGSGPTVYQLLSACSHFEDITMTDFLEVNRQELGRWLQEEPGAFNWSMYSQHACLIEGKG

SEQ ID NO: 21661 - protein, 416 aa, Homo sapiens; identical to SEQ ID NO: 5051

SEQ ID NO: 21662 - protein, 293 aa, Homo sapiens
MWLPQLDLMRVISAKSQGYSIVTQITGPTTVNGLERGSLTVQCVYRSGWETYLKWWCRGAIWRDCKILVKTSGSEQEVKRDRVSIKDNQKNRTFTVTMEDLMKTDADTYWCGIEKTGNDLGVTVQVTIDPAPVTQEETSSSPTLTGHHLDNRHKLLKLSVLLPLIFTILLLLLVAASLLAWRMMKYQQKAAGMSPEQVLQPLEGDLCYADLTLQLAGTSPQKATTKLSSAQVDQVEVEYVTMASLPKEDISYASLTLGAEDQEPTYCNMGHLSSHLPGRGPEEPTEYSTISRP

SEQ ID NO: 21663 - protein, 271 aa, Homo sapiens
MSSAMLVTCLPDPSSSFREDAPRPPVPGEEGETPPCQPGVGKGQVTKPMPVSSNTRRNEDGLGEPEGRASPDSPLTRWTKSLHSLLGDQDGAYLFRTFLEREKCVDTLDFWFACNGFRQMNLKDTKTLRVAKAIYKRYIENNSIVSKQLKPATKTYIRDGIKKQQIDSIMFDQAQTEIQSVMEENAYQMFLTSDIYLEYVRSGGENTAYMSNGGLGSLKVVCGYLPTLNEEEEWTCADFKCKLSPTVVGLSSKTLRATASVRSTETVDSGY

SEQ ID NO: 21664 - protein, 213 aa, Homo sapiens
KVNDTAARLSYQKNAGFQEYTIPITVKDRAGQAATKLLRVNLCECTHPTQCRATSRSTGVILGKWAILAILLGIALLFSVLLTLVCGVFGATKGKRFPEDLAQQNLIISNTEAPGDDRVCSANGFMTQTTNNSSQGFCGTMGSGMKNGGQETIEMMKGGNQTLESCRGAGHHHTLDSCRGGHTEVDNCRYTYSEWHSFTQPRLGEESIRGHTG

SEQ ID NO: 21665 - protein, 207 aa, Homo sapiens
SWADNSVPKNQKTSEVRLYTVRWRTSFSASAKYKSEDTTSLSYTATGLKPNTMYEFSVMVTKNRRSSTWSMTAHATTYEAAPTSAPKDLTVITREGKPRAVIVSWQPPLEANGKITAYILFYTLDKNIPIDDWIMETISGDRLTHQIMDLNLDTMYYFRIQARNSKGVGPLSDPILFRTLKVEHPDKMANDQDTGVTINLVNEVLLG

SEQ ID NO: 21666 - protein, 961 aa, Homo sapiens
MAEQESLEFGKADFVLMDTVSMPEFMANLRLRFEKGRIYTFIGEVVVSVNPYKLLNIYGRDTIEQYKGRELYERPPHLFAIADAAYKAMKRRSKDTCIVISGESGAGKTEASKYIMQYIAAITNPSQRAEVERVKNMLLKSNCVLEAFGNAKTNRNDNSSRFGKYMDINFDFKGDPIGGHINNYLLEKSRVIVQQPGERSFHSFYQLLQGGSEQMLRSLHLQKSLSSYNYIHVGAQLKSSINDAAEFRVVADAMKVIGFKPEEIQTVYKILAAILHLGNLKFVVDGDTPLIENGKVVSIIAELLSTKTDMVEKALLYRTVATGRDIIDKQHTEQEASYGRDAFAKAIYERLFCWIVTRINDIIEVKNYDTTIHGKNTVIGVLDIYGFEIFDNNSFEQFCINYCNEKLQQLFIQLVLKQEQEEYQREGIPWKHIDYFNNQIIVDLVEQQHKGIIAILDDACMNVGKVTDEMFLEALNSKLGKHAHFSSRKLCASDKILEFDRDFRIRHYAGDVVYSVIGFIDKNKDTLFQDFKRLMYNSSNPVLKNMWPEGKLSITEVTKRPLTAATLFKNSMIALVDNLASKEPYYVRCIKPNDKKSPQIFDDERCRHQVEYLGLLENVRVRRAGFAFRQTYEKFLHRYKMISEFTWPNHDLPSDKEAVKKLIERCGFQDDVAYGKTKIFIRTPRTLFTLEELRAQMLIRIVLFLQKVWRGTLARMRYKRTKAALTIIRYYRRYKVKSYIHEVARRFHGVKTMRDYGKHVKWPSPPKVLRRFEEALQTIFNRWRASQLIKSIPASDLPQVRAKVAAVEMLKGQRADLGLQRAWEGNYLASKPDTPQTSGTFVPVANELKRKDKYMNVLFSCHVRKVNRFSKVEDRAIFVTDRHLYKMDPTKQYKVMKTIPLYNLTGLSVSNGKDQLVVFHTKDNKDLIVCLFSKQPTHESRIGELVGVLVNHFKRNHLLIL

SEQ ID NO: 21667 - protein, 1940 aa, Homo sapiens
MSSDTEMEVFGIAAPFLRKSEKERIEAQNQPFDAKTYCFVVDSKEEYAKGKIKSSQDGKVTVETEDNRTLVVKPEDVYAMNPPKFDRIEDMAMLTHLNEPAVLYNLKDRYTSWMIYTYSGLFCVTVNPYKWLPVYNPEVVEGYRGKKRQEAPPHIFSISDNAYQFMLTDRENQSILITGESGAGKTVNTKRVIQYFATIAATGDLAKKKDSKMKGTLEDQIISANPLLEAFGNAKTVRNDNSSRFGKFIRIHFGTTGKLASADIETYLLEKSRVTFQLKAERSYHIFYQILSNKKPELIELLLITTNPYDYPFISQGEILVASIDDAEELLATDSAIDILGFTPEEKSGLYKLTGAVMHYGNMKFKQKQREEQAEPDGTEVADKTAYLMGLNSSDLLKALCFPRVKVGNEYVTKGQTVDQVHHAVNALSKSVYEKLFLWMVTRINQQLDTKLPRQHFIGVLDIAGFEIFEYNSLEQLCINFTNEKLQQFFNHHMFVLEQEEYKKEGIEWTFIDFGMDLAACIELIEKPMGIFSILEEECMFPKATDTSFKNKLYDQHLGKSNNFQKPKVVKGRAEAHFSLIHYAGTVDYSVSGWLEKNKDPLNETVVGLYQKSSNRLLAHLYATFATADADSGKKKVAKKKGSSFQTVSALFRENLNKLMSNLRTTHPHFVRCIIPNETKTPGAMEHSLVLHQLRCNGVLEGIRICRKGFPNRILYGDFKQRYRVLNASAIPEGQFIDSKKACEKLLASIDIDHTQYKFGHTKVFFKAGLLGTLEEMRDDRLAKLITRTQAVCRGFLMRVEFQKMVQRRESIFCIQYNIRSFMNVKHWPWMKLFFKIKPLLKSAETEKEMATMKEEFQKTKDELAKSEAKRKELEEKLVTLVQEKNDLQLQVQAESENLLDAEERCDQLIKAKFQLEAKIKEVTERAEDEEEINAELTAKKRKLEDECSELKKDIDDLELTLAKVEKEKHATENKVKNLTEELSGLDETIAKLTREKKALQEAHQQALDDLQAEEDKVNSLNKTKSKLEQQVEDLESSLEQEKKLRVDLERNKRKLEGDLKLAQESILDLENDKQQLDERLKKKDFEYCQLQSKVEDEQTLGLQFQKKIKELQARIEELEEEIEAERATRAKTEKQRSDYARELEELSERLEEAGGVTSTQIELNKKREAEFLKLRRDLEEATLQHEAMVAALRKKHADSVAELGEQIDNLQRVKQKLEKEKSEFKLEIDDLSSSMESVSKSKANLEKICRTLEDQLSEARGKNEEIQRSLSELTTQKSRLQTEAGELSRQLEEKESIVSQLSRSKQAFTQQTEELKRQLEEENKAKNALAHALQSSRHDCDLLREQYEEEQEGKAELQRALSKANSEVAQWRTKYETDAIQRTEELEEAKKKLAQRLQDSEEQVEAVNAKCASLEKTKQRLQGEVEDLMVDVERANSLAAALDKKQRNFDKVLAEWKTKCEESQAELEASLKESRSLSTELFKLKNAYEEALDQLETVKRENKNLEQEIADLTEQIAENGKTIHELEKSRKQIELEKADIQLALEEAEAALEHEEAKILRIQLELTQVKSEIDRKIAEKDEEIEQLKRNYQRTVETMQSALDAEVRSRNEAIRLKKKMEGDLNEIEIQLSHANRQAAETLKHLRSVQGQLKDTQLHLDDALRGQEDLKEQLAIVERRANLLQAEVEELRATLEQTERARKLAEQELLDSNERVQLLHTQNTSLIHTKKKLETDLMQLQSEVEDASRDARNAEEKAKKAITDAAMMAEELKKEQDTSAHLERMKKNLEQTVKDLQHRLDEAEQLALKGGKKQIQKLETRIRELEFELEGEQKKNTESVKGLRKYERRVKELTYQSEEDRKNVLRLQDLVDKLQVKVKSYKRQAEEADEQANAHLTKFRKAQHELEEAEERADIAESQVNKLRAKTRDFTSSRMVVHESEE

SEQ ID NO: 21668 - protein, 685 aa, Homo sapiens
MNDSRQQSLFFITLPDLNKLCAVRIILSNKVADTEIRTIQMKMCRQLLFLHQDILTSPVSGILNQIWVVMAIPFYKARKLNAYVEKYGAKMEAPQRVIPVILQNCLSYSFMARLAPAWNRTGHLLIQGRDFLSQMGKQSAVVLNINVTETQVCLSIEACTIRLPAPELKEFEISQSIIKDFHANKHAVIERHSILSNWCYVLPSMKMGQIINIFHAIPAACPFHSYGDFQRHWDALYGYKLPGDCGKIKIYCNIYFKMLGERTFTYPLSCIRSQPMQFFPRVDSEVVLKSFLSDLKSKLPHICGFPIKMTSKPCYYTQELTKPNIQEHKVKPPNLTTKKMLRASLTQATSRKPACAQSLLPCSVAVDHKVELSVSQPTSGIFSALHLQPESVQGRKKSLSIRAPQVHSEVLMPNRGNTQVQHTNLSSQSNITPKFVPVFKNRLLQMNKNTSVLGSPKRKQHDVTQSKLFSLKTSMIQHDKLNLGPAIKNRYSSNIQMQAANNLNQENSRPLQEKNTESSENMTKFPSSRGKSTVSLNKNKQLSNSAVFVVSNNNLGVVKSAVDFQMKGKENLTGKGITQILGKSHGSLKLKRQPHIFESDGETEDPRLLQQQSENQAKEVGTSDHRLIVSKIAHRSKRKLCPESSKTSKKHHSDTVHYGQSSSSKKQILDSDKSKLKKSLIIHNA

SEQ ID NO: 21669 - protein, 493 aa, Homo sapiens
MGRKKKKQLKPWCWYCNRDFDDEKILIQHQKAKHFKCHICHKKLYTGPGLAIHCMQVHKETIDAVPNAIPGRTDIELEIYGMEGIPEKDMDERRRLLEQKTQESQKKKQQDDSDEYDDDDSAASTSFQPQPVQPQQGYIPPMAQPGLPPVPGAPGMPPGIPPLMPGVPPLMPGMPPVMPGMPPGLHHQRKYTQSFCGENIMMPMGGMMPPGPGIPPLMPGMPPGMPPPVPRPGIPPMTQAQAVSAPGILNRPPAPTATVPAPQPPVTKPLFPSAGQMGTPVTSSSTASSNSESLSASSKALFPSTAQAQAAVQGPVGTDFKPLNSTPATTTEPPKPTFPAYTQSTASTTSTTNSTAAKPAASITSKPATLTTTSATSKLIHPDEDISLEERRAQLPKYQRNLPRPGQAPIGNPPVGPIGGMMPPQPGIPQQQGMRPPMPPHGQYGGHHQGMPGYLPGAMPPYGQGPPMVPPYQGGPPRPPMGMRPPVMSQALP

SEQ ID NO: 21670 - protein, 548 aa, Homo sapiens
MLDLIMGCIKSKENKSPAIKYRPENTPEPVSTSVSHYGAEPTTVSPCPSSSAKGTAVNFSSLSMTPFGGSSGVTPFGGASSSFSVVPSSYPAGLTGGVTIFVALYDYEARTTEDLSFKKGERFQIINNTEGDWWEARSIATGKNGYIPSNYVAPADSIQAEEWYFGKMGRKDAERLLLNPGNQRGIFLVRESETTKGAYSLSIRDWDEIRGDNVKHYKIRKLDNGGYYITTRAQFDTLQKLVKHYTEHADGLCHKLTTVCPTVKPQTQGLAKDAWEIPRESLRLEVKLGQGCFGEVWMGTWNGTTKVAIKTLKPGTMMPEAFLQEAQIMKKLRHDKLVPLYAVVSEEPIYIVTEFMSKGSLLDFLKEGDGKYLKLPQLVDMAAQIADGMAYIERMNYIHRDLRAANILVGENLVCKIADFGLARLIEDNEYTARQGAKFPIKWTAPEAALYGRFTIKSDVWSFGILQTELVTKGRVPYPGMVNREVLEQVERGYRMPCPQGCPESLHELMNLCWKKDPDERPTFEYIQSFLEDYFTATEPQYQPGENL

SEQ ID NO: 21671 - protein, 1077 aa, Homo sapiens
MPRRKQQAPRRSAAYVPEEELKAAEIDEEHVEDDGLSLDIQESEYMCNEETEIKEAQSYQNSPVSSATNQDAGYGSPFSESSDQLAHFKGSSSREEKEDPQCPDSVSYPQDSLAQIKAVYANLFSESCWSSLALDLKKSGSTTSTNDASQKESSAPTPTPPTCPVSTTGPTTSTPSTSCSSSTSHSSTTSTSSSSGYDWHQAALAKTLQQTSSYGLLPEPSLFSTVQLYRQNNKLYGSVFTGASKFRCKDCSAAYDTLVELTVHMNETGHYRDDNRDKDSEKTKRWSKPRKRSLMEMEGKEDAQKVLKCMYCGHSFESLQDLSVHMIKTKHYQKVPLKEPVPAITKLVPSTKKRALQDLAPPCSPEPAGMAAEVALSESAKDQKAANPYVTPNNRYGYQNGASYTWQFEARKAQILKCMECGSSHDTLQQLTAHMMVTGHFLKVTTSASKKGKQLVLDPVVEEKIQSIPLPPTTHTRLPASSIKKQPDSPAGSTTSEEKKEPEKEKPPVAGDAEKIKEESEDSLEKFEPSTLYPYLREEDLDDSPKGGLDILKSLENTVSTAISKAQNGAPSWGGYPSIHAAYQLPGTVKPLPAAVQSVQVQPSYAGGVKSLSSAEHNALLHSPGSLTPPPHKSNVSAMEELVEKVTGKVNIKKEERPPEKEKSSLAKAASPIAKENKDFPKTEEVSGKPQKKGPEAETGKAKKEGPLDVHTPNGTEPLKAKVTNGCNNLGIIMDHSPEPSFINPLSALQSIMNTHLGKVSKPVSPSLDPLAMLYKISNSMLDKPVYPATPVKQADAIDRYYYENSDQPIDLTKSKNKPLVSSVADSVASPLRESALMDISDMVKNLTGRLTPKSSTPSTVSEKSDADGSSFEEALDELSPVHKRKGRQSNWNPQHLLILQAQFASSLRETTEGKYIMSDLGPQERVHISKFTGLSMTTISHWLANVKYQLRRTGGTKFLKNLDTGHPVFFCNDCASQFRTASTYISHLETHLGFSLKDLSKLPLNQIQEQQNVSKVLTNKTLGPLGATEEDLGSTFQCKLCNRTFASKHAVKLHLSKTHGKSPEDHLIYVTELEKQ

SEQ ID NO: 21672 - protein, 198 aa, Homo sapiens
MSRRVVRQSKFRHVFGQAAKADQAYEDIRVSKVTWDSSFCAVNPKFLAIIVEAGGGGAFIVLPLAKTGRVDKNYPLVTGHTAPVLDIDWCPHNDNVIASASDDTTIMVWQIPDYTPMRNITEPIITLEGHSKRVGILSWHPTARNVLLSAGGDNVIIIWNVGTGEVLLSLDDMHPDVIHSVCWNSNGSLLATTCKDKT

SEQ ID NO: 21673 - protein, 1019 aa, Homo sapiens
MRRFLRPGHDPVRERLKRDLFQFNKTVEHGFPHQPSALGYSPSLRILAIGTRSGAIKLYGAPGVEFMGLHQENNAVTQIHLLPGQCQLVTLLDDNSLHLWSLKVKGGASELQEDESFTLRGPPGAAPSATQITVVLPHSSCELLYLGTESGNVFVVQLPAFRALEDRTISSDAVLQRLPEEARHRRVFEMVEALQEHPRDPNQILIGYSRGLVVIWDLQGSRVLYHFLSSQQLENIWWQRDGRLLVSCHSDGSYCQWPVSSEAQQPEPLRSLVPYGPFPCKAITRILWLTTRQGLPFTIFQGGMPRASYGDRHCISVIHDGQQTAFDFTSRVIGFTVLTEADPAATFDDPYALVVLAEEELVVIDLQTAGWPPVQLPYLASLHCSAITCSHHVSNIPLKLWERIIAAGSRQNAHFSTMEWPIDGGTSLTPAPPQRDLLLTGHEDGTVRFWDASGVCLRLLYKLSTVRVFLTDTDPNENFSAQGEDEWPPLRKVGSFDPYSDDPRLGIQKIFLCKYSGYLAVAGTAGQVLVLELNDEAAEQAVEQVEADLLQDQEGYRWKGHERLAARSGPVRFEPGFQPFVLVQCQPPAVVTSLALHSEWRLVAFGTSHGFGLFDHQQRRQVFVKCTLHPSDQLALEGPLSRVKSLKKSLRQSFRRMRRSRVSSRKRHPAGPPGEAQEGSAKAERPGLQNMELAPVQRKIEARSAEDSFTGFVRTLYFADTYLKDSSRHCPSLWAGTNGGTIYAFSLRVPPAERRMDEPVRAEQAKEIQLMHRAPVVGILVLDGHSVPLPEPLEVAHDLSKSPDMQGSHQLLVVSEEQFKVFTLPKVSAKLKLKLTALEGSRVRRVSVAHFGSRRAEDYGEHHLAVLTNLGDIQVVSLPLLKPQVRYSCIRREDVSGIASCVFTKYGQGFYLISPSEFERFSLSTKWLVEPRCLVDSAETKNHRPGNGAGPKKAPSRARNSGTQSDGEEKQPGLVMERALLSDERVLKEIQSTLEGDRGSGNWRSHRAAVGCSLSNGGE

SEQ ID NO: 21674 - protein, 262 aa, Homo sapiens
MSKLPRELTRDLERSLPAVASLGSSLSHSQSLSSHLLPPPEKRRAISDVRRTFCLFVTFDLLFISLLWIIELNTNTGIRKNLEQEIIQYNFKTSFFDIFVLAFFRFSGLLLGYAVLRLRHCCSAKGHLATCSPSSLLSSPGWRPGSLTSKSYPRKLKRSDGILPPRLLLPVDPCCSPVLCPRDSSIHPQNPLQGLTMNQMKKLLGRKVSLLRSGSTSARGRRPRQWWTRSWPRKRTGSLRRIMNMGTPCTPLKFPFTARRLS

SEQ ID NO: 21675 - protein, 65 aa, Homo sapiens
MNCYLLLRFMLGIPLLWPCLGATENSQTKKVKQPVRSHLRVKRGWVWNQFFVPEEMNTTSHHIGQ

SEQ ID NO: 21676 - protein, 1943 aa, Homo sapiens
MEDRRAEKSCEQACESLKRQDYEMALKHCTEALLSLGQYSMADFTGPCPLEIERIKIESLLYRIASFLQLKNYVQADEDCRHVLGEGLAKGEDAFRAVLCCMQLKGKLQPVSTILAKSLTGESLNGMVTKDLTRLKTLLSETETATSNALSGYHVEDLDEGSCNGWHFRPPPRGITSSEEYTLCKRFLEQGICRYGAQCTSAHSQEELAEWQKRYASRLIKLKQQNENKQLSGSYMETLIEKWMNSLSPEKVLSECIEGVKVEHNPDLSVTVSTKKSHQTWTFALTCKPARMLYRVALLYDAHRPHFSIIAISAGDSTTQVSQEVPENCQEWIGGKMAQNGLDHYVYKVGIAFNTEIFGTFRQTIVFDFGLEPVLMQRVMIDAASTEDLEYLMHAKQQLVTTAKRWDSSSKTIIDFEPNETTDLEKSLLIRYQIPLSADQLFTQSVLDKSLTKSNYQSRLHDLLYIEEIAQYKEISKFNLKVQLQILASFMLTGVSGGAKYAQNGQLFGRFKLTETLSEDTLAGRLVMTKVNAVYLLPVPKQKLVQTQGTKEKVYEATIEEKTKEYIFLRLSRECCEELNLRPDCDTQVELQFQLNRLPLCEMHYALDRIKDNGVLFPDISMTPTIPWSPNRQWDEQLDPRLNAKQKEAVLAITTPLAIQLPPVLIIGPYGTGKTFTLAQAVKHILQQQETSRILICTHSNSAADLYIKDYLHPYVEAGNPQARPLRVYFRNRWVKTVHPVVHQYCLISSAHSTFQMPQKEDILKHRVVVVTLNTSQYLCQLDLEPGFFTHILLDEAAQAMECETIMPLALATQNTRIVLAGDHMQLSPFVYSEFARERNLHVSLLDRLYEHYPAEFPCRILLCENYRSHEAIINYTSELFYEGKLMASGKQPAHKDFYPLTFFTARGEDVQEKNSTAFYNNAEVFEVVERVEELRRKWPVAWGKLDDGSIGVVTPYADQVFRIRAELRKKRLSDVNVERVLNVQGKQFRVLFLSTVRTRHTCKHKQTPIKKKEQLLEDSTEDLDYGFLSNYKLLNTAITRAQSLVAVVGDPIALCSIGRCRKFWERFIALCHENSSLHGITFEQIKAQLEALELKKTYVLNPLAPEFIPRALRLQHSGSTNKQQQSPPKGKSLHHTQNDHFQNDGIVQPNPSVLIGNPIRAYTPPPPLGPHPNLGKSPSPVQRIDPHTGTSILYVPAVYGGNVVMSVPLPVPWTGYQGRFAVDPRIITHQAAMAYNMNLLQTHGRGSPIPYGLGHHPPVTIGQPQNQHQEKDQHEQNRNGKSDTNNSGPEINKIRTPEKKPTEPKQVDLESNPQNRSPESRPSVVYPSTKFPRKDNLNPRHINLPLPAPHAQYAIPNRHFHPLPQLPRPPFPIPQQHTLLNQQQNNLPEQPNQIPPQPNQVVQQQSQLNQQPQQPPPQLSPAYQAGPNNAFFNSAVAHRPQSPPAEAVIPEQQPPPMLQEGHSPLRAIAQPGPILPSHLNSFIDENPSGLPIGEALDRIHGSVALETLRQQQARFQQWSEHHAFLSQGSAPYPHHHHPHLQHLPQPPLGLHQPPVRADWKLTSSAEDEVETTYSRFQDLIRELSHRDQSETRELAEMPPPQSRLLQYRQVQSRSPPAVPSPPSSTDHSSHFSNFNDNSRDIEVASNPAFPQRLPPQIFNSPFSLPSEHLAPPPLKYLAPDGAWTFANLQQNHLMGPGFPYGLPPLPHRPPQNPFVQIQNHQHAIGQEPFHPLSSRTVSSSSLPSLEEYEPRGPGRPLYQRRISSSSVQPCSEEVSTPQDSLAQCKELQDHSNQSSFNFSSPESWVNTTSSTPYQNIPCNGSSRTAQPRELIAPPKTVKPPEDQLKSENLEVSSSFNYSVLQHLGQFPPLMPNKQIAESANSSSPQSSAGGKPAMSYASALRAPPKPRPPPEQAKKSSDPLSLFQELSLGSSSGSNGFYSYFK

SEQ ID NO: 21677 - protein, 138 aa, Homo sapiens
METVVIVAIGVLATIFLASFAALVLVCRQRYCRPRDLLQRYDSKPIVDLIGAMETQSEPSELELDDVVITNPHIEAILENEDWIEDASGLMSHCIAILKICHTLTEKLVAMTMGSGAKMKTSASVSDIIVVAKRISPR

SEQ ID NO: 21678 - protein, 207 aa, Homo sapiens
MSAQSLPAATPPTQKPPRIIRPRPPSRSRAAQSPGPPHNGSSPQELPRNSNDAPTPMCTPIFWEPPAASLKPPALLPPSASRASLDSQTSPDSPSSTPTPSPVSRRSASPEPAPRSPVPPPKPSGSPCTPLLPMAGVLAQNGSASAPGTVRRLAGRFEGGAEGRAQDADAPEPGLQARADVNGEREAPLTGSGSQENGAPDAGLACP

SEQ ID NO: 21679 - protein, 110 aa, Homo sapiens
SSTVKTETISFGSVSPGGVKLEISTKEVPVVHTETKTITYESSQVDPGTDLEPGVLMSAQTITSETTSTTTTTHITKTVKGGISETRIEKRIVITGDADIDHDQVVCVRR

SEQ ID NO: 21680 - protein, 1076 aa, Homo sapiens
MDIEFECTVSGKPVPTVNWMKNGDVVIPSDYFQIVGGSNLRILGVVKSDEGFYQCVAENEAGNAQTSAQLIVPKPAIPSSSVLPSAPRDVVPVLVSSRFVRLSWRPPAEAKGNIQTFTVFFSREGDNRERALNTTQPGSLQLTVGNLKPEAMYTFRVVAYNEWGPGESSQPIKVATQPELQVPGPVENLQAVSTSPTSILITWEPPAYANGPVQGYRLFCTEVSTGKEQNIEVDGLSYKLEGLKKFTEYSLRFLAYNRYGPGVSTDDITVVTLSDVPSAPPQNVSLEVVNSRSIKVSWLPPPSGTQNGFITGYKIRHRKTTRRGEMETLEPNNLWYLFTGLEKGSQYSFQVSAMTVNGTGPPSNWYTAETPENDLDESQVPDQPSSLHVRPQTNCIIMSWTPPLNPNIVVRGYIIGYGVGSPYAETVRVDSKQRYYSIERLESSSHYVISLKAFNNAGEGVPLYESATTRSITDLSTPMLPPVGVQAVALTHDAVRVSWADNSVPKNQKTSEVRLYTVRWRTSFSASAKYKSEDTTSLSYTATGLKPNTMYEFSVMVTKNRRSSTWSMTAHATTYEAAPTSAPKDLTVITREGKPRAVIVSWQPPLEANGKITAYILFYTLDKNIPIDDWIMETISGDRLTHQIMDLNLDTMYYFRIQARNSKGVGPLSDPILFRTLKVEHPDKMANDQGRHGDGGYWPVDTNLIDRSTLNEPPIGQMHPPHGSVTPQKNSNLLVIIVVTVGVITVLVVVIVAVICTRRSSAQQRKKRATHSAGKRKGSQKDLRPPDLWIHHEEMEMKNIEKPSGTDPAGRDSPIQSCQDLTPVSHSQSETQLGSKSTSHSGQDTEEAGSSMSTLERSLAARRAPRAKLMIPMDAQSNNPAVVSAIPVPTLESAQYPGILPSPTCGYPHPQFTLRPVPFPTLSVDRGFGAGRTVSEGPTTQQPPMLPPSQPEHSSSEEAPSRTIPTACVRPTHPLRSFANPLLPPPMSAIEPKVPYTPLLSQPGPTLPKTHVKTASLGLAGKARSPLLPVSVPTAPEVSEESHKPTEDSANVEMEWVKQYAISYYPLLLPASSFSV

SEQ ID NO: 21681 - protein, 666 aa, Homo sapiens
MAQCVQSVQELIPDSFVPCVAALCSDEAERLTRLNHLSFAELLKPFSRLTSEVHMRDPNNQLHVIKNLKIAVSNIVTQPPQPGAIRKLLNDVVSGSQPAEGLVANVITAGDYDLNISATTPWFESYRETFLQSMPALDHEFLNHYLACMLVASSSEAEPVEQFSKLSQEQHRIQHNSDYSYPKWFIPNTLKYYVLLHDVSAGDEQRAESIYEEMKQKYGTQGCYLLKINSRTSNRASDEQIPDPWSQYLQKNSIQNQESYEDGPCTITSNKNSDNNLLSLDGLDNEVKDGLPNNFRAHPLQLEQSSDPSNSIDGPDHLRSASSLHETKKGNTGIIHGACLTLTDHDRIRQFIQEFTFRGLLPHIEKTIRQLNDQLISRKGLSRSLFSATKKWFSGSKVPEKSINDLKNTSGLLYPPEAPELQIRKMADLCFLVQHYDLAYSCYHTAKKDFLNDQAMLYAAGALEMAAVSAFLQPGAPRPYPAHYMDTAIQTYRDICKNMVLAERCVLLSAELLKSQSKYSEAAALLIRLTSEDSDLRSALLLEQAAHCFINMKSPMVRKYAFHMILAGHRFSKAGQKKHALRCYCQAMQVYKGKGWSLAEDHINFTIGRQSYTLRQLDNAVSAFRHILINESKQSAAQQGAFLREYLYVYKVTAYFHSGIDIKTVF

SEQ ID NO: 21682 - protein, 1201 aa, Homo sapiens
MPNSERHGGKKDGSGGASGTLQPSSGGGSSNSRERHRLVSKHKRHKSKHSKDMGLVTPEAASLGTVIKPLVEYDDISSDSDTFSDDMAFKLDRRENDERRGSDRSDRLHKHRHHQHRRSRDLLKAKQTEKEKSQEVSSKSGSMKDRISGSSKRSNEETDDYGKAQVAKSSSKESRSSKLHKEKTRKERELKSGHKDRSKSHRKRETPKSYKTVDSPKRRSRSPHRKWSDSSKQDDSPSGASYGQDYDLSPSRSHTSSNYDSYKKSPGSTSRRQSVSPPYKEPSAYQSSTRSPSPYSRRQRSVSPYSRRRSSSYERSGSYSGRSPSPYGRRRSSSPFLSKRSLSRSPLPRKSMKSRSRSPAYSRHSSSHSKKKRSSSRSRHSSISPVRLPLNSSLGAELSRKKKERAAAAAAAKMDGKESKGSPVFLPRKENSSVEAKDSGLESKKLPRSVKLEKSAPDTELVNVTHLNTEVKNSSDTGKVKLDENSEKHLVKDLKAQGTRDSKPIALKEEIVTPKETETSEKETPPPLPTIASPPPPLPTTTPPPQTPPLPPLPPIPALPQQPPLPPSQPAFSQVPASSTSTLPPSTHSKTSAVSSQANSQPPVQVSVKTQVSVTAAIPHLKTSTLPPLPLPPLLPGDDDMDSPKETLPSKPVKKEKEQRTRHLLTDLPLPPELPGGDLSPPDSPEPKAITPPQQPYKKRPKICCPRYGERRQTESDWGKRCVDKFDIIGIIGEGTYGQVYKAKDKDTGELVALKKVRLDNEKEGFPITAIREIKILRQLIHRSVVNMKEIVTDKQDALDFKKDKGAFYLVFEYMDHDLMGLLESGLVHFSEDHIKSFMKQLMEGLEYCHKKNFLHRDIKCSNILLNNSGQIKLADFGLARLYNSEESRPYTNKVITLWYRPPELLLGEERYTPAIDVWSCGCILGELFTKKPIFQANLELAQLELISRLCGSPCPAVWPDVIKLPYFNTMKPKKQYRRRLREEFSFIPSAALDLLDHMLTLDPSKRCTAEQTLQSDFLKDVELSKMAPPDLPHWQDCHELWSKKRRRQRQSGVVVEEPPPSKTSRKETTSGTSTEPVKNSSPAPPQPAPGKVESGAGDAIGLADITQQLNQSELAVLLNLLQSQTDLSIPQMAQLLNIHSNPEMQQQLEALNQSISALTEATSQQQDSETMAPEESLKEAPSAPVILPSAEQTTLEASST

SEQ ID NO: 21683 - protein, 994 aa, Homo sapiens
MSSMWSEYTIGGVKIYFPYKAYPSQLAMMNSILRGLNSKQHCLLESPTGSGKSLALLCSALAWQQSLSGKPADEGVSEKAEVQLSCCCACHSKDFTNNDMNQGTSRHFNYPSTPPSERNGTSSTCQDSPEKTTLAAKLSAKKQASIYRDENDDFQVEKKRIRPLETTQQIRKRHCFGTEVHNLDAKVDSGKTVKLNSPLEKINSFSPQKPPGHCSRCCCSTKQGNSQESSNTIKKDHTGKSKIPKIYFGTRTHKQIAQITRELRRTAYSGVPMTILSSRDHTCVHPEVVGNFNRNEKCMELLDGKNGKSCYFYHGVHKISDQHTLQTFQGMCKAWDIEELVSLGKKLKACPYYTARELIQDADIIFCPYNYLLDAQIRESMDLNLKEQVVILDEAHNIEDCARESASYSVTEVQLRFARDELDSMVNNNIRKKDHEPLRAVCCSLINWLEANAEYLVERDYESACKIWSGNEMLLTLHKMGITTATFPILQGHFSAVLQKEEKISPIYGKEEAREVPVISASTQIMLKGLFMVLDYLFRQNSRFADDYKIAIQQTYSWTNQIDISDKNGLLVLPKNKKRSRQKTAVHVLNFWCLNPAVAFSDINGKVQTIVLTSGTLSPMKSFSSELGVTFTIQLEANHIIKNSQVWVGTIGSGPKGRNLCATFQNTETFEFQDEVGALLLSVCQTVSQGILCFLPSYKLLEKLKERWLSTGLWHNLELVKTVIVEPQGGEKTNFDELLQVYYDAIKYKGEKDGALLVAVCRGKVSEGLDFSDDNARAVITIGIPFPNVKDLQVELKRQYNDHHSKLRGLLPGRQWYEIQAYRALNQALGRCIRHRNDWGALILVDDRFRNNPSRYISGLSKWVRQQIQHHSTFESALESLAEFSKKHQKVLNVSIKDRTNIQDNESTLEVTSLKYSTSPYLLEAASHLSPENFVEDEAKICVQELQCPKIITKNSPLPSSIISRKEKSMKSSSHLPLIEKSFIIFSEMIFIWV

SEQ ID NO: 21684 - protein, 502 aa, Homo sapiens
MPVRRGHVAPQNTYLDTIIRKFEGQSRKFLIANAQMENCAIIYCNDGFCELFGYSRVEVMQQPCTCDFLTGPNTPSSAVSRLAQALLGAEECKVDILYYRKDASSFRCLVDVVPVKNEDGAVIMFILNFEDLAQLLAKCSSRSLSQRLLSQSFLGSEGSHGRPGGPGPGTGRGKYRTISQIPQFTLNFVEFNLEKHRSSSTTEIEIIAPHKVVERTQNVTEKVTQVLSLGADVLPEYKLQAPRIHRWTILHYSPFKAVWDWLILLLVIYTAVFTPYSAAFLLSDQDESRRGACSYTCSPLTVVDLIVDIMFVVDIVINFRTTYVNTNDEVVSHPRRIAVHYFKGWFLIDMVAAIPFDLLIFRTGSDETTTLIGLLKTARLLRLVRVARKLDRYSEYGAAVLFLLMCTFALIAHWLACIWYAIGNVERPYLEHKIGWLDSLGVQLGKRYNGSDPASGPSVQDKYVTALYFTFSSLTSVGFGNVSPNTNSEKVFSICVMLIGCE

SEQ ID NO: 21685 - protein, 639 aa, Homo sapiens
GMHERYSNVQVAGPVDRTSSKFCGSFNCRFAFQYNPSLQPRALVVFGCISKRVSHGQIKQIIRILSKALESCLKGPDTYNSQVLIEATVIALTKLQPLLNKDSPLHKALFWVAVAVLQLDEVNLYSAGTALLEQNLHTLDSLRIFNDKSPEEVFMAIRNPLEWHCKQMDHFVGLNFNSNFNFALVGHLLKGYRHPSPAIVARTVRILHTLLTLVNKHRNCDKFEVNTQSVAYLAALLTVSEEVRSRCSLKHRKSLLLTDISMENVPMDTYPIHHGDPSYRTLKETQPWSSPKGSEGYLAATYPTVGQTSPRARKSMSLDMGQPSQANTKKLLGTRKSFDHLISDTKAPKRQEMESGITTPPKMRRVAETDYEMETQRISSSQQHPHLRKVSVSESNVLLDEEVLTDPKIQALLLTVLATLVKYTTDEFDQRILYEYLAEASVVFPKVFPVVHNLLDSKINTLLSLCQDPNLLNPIHGIVQSVVYHEESPPQYQTSYLQSFGFNGLWRFAGPFSKQTQIPDYAELIVKFLDALIDTYLPGIDEETSEESLLTPTSPYPPALQSQLSITANLNLSNSMTSLATSQHSPGIDKENVELSPTTGHCNSGRTRHGSASQVQKQRSAGSFKLALLNLLTAHQNSL

SEQ ID NO: 21686 - protein, 248 aa, Homo sapiens
MTEPGASPEDPWVKASPVGAHAGEGRAGRARARRGAGRRGASLLSPKSPTLSVPRGCREDSSHPACAKVEYAYSDNSLDPDDEDSDYHQEAYKESYKDRRRRAHTQAEQKRRDAIKRGYDDLQTIVPTCQQQDFSIGSQKLSKAIVLQKTIDYIQFLHKEKKKQEEEVSTLRKDVTALKIMKVNYEQIVKAHQDNPHEGEDQVSDQVKFNVFQGIMDSLFQSFNASISVASFQELSACVFSWIEEHCK

SEQ ID NO: 21687 - protein, 425 aa, Homo sapiens
MSAFDMSHGFFPREPICPFEEKTKIGTMVEDHRSNSYQDSVTFDDVAVEFTPEEWALLDTTQKYLYRDVMLENYMNLASVDFFFCLTSEWEIQPRTKRSSLQQGFLKNQIFTGIQMTRSYSGWKLCENCGEVFSEQFCLKTHMRAQNGGNTFEGNCYGKDSISVHKEASIGQELSKFNPCGKVFTLTPGLAVHLEILNGRQPYKCKECGKGFKYFASLDNHMGIHIGEKLCEFQECERAITTSSHLKQCVAVHTGKKSEKTKNCGKSFTNFSQLSAHAKTHKGEKSFECKECGRSFRNSSSFNVHIQIHTGIKPHKCTECGKAFTRSTHLTQHVRTHTGIKPYECKECGQAFTQYTGLAIHIRNHTGEKPYQCKECGKAFNRSSTLTQHRRIHTGEKPYECVECGKTFITSSHRSKHLKTHSGER

SEQ ID NO: 21688 - protein, 1250 aa, Homo sapiens
SLQVSPQEMVQEIHQVLMDREDTCHRTCFSLHLDGNVLDHFSELRSVEGLQEGSVLRVVEEPYTVREARIHVRHVRDLLKSLDPSDAFNGVDCNSLSFLSVFTDGDLGDSGKRKKGLEMDPIDCTPPEYILPGSRERPLCPLQPQNRDWKPLQCLKVLTMSGWNPPPGNRKMHGDLMYLFVITAEDRQVSITASTRGFYLNQSTAYHFNPKPASPRFLSHSLVELLNQISPTFKKNFAVLQKKRVQRHPFERIATPFQVYSWTAPQAEHAMDCVRAEDAYTSRLGYEEHIPGQTRDWNEELQTTRELPRKNLPERLLRERAIFKVHSDFTAAATRGAMAVIDGNVMAINPSEETKMQMFIWNNIFFSLGFDVRDHYKDFGGDVAAYVAPTNDLNGVRTYNAVDVEGLYTLGTVVVDYRGYRVTAQSIIPGILERDQEQSVIYGSIDFGKTVVSHPRYLELLERTSRPLKILRHQVLNDRDEEVELCSSVECKGIIGNDGRHYILDLLRTFPPDLNFLPVPGEELPEECARAGFPRAHRHKLCCLRQELVDAFVEHRYLLFMKLAALQLMQQNASQLETPSSLENGGPSSLESKSEDPPGQEAGSEEEGSSASGLAKVKELAETIAADDGTADPRSREVIRNACKAVGSISSTAFDIRFNPDIFSPGVRFPESCQDEVRDQKQLLKDAAAFLLSCQIPGLVKDCMEHAVLPVDGATLAEVMRQRGINMRYLGKVLELVLRSPARHQLDHVFKIGIGELITRSAKHIFKTYLQGVELSGLSAAISHFLNCFLSSYPNPVAHLPADELVSKKRNKRRKNRPPGAADNTAWAVMTPQELWKNICQEAKNYFDFDLECETVDQAVETYGLQKITLLREISLKTGIQVLLKEYSFDSRHKPAFTEEDVLNIFPVVKHVNPKASDAFHFFQSGQAKVQQGFLKEGCELINEALNLFNNVYGAMHVETCACLRLLARLHYIMGDYAEALSNQQKAVLMSERVMGTEHPNTIQEYMHLALYCFASSQLSTALSLLYRARYLMLLVFGEDHPEMALLDNNIGLVLHGVMEYDLSLRFLENALAVSTKYHGPKALKVALSHHLVARVYESKAEFRSALQHEKEGYTIYKTQLGEDHEKTKESSEYLKCLTQQAVALQRTMNEIYRNGSSANIPPLKFTAPSMASVLEQLNVINGILFIPLSQKDLENLKAEVARRHQLQEASRNRDRAEEPMATEPAPAGAPGDLGSQPPAAKDPSPSVQG

SEQ ID NO: 21689 - protein, 137 aa, Homo sapiens
MGPLQFRDVAIEFSLEEWHCLDAAQRNLYRDVMLENYRNLIFLGIVVSKPNLITCLEQGKKPLTMKRHEMIAKPPDGVSVFHPGWSAVARSRLTATSTSQVDCLRSGVQDHPGQHSETPSEEALLSRGHSLWMNKVH

SEQ ID NO: 21690 - protein, 174 aa, Homo sapiens
MCADDLLSVLLYLLVKTEIPNWMANLSYIKNFRFSSLAKDELGYCLTSFEAAIEYIRQGSLSAKPPESEGFGDRLFLKQRMSLLSQMTSSPTDCLFKHIASGNQKEVERLLSQEDHDKDTVQKMCHPLCFCDDCEKLVSGRLNDPSVVTPFSRDDRGHTPLHVAAVCGQASLID

SEQ ID NO: 21691 - protein, 267 aa, Homo sapiens
MSTTGWEAETFKEQGNAYYAKKDYNEAYNYYTKAIDMCPKNASYYGNRAATLMMLGRFREALGDAQQSVRLDDSFVRGHLREGKCHLSLGNAMAACRSFQRALELDHKNAQAQQEFKNANAVMEYEKIAETDFEKRDFRKVVFCMDRALEFAPACHRFKILKAECLAMLGRYPEAQSVASDILRMDSTNADALYVRGLCLYYEDCIEKAVQFFVQALRMAPDHEKACIACRNAKALKAKKEDGNKAFKEGNYKLAYELYTEALGIDP

SEQ ID NO: 21692 - protein, 1616 aa, Homo sapiens
MSTPDPPLGGTPRPGPSPGPGPSPGAMLGPSPGPSPGSAHSMMGPSPGPPSAGHPIPTQGPGGYPQDNMHQMHKPMESMHEKGMSDDPRYNQMKGMGMRSGGHAGMGPPPSPMDQHSQGYPSPLGGSEHASSPVPASGPSSGPQMSSGPGGAPLDGADPQALGQQNRGPTPFNQNQLHQLRAQIMAYKMLARGQPLPDHLQMAVQGKRPMPGMQQQMPTLPPPSVSATGPGPGPGPGPGPGPGPAPPNYSRPHGMGGPNMPPPGPSGVPPGMPGQPPGGPPKPWPEGPMANAAAPTSTPQKLIPPQPTGRPSPAPPAVPPAASPVMPPQTQSPGQPAQPAPMVPLHQKQSRITPIQKPRGLDPVEILQEREYRLQARIAHRIQELENLPGSLAGDLRTKATIELKALRLLNFQRQLRQEVVVCMRRDTALETALNAKAYKRSKRQSLREARITEKLEKQQKIEQERKRRQKHQEYLNSILQHAKDFKEYHRSVTGKIQKLTKAVATYHANTEREQKKENERIEKERMRRLMAEDEEGYRKLIDQKKDKRLAYLLQQTDEYVANLTELVRQHKAAQVAKEKKKKKKKKKAENAEGQTPAIGPDGEPLDETSQMSDLPVKVIHVESGKILTGTDAPKAGQLEAWLEMNPGYEVAPRSDSEESGSEEEEEEEEEEQPQAAQPPTLPVEEKKKIPDPDSDDVSEVDARHIIENAKQDVDDEYGVSQALARGLQSYYAVAHAVTERVDKQSALMVNGVLKQYQIKGLEWLVSLYNNNLNGILADEMGLGKTIQTIALITYLMEHKRINGPFLIIVPLSTLSNWAYEFDKWAPSVVKVSYKGSPAARRAFVPQLRSGKFNVLLTTYEYIIKDKHILAKIRWKYMIVDEGHRMKNHHCKLTQVLNTHYVAPRRLLLTGTPLQNKLPELWALLNFLLPTIFKSCSTFEQWFNAPFAMTGEKVDLNEEETILIIRRLHKVLRPFLLRRLKKEVEAQLPEKVEYVIKCDMSALQRVLYRHMQAKGVLLTDGSEKDKKGKGGTKTLMNTIMQLRKICNHPYMFQHIEESFSEHLGFTGGIVQGLDLYRASGKFELLDRILPKLRATNHKVLLFCQMTSLMTIMEDYFAYRGFKYLRLDGTTKAEDRGMLLKTFNEPGSEYFIFLLSTRAGGLGLNLQSADTVIIFDSDWNPHQDLQAQDRAHRIGQQNEVRVLRLCTVNSVEEKILAAAKYKLNVDQKVIQAGMFDQKSSSHERRAFLQAILEHEEQDEEEDEVPDDETVNQMIARHEEEFDLFMRMDLDRRREEARNPKRKPRLMEEDELPSWIIKDDAEVERLTCEEEEEKMFGRGSRHRKEVDYSDSLTEKQWLKTLKAIEEGTLEEIEEEVRQKKSSRKRKRDSDAGSSTPTTSTRSRDKDDESKKQKKRGRPPAEKLSPNPPNLTKKMKKIVDAVIKYKDSSGRQLSEVFIQLPSRKELPEYYELIRKPVDFKKIKERIRNHKYRSLNDLEKDVMLLCQNAQTFNLEGSLIYEDSIVLQSVFTSVRQKIEKEDDSEGEESEEEEEGEEEGSESESRSVKVKIKLGRKEKAQDRLKGGRRRPSRGSRAKPVVSDDDSEEEQEEDRSGSGSEED

SEQ ID NO: 21693 - protein, 684 aa, Homo sapiens
MNPIALGSRWLAYAENKLIRCHQSRGGACGDNIQSYTATVISAAKTLKSGLTMVGKVVTQLTGTLPSGVTEDDVAIHSNSRRSPLVPGIITVIDTETVGEGQVLVSEDSDSDGIVAHFPAHEKPVCCMAFNTSGMLLVTTDTLGHDFHVFQILTHPWSSSQCAVHHLYTLHRGETEAKVQDICFSHDCRWVVVSTLRGTSHVFPINPYGGQPCVRTHMSPRVVNRMSRFQKSAGLEEIEQELTSKQGGRCSPVPGLSSSPSGSPLHGKLNSQDSYNNFTNNNPGNPRLSPLPSLMVVMPLAQIKQPMTLGTITKRTGKVKPPPQISPSKSMGGEFCVAAIFGTSRSWFANNAGLKREKDQSKQVVVESLYIISCYGTLVEHMMEPRPLSTAPKISDDTPLEMMTSPRASWTLVRTPQWNELQPPFNANHPLLLAADAVQYYQFLLAGLVPPGSPGPITRHGSYDSLASDHSGQEDEEWLSQVEIVTHTGPHRRLWMGPQFQFKTIHPSGQTTVISSSSSVLQSHGPSDTPQPLLDFDTDDLDLNSLRIQPVRSDPVSMPGSSRPVSDRRGVSTVIDAASGTFDRSVTLLEVCGSWPEGFGLRHMSSMEHTEEGLRERLADAMAESPSRDVVGSGTELQREGSIETLSNSSGSTSGSIPRNFDGYRSPLPTNESQPLSLFPTGFP

SEQ ID NO: 21694 - protein, 209 aa, Homo sapiens
MADTPRDAGLKQAPASRNEKAPVDFGYVGIDSILEQMRRKAMKQGFEFNIMVVGQSGLGKSTLINTLFKSKISRKSVQPTSEERIPKTIEIKSITHDIEEKGVRMKLTVIDTPGFGDHINNENCWQPIMKFINDQYEKYLQEEVNINRKKRIPDTRVHCCLYFIPATGHSLRPLDIEFMKRLSKVVNIVPVIAKADTLTLEERVHFKQR

SEQ ID NO: 21695 - protein, 1146 aa, Homo sapiens
FATGCVVNGGDVRCSCKAGYTGTQCERCAPGYFGNPQKFGGSCQPCSCNSNGQLGSCHPLTGDCINQEPKDSSPAEECDDCDSCVMTLLNDLATMGEQLRLVKSQLQGLSASAGLLEQMRHMETQAKDLRNQLLNYRSAISNHGSKIEGLERELTDLNQEFETLQEKAQVNSRKAQTLNNNVNRATQSAKELDVKIKNVIRNVHILLKQISGTDGEGNNVPSGDFSREWAEAQRMMRELRNRNFGKHLREAEADKRESQLLLNRIRTWQKTHQGENNGLANSIRDSLNEYEAKLSDLRARLQEAAAQAKQANGLNQENERALGAIQRQVKEINSLQSDFTKYLTTADSSLLQTNIALQLMEKSQKEYEKLAASLNEARQELSDKVRELSRSAGKTSLVEEAEKHARSLQELAKQLEEIKRNASGDELVRCAVDAATAYENILNAIKAAEDAANRAASASESALQTVIKEDLPRKAKTLSSNSDKLLNEAKMTQKKLKQEVSPALNNLQQTLNIVTVQKEVIDTNLTTLRDGLHGIQRGDIDAMISSAKSMVRKANDITDEVLDGLNPIQTDVERIKDTYGRTQNEDFKKALTDADNSVNKLTNKLPDLWRKIESINQQLLPLGNISDNMDRIRELIQQARDAASKVAVPMRFNGKSGVEVRLPNDLEDLKGYTSLSLFLQRPNSRENGGTENMFVMYLGNKDASRDYIGMAVVDGQLTCVYNLGDREAELQVDQILTKSETKEAVMDRVKFQRIYQFARLNYTKGATSSKPETPGVYDMDGRNSNTLLNLDPENVVFYVGGYPPDFKLPSRLSFPPYKGCIELDDLNENVLSLYNFKKTFNLNTTEVEPCRRRKEESDKNYFEGTGYARVPTQPHAPIPTFGQTIQTTVDRGLLFFAENGDRFISLNIEDGKLMVRYKLNSELPKERGVGDAINNGRDHSIQIKIGKLQKRMWINVDVQNTIIDGEVFDFSTYYLGGIPIAIRERFNISTPAFRGCMKNLKKTSGVVRLNDTVGVTKKCSEDWKLVRSASFSRGGQLSFTDLGLPPTDHLQASFGFQTFQPSGILLDHQTWTRNLQVTLEDGYIELSTSDSGGPIFKSPQTYMDGLLHYVSVISDNSGLRQEGCLRPRVRDQSWKHSETMSLRKLK

SEQ ID NO: 21696 - protein, 916 aa, Homo sapiens
MAETLSGLGDSGAAGAAALSSASSETGTRRLSDLRVIDLRAELRKRNVDSSGNKSVLMERLKKAIEDEGGNPDEIEITSEGNKKTSKRSSKGRKPEEEGVEDNGLEENSGDGQEDVETSLENLQDIDIMDISVLDEAEIDNGSVADCVEDDDADNLQESLSDSRELVEGEMKELPEQLQEHAIEDKETINNLDTSSSDFTILQEIEEPSLEPENEKILDILGETCKSEPVKEESSELEQPFAQDTSSVGPDRKLAEEEDLFDSAHPEEGDLDLASESTAHAQSSKADSLLAVVKREPAEQPGDGERTDCEPVGLEPAVEQSSAASELAEASSEELAEAPTEAPSPEARDSKEDGRKFDFDACNEVPPAPKESSTSEGADQKMSSPEDDSDTKRLSKEEKGRSSCGRNFWVSGLSSTTRATDLKNLFSKYGKVVGAKVVTNARSPGARCYGFVTMSTAEEATKCINHLHKTELHGKMISVEKAKNEPVGKKTSDKRDSDGKKEKSSNSDRSTNLKRDDKCDRKDDAKKGDDGSGEKSKDQDDQKPGPSERSRATKSGSRGTERTVVMDKSKGVPVISVKTSGSKERASKSQDRKSASREKRSVVSFDKVKEPRKSRDSESHRVRERSEREQRMQAQWEREERERLEIARERLAFQRQRLERERMERERLERERMHVEHERRREQERIHREREELRRQQELRYEQERRPAVRRPYDLDRRDDAYWPEAKRAALDERYHSDFNRQDRFHDFDHRDRGRYPDHSVDRREGSRSMMGEREGQHYPERHGGPERHGRDSRDGWGGYGSDKRMSEGRGLPPPPRGRRDWGDHGRREDDRSWQGTADGGMMDRDHKRWQGGERSMSGHSGPGHMMNRGGMSGRGSFAPGGASRGHPIPHGGMQGGFGGQSRGSRPSDARFTRRY

SEQ ID NO: 21697 - protein, 54 aa, Homo sapiens
MTKFQEMVTFKDVAVVFTEEELGLLDSVQRKLYRDVMLENFRNLLLHISPSSQT

SEQ ID NO: 21698 - protein, 265 aa, Homo sapiens
MPREIITLQLGQCGNQIGFEFWKQLCAEHGISPEGIVEEFATEGTDRKDVFFYQADDEHYIPRAVLLDLEPRVIHSILNSPYAKLYNPENIYLSEHGGGAGNNWASGFSQVVSYSLAGPTTRWGEKIHEDIFDIIDREADGSDSLEGFVLCHSIAGGTGSGLGSYLLERLNDRYPKKLVQTYSVFPNQDEMSDVVVQPYNSLLTLKRLTQNADCVVVLDNTALNRIATDRLHIQNPSFSQINQLVSTIMSASTTTLRYPGYMNND

SEQ ID NO: 21699 - protein, 540 aa, Homo sapiens
MELLTFRDVAIEFSPEEWKCLDPAQQNLYRDVMLENYRNLVSLAVYSYYNQGILPEQGIQDSFKKATLGRYGSCGLENICLWKNWESIGEGEGQKECYNLCSQYLTTSHNKHLTVKGDKEYRIFQKKPQFLSAAPTEPCIPMNKYQHKFLKSVFCNKNQINFNHDSNISKHHSTHFLENYYNCNECEKVFYQSSKLIFPENIHIQKKPYNSNECGETSDPFSKLTQHQRIYIGESSQRCNKKCIIVFSQSHLKGHKIINTGEKSVKYKERGKAFTRGLHLGHQKIHTGEKPYKCKKCDKAFNKSSHLAQHQRIHTGEKPFKCKECGKAFNRGSYLTQHQRIHTGERAFKCEECGKAFNRGSYLTQHQRIHTGEKPFRCKECGKAFNRSSYVTQHQRMHTGEKPFKCKECGKAFNRASHLTQHQRIHTGEKHFKCKECGKAFNRGSHLTRHQRIHTGEKSFKCEECGKAFIWGSHLTQHQRVHTGEKFFKCKECGKAFTRSSHLTQHQRIHTGEKPFKCKECGKAFNRRSTLTQHQIIHTR

SEQ ID NO: 21700 - protein, 176 aa, Homo sapiens
MRRPGRKGTGGGQAPSPIANTFLHYRTSKVRVLRAARLERLVGELVFGDREQDPSFMPAFLATYRTFVPTACLLGFLLPPMPPPPPPGVEIKKTAVQDLSFNKNLRAVVSVLGSWLQDHPQDFRDHPAHSDLGSVRTFLGWAAPGSAEAQKAEKLLEDFLEEAEREQEEEPPQVWT

SEQ ID NO: 21701 - protein, 292 aa, Homo sapiens
MRELKRTLDAKGHGVLEMPSGTGKTVSLLALIMAYQRAYPLEVTKLIYCSRTVPEIEKVIEELRKLLNFYEKQEGEKLPFLGLALSSRKNLCIHPEVTPLRFGKDVDGKCHSLTASYVRAQYQHDTSLPHCRFYEEFDAHGREVPLPAGIYNLDDLKALGRRQGWCPYFLARYSILHANVVVYSYHYLLDPKIADLVSKELARKAVVVFDEAHNIDNVCIDSMSVNLTRRTLDRCQGNLETLQKTVLRIKETDEQRLRDEYRRLVEGLREASAARETDAHLANPVLPDEVLQ

SEQ ID NO: 21702 - protein, 810 aa, Homo sapiens
MSKGPGPGGSAASSAPPAATAQVLQAQPEKPQHYTYLKEFRTEQCPLFVQHKCTQHRPYTCFHWHFVNQRRRRSIRRRDGTFNYSPDVYCTKYDEATGLCPEGDECPFLHRTTGDTERRYHLRYYKTGICIHETDSKGNCTKNGLHCAFAHGPHDLRSPVYDIRELQAMEALQNGQTTVEGSIEGQSAGAASHAMIEKILSEEPRWQETAYVLGNYKTEPCKKPPRLCRQGYACPYYHNSKDRRRSPRKHKYRSSPCPNVKHGDEWGDPGKCENGDACQYCHTRTEQQFHPEIYKSTKCNDMQQSGSCPRGPFCAFAHVEQPPLSDDLQPSSAVSSPTQPGPVLYMPSAAGDSVPVSPSSPHAPDLSALLCRNSSLGSPSNLCGSPPGSIRKPPNLEGIVFPGESGLAPGSYKKAPGFEREDQVGAEYLKNFKCQAKLKPHSLEPRSQEQPLLQPKQDMLGILPAGSPLTSSISSSITSSLAATPPSPVGTSSVPGMNANALPFYPTSDTVESVIESALDDLDLNEFGVAALEKTFDNSTVPHPGSITIGGSLLQSSAPVNIPGSLGSSASFHSASPSPPVSLSSHFLQQPQGHLSQSENTFLGTSASHGSLGLNGMNSSIWEHFASGSFSPGTSPAFLSGPGAAELARLRQELDEANSTIKQWEESWKQAKQACDAWKKEAEEAGERASAAGAECELAREQRDALEVQVKKLQEELERLHAGPEPQALPAFSDLEALSLSTLYSLQKQLRAHLEQVDKAVFHMQSVKCLKCQEQKRAVLPCQHAALCELCAEGSECPICQPGRAHTLQS

SEQ ID NO: 21703 - protein, 124 aa, Homo sapiens
PSKLCRHSLKCLECNEVFQDETSLATHFQQAADTSGQQMKKHPCRQCDKSFSSSHSLCRHNRIKHKGIRKVYACSHCPDSRRTFTKRLMLEKHVQLMHGIKDPDLKEMTDATNEEETEIKEDTK

SEQ ID NO: 21704 - protein, 456 aa, Homo sapiens
MDNMSITNTPTSNDACLSIVHSLMCHRQGGESETFAKRAIESLVKKLKEKKDELDSLITAITTNGAHPSKCVTIQRTLDGRLQVAGRKGFPHVIYARLWRWPDLHKNELKHVKYCQYAFDLKCDSVCVNPYHYERVVSPGIDLSGLTLQSNAPSSMMVKDEYVHDFEGQPSLSTEGHSIQTIQHPPSNRASTETYSTPALLAPSESNATSTANFPNIPVASTTPEYWCSIAYFEMDVQVGETFKVPSSCPIVTVDGYVDPSGGDRFCLGQLSNVHRTEAIERARLHIGKGVQLECKGEGDVWVRCLSDHAVFVQSYYLDREAGRAPGDAVHKIYPSAYIKVFDLRQCHRQMQQQAATAQAAAAAQAAAVAGNIPGPGSVGGIAPAISLSAAAGIGVDDLRRLCILRMSFVKGWGPDYPRQSIKETPCWIEIHLHRALQLLDEVLHTMPIADPQPLD

SEQ ID NO: 21705 - protein, 484 aa, Homo sapiens
MYIKMATLANGQADNASLSTNGLGSSPGSAGHMNGLSHSPGNPSTIPMKDHDAIKLFIGQIPRNLDEKDLKPLFEEFGKIYELTVLKDRFTGMHKGCAFLTYCERESALKAQSALHEQKTLPGMNRPIQVKPADSESRGGSSCLRQPPSHRKLFVGMLNKQQSEDDVRRLFEAFGNIEECTILRGPDGNSKGCAFVKYSSHAEAQAAINALHGSQTMPGASSSLVVKFADTDKERTMRRMQQMAGQMGMFNPMAIPFGAYGAYAQALMQQQAALMASVAQGGYLNPMAAFAAAQMQQMAALNMNGLAAAPMTPTSGGSTPPGITAPAVPSIPSPIGVNGFTGLPPQANGQPAAEAVFANGIHPYPAQSPTAADPLQQAYAGVQQYAAAAYPAAYGQISQAFPQPPPMIPQQQREGPEGCNLFIYHLPQEFGDAELMQMFLPFGFVSFDNPASAQTAIQAMNGFQIGMKRLKVQLKRPKDANRPY

SEQ ID NO: 21706 - protein, 265 aa, Homo sapiens
MIVSFLRPPQTCGTDMDLIDILWRQDIDLGVSREVFDFSQRRKEYELEKQKKLEKERQEQLQKEQEKAFFAQLQLDEETGEFLPIQPAQHIQSETSGSANYSQVAHIPKSDALYFDDCMQLLAQTFPFVDDNEVSSATFQSLVPDIPGHIESPVFIATNQAQSPETSVAQVAPVDLDGMQQDIEQVWEELLSIPELQCLNIENDKLVETTMVPSPEAKLTEVDNYHFYSSIPSMEKEVGNCSPHFLNAFEDSFSSILSTEDPNQL

SEQ ID NO: 21707 - protein, 82 aa, Homo sapiens
MVDHLANTEINSQRIAAVESCFGASGQPLALPGRVLLGEGVLTKECRKKAKPRIFFLFNDILVYGSIVLNKRKYRSQHIIPL

SEQ ID NO: 21708 - protein, 1069 aa, Homo sapiens
MAAVQVVGSWPSVQPREAPREAIPERGNGFRLLSARLCALRPDDSSSARTEIHLLFDQLISENYSEGSGVAPEDVSALLVQACRLVPLNQNHLVSKVSQLIHHLLNRLQVIVDEQHLDFLLAYTISAIHQCSSWTHREILQALAALVYCNGSKCQKYLPELLGNTGLLMKLSDLAQSDPEVRRAAVHCMANLCLSVPGQPYLEEPYQNVCFQAFLTILQSPKSSDMDDITFCMLLQNALKGIQSLLNGGRMKLTQTDELGALLAVLKKFMFHGLPGLNIEMPTVLYPTPLPQYDGRTPIKPQQSESSASRPTLNKKKKSKVKPKKIQQGEEEEKESSGEIEAAPVTGTGRVNLHEGNTWCPSSLGVQSLPLDGSGAAEKDGVSSSFSSSSWKRVSSSESDFSDAEGGMQSKMRSYQAKVRQGALVCFLSTIKSIEKKVLYGYWSAFIPDTPELGSPQSVSLMTLTLKDPSPKTRACALQVLSAILEGSKQFLSVAEDTSDHRRAFTPFSVMIACSIRELHRCLLLALVAESSSQTVTQIIKCLANLVSNAPYDRLKLSLLTKVWNQIKPYIRHKDVNVRVSSLTLLGAIVSTHAPLPEVQLLLQQPCSSGLGNSNSATPHLSPPDWWKKAPAGPSLEETSVSSPKGSSEPCWLIRLCISIVVLPKEDSCSGSDAGSAAGSTYEPSPMRLEAFSNLPNDRQMLCITVLLGLNDSKNRLVKAATSRALGVYVLFPCLRQDVIFVADAANAILMSLEDKSLNVRAKAAWSLGNLTDTLIVNMETPDPSFQEEFSGLLLLKMLRSAIEASKDKDKVKSNAVRALGNLLHFLQPSHIEKPTFAEIIEESIQALISTVLTEAAMKVRWNACYAMGNVFKNPALPLGTAPWTSQAYNALTSVVTSCKNFKVRIRSAAALSVPGKREQYGSVDQYARIWNALVTALQKSEDTIDFLEFKYCVSLRTQICQALIHLLSLASASDLPCMKETLELSGNMVQSYILQFLKSGAEGDDTGAPHSPQERDQMVRMALKHMGSIQAPTGDTARRAIMGFLEEILAVCFDSSGSQGALPGLTNQ

SEQ ID NO: 21709 - protein, 105 aa, Homo sapiens
MMMGSARVAELLLLHGAEPNCADPATLTRPVHDAAREGFLDTLVVLHRAGARLDVRDAWGRLPVDLAEELGHRDVARYLRAAAGGTRGSNHARIDAAEGPSDIPD

SEQ ID NO: 21710 - protein, 158 aa, Homo sapiens
MATQAYTELQAAPPPSQPPQAPPQAQPQPPPPPPPAAPQPPQPPTAAATPQPQYVTELQSPQPQAQPPGGQKQYVTELPAVPAPSQPTGAPTPSPAPQQYIVVTVSEGAMRASETVSEASPGSTASQTGVPTQVVQQVQGTQQMCTAAARHPTTPGLP

SEQ ID NO: 21711 - protein, 445 aa, Homo sapiens
MVQKYQSPVRVYKYPFELIMAAYERRFPTCPLIPMFVGSDTVNEFKSEDGAIHVIERRCKLDVDAPRLLKKIAGVDYVYFVQKNSLNSRERTLHIEAYNETFSNRVIINEHCCYTVHPENEDWTCFEQSASLDIKSFFGFESTVEKIAMKQYTSNIKKGKEIIEYYLRQLEEEGITFVPRWSPPSITTSSETSSSSSKKQAASMAVVIPEAALKEGLSGDALSSPSAPEPVVGTPDDKLDADYIKRYLGDLTPLQESCLIRLRQWLQETHKGKIPKDEHILRFLRARDFNIDKAREIMCQSLTWRKQHQVDYILETWTPPQVLQDYYAGGWHHHDKDGRPLYVLRLGQMDTKGLVRALGEEALLRYVLSINEEGLRRCEENTKVFGRPISSWTCLVDLEGLNMRHLWRPGVKALLRIIEVVEANYPETLGRLLILRAPRVFPVLW

SEQ ID NO: 21712 - protein, 1090 aa, Homo sapiens
MNMEGLVMFQDLSIDFSQEEWECLDAAQKDLYRDVMMENYSSLVSLGLSIPKPDVISLLEQGKEPWMVSRDVLGGWCRDSEFRCKTKDSCLPKEIYEVTSSQWVRMEKCHSLVGSSVRDDWECKGQFQHQDINQERYLEKAIMTYETTPTFCLQTSLTLHHRIHPGEKLYKSTECMAFKYGSELTQQQETHTGEKLYKCKECGKAFHHFSYLVKHQRIHTGEKPCACKEYGKAFISGSHLIQHQKMYTDERPHECQESVKAFRPSAHLIQHWRIHTGDKPYECKECGKSFTSGSTLNQHQQIHTGEKPYHCKQCGKSFTVGSTLIRHQQIHTGEKPYDCKECGKSFASGSALIRHQRIHTGEKPYDCKECGKSFTFHSALIRHQRIHTGEKPYDCKECGKSFTFRSGLIGHQAIHTGEKPYDCKECGKSFTAGSTLIQHQRIHTGEKPYDCKECGKSFASGSALLQHQRIHTGEKPYCCKECGKSFTFRSTRNRHQRIHTGEKPYNCKECGKSFASGSALLQHQRIHTGEKPYHCKECGKSFTFRSGLIGHQAVHTGEKPYDCKECGKSFTSRSALIQHQRIHTGEKPYHCKECGKSFTVGSTLLQHQQIHTGEKPYDCKECGKAFRLRLRLTQHQQIHTGEKPYQCQECGKAFVSVSGLTQHHRIHTGEKPYECPDCGKAFRQRTYLNQHRRIHTGEKPYECKECGKSFTFCSGLIQHQQNHTDEKPYDGKECGKSFTSHSTLIQHQQIHTGEKPYDCKECGKSFTSHSTLIQHQQIHTGEKLYDCKECGKSFTSHSTLIQHQPLHTGEKPYHCKECGKSFTLRSALIQHRPVHTGEKRYSCKECGKSFTSRSTLIEHQRIHTGEKPYHCKECGKSFAFRSAIIQHRRIHTGEKPYDCKECGKAFRRRSKLTQHQRIHTGEKPYRCHECGKAFVRFSGLTKHHSIHTGEKPYECKTCGKSFRQRTHLTLHQRIHTGDRPYECKECGKSFTCGSELIRHQRTHTGEKPYDCKECGKAFRCPSQLSQHKRIHTGEKTYQCPECGKAFFYASGLSRHQSVHTGEKPYECKTCGKAFKQLTQLTRHQRIHDLT

SEQ ID NO: 21713 - protein, 347 aa, Homo sapiens
MAAAAECDVVMAATEPELLDDQEAKREAETFKEQGNAYYAKKDYNEAYNYYTKAIDMCPKNASYYGNRAATLMMLGRFREALGDAQQSVRLDDSFVRGHLREGKCHLSLGNAMAACRSFQRALELDHKNAQAQQEFKNANAVMEYEKIAETDFEKRDFRKVVFCMDRALEFAPACHRFKILKAECLAMLGRYPEAQSVASDILRMDSTNADALYVRGLCLYYEDCIEKAVQFFVQALRMAPDHEKACIACRNAKALKAKKEDGNKAFKEGNYKLAYELYTEALGIDPNNIKTNAKLYCNRGTVNSKLRKLDDAIEDCTNAVKLDDTYIKAYLRRAQWWDCSSPRLSL

SEQ ID NO: 21714 - protein, 111 aa, Homo sapiens
MDPAGGPRGVLPRPCRVLVLLNPRGGKGKALQLFRSHVQPLLAEAEISFTLMLTERRNHARELVRSEELGRWDALVVMSGDGLMHEVVNGLMERPDWETAIQKPLCSLPAG

SEQ ID NO: 21715 - protein, 205 aa, Homo sapiens
MGTGPAQTPRSTRAGPEPSPAPPGPGDTGDSDVTQEGSGPAGIRGGETVIRAGMGDSPGRGAPERRHKAQPGRARKYEWRPEGPTSMGSLGQREDLQDEDRNSAFTWKVQANNRAYNGQFKEKVILCWQRKKYKTNVIRTAKYNFYSFLPLNLYEQFHRVSNLFFLIIIILQSIPDISTLPWFSLSTPMVCLLFIRATRDLVDDM

SEQ ID NO: 21716 - protein, 833 aa, Homo sapiens
MDVVDPDIFNRDPRDHYDLLQRLGGGTYGEVFKARDKVSGDLVALKMVKMEPDDDVSTLQKEILILKTCRHANIVAYHGSYLWLQKLWICMEFCGAGSLQDIYQVTGSLSELQISYVCREVLQGLAYLHSQKKIHRDIKGANILINDAGEVRLADFGISAQIGATLARRLSFIGTPYWMAPEVAAVALKGGYNELCDIWSLGITAIELAELQPPLFDVHPLRVLFLMTKSGYQPPRLKEKGKWSAAFHNFIKVTLTKSPKKRPSATKMLSHQLVSQPGLNRGLILDLLDKLKNPGKGPSIGDIEDEEPELPPAIPRRIRSTHRSSSLGIPDADCCRRHMEFRKLRGMETRPPANTARLQPPRDLRSSSPRKQLSESSDDDYDDVDIPTPAEDTPPPLPPKPKFRSPSDEGPGSMGDDGQLSPGVLVRCASGPPPNSPRPGPPPSTSSPHLTAHSEPSLWNPPSRELDKPPLLPPKKEKMKRKGCALLVKLFNGCPLRIHSTAAWTHPSTKDQHLLLGAEEGIFILNRNDQEATLEMLFPSRTTWVYSINNVLMSLSGKTPHLYSHSILGLLERKETRAGNPIAHISPHRLLARKNMVSTKIQDTKGCRACCVAEGASSGGPFLCGALETSVVLLQWYQPMNKFLLVRQVLFPLPTPLSVFALLTGPGSELPAVCIGVSPGRPGKSVLFHTVRFGALSCWLGEMSTEHRGPVQVTQVEEDMVMVLMDGSVKLVTPEGSPVRGLRTPEIPMTEAVEAVAMVGGQLQAFWKHGVQVWALGSDQLLQELRDPTLTFRLLGSPRLECSGTISPHCNLLLPGSSNSPASASRVAGITGL

SEQ ID NO: 21717 - protein, 318 aa, Homo sapiens
MKDKRKKKDRTWAEAARLALEKHPNSPMTAKQILEVIQKEGLKETRNGTSPLACLNAMLHTNTRIGDGTFFKIPGKSGLYALKKEESSCPADGTLDLVCESELDGTDMAEANAHGEENGVCSKQVTDEASSTRDSSLTNTAVQSKLVSSFQQHTKKALKQALRQQQKRRNGVSMMVNKTVPRVVLTPLKVSDEQSDSPSGSESKNGEADSSDKEMKHGQKSPTGKQTSQHLKRLKKSGLGHLKWTKAEDIDIETPGSILVNTNLRALINKHTFASLPQHFQQYLLLLLPEVDRQSRNEPFLQEAMVPISGGCHEIKMS

SEQ ID NO: 21718 - protein, 962 aa, Homo sapiens
MDTDLYDEFGNYIGPELDSDEDDDELGRETKDLDEMDDDDDDDDVGDHDDDHPGMEVVLHEDKKYYPTAEEVYGPEVETIVQEEDTQPLTEPIIKPVKTKKFTLMEQTLPVTVYEMDFLADLMDNSELIRNVTLCGHLHHGKTHPEIRKRYDQDLCYTDILFTEQERGVGIKSTPVTVVLPDTKGKSYLFNIMDTPGHVNFSDEVTAGLRISDGVVLFIDAAEGVMLNTERLIKHAVQERLAVTVCINKIDRLILELKLPPTDAYYKLRHIVDEVNGLISMYSTDENLILSPLLGNVCFSSSQYSICFTLGSFAKIYADTFGDINYQEFAKRLWGDIYFNPKTRKFTKKAPTSSSQRSFVEFILEPLYKILAQVVGDVDTSLPRTLDELGIHLTKEELKLNIRPLLRLVCKKFFGEFTGFVDMCVQHIPSPKVGAKPKIEHTYTGGVDSDLGEAMSDCDPDGPLMCHTTKMYSTDDGVQFHAFGRVLSGTIHAGQPVKVLGENYTLEDEEDSQICTVGRLWISVARYHIEVNRVPAGNWVLIEGVDQPIVKTATITEPRGNEEAQIFRPLKFNTTSVIKIAVEPVNPSELPKMLDGLRKVNKSYPSLTTKVEESGEHVILGTGELYLDCVMHDLRKMYSEIDIKVADPVVTFCETVVETSSLKCFAETPNKKNKITMIAEPLEKGLAEDIENEVVQITWNRKKLGEFFQTKYDWDLLAARSIWAFGPDATGPNILVDDTLPSEVDKALLGSVKDSIVQGFQWGTREGPLCDELIRNVKFKILDAVVAQEPLHRGGGQIIPTARRVVYSAFLMATPRLMEPYYFVEVQAPADCVSAVYTVLARRRGHVTQDAPIPGSPLYTIKAFIPAIDSFGFETDLRTHTQGQAFSLSVFHHWQIVPGDPLDKSIVIRPLEPQPAPHLAREFMIKTRRRKGLSEDVSISKFFDDPMLLELAKQDVVLNYPM

SEQ ID NO: 21719 - protein, 1154 aa, Homo sapiens
MVCGCSALLPLPNPRPTMPATPNFLANPSSSSRWIPLQPMPVAWAFVQKTSALLWLLLLGTSLSPAWGQAKIPLETVKLWADTFGGDLYNTVTKYSGSLLLQKKYKDVESSLKIEEVDGLELVRKFSEDMENMLRRKVEAVQNLVEAAEEADLNHEFNESLVFDYYNSVLINERDEKGNFVELGAEFLLESNAHFSNLPVNTSISSVQLPTNVYNKDPDILNGVYMSEALNAVFVENFQRDPTLTWQYFGSATGFFRIYPGIKWTPDENGVITFDCRNRGWYIQAATSPKDIVILVDVSGSMKGLRMTIAKHTITTILDTLGENDFINIIAYNDYVHYIEPCFKGILVQADRDNREHFKLLVEELMVKGVGVVDQALREAFQILKQFQEAKQGSLCNQAIMLISDGAVEDYEPVFEKYNWPDCKVRVFTYLIGREVSFADRMKWIACNNKGYYTQISTLADTQENVMEYLHVLSRPMVINHDHDIIWTEAYMDSKLLSSQAQSLTLLTTVAMPVFSKKNETRSHGILLGVVGSDVALRELMKLAPRYKLGVHGYAFLNTNNGYILSHPDLRPLYREGKKLKPKPNYNSVDLSEVEWEDQAESLRTAMINRETGTLSMDVKVPMDKGKRVLFLTNDYFFTDISDTPFSLGVVLSRGHGEYILLGNTSVEEGLHDLLHPDLALAGDWIYCITDIDPDHRKLSQLEAMIRFLTRKDPDLECDEELVREVLFDAVVTAPMEAYWTALALNMSEESEHVVDMAFLGTRAGLLRSSLFVGSEKVSDRKFLTPEDEASVFTLDRFPLWYRQASEHPAGSFVFNLRWAEGPESAGEPMVVTASTAVAVTVDKRTAIAAAAGVQMKLEFLQRKFWAATRQCSTVDGPCTQSCEDSDLDCFVIDNNGFILISKRSRETGRFLGEVDGAVLTQLLSMGVFSQVTMYDYQAMCKPSSHHHSAAQPLVSPISAFLTATRWLLQELVLFLLEWSVWGSWYDRGAEAKSVFHHSHKHKKQDPLQPCDTEYPVFVYQPAIREANGIVECGPCQKVFVVQQIPNSNLLLLVTDPTCDCSIFPPVLQEATEVKYNASVKCDRMRSQKLRRRPDSCHAFHPEVRVEADRGWAGFSSPNPLCLGLCPCRQEHIGMPMNTPVPVLLGGNIRVYAL

SEQ ID NO: 21720 - protein, 213 aa, Homo sapiens
MDTERVGDGKQHRRKQSQRLRWPCCLALVPDRHPSQLSSCTLCLLAAASQWESWAHFSKWHTEASTGTHLGKAKAEGLGCTVKNTPQLSICEPSHFGPSFVHSPHLLVDHDHRAGAATGRGQAGPSRASSVSPTFCPPTTSHHPVCAKGTDPVLVLQEEEQDLDGEKGPSSEGPEEEDGEGFSFKYSPGKLRGNQYKKMMTKEELEEEQRTEE

SEQ ID NO: 21721 - protein, 773 aa, Homo sapiens
DTPSKFDPINYLGEYLIRNNPNYIKDPGMSGYQRLMKEVTEDLKIYVPDTICNRVSKMKENVKQNRKQRESIDKIIVKVANTRKQALQEQFDEWILDPKGMIPKSVIQNVLQEFFQNPDFKLGSHCKQLDITDSTEPRLNKMEFTEYISSHIKDLKSEMFEELLKHLCHSADEFREVIKADMRRQMFAELFLHCDHGKVGFLDRQRTLALLELFYDHSSQMLRSLLRNPRQWPFIEFEEINLTELWGDMDNQKHIYEGFDKVLLEMNTLLSANHASKTQSKLLESPDQPKLNEQRTSTPSPNPPEQQRGVTAEQGPQRISIEEQQQGKKPTAEQELYIESVIEPGTHTESTLEQGSSRRLLTEQETHRESTTEQGQHKGSIEGQGPRRVSVSEQGSSRESVAEQGSRRESIAEQDRHKGSVAEQGSRRMSAAEQGSLRESVIEEPYQKSEQGPYGEIISEEQEDIGSTSQSRKDSILKSTKYGEPITSEYIEVPLQEKRSWEQTYEEEIFLSSELQEEVPTLSRKDHFPETTKKEVQKDKPCEPKSQKIEGKSWSGEFFTCNWKMKYVTFEDEEQANLIYGNSRFTDLHSIIRNIQSCKEVKGRTAFNGVSFNLLQFVQLLETFVGEDAPLSVSETLTSFFKEGYVETEQEKMNALEQFSQNAFQVRQRLLLEAIFQKWDSDGSGFLDLKEVDELLYTYKEGMEKESMKKDHSRTEVWKFGNVVIEHLYHWIHICSALMKITKQLNSGITPPLPSKTDNYMYAKMPGEGLQEK

SEQ ID NO: 21722 - protein, 799 aa, Homo sapiens
ASGGCVRPARPERRLRSERAGVVRELCAQPGQVVAPGAVLVRLEGCSHPVVMKGLCAECGQDLTQLQSKNGKQQVPLSTATVSMVHSVPELMVSSEQAEQLGREDQQRLHRNRKLVLMVDLDQTLIHTTEQHCQQMSNKGIFHFQLGRGEPMLHTRLRPHCKDFLEKIAKLYELHVFTFGSRLYAHTIAGFLDPEKKLFSHRILSRDECIDPFSKTGNLRNLFPCGDSMVCIIDDREDVWKFAPNLITVKKYVYFQGTGDMNAPPGSRESQTRKKVNHSRGTEVSEPSPPVRDPEGVTQAPGVEPSNGLEKPARELNGSEAATPRDSPRPGKPDERDIWPPAQAPTSSQELAGAPEPQGSCAQGGRVAPGQRPAQGATGTDLDFDLSSDSESSSESEGTKSSSSASDGESEGKRGRQKPKAAPEGAGALAQGSSLEPGRPAAPSLPGEAEPGAHAPDKEPELGGQEEGERDGLCGLGNGCADRKEAETESQNSELSGVTAGESLDQSMEEEEEEDTDEDDHLIYLEEILVRVHTDYYAKYDRYLNKEIEEAPDIRKIVPELKSKVLADVAIIFSGLHPTNFPIEKTREHYHATALGAKILTRLVLSPDAPDRATHLIAARAGTEKVLQAQECGHLHVVNPDWLWSCLERWDKVEEQLFPLRDDHTKAQRENSPAAFPDREGVPPTALFHPMPVLPKAQPGPEVRIYDSNTGKLIRTGARGPPAPSSSLPIRQEPSSFRAVPPPQPQMFGEELPDAQDGEQPGPSRRKRQPSMSETMPLYTLCKEDLESMDKERPQEEAE

SEQ ID NO: 21723 - protein, 1133 aa, Homo sapiens
MAPKTKKGCKVTLPEKPVKLASHTRDTTGVSQMFPSSKARTKSLLGDDVFSTMAGLEEADAEVSGISEADPQALLQAMKDLDGMDADILGLKKSNSAPSKKAAKDPGKGELPNHPKPAGGAIPTKKSLPSPSSSGHQNRRFSSEDLEDPLRGLLSYDEGGITKQPPVTQSKTASDKSPSTVRDQGPSIPLTPGDTPIRKKEELLFDDGDDIMATLGFGDSPKAEKRQIGDQEGPRPARSTLDELLGRGMATKLLARPGTGEHREFKLDKKYQRPQDSEDMWGDEDFTFGAYQPTVVSSEGRQSRRQSVSRFFADSGADPKGEPGSKQSPPMASSPIQPRKGGADWLGLKDEDLDLFPASPTREAHRESSVPVTPSVPPPASQHSTPAGLPPSRAKPPTEGAGSPAKASQASKLRASKEEKEDWLSHALSRKKSQGLAREQHAGTSEGLHLAGTAGHPPSGSQPLTSTQGLEHAAAGGSSGTTARERPCVRPGVSGSPVTQNHAASALPTGSPKRGTAPGDLSATEPATCFPSTQKPTEPSVPVQPLLPESLARSLLPSTEYQKQLLAAQVQLQCSPAELQAELLHSQARLAELEAQVRKLELERAQHELLLGSLQQQHQADLELIESAHRSRIKVLETSYQQREERLRRENEELSARYLSQCQEAEQARAELTAQHQRRLAAIAQEKDQEMERLRELQRASILDMRRDHEEQLQRLKLLKDREVDAATSATSHTRSLNSIIHQMEKFSSSLHELSSRVEASHLTTSQERELGIRQRDEQLRALQERLGQQQRDMEEERSRQQEVIGKMEARLNEQSRLLEQERWRVTAEQSKAESMQRALEEQRKVTAQQMAMERAELERAKSALLEEQKSVMLKCGEERRRLAAEWAEFSAQQKLSKERAEREAERALQVDTQREGTLISLAKQAELKIRASELRAEEKQLAAERAALEQERQELRLEKERINATALRVKLRAEEVESMSKVASEKYEEGERALREAQQVQAEQQARLQAVQQQQERLRKQEQHMHQEHLSLAQQRLQLDRARQDLPSSLVGLFPRAQGPAASSQSALMPPAPTTRWCSQPPTGLDPSPLHLHARLALLRHMAEQDRDFLENEQFFLETLKKGSYNLTSHSA

SEQ ID NO: 21724 - protein, 829 aa, Homo sapiens
MTIPDVFPHLPLIAITRNPVFPRFIKIIEVKNKKLVELLRRKVRLAQPYVGVFLKRDDSNESDVVESLDEIYHTGTFAQIHEMQDLGDKLRMIVMGHRRVHISRQLEVEPEEPEAENKHKPRRKSKRGKKEAEDELSARHPAELAMEPTPELPAEVLMVEALTAEIVKTIRDIIALNPLYRESVLQMMQAGQRVVDNPIYLSDMGAALTGAESHELQDVLEETNIPKRLYKALSLLKKEFELSKLQQRLGREVEEKIKQTHRKYLLQEQLKIIKKELGLEKDDKDAIEEKFRERLKELVVPKHVMDVVDEELSKLGLLDNHSSEFNVTRNYLDWLTSIPWGKYSNENLDLARAQAVLEEDHYGMEDVKKRILEFIAVSQLRGSTQGKILCFYGPPGVGKTSIARSIARALNREYFRFSVGGMTDVAEIKGHRRTYVGAMPGKIIQCLKKTKTENPLILIDEVDKIGRGYQGDPSSALLELLDPEQNANFLDHYLDVPVDLSKVLFICTANVTDTIPEPLRDRMEMINVSGYVAQEKLAIAERYLVPQARALCGLDESKAKLSSDVLTLLIKQYCRESGVRNLQKQVEKVLRKSAYKIVSGEAESVEVTPENLQDFVGKPVFTVERMYDVTPPGVVMGLAWTAMGGSTLFVETSLRRPQDKDAKGDKDGSLEVTGQLGEVMKESARIAYTFARAFLMQHAPANDYLVTSHIHLHVPEGATPKDGPSAGCTIVTALLSLAMGRPVRQNLAMTGEVSLTGKILPVGGIKEKTIAAKRAGVTCIVLPAENKKDFYDLAAFITEGLEVHFVEHYREIFDIAFPDEQAEALAVER

SEQ ID NO: 21725 - protein, 178 aa, Homo sapiens
MNPIALGSRWLAYAENKLIRCHQSRGGACGDNIQSYTATVISAAKTLKSGLTMVGKVVTQLTGTLPSGVTEDDVAIHSNSRRSPLVPGIITVIDTETVGEGQVLVSEDSDSDGIVAHFPAHEKPVCCMAFNTSGMLLVTTDTLGHDFHVFQILTHPWSSSQCAVHHLYTLHRGETEAK

SEQ ID NO: 21726 - protein, 220 aa, Homo sapiens
MKSVIYHALSQKEANDSDVQPSGAQRAEAFVRAFLKRSTPRMSPQAREDQLQRKAVVLEYFTRHKRKEKKKKAKGLSARQRRELRLFDIKPEQQRYSLFLPLHELWKQYIRDLCSGLKPDTQPQMIQAKLLKADLHGAIISVTKSKCPSYVGITGILLQETKHIFKIITKEDRLKVIPKLNCVFTVETDGFISYIYGSKFQLRSSERSAKKFKAKGTIDL

SEQ ID NO: 21727 - protein, 677 aa, Homo sapiens
MKPVSGHPFLKKCTIESIFPGFASQHMLMRSLNTVALVPIMYSWSPLQQNFMVEDETVLCNIPYMGDEVKEEDETFIEELINNYDGKVHGEEEMIPGSVLISDAVFLELVDALNQYSDEEEEGHNDTSDGKQDDSKEDLPVTRKRKRHAIEGNKKSSKKQFPNDMIFSAIASMFPENGVPDDMKERYRELTEMSDPNALPPQCTPNIDGPNAKSVQREQSLHSFHTLFCRRCFKYDCFLHPFHATPNVYKRKNKEIKIEPEPCGTDCFLLLEGAKEYAMLHNPRSKCSGRRRRRHHIVSASCSNASASAVAETKEGDSDRDTGNDWASSSSEANSRCQTPTKQKASPAPPQLCVVEAPSEPVEWTGAEESLFRVFHGTYFNNFCSIARLLGTKTCKQVFQFAVKESLILKLPTDELMNPSQKKKRKHRLWAAHCRKIQLKKDNSSTQVYNYQPCDHPDRPCDSTCPCIMTQNFCEKFCQCNPDCQNRFPGCRCKTQCNTKQCPCYLAVRECDPDLCLTCGASEHWDCKVVSCKNCSIQRGLKKHLLLAPSDVAGWGTFIKESVQKNEFISEYCGELISQDEADRRGKVYDKYMSSFLFNLNNDFVVDATRKGNKIRFANHSVNPNCYAKVVMVNGDHRIGIFAKRAIQAGEELFFDYRYSQADALKYVGIERETDVL

SEQ ID NO: 21728 - protein, 255 aa, Homo sapiens
MILGYRLSPFGTSPPPPRPDWGGRRRLRSSPLPIGFRAKSRGACAAAAASAEASEMPARTAPARVPTLAVPAISLPDDVRRRLKDLERDSLTEKECVKEKLNLLHEFLQTEIKNQLCDLETKLRKEELSEEGYLAKVKSLLNKDLSLENGAHAYNREVNGRLENGNQARSEARRVGMADANSPPKPLSKPRTPRRSKSDGEAKPEPSPSPRITRKSTRQTTITSHFAKGPAKRKPQEESERAKSDESIKEEDKDQ

SEQ ID NO: 21729 - protein, 765 aa, Homo sapiens
MLRSTSTVTLLSGGAARTPGAPSRRANVCRLRLTVPPESPVPEQCEKKIERKEQLLDLSNGEPTRKLPQGVVYGVVRRSDQNQQKEMVVYGWSTSQLKEEMNYIKDVRATLEKVRKRMYGDYDEMRQKIRQLTQELSVSHAQQEYLENHIQTQSSALDRFNAMNSALASDSIGLQKTLVDVTLENSNIKDQIRNLQQTYEASMDKLREKQRQLEVAQVENQLLKMKVESSQEANAEVMREMTKKLYSQYEEKLQEEQRKHSAEKEALLEETNSFLKAIEEANKKMQAAEISLEEKDQRIGELDRLIERMEKERHQLQLQLLEHETEMSGELTDSDKERYQQLEEASASLRERIRHLDDMVHCQQKKVKQMVEEIESLKKKLQQKQLLILQLLEKISFLEGENNELQSRLDYLTETQAKTEVETREIGVGCDLLPRKFICKLPDKGKKIFDSFAKLKAAIAECEEVRRKSELFNPVSLDCKLRQKAIAEVDVGTDKAQNSDPILDTSSLVPGCSSVDNIKSSQTSQNQGLGRPTLEGDEETSEVEYTVNKGPASSNRDRVPPSSEASEHHPRHRVSSQAEDTSSSFDNLFIDRLQRITIADQGEQQSEENASTKNLTGLSSGTEKKPHYMEVLEMRAKNPVPQLRKFKTNVLPFRQNDSSSHCQKSGSPISSEERRRRDKQHLDDITAARLLPLHHMPTQLLSIEESLALQKQQKQNYEEMQAKLAAQKLAERLNIKMRSYNPEGESSGRYREVRDEDDDWSSDEF

SEQ ID NO: 21730 - protein, 142 aa, Homo sapiens
PCSFVAIGILVAFFLLIQACPWTYYVYGLLPLPIWYAVLREFQVIQDLVVSVLTYPLSHFVGYLLAFTLGIEVLVLSFFYRYMLTAGLTAFAAWPFLTRLWTRAKMTSLSWTFFSLLLAVFPLMPVVGRKPDISLVILKECI

SEQ ID NO: 21731 - protein, 986 aa, Homo sapiens
MAESFFSDFGLLWYLKELRKEEFWKFKELLKQPLEKFELKPIPWAELKKASKEDVAKLLDKHYPGKQAWEVTLNLFLQINRKDLWTKAQEEMRNKLNPYRKHMKETFQLIWEKETCLHVPEHFYKETMKNEYKELNDAYTAAARRHTVVLEGPDGIGKTTLLRKVMLDWAEGNLWKDRFTFVFFLNVCEMNGIAETSLLELLSRDWPESSEKIEDIFSQPERILFIMDGFEQLKFNLQLKADLSDDWRQRQPMPIILSSLLQKKMLPESSLLIALGKLAMQKHYFMLRHPKLIKLLGFSESEKKSYFSYFFGEKSKALKVFNFVRDNGPLFILCHNPFTCWLVCTCVKQRLERGEDLEINSQNTTYLYASFLTTVFKAGSQSFPPKVNRARLKSLCALAAEGIWTYTFVFSHGDLRRNGLSESEGVMWVGMRLLQRRGDCFAFMHLCIQEFCAAMFYLLKRPKDDPNPAIGSITQLVRASVVQPQTLLTQVGIFMFGISTEEIVSMLETSFGFPLSKDLKQEITQCLESLSQCEADREAIAFQELFIGLFETQEKEFVTKVMNFFEEVFIYIGNIEHLVIASFCLKHCQHLTTLRMCVENIFPDDSGCISDYNEKLVYWRELCSMFITNKNFQILDMENTSLDDPSLAILCKALAQPVCKLRKLIFTSVYFGHDSELFKAVLHNPHLKLLSLYGTSLSQSDIRHLCETLKHPMCKIEELILGKCDISSEVCEDIASVLACNSKLKHLSLVENPLRDEGMTLLCEALKHSHCALERLMLMYCCLTSVSCDSISEVLLCSKSLSLLDLGSNALEDNGVASLCAALKHPGCSIRELWLMGCFLTSDSCKDIAAVLICNGKLKTLKLGHNEIGDTGVRQLCAALQHPHCKLECLGLQTCPITRACCDDIAAALIACKTLRSLNLDWIALDADAVVVLCEALSHPDCALQMLGNCQKSLGDTVAPGENHCSIKHLLLTLPINMQRQLRLQK

SEQ ID NO: 21732 - protein, 453 aa, Homo sapiens
MQPTATMATAATTTTTTTATVALTTSWDNATGRPTAEPDPILDNYVLLVVVMSLFVGGTLVVLSGVLLLCKRCWDVHQRLNRAMEEAEKTTTTYLDNGTHPAQDPDFRGEDPECQDAETERFLSTSSTGRRVSFNEAALFEQSRKTQDKGRRYTLTEGDFHHLKNARLTHLHLPPLKIVTIHECDSGEASSATTPHPATSPKATLAIFQPPGKALTGRSVGPSSALPGDPYNSAAGATDFAEISPSASSDSGEGTSLDAGTRSTKAGGPGAAAGPGEAGPGSGAGTVLQFLTRLRRHASLDGASPYFKVKKWKLEPSQRAASLDTRGSPKRHHFQRQRAASESTEQEEGDAPQEDFIQYIARAGDAVAFPHPRPFLASPPPALGRYFSVDGGARGGPVGPCPPSPPPRRPRERSPGPVDTRSPASSGKAPPRGGLTGATSPAWTRGGKQGETG

SEQ ID NO: 21733 - protein, 121 aa, Homo sapiens
MAVTAVTATAASDRMESDSDSDKSSDNSGLKRKTPALKMSVSKRARKASSDLDQASVSPSEEENSESSSESEKTSDQDFTPEKKAAVRAPRRGPLGGRKKKKAPSASDSDSKADSDGAKPE

SEQ ID NO: 21734 - protein, 142 aa, Homo sapiens
SFRTILRDLTRLQPHNLADVLTVNPDSPASDPTVFHKRYLKKIRDLGEGHFGKVSLYCYDPTNDGTGEMVAVKALKADCGPQHRSGWKQEIDILRTLYHEHIIKYKGCCEDQGLSSHEELLGDRGVLSPNLREPHTHSEDSP

SEQ ID NO: 21735 - protein, 453 aa, Homo sapiens
MLKMVLTENPNQEIATSLEFLLLQNSPGSLRAQQRMSYYGSSYHIINADAKYPGYPPEHIIAEKRRARRRLLHKDGSCNVYFKHIFGEWGSYVVDIFTTLVDTKWRHMFVIFSLSYILSWLIFGSVFWLIAFHHGDLLNDPDITPCVDNVHSFTGAFLFSLETQTTIGYGYRCVTEECSVAVLMVILQSILSCIINTFIIGAALAKMATARKRAQTIRFSYFALIGMRDGKLCLMWRIGDFRPNHVVEGTVRAQLLRYTEDSEGRMTMAFKDLKLVNDQIILVTPVTIVHEIDHESPLYALDRKAVAKDNFEILVTFIYTGDSTGTSHQSRSSYVPREILWGHRFNDVLEVKRKYYKVNCLQFEGSVEVYAPFCSAKQLDWKDQQLHIEKAPPVRESCTSDTKARRRSFSAVAIVSSCENPEETTTSATHEYRETPYQKALLTLNRISVESQM

SEQ ID NO: 21736 - protein, 524 aa, Homo sapiens
SSSLGIPDADCCRRHMEFRKLRGMETRPPANTARLQPPRDLRSSSPRSGTPGRMGRGLECGQGPQGSYLSPFRKQLSESSDDDYDDVDIPTPAEDTPPPLPPKPKFRSPSDEGPGSMGDDGQLSPGVLVRCASGPPPNSPRPGPPPSTSSPHLTAHSEPSLWNPPSRELDKPPLLPPKKEKMKRKGCALLVKLFNGCPLRIHSTAAWTHPSTKDQHLLLGAEEGIFILNRNDQEATLEMLFPSRTTWVYSINNVLMSLSGKTPHLYSHSILGLLERKETRAGNPIAHISPHRLLARKNMVSTKIQDTKGCRACCVAEGASSGGPFLCGALETSVVLLQWYQPMNKFLLVRQVLFPLPTPLSVFALLTGPGSELPAVCIGVSPGRPGKSVLFHTVRFGALSCWLGEMSTEHRGPVQVTQVEEDMVMVLMDGSVKLVTPEGSPVRGLRTPEIPMTEAVEAVAMVGGQLQAFWKHGVQVWALGSDQLLQELRDPTLTFRLLGSPRPVVVETRPVDDPTAPSNLYIQE

SEQ ID NO: 21737 - protein, 673 aa, Homo sapiens
MLRMRVPALLVLLFCFRGRAGPSPHFLQQPEDLVVLLGEEARLPCALGAYWGLVQWTKSGLALGGQRDLPGWSRYWISGNAANGQHDLHIRPVELEDEASYECQATQAGLRSRPAQLHVLVPPEAPQVLGGPSVSLVAGVPANLTCRSRGDARPTPELLWFRDGVLLDGATFHQTLLKEGTPGSVESTLTLTPFSHDDGATFVCRARSQALPTGRDTAITLSLQYPPEVTLSASPHTVQEGEKVIFLCQATAQPPVTGYRWAKGGSPVLGARGPRLEVVADASFLTEPVSCEVSNAVGSANRSTALDVLFGPILQAKPEPVSVDVGEDASFSCAWRGNPLPRVTWTRRGGAQVLGSGATLRLPSVGPEDAGDYVCRAEAGLSGLRGGAAEARLTVNAPPVVTALHSAPAFLRGPARLQCLVFASPAPDAVVWSWDEGFLEAGSQGRFLVETFPAPESRGGLGPGLISVLHISGTQESDFSRSFNCSARNRLGEGGAQASLGRRASASFSEQKNLMRIPGSSDGSSSRGPEEEETGSREDRGPIVHTDHSDLVLEEEGTLETKDPTNGYYKVRGVSVSLSLGEAPGGGLFLPPPSPLGPPGTPTFYDFNPHLGMVPPCRLYRARAGYLTTPHPRAFTSYIKPTSFGPPDLAPGTPPFPYAAFPTPSHPRLQTHV

SEQ ID NO: 21738 - protein, 225 aa, Homo sapiens
MRKTRLWGLLWMLFVSELRAATKLTEEKYELKEGQTLDVKCDYTLEKFASSQKAWQIIRDGEMPKTLACTERPSKNSHPVQVGRIILEDYHDHGLLRVRMVNLQVEDSGLYQCVIYQPPKEPHMLFDRIRLVVTKGFSGTPGSNENSTQNVYKIPPTTTKALCPLYTSPRTVTQAPPKSTADVSTPDSEINLTNVTDIIRYSFQVPGPLVWTLSPLFPSLCAERM

SEQ ID NO: 21739 - protein, 573 aa, Homo sapiens
MPPYFAMENAENHKIKAYTQLKLSGLLPSAYWIGQAVVDIPLFFIILILMLGSLLAFHYGLYFYTVKFLAVVFCLIGYVPSVILFTYIASFTFKKILNTKEFWSFIYSVAALACIAITEITFFMGYTIATILHYAFCIIIPIYPLLGCLISFIKISWKNVRKNVDTYNPWDRLSVAVISPYLQCVLWIFLLQYYEKKYGGRSIRKDPFFRNLSTKSKNRKLPEPPDNEDEDEDVKAERLKVKELMGCQCCEEKPSIMVSNLHKEYDDKKDFLLSRKVKKVATKYISFCVKKGEILGLLGPNGAGKSTIINILVGDIEPTSGQVFLGDYSSETSEDDDSLKCMGYCPQINPLWPDTTLQEHFEIYGAVKGMSASDMKEVISRITHALDLKEHLQKTVKKLPAGIKRKLCFALSMLGNPQITLLDEPSTGMDPKAKQHMWRAIRTAFKNRKRAAILTTHYMEEAEAVCDRVAIMVSGQLRCIGTVQHLKSKFGKGYFLEIKLKDWIENLEVDRLQREIQYIFPNASRQESFSSILAYKIPKEDVQSLSQSFFKLEEAKHAFAIEEYSFSQATLEQ

SEQ ID NO: 21740 - protein, 1112 aa, Homo sapiens
MVCGCSALLPLPNPRPTMPATPNFLANPSSSSRWIPLQPMPVAWAFVQKTSALLWLLLLGTSLSPAWGQAKIPLETVKLWADTFGGDLYNTVTKYSGSLLLQKKYKDVESSLKIEEVDGLELVRKFSEDMENMLRRKVEAVQNLVEAAEEADLNHEFNESLVFDYYNSVLINERDEKGNFVELGAEFLLESNAHFSNLPVNTSISSVQLPTNVYNKDPDILNGVYMSEALNAVFVENFQRDPTLTWQYFGSATGFFRIYPGIKWTPDENGVITFDCRNRGWYIQAATSPKDIVILVDVSGSMKGLRMTIAKHTITTILDTLGENDFINIIAYNDYVHYIEPCFKGILVQADRDNREHFKLLVEELMVKGVGVVDQALREAFQILKQFQEAKQGSLCNQAIMLISDGAVEDYEPVFEKYNWPDCKVRVFTYLIGREVSFADRMKWIACNNKGYYTQISTLADTQENVMEYLHVLSRPMVINHDHDIIWTEAYMDSKLLSSQAQSLTLLTTVAMPVFSKKNETRSHGILLGVVGSDVALRELMKLAPRYKYREGKKLKPKPNYNSVDLSEVEWEDQAESLRTAMINRETGTLSMDVKVPMDKGKRVLFLTNDYFFTDISDTPFSLGVVLSRGHGEYILLGNTSVEEGLHDLLHPDLALAGDWIYCITDIDPDHRKLSQLEAMIRFLTRKDPDLECDEELVREVLFDAVVTAPMEAYWTALALNMSEESEHVVDMAFLGTRAGLLRSSLFVGSEKVSDRKFLTPEDEASVFTLDRFPLWYRQASEHPAGSFVFNLRWAEGPESAGEPMVVTASTAVAVTVDKRTAIAAAAGVQMKLEFLQRKFWAATRQCSTVDGPCTQSCEDSDLDCFVIDNNGFILISKRSRETGRFLGEVDGAVLTQLLSMGVFSQVTMYDYQAMCKPSSHHHSAAQPLVSPISAFLTATRWLLQELVLFLLEWSVWGSWYDRGAEAKSVFHHSHKHKKQDPLQPCDTEYPVFVYQPAIREANGIVECGPCQKVFVVQQIPNSNLLLLVTDPTCDCSIFPPVLQEATEVKYNASVKCDRMRSQKLRRRPDSCHAFHPEENAQDCGGASDTSASPPLLLLPVCAWGLLPQLLR

SEQ ID NO: 21741 - protein, 833 aa, Homo sapiens
MAVEDSTLQVVVRVRPPTPRELDSQRRPVVQVVDERVLVFNPEEPDGGFPGLKWGGTHDGPKKKGKDLTFVFDRVFGEAATQQDVFQHTTHSVLDSFLQGYNCSVFAYGATGAGKTHTMLGREGDPGIMYLTTVELYRRLEARQQEKHFEVLISYQEVYNEQIHDLLEPKGPLAIREDPDKGVVVQGLSFHQPASAEQLLEILTRGNRNRTQHPTDANATSSRSHAIFQIFVKQQDRVPGLTQAVQVAKMSLIDLAGSERASSTHAKGERLREGANINRSLLALINVLNALADAKGRKTHVPYRDSKLTRLLKDSLGGNCRTVMIAAISPSSLTYEDTYNTLKYADRAKEIRLSLKSNVTSLDCHISQYATICQQLQAEVAALRKKLQVYEGGGQPPPQDLPGSPKSGPPPEHLPSSPLPPHPPSQPCTPELPAGPRALQEESLGMEAQVERAMEGNSSDQEQSPEDEDEGPAEEVPTQMPEQNPTHALPESPRLTLQPKPVVGHFSARELDGDRSKQLALKVLCVAQRQYSLLQAANLLTPDMITEFETLQQLVQEEKIEPGAEALRTSGLARGAPLAQELCSESIPVPSPLCPEPPGYTGPVTRTMARRLSGPLHTLGIPPGPNCTPAQGSRWPMEKKRRRPSALEADSPMAPKRGTKRQRQSFLPCLRRGSLPDTQPSQGPSTPKGERASSPCHSPRVCPATVIKSRVPLGPSAMQNCSTPLALPTRDLNATFDLSEEPPSKPSFHECIGWDKIPQELSRLDQPFIPRAPVPLFTMKGPKPTSSLPGTSACKKKRVASSSVSHGRSRIARLPSSTLKRPAGPLVLPGDWH

SEQ ID NO: 21742 - protein, 432 aa, Homo sapiens
RPHSPLPGHLGSSPLDSPRNFSPNTPAHFSFASSRRADGRRWSLASLPSSGYGTNTPSSTVSSSCSSQERLHQLPYQPTVDELHFLSKHFGSTESITDEDGGRRSPAVRPRSRSLSPGRSPSSYDNEIVMMNHVYKERFPKATAQMEEKLRDFTRAYEPDSVLPLADGVLSFIHHQIIELARDCLTKSRDGLITTVYFYELQENLEKLLQDAYERSESLEVAFVTQLVKKLLIIISRPARLLECLEFNPEEFYHLLEAAEGHAKEGHLVKTDIPRYIIRQLGLTRDPFPDVVHLEEQDSGGSNTPEQDDLSEGRSSKAKKPPGENDFDTIKLISNGAYGAVYLVRHRDTRQRFAMKKINKQNLILRNQIQQAFVERDILTFAENPFVVGMFCSFETRRHLCMVMEYVEGVAACGAAGKMGPCSLVRAAGWPA

SEQ ID NO: 21743 - protein, 242 aa, Homo sapiens
MWKLLRGLSREAETFKEQGNAYYAKKDYNEAYNYYTKAIDMCPKNASYYGNRAATLMMLGRFREALGDAQQSVRLDDSFVRGHLREGKCHLSLGNAMAACRSFQRALELDHKNAQAQQEFKNANAVMEYEKIAETDFEKRDFRKVVFCMDRALEFAPACHRFKILKAECLAMLGRYPEAQSVASDILRMDSTNADALYVRGLCLYYEDCIEKAVQFFVQALRMAPDHEKACIACRNAKALKA

SEQ ID NO: 21744 - protein, 206 aa, Homo sapiens
MPLPGGLWWLLCCRRGFTLLHRDYGDGELSGDGDEDEDEETFELRTPSPAGGGRGGSVEEGKMRRRGCLGAWQNELTSPVSKMGKLRPGDGKRLAQGSTGPLEVTLTQPVRSGPVSNRLQSWEETWSLIPEKGLPEDDPDIVVKGWLYREPRGGGARPWLPPRRAWFVLTRDSLDQFSSSGKGARRLGSLVLTSLCSVTGPERRRK

SEQ ID NO: 21745 - protein, 132 aa, Homo sapiens
MARTKQTARKSTGGKAPRKQLATKAARKSAPSTGGVKKPHRYRPGTVALREIRRYQKSTELLIRKLPFQRLVREIAQDFKTDLRFQSAAIGALQEASEAYLVGLFEDTNLCAIHAKRVTIMPKDIQLARRIR

SEQ ID NO: 21746 - protein, 195 aa, Homo sapiens
MADTPRDAGLKQAPASRNEKAPVDFGYVGIDSILEQMRRKAMKQGFEFNIMVVGQSGLGKSTLINTLFKSKISRKSVQPTSEERIPKTIEIKSITHDIEEKGVRMKLTVIDTPGFGDHINNENCWQPIMKFINDQYEKYLQEEVNINRKKRIPDTRVHCCLYFIPATGHSLRPLDIEFMKRLSKVVNIVPVIAKA

SEQ ID NO: 21747 - protein, 928 aa, Homo sapiens
MAVRFQVADMEELTIWEQHTATLSKDPRRGFGIAISGGRDRPGGSMVVSDVVPGGPAEGRLQTGDHIVMVNGVSMENATSAFAIQILKTCTKMANITVKRPRRIHLPATKASPSSPGRQDSDEDDGPQRVEEVDQGRGYDGDSSSGSGRSWDERSRRPRPGRRGRAGSHGRRSPGGGSEANGLALVSGFKRLPRQDVQMKPVKSVLVKRRDSEEFGVKLGSQIFIKHITDSGLAARHRGLQEGDLILQINGVSSQNLSLNDTRRLIEKSEGKLSLLVLRDRGQFLVNIPPAVSDSDSSPLEDISDLASELSQAPPSHIPPPPRHAQRSPEASQTDSPVESPRLRRESSVDSRTISEPDEQRSELPRESSYDIYRVPSSQSMEDRGYSPDTRVVRFLKGKSIGLRLAGGNDVGIFVSGVQAGSPADGQGIQEGDQILQVNDVPFQNLTREEAVQFLLGLPPGEEMELVTQRKQDIFWKMVQSRVGDSFYIRTHFELEPSPPSGLGFTRGDVFHVLDTLHPGPGQSHARGGHWLAVRMGRDLREQERGIIPNQSRAEQLASLEAAQRAVGVGPGSSAGSNARAEFWRLRGLRRGAKKTTQRSREDLSALTRQGRYPPYERVVLREASFKRPVVILGPVADIAMQKLTAEMPDQFEIAETVSRTDSPSKIIKLDTVRVIAEKDKHALLDVTPSAIERLNYVQYYPIVVFFIPESRPALKALRQWLAPASRRSTRRLYAQAQKLRKHSSHLFTATIPLNGTSDTWYQELKAIIREQQTRPIWTAEDQLDGSLEDNLDLPHHGLADSSADLSCDSRVNSDYETDGEGGAYTDGEGYTDGEGGPYTDVDDEPPAPALARSSEPVQADESQSPRDRGRISAHQGAQVDSRHPQGQWRQDSMRTYEREALKKKFMRVHDAESSDEDGYDWGPATDL

SEQ ID NO: 21748 - protein, 82 aa, Homo sapiens
MVQKKPAELQGFHRSFKGQNPFELAFSLDQPDHGDSDFGLQCSARPDMPASQPIDIPDAKKRGKKKKRGRATDSFSGRFEDH

SEQ ID NO: 21749 - protein, 406 aa, Homo sapiens
MNNSGADEIGKLFVGGLDWSTTQETLRSYFSQYGEVVDCVIMKDKTTNQSRGFGFVKFKDPNCVGTVLASRPHTLDGRNIDPKPCTPRGMQPERTRPKEGWKGPRSDNSKSNKIFVGGIPHNCGETELREYFKKFGVVTEVVMIYDAEKQRPRGFGFITFEDEQSVDQAVNMHFHDIMGKKVEVKRAEPRDSKSQAPGQPGASQWGSRVVPNAANGWAGQPPPTWQQGYGPQGMWVPAGQAIGGYGPPPAGRGAPPPPPPFTSYIVSTPPGGFPPPQGFPQGYGAPPQFSFGYGPPPPPPDQFAPPGVPPPPATPGAAPLAFPPPPSQAAPDMSKPPTAQPDFPYGQYAGYGQDLSGFGQGFSDPSQQPPSYGGPSVPGSGGPPAGGSGFGRGQNHNVQGFHPYRR

SEQ ID NO: 21750 - protein, 763 aa, Homo sapiens
MAGWIQAQQLQGDALRQMQVLYGQHFPIEVRHYLAQWIESQPWDAIDLDNPQDRAQATQLLEGLVQELQKKAEHQVGEDGFLLKIKLGHYATQLQKTYDRCPLELVRCIRHILYNEQRLVREANNCSSPAGILVDAMSQKHLQINQTFEELRLVTQDTENELKKLQQTQEYFIIQYQESLRIQAQFAQLAQLSPQERLSRETALQQKQVSLEAWLQREAQTLQQYRVELAEKHQKTLQLLRKQQTIILDDELIQWKRRQQLAGNGGPPEGSLDVLQSWCEKLAEIIWQNRQQIRRAEHLCQQLPIPGPVEEMLAEVNATITDIISALVTSTFIIEKQPPQVLKTQTKFAATVRLLVGGKLNVHMNPPQVKATIISEQQAKSLLKNENTRNECSGEILNNCCVMEYHQATGTLSAHFRNMSLKRIKRADRRGAESVTEEKFTVLFESQFSVGSNELVFQVKGRVPFAVPDKVLWPQLCEALNMKFKAEVQSNRGLTKENLVFLAQKLFNNSSSHLEDYSGLSVSWSQFNRENLPGWNYTFWQWFDGVMEVLKKHHKPHWNDGAILGFVNKQQAHDLLINKPDGTFLLRFSDSEIGGITIAWKFDSPERNLWNLKPFTTRDFSIRSLADRLGDLSYLIYVFPDRPKDEVFSKYYTPVLAKAVDGYVKPQIKQVVPEFVNASADAGGSSATYMDQAPSPAVCPQAPYNMYPQNPDHVLDQDGEFDLDETMDVARHVEELLRRPMDSLDSRLSPPAGLFTSARGSLS

SEQ ID NO: 21751 - protein, 1910 aa, Homo sapiens
MAPTWGPGMVSVVGPMGLLVVLLVGGCAAEEPPRFIKEPKDQIGVSGGVASFVCQATGDPKPRVTWNKKGKKVNSQRFETIEFDESAGAVLRIQPLRTPRDENVYECVAQNSVGEITVHAKLTVLREDQLPSGFPNIDMGPQLKVVERTRTATMLCAASGNPDPEITWFKDFLPVDPSASNGRIKQLRSGALQIESSEETDQGKYECVATNSAGVRYSSPANLYVRVRRVAPRFSILPMSHEIMPGGNVNITCVAVGSPMPYVKWMQGAEDLTPEDDMPVGRNVLELTDVKDSANYTCVAMSSLGVIEAVAQITVKSLPKAPGTPMVTENTATSITITWDSGNPDPVSYYVIEYKSKSQDGPYQIKEDITTTRYSIGGLSPNSEYEIWVSAVNSIGQGPPSESVVTRTGEQAPASAPRNVQARMLSATTMIVQWEEPVEPNGLIRGYRVYYTMEPEHPVGNWQKHNVDDSLLTTVGSLLEDETYTVRVLAFTSVGDGPLSDPIQVKTQQGVPGQPMNLRAEARSETSITLSWSPPRQESIIKYELLFREGDHGREVGRTFDPTTSYVVEDLKPNTEYAFRLAARSPQGLGAFTPVVRQRTLQSKPSAPPQDVKCVSVRSTAILVSWRPPPPETHNGALVGYSVRYRPLGSEDPEPKEVNGIPPTTTQILLEALEKWTQYRITTVAHTEVGPGPESSPVVVRTDEDVPSAPPRKVEAEALNATAIRVLWRSPAPGRQHGQIRGYQVHYVRMEGAEARGPPRIKDVMLADAQEMVITNLQPETAYSITVAAYTMKGDGARSKPKVVVTKGAVLGRPTLSVQQTPEGSLLARWEPPAGTAEDQVLGYRLQFGREDSTPLATLEFPPSEDRYTASGVHKGATYVFRLAARSRGGLGEEAAEVLSIPEDTPRGHPQILEAAGNASAGTVLLRWLPPVPAERNGAIVKYTVAVREAGALGPARETELPAAAEPGAENALTLQGLKPDTAYDLQVRAHTRRGPGPFSPPVRYRTFLRDQVSPKNFKVKMIMKTSVLLSWEFPDNYNSPTPYKIQYNGLTLDVDGRTTKKLITHLKPHTFYNFVLTNRGSSLGGLQQTVTAWTAFNLLNGKPSVAPKPDADGFIMVYLPDGQSPVPVQSYFIVMVPLRKSRGGQFLTPLGSPEDMDLEELIQDISRLQRRSLRHSRQLEVPRPYIAARFSVLPPTFHPGDQKQYGGFDNRGLEPGHRYVLFVLAVLQKSEPTFAASPFSDPFQLDNPDPQPIVDGEEGLIWVIGPVLAVVFIICIVIAILLYKNKPDSKRKDSEPRTKCLLNNADLAPHHPKDPVEMRRINFQTPGMLSHPPIPIADMAEHTERLKANDSLKLSQEYESIDPGQQFTWEHSNLEVNKPKNRYANVIAYDHSRVILQPIEGIMGSDYINANYVDGYRCQNAYIATQGPLPETFGDFWRMVWEQRSATIVMMTRLEEKSRIKCDQYWPNRGTETYGFIQVTLLDTIELATFCVRTFSLHKNGSSEKREVRQFQFTAWPDHGVPEYPTPFLAFLRRVKTCNPPDAGPIVVHCSAGVGRTGCFIVIDAMLERIKPEKTVDVYGHVTLMRSQRNYMVQTEDQYSFIHEALLEAVGCGNTEVPARSLYAYIQKLAQVEPGEHVTGMELEFKRLANSKAHTSRFISANLPCNKFKNRLVNIMPYESTRVCLQPIRGVEGSDYINASFIDGYRQQKAYIATQGPLAETTEDFWRMLWENNSTIVVMLTKLREMGREKCHQYWPAERSARYQYFVVDPMAEYNMPQYILREFKVTDARDGQSRTVRQFQFTDWPEQGVPKSGEGFIDFIGQVHKTKEQFGQDGPISVHCSAGVGRTGVFITLSIVLERMRYEGVVDIFQTVKMLRTQRPAMVQTEDEYQFCYQAALEYLGSFDHYAT

SEQ ID NO: 21752 - protein, 536 aa, Homo sapiens
MESERDMYRQFQDWCLRTYGDSGKTKTVTRKKYERIVQLLNGSESSSTDNAKFKFWVKSKGFQLGQPDEVRGGGGGAKQVLYVPVKTTDGVGVDEKLSLRRVAVVEDFFDIIYSMHVETGPNGEQIRKHAGQKRTYKAISESYAFLPREAVTRFLMSCSECQKRMHLNPDGTDHKDNGKPPTLVTSMIDYNMPITMAYMKHMKLQLLNSQQDEDESSIESDEFDMSDSTRMSAVNSDLSSNLEERMQSPQNLHGQQDDDSAAESFNGNETLGHSSIASGGTHSREMGDSNSDGKTGLEQDEQPLNLSDSPLSAQLTSEYRIDDHNSNGKNKYKNLLISDLKMEREARENGSKSPAHSYSSYDSGKNESVDRGAEDLSLNRGDEDEDDHEDHDDSEKVNETDGVEAERLKAFNDESAPADKQCKPEATQATYSTSAVPGSQDVLYINGNGTYSYHSYRGLGGGLLNLNDASSSGPTDLSMKRQLATSSGSSSSSNSRPQLSPTEINAVRQLVAGYRESAAFLLRSADELENLILQQN

SEQ ID NO: 21753 - protein, 919 aa, Homo sapiens
MQECLTLWVFSPLALTDSGYTKTYQAHAKQKFSRLWSSKSVTEIHLYFEEEVKQEECDHLDRLFAPKEAGKQPRTVIIQGPQGIGKTTLLMKLMMAWSDNKIFRDRFLYTFYFCCRELRELPPTSLADLISREWPDPAAPITEIVSQPERLLFVIDSFEELQGGLNEPDSDLCGDLMEKRPVQVLLSSLLRKKMLPEASLLIAIKPVCPKELRDQVTISEIYQPRGFNESDRLVYFCCFFKDPKRAMEAFNLVRESEQLFSICQIPLLCWILCTSLKQEMQKGKDLALTCQSTTSVYSSFVFNLFTPEGAEGPTPQTQHQLKALCSLAAEGMWTDTFEFCEDDLRRNGVVDADIPALLGTKILLKYGERESSYVFLHVCIQEFCAALFYLLKSHLDHPHPAVRCVQELLVANFEKARRAHWIFLGCFLTGLLNKKEQEKLDAFFGFQLSQEIKQQIHQCLKSLGERGNPQGQVDSLAIFYCLFEMQDPAFVKQAVNLLQEANFHIIDNVDLVVSAYCLKYCSSLRKLCFSVQNVFKKEDEHSSTSDYSLICWHHICSVLTTSGHLRELQVQDSTLSESTFVTWCNQLRHPSCRLQKLGINNVSFSGQSVLLFEVLFYQPDLKYLSFTLTKLSRDDIRSLCDALNYPAGNVKELALVNCHLSPIDCEVLAGLLTNNKKLTYLNVSCNQLDTGVPLLCEALCSPDTVLVYLMLAFCHLSEQCCEYISEMLLRNKSVRYLDLSANVLKDEGLKTLCEALKHPDCCLDSLCLVKCFITAAGCEDLASALISNQNLKILQIGCNEIGDVGVQLLCRALTHTDCRLEILGLEECGLTSTCCKDLASVLTCSKTLQQLNLTLNTLDHTGVVVLCEALRHPECALQVLGLRKTDFDEETQALLTAEEERNPNLTITDDCDTITRVEI

SEQ ID NO: 21754 - protein, 210 aa, Homo sapiens
MTHMITHIGEKTSEDNQSGKALRKNFPHSFYKKSHAEGKMPKCVKHEKAFNQFPNLTRQNKTHTQEKLCECKDCWRTFLNQSSLKLHIRSHNGDKHYVCKECGKAFSNSSHLIGHGRIHSGEKPYVCKECGKAFTQSTGLKLHIRTHSGEKPYKCKECGKAFTHSSYLTDHTRIHSGKKPYVCMECGKAFTRSTGLILHMRIHTGEKPYE

SEQ ID NO: 21755 - protein, 369 aa, Homo sapiens
MEAEAADAPPGGVESALSCFSFNQDCTSLATGTKAGYKLFSLSSVEQLDQVHGSNEIPDVYIVERLFSSSLVVVVSHTKPRQMNVYHFKKGTEICNYSYSSNILSIRLNRQRLLVCLEESIYIHNIKDMKLLKTLLDIPANPTGLCALSINHSNSYLAYPGSLTSGEIVLYDGNSLKTVCTIAAHEGTLAAITFNASGSKLASASEKGTVIRVFSVPDGQKLYEFRRGMKRYVTISSLVFSMDSQFLCASSNTETVHIFKLEQVTNRQSTRRAFDLEWLHGKDVYGCYQLPPYPGVRHDASGQGFCHCTLELLRTEEHLYPLNDPEVATAASCVIQWTPLYVQFGSSGWRRVCLNQNPQLAWLRNNRRE

SEQ ID NO: 21756 - protein, 184 aa, Homo sapiens
MAKPDMIRKLEQGEELWTQRIFPSYSYLEEDGKTEDVLVKFKEYQDRHSRPLIFINHKKLIKERSNIYGKTFTLGKNRISKTILCEYKPDGKVLKNISELVIRNISPIKEKFGDSTGWEKSLLNTKHEKIHPAVNLHKQTERVLSGKQELIQHQKVQAPEQPFDHNECEKSFLMKGMLFTHTRA

SEQ ID NO: 21757 - protein, 616 aa, Homo sapiens
MAPRARRRRPLFALLLLCALLARLQVALQIAPPCTSEKHYEHLGRCCNKCEPGKYMSSKCTTTSDSVCLPCGPDEYLDSWNEEDKCLLHKVCDTGKALVAVVAGNSTTPRRCACTAGYHWSQDCECCRRNTECAPGLGAQHPLQLNKDTVCKPCLAGYFSDAFSSTDKCRPWTNCTFLGKRVEHHGTEKSDAVCSSSLPARKPPNEPHVYLPGLIILLLFASVALVAAIIFGVCYRKKGKALTANLWHWINEACGRLSGDKESSGDSCVSTHTANFGQQGACEGVLLLTLEEKTFPEDMCYPDQGGVCQGTCVGGGPYAQGEDARMLSLVSKTEIEEDSFRQMPTEDEYMDRPSQPTDQLLFLTEPGSKSTPPFSEPLEVGENDSLSQCFTGTQSTVGSESCNCTEPLCRTDWTPMSSENYLQKEVDSGHCPHWAASPSPNWADVCTGCRNPPGEDCEPLVGSPKRGPLPQCAYGMGLPPEEEASRTEARDQPEDGADGRLPSSARAGAGSGSSPGGQSPASGNVTGNSNSTFISSGQVMNFKGDIIVVYVSQTSQEGAAAAAEPMGRPVQEETLARRDSFAGNGPRFPDPCGGPEGLREPEKASRPVQEQGGAKA

SEQ ID NO: 21758 - protein, 842 aa, Homo sapiens
MSHPGVTTVMAVEDSTLQVVVRVRPPTPRELDSQRRPVVQVVDERVLVFNPEEPDGGFPGLKWGGTHDGPKKKGKDLTFVFDRVFGEAATQQDVFQHTTHSVLDSFLQGYNCSVFAYGATGAGKTHTMLGREGDPGIMYLTTVELYRRLEARQQEKHFEVLISYQEVYNEQIHDLLEPKGPLAIREDPDKGVVVQGLSFHQPASAEQLLEILTRGNRNRTQHPTDANATSSRSHAIFQIFVKQQDRVPGLTQAVQVAKMSLIDLAGSERASSTHAKGERLREGANINRSLLALINVLNALADAKGRKTHVPYRDSKLTRLLKDSLGGNCRTVMIAAISPSSLTYEDTYNTLKYADRAKEIRLSLKSNVTSLDCHISQYATICQQLQAEVAALRKKLQVYEGGGQPPPQDLPGSPKSGPPPEHLPSSPLPPHPPSQPCTPELPAGPRALQEESLGMEAQVERAMEGNSSDQEQSPEDEDEGPAEEVPTQMPEQNPTHALPESPRLTLQPKPVVGHFSARELDGDRSKQLALKVLCVAQRQYSLLQAANLLTPDMITEFETLQQLVQEEKIEPGAEALRTSGLARGAPLAQELCSESIPVPSPLCPEPPGYTGPVTRTMARRLSGPLHTLGIPPGPNCTPAQGSRWPMEKKRRRPSALEADSPMAPKRGTKRQRQSFLPCLRRGSLPDTQPSQGPSTPKGERASSPCHSPRVCPATVIKSRVPLGPSAMQNCSTPLALPTRDLNATFDLSEEPPSKPSFHECIGWDKIPQELSRLDQPFIPRAPVPLFTMKGPKPTSSLPGTSACKKKRVASSSVSHGRSRIARLPSSTLKRPAGPLVLPGDWH

SEQ ID NO: 21759 - protein, 552 aa, Homo sapiens
MAHALVTFRDVAIDFSQKEWECLDTTQRKLYRDVMLENYNNLVSLGYSGSKPDVITLLEQGKEPCVVARDVTGRQCPGLLSRHKTKKLSSEKDIHEISLSKESIIEKSKTLRLKGSIFRNEWQNKSEFEGQQGLKERSISQKKIVSKKMSTDRKRPSFTLNQRIHNSEKSCDSHLVQHGKIDSDVKHDCKECGSTFNNVYQLTLHQKIHTGEKSCKCEKCGKVFSHSYQLTLHQRFHTGEKPYECQECGKTFTLYPQLNRHQKIHTGKKPYMCKKCDKGFFSRLELTQHKRIHTGKKSYECKECGKVFQLIFYFKEHERIHTGKKPYECKECGKAFSVCGQLTRHQKIHTGVKPYECKECGKTFRLSFYLTEHRRTHAGKKPYECKECGKSFNVRGQLNRHKTIHTGIKPFACKVCEKAFSYSGDLRVHSRIHTGEKPYECKECGKAFMLRSVLTEHQRLHTGVKPYECKECGKTFRVRSQISLHKKIHTDVKPYKCVRCGKTFRFGFYLTEHQRIHTGEKPYKCKECGKAFIRRGNLKEHLKIHSGLKPYD

SEQ ID NO: 21760 - protein, 490 aa, Homo sapiens
MLLFFTLGLLIHFVFFASIFDIYFTSPLVHGMTPQFTPLPPPARRLVLFVADGLRADALYELDENGNSRAPFIRNIIMHEGSWGISHTRVPTESRPGHVALIAGFYEDVSAVAKGWKENPVEFDSLFNESKYTWSWGSPDILPMFAKGASGDHVYTYSYDAKREDFGAQDATKLDTWVFDNVKDFFHHARNNQSLFSKINEEKIVFFLHLLGIDTNGHAHRPSSRDYKHNIKKVDDGVKEIVSMFNHFYGNDGKTTFIFTSDHGMTDWGSHGAGHPSETLTPLVTWGAGIKYPQRVSAQQFDDAFLKEWRLENWKRLDVNQADIAPLMTSLIGVPFPLNSVGILPVDYLNNTDLFKAESMFTNAVQILEQFKVKMTQKKEVTLPFLFTPFKLLSDSKQFNILRKARSYIKHRKFDEVVSLCKELIHLALKGLSYYHTYDRFFLGVNVVIGFVGWISYASLLIIKSHSNLIKGVSKEVKVRLENVRIQMMV

SEQ ID NO: 21761 - protein, 220 aa, Homo sapiens
MRQKHYLEAAARGLHDSCPGQARYLLWAYTSSHDDKSTFEETCPYCFQLLVLDNSRVRLKPKARLTPKIQKLLNREARNYTLSFKEAKMVKKFKDSKSVLLITCKTCNRTVKHHGKSRSFVSTLKSNPATPTSKLSLKTPERRTANPNHDMSGSKGKSPASVFRTPTSGQSVSTCSSKNTSKTKKHFSQLKMLLSQNESQKIPKVDFRNFLSSLKGGLLK

SEQ ID NO: 21762 - protein, 145 aa, Homo sapiens
MNPIALGSRWLAYAENKLIRCHQSRGGACGDNIQSYTATVISAAKTLKSGLTMVGKVVTQLTGTLPSGVTEDDVAIHSNSRRSPLVPGIITVIDTETVGEGQVLVSEDSDSDGIVAHFPAHEKPVCCMAFNTSGMLLVTTDTLGH

SEQ ID NO: 21763 - protein, 32759 aa, Homo sapiens
MTTQAPTFTQPLQSVVVLEGSTATFEAHISGFPVPEVSWFRDGQVISTSTLPGVQISFSDGRAKLTIPAVTKANSGRYSLKATNGSGQATSTAELLVKAETAPPNFVQRLQSMTVRQGSQVRLQVRVTGIPTPVVKFYRDGAEIQSSLDFQISQEGDLYSLLIAEAYPEDSGTYSVNATNSVGRATSTAELLVQGEEEVPAKKTKTIVSTAQISESRQTRIEKKIEAHFDARSIATVEMVIDGAAGQQLPHKTPPRIPPKPKSRSPTPPSIAAKAQLARQQSPSPIRHSPSPVRHVRAPTPSPVRSVSPAARISTSPIRSVRSPLLMRKTQASTVATGPEVPPPWKQEGYVASSSEAEMRETTLTTSTQIRTEERWEGRYGVQEQVTISGAAGAAASVSASASYAAEAVATGAKEVKQDADKSAAVATVVAAVDMARVREPVISAVEQTAQRTTTTAVHIQPAQEQVRKEAEKTAVTKVVVAADKAKEQELKSRTKEVITTKQEQMHVTHEQIRKETEKTFVPKVVISAAKAKEQETRISEEITKKQKQVTQEAIRQETEITAASMVVVATAKSTKLETVPGAQEETTTQQDQMHLSYEKIMKETRKTVVPKVIVATPKVKEQDLVSRGREGITTKREQVQITQEKMRKEAEKTALSTIAVATAKAKEQETILRTRETMATRQEQIQVTHGKVDVGKKAEAVATVVAAVDQARVREPREPGHLEESYAQQTTLEYGYKERISAAKVAEPPQRPASEPHVVPKAVKPRVIQAPSETHIKTTDQKGMHISSQIKKTTDLTTERLVHVDKRPRTASPHFTVSKISVPKTEHGYEASIAGSAIATLQKELSATSSAQKITKSVKAPTVKPSETRVRAEPTPLPQFPFADTPDTYKSEAGVEVKKEVGVSITGTTVREERFEVLHGREAKVTETARVPAPVEIPVTPPTLVSGLKNVTVIEGESVTLECHISGYPSPTVTWYREDYQIESSIDFQITFQSGIARLMIREAFAEDSGRFTCSAVNEAGTVSTSCYLAVQVSEEFEKETTAVTEKFTTEEKRFVESRDVVMTDTSLTEEQAGPGEPAAPYFITKPVVQKLVEGGSVVFGCQVGGNPKPHVYWKKSGVPLTTGYRYKVSYNKQTGECKLVISMTFADDAGEYTIVVRNKHGETSASASLLEEADYELLMKSQQEMLYQTQVTAFVQEPKVGETAPGFVYSEYEKEYEKEQALIRKKMAKDTVVVRTYVEDQEFHISSFEERLIKEIEYRIIKTTLEELLEEDGEEKMAVDISESEAVESGFDSRIKNYRILEGMGVTFHCKMSGYPLPKIAWYKDGKRIKHGERYQMDFLQDGRASLRIPVVLPEDEGIYTAFASNIKGNAICSGKLYVEPAAPLGAPTYIPTLEPVSRIRSLSPRSVSRSPIRMSPARMSPARMSPARMSPARMSPGRRLEETDESQLERLYKPVFVLKPVSFKCLEGQTARFDLKVVGRPMPETFWFHDGQQIVNDYTHKVVIKEDGTQSLIIVPATPSDSGEWTVVAQNRAGRSSISVILTVEAVEHQVKPMFVEKLKNVNIKEGSRLEMKVRATGNPNPDIVWLKNSDIIVPHKYPKIRIEGTKGEAALKIDSTVSQDSAWYTATAINKAGRDTTRCKVNVEVEFAEPEPERKLIIPRGTYRAKEIAAPELEPLHLRYGQEQWEEGDLYDKEKQQKPFFKKKLTSLRLKRFGPAHFECRLTPIGDPTMVVEWLHDGKPLEAANRLRMINEFGYCSLDYGVAYSRDSGIITCRATNKYGTDHTSATLIVKDEKSLVEESQLPEGRKGLQRIEELERMAHEGALTGVTTDQKEKQKPDIVLYPEPVRVLEGETARFRCRVTGYPQPKVNWYLNGQLIRKSKRFRVRYDGIHYLDIVDCKSYDTGEVKVTAENPEGVIEHKVKLEIQQREDFRSVLRRAPEPRPEFHVHEPGKLQFEVQKVDRPVDTTETKEVVKLKRAERITHEKVPEESEELRSKFKRRTEEGYYEAITAVELKSRKKDESYEELLRKTKDELLHWTKELTEEEKKALAEEGKITIPTFKPDKIELSPSMEAPKIFERIQSQTVGQGSDAHFRVRVVGKPDPECEWYKNGVKIERSDRIYWYWPEDNVCELVIRDVTAEDSASIMVKAINIAGETSSHAFLLVQAKQLITFTQELQDVVAKEKDTMATFECETSEPFVKVKWYKDGMEVHEGDKYRMHSDRKVHFLSILTIDTSDAEDYSCVLVEDENVKTTAKLIVEGAVVEFVKELQDIEVPESYSGELECIVSPENIEGKWYHNDVELKSNGKYTITSRRGRQNLTVKDVTKEDQGEYSFVIDGKKTTCKLKMKPRPIAILQGLSDQKVCEGDIVQLEVKVSLESVEGVWMKDGQEVQPSDRVHIVIDKQSHMLLIEDMTKEDAGNYSFTIPALGLSTSGRVSVYSVDVITPLKDVNVIEGTKAVLECKVSVPDVTSVKWYLNDEQIKPDDRVQAIVKGTKQRLVINRTHASDEGPYKLIVGRVETNCNLSVEKIKIIRGLRDLTCTETQNVVFEVELSHSGIDVLWNFKDKEIKPSSKYKIEAHGKIYKLTVLNMMKDDEGKYTFYAGENMTSGKLTVAGGAISKPLTDQTVAESQEAVFECEVANPDSKGEWLRDGKHLPLTNNIRSESDGHKRRLIIAATKLDDIGEYTYKVATSKTSAKLKVEAVKIKKTLKNLTVTETQDAVFTVELTHPNVKGVQWIKNGVVLESNEKYAISVKGTIYSLRIKNCAIVDESVYGFRLGRLGASARLHVETVKIIKKPKDVTALENATVAFEVSVSHDTVPVKWFHKSVEIKPSDKHRLVSERKVHKLMLQNISPSDAGEYTAVVGQLECKAKLFVETLHITKTMKNIEVPETKTASFECEVSHFNVPSMWLKNGVEIEMSEKFKIVVQGKLHQLIIMNTSTEDSAEYTFVCGNDQVSATLTVTPIMITSMLKDINAEEKDTITFEVTVNYEGISYKWLKNGVEIKSTDKCQMRTKKLTHSLNIRNVHFGDAADYTFVAGKATSTATLYVEARHIEFRKHIKDIKVLEKKRAMFECEVSEPDITVQWMKDDQELQITDRIKIQKEKYVHRLLIPSTRMSDAGKYTVVAGGNVSTAKLFVEGRDVRIRSIKKEVQVIEKQRAVVEFEVNEDDVDAHWYKDGIEINFQVQERHKYVVERRIHRMFISETRQSDAGEYTFVAGRNRSSVTLYVNAPEPPQVLQELQPVTVQSGKPARFCAVISGRPQPKISWYKEEQLLSTGFKCKFLHDGQEYTLLLIEAFPEDAAVYTCEAKNDYGVATTSASLSVEVPEVVSPDQEMPVYPPAIITPLQDTVTSEGQPARFQCRVSGTDLKVSWYSKDKKIKPSRFFRMTQFEDTYQLEIAEAYPEDEGTYTFVASNAVGQVSSTANLSLEAPESILHERIEQEIEMEMKEFSSSFLSAEEEGLHSAELQLSKINETLELLSESPVYPTKFDSEKEGTGPIFIKEVSNADISMGDVATLSVTVIGIPKPKIQWFFNGVLLTPSADYKFVFDGDDHSLIILFTKLEDEGEYTCMASNDYGKTICSAYLKINSKGEGHKDTETESAVAKSLEKLGGPCPPHFLKELKPIRCAQGLPAIFEYTVVGEPAPTVTWFKENKQLCTSVYYTIIHNPNGSGTFIVNDPQREDSGLYICKAENMLGESTCAAELLVLLEDTDMTDTPCKAKSTPEAPEDFPQTPLKGPAVEALDSEQEIATFVKDTILKAALITEENQQLSYEHIAKANELSSQLPLGAQELQSILEQDKLTPESTREFLCINGSIHFQPLKEPSPNLQLQIVQSQKTFSKEGILMPEEPETQAVLSDTEKIFPSAMSIEQINSLTVEPLKTLLAEPEGNYPQSSIEPPMHSYLTSVAEEVLSPKEKTVSDTNREQRVTLQKQEAQSALILSQSLAEGHVESLQSPDVMISQVNYEPLVPSEHSCTEGGKILIESANPLENAGQDSAVRIEEGKSLRFPLALEEKQVLLKEEHSDNVVMPPDQIIESKREPVAIKKVQEVQGRDLLSKESLLSGIPEEQRLNLKIQICRALQAAVASEQPGLFSEWLRNIEKVEVEAVNITQEPRHIMCMYLVTSAKSVTEEVTIIIEDVDPQMANLKMELRDALCAIIYEEIDILTAEGPRIQQGAKTSLQEEMDSFSGSQKVEPITEPEVESKYLISTEEVSYFNVQSRVKYLDATPVTKGVASAVVSDEKQDESLKPSEEKEESSSESGTEEVATVKIQEAEGGLIKEDGPMIHTPLVDTVSEEGDIVHLTTSITNAKEVNWYFENKLVPSDEKFKCLQDQNTYTLVIDKVNTEDHQGEYVCEALNDSGKTATSAKLTVVKRAAPVIKRKIEPLEVALGHLAKFTCEIQSAPNVRFQWFKAGREIYESDKCSIRSSKYISSLEILRTQVVDCGEYTCKASNEYGSVSCTATLTVTEAYPPTFLSRPKSLTTFVGKAAKFICTVTGTPVIETIWQKDGAALSPSPNWRISDAENKHILELSNLTIQDRGVYSCKASNKFGADICQAELIIIDKPHFIKELEPVQSAINKKVHLECQVDEDRKVTVTWSKDGQKLPPGKDYKICFEDKIATLEIPLAKLKDSGTYVCTASNEAGSSSCSATVTVREPPSFVKKVDPSYLMLPGESARLHCKLKGSPVIQVTWFKNNKELSESNTVRMYFVNSEAILDITDVKVEDSGSYSCEAVNDVGSDSCSTEIVIKEPPSFIKTLEPADIVRGTNALLQCEVSGTGPFEISWFKDKKQIRSSKKYRLFSQKSLVCLEIFSFNSADVGEYECVVANEVGKCGCMATHLLKEPPTFVKKVDDLIALGGQTVTLQAAVRGSEPISVTWMKGQEVIREDGKIKMSFSNGVAVLIIPDVQISFGGKYTCLAENEAGSQTSVGELIVKEPAKIIERAELIQVTAGDPATLEYTVAGTPELKPKWYKDGRPLVASKKYRISFKNNVAQLKFYSAELHDSGQYTFEISNEVGSSSCETTFTVLDRDIAPFFTKPLRNVDSVVNGTCRLDCKIAGSLPMRVSWFKDGKEIAASDRYRIAFVEGTASLEIIRVDMNDAGNFTCRATNSVGSKDSSGALIVQEPPSFVTKPGSKDVLPGSAVCLKSTFQGSTPLTIRWFKGNKELVSGGSCYITKEALESSLELYLVKTSDSGTYTCKVSNVAGGVECSANLFVKEPATFVEKLEPSQLLKKGDATQLACKVTGTPPIKITWFANDREIKESSKHRMSFVESTAVLRLTDVGIEDSGEYMCEAQNEAGSDHCSSIVIVKESPYFTKEFKPIEVLKEYDVMLLAEVAGTPPFEITWFKDNTILRSGRKYKTFIQDHLVSLQILKFVAADAGEYQCRVTNEVGSSICSARVTLREPPSFIKKIESTSSLRGGTAAFQATLKGSLPITVTWLKDSDEITEDDNIRMTFENNVASLYLSGIEVKHDGKYVCQAKNDAGIQRCSALLSVKEPATITEEAVSIDVTQGDPATLQVKFSGTKEITAKWFKDGQELTLGSKYKISVTDTVSILKIISTEKKDSGEYTFEVQNDVGRSSCKARINVLDLIIPPSFTKKLKKMDSIKGSFIDLECIVAGSHPISIQWFKDDQEISASEKYKFSFHDNTAFLEISQLEGTDSGTYTCSATNKAGHNQCSGHLTVKEPPYFVEKPQSQDVNPNTRVQLKALVGGTAPMTIKWFKDNKELHSGAARSVWKDDTSTSLELFAAKATDSGTYICQLSNDVGTATSKATLFVKEPPQFIKKPSPVLVLRNGQSTTFECQITGTPKIRVSWYLDGNEITAIQKHGISFIDGLATFQISGARVENSGTYVCEARNDAGTASCSIELKVKEPPTFIRELKPVEVVKYSDVELECEVTGTPPFEVTWLKNNREIRSSKKYTLTDRVSVFNLHITKCDPSDTGEYQCIVSNEGGSCSCSTRVALKEPPSFIKKIENTTTVLKSSATFQSTVAGSPPISITWLKDDQILDEDDNVYISFVDSVATLQIRSVDNGHSGRYTCQAKNESGVERCYAFLLVQEPAQIVEKAKSVDVTEKDPMTLECVVAGTPELKVKWLKDGKQIVPSRYFSMSFENNVASFRIQSVMKQDSGQYTFKVENDFGSSSCDAYLRVLDQNIPPSFTKKLTKMDKVLGSSIHMECKVSGSLPISAQWFKDGKEISTSAKYRLVCHERSVSLEVNNLELEDTANYTCKVSNVAGDDACSGILTVKEPPSFLVKPGRQQAIPDSTVEFKAILKGTPPFKIKWFKDDVELVSGPKCFIGLEGSTSFLNLYSVDASKTGQYTCHVTNDVGSDSCTTMLLVTEPPKFVKKLEASKIVKAGDSSRLECKIAGSPEIRVVWFRNEHELPASDKYRMTFIDSVAVIQMNNLSTEDSGDFICEAQNPAGSTSCSTKVIVKEPPVFSSFPPIVETLKNAEVSLECELSGTPPFEVVWYKDKRQLRSSKKYKIASKNFHTSIHILNVDTSDIGEYHCKAQNEVGSDTCVCTVKLKEPPRFVSKLNSLTVVAGEPAELQASIEGAQPIFVQWLKEKEEVIRESENIRITFVENVATLQFAKAEPANAGKYICQIKNDGGMRENMATLMVLEPAVIVEKAGPMTVTVGETCTLECKVAGTPELSVEWYKDGKLLTSSQKHKFSFYNKISSLRILSVERQDAGTYTFQVQNNVGKSSCTAVVDVSDRAVPPSFTRRLKNTGGVLGASCILECKVAGSSPISVAWFHEKTKIVSGAKYQTTFSDNVCTLQLNSLDSSDMGNYTCVAANVAGSDECRAVLTVQEPPSFVKEPEPLEVLPGKNVTFTSVIRGTPPFKVNWFRGARELVKGDRCNIYFEDTVAELELFNIDISQSGEYTCVVSNNAGQASCTTRLFVKEPAAFLKRLSDHSVEPGKSIILESTYTGTLPISVTWKKDGFNITTSEKCNIVTTEKTCILEILNSTKRDAGQYSCEIENEAGRDVCGALVSTLEPPYFVTELEPLEAAVGDSVSLQCQVAGTPEITVSWYKGDTKLRPTPEYRTYFTNNVATLVFNKVNINDSGEYTCKAENSIGTASSKTVFRIQERQLPPSFARQLKDIEQTVGLPVTLTCRLNGSAPIQVCWYRDGVLLRDDENLQTSFVDNVATLKILQTDLSHSGQYSCSASNPLGTASSSARLTAREPKKSPFFDIKPVSIDVIAGESADFECHVTGAQPMRITWSKDNKEIRPGGNYTITCVGNTPHLRILKVGKGDSGQYTCQATNDVGKDMCSAQLSVKEPPKFVKKLEASKVAKQGESIQLECKISGSPEIKVSWFRNDSELHESWKYNMSFINSVALLTINEASAEDSGDYICEAHNGVGDASCSTALTVKAPPVFTQKPSPVGALKGSDVILQCEISGTPPFEVVWVKDRKQVRNSKKFKITSKHFDTSLHILNLEASDVGEYHCKATNEVGSDTCSCSVKFKEPPRFVKKLSDTSTLIGDAVELRAIVEGFQPISVVWLKDRGEVIRESENTRISFIDNIATLQLGSPEASNSGKYICQIKNDAGMRECSAVLTVLEPARIIEKPEPMTVTTGNPFALECVVTGTPELSAKWFKDGRELSADSKHHITFINKVASLKIPCAEMSDKGLYSFEVKNSVGKSNCTVSVHVSDRIVPPSFIRKLKDVNAILGASVVLECRVSGSAPISVGWFQDGNEIVSGPKCQSSFSENVCTLNLSLLEPSDTGIYTCVAANVAGSDECSAVLTVQEPPSFEQTPDSVEVLPGMSLTFTSVIRGTPPFKVKWFKGSRELVPGESCNISLEDFVTELELFEVQPLESGDYSCLVTNDAGSASCTTHLFVKEPATFVKRLADFSVETGSPIVLEATYTGTPPISVSWIKDEYLISQSERCSITMTEKSTILEILESTIEDYAQYSCLIENEAGQDICEALVSVLEPPYFIEPLEHVEAVIGEPATLQCKVDGTPEIRISWYKEHTKLRSAPAYKMQFKNNVASLVINKVDHSDVGEYSCKADNSVGAVASSAVLVIKARKLPPFFARKLKDVHETLGFPVAFECRINGSEPLQVSWYKDGVLLKDDANLQTSFVHNVATLQILQTDQSHIGQYNCSASNPLGTASSSAKLILSEHEVPPFFDLKPVSVDLALGESGTFKCHVTGTAPIKITWAKDNREIRPGGNYKMTLVENTATLTVLKVGKGDAGQYTCYASNIAGKDSCSAQLGVQEPPRFIKKLEPSRIVKQDEFTRYECKIGGSPEIKVLWYKDETEIQESSKFRMSFVDSVAVLEMHNLSVEDSGDYTCEAHNAAGSASSSTSLKVKEPPIFRKKPHPIETLKGADVHLECELQGTPPFHVSWYKDKRELRSGKKYKIMSENFLTSIHILNVDAADIGEYQCKATNDVGSDTCVGSIALKAPPRFVKKLSDISTVVGKEVQLQTTIEGAEPISVVWFKDKGEIVRESDNIWISYSENIATLQFSRVEPANAGKYTCQIKNDAGMQECFATLSVLEPATIVEKPESIKVTTGDTCTLECTVAGTPELSTKWFKDGKELTSDNKYKISFFNKVSGLKIINVAPSDSGVYSFEVQNPVGKDSCTASLQVSDRTVPPSFTRKLKETNGLSGSSVVMECKVYGSPPISVSWFHEGNEISSGRKYQTTLTDNTCALTVNMLEESDSGDYTCIATNMAGSDECSAPLTVREPPSFVQKPDPMDVLTGTNVTFTSIVKGTPPFSVSWFKGSSELVPGDRCNVSLEDSVAELELFDVDTSQSGEYTCIVSNEAGKASCTTHLYIKAPAKFVKRLNDYSIEKGKPLILEGTFTGTPPISVTWKKNGINVTPSQRCNITTTEKSAILEIPSSTVEDAGQYNCYIENASGKDSCSAQILILEPPYFVKQLEPVKVSVGDSASLQCQLAGTPEIGVSWYKGDTKLRPTTTYKMHFRNNVATLVFNQVDINDSGEYICKAENSVGEVSASTFLTVQEQKLPPSFSRQLRDVQETVGLPVVFDCAISGSEPISVSWYKDGKPLKDSPNVQTSFLDNTATLNIFKTDRSLAGQYSCTATNPIGSASSSARLILTEGKNPPFFDIRLAPVDAVVGESADFECHVTGTQPIKVSWAKDSREIRSGGKYQISYLENSAHLTVLKVDKGDSGQYTCYAVNEVGKDSCTAQLNIKERLIPPSFTKRLSETVEETEGNSFKLEGRVAGSQPITVAWYKNNIEIQPTSNCEITFKNNTLVLQVRKAGMNDAGLYTCKVSNDAGSALCTSSIVIKEPKKPPVFDQHLTPVTVSEGEYVQLSCHVQGSEPIRIQWLKAGREIKPSDRCSFSFASGTAVLELRDVAKADSGDYVCKASNVAGSDTTKSKVTIKDKPAVAPATKKAAVDGRLFFVSEPQSIRVVEKTTATFIAKVGGDPIPNVKWTKGKWRQLNQGGRVFIHQKGDEAKLEIRDTTKTDSGLYRCVAFNEHGEIESNVNLQVDERKKQEKIEGDLRAMLKKTPILKKGAGEEEEIDIMELLKNVDPKEYEKYARMYGITDFRGLLQAFELLKQSQEEETHRLEIEEIERSERDEKEFEELVSFIQQRLSQTEPVTLIKDIENQTVLKDNDAVFEIDIKINYPEIKLSWYKGTEKLEPSDKFEISIDGDRHTLRVKNCQLKDQGNYRLVCGPHIASAKLTVIEPAWERHLQDVTLKEGQTCTMTCQFSVPNVKSEWFRNGRILKPQGRHKTEVEHKVHKLTIADVRAEDQGQYTCKYEDLETSAELRIEAEPIQFTKRIQNIVVSEHQSATFECEVSFDDAIVTWYKGPTELTESQKYNFRNDGRCHYMTIHNVTPDDEGVYSVIARLEPRGEARSTAELYLTTKEIKLELKPPDIPDSRVPIPTMPIRAVPPEEIPPVVAPPIPLLLPTPEEKKPPPKRIEVTKKAVKKDAKKVVAKPKEMTPREEIVKKPPPPTTLIPAKAPEIIDVSSKAEEVKIMTITRKKEVQKEKEAVYEKKQAVHKEKRVFIESFEEPYDELEVEPYTEPFEQPYYEEPDEDYEEIKVEAKKEVHEEWEEDFEEGQEYYEREEGYDEGEEEWEEAYQEREVIQVQKEVYEESHERKVPAKVPEKKAPPPPKVIKKPVIEKIEKTSRRMEEEKVQVTKVPEVSKKIVPQKPSRTPVQEEVIEVKVPAVHTKKMVISEEKMFFASHTEEEVSVTVPEVQKEIVTEEKIHVAISKRVEPPPKVPELPEKPAPEEVAPVPIPKKVEPPAPKVPEVPKKPVPEEKKPVPVPKKEPAAPPKVPEVPKKPVPEEKIPVPVAKKKEAPPAKVPEVQKGVVTEEKITIVTQREESPPPAVPEIPKKKVPEERKPVPRKEEEVPPPPKVPALPKKPVPEEKVAVPVPVAKKAPPPRAEVSKKTVVEEKRFVAEEKLSFAVPQRVEVTRHEVSAEEEWSYSEEEEGVSISVYREEEREEEEEAEVTEYEVMEEPEEYVVEEKLHIISKRVEAEPAEVTERQEKKIVLKPKIPAKIEEPPPAKVPEAPKKIVPEKKVPAPVPKKEKVPPPKVPEEPKKPVPEKKVPPKVIKMEEPLPAKVTERHMQITQEEKVLVAVTKKEAPPKARVPEEPKRAVPEEKVLKLKPKREEEPPAKVTEFRKRVVKEEKVSIEAPKREPQPIKEVTIMEEKERAYTLEEEAVSVQREEEYEEYEEYDYKEFEEYEPTEEYDQYEEYEEREYERYEEHEEYITEPEKPIPVKPVPEEPVPTKPKAPPAKVLKKAVPEEKVPVPIPKKLKPPPPKVPEEPKKVFEEKIRISITKREKEQVTEPAAKVPMKPKRVVAEEKVPVPRKEVAPPVRVPEVPKELEPEEVAFEEEVVTHVEEYLVEEEEEYIHEEEEFITEEEVVPVIPVKVPEVPRKPVPEEKKPVPVPKKKEAPPAKVPEVPKKPEEKVPVLIPKKEKPPPAKVPEVPKKPVPEEKVPVPVPKKVEAPPAKVPEVPKKPVPEKKVPVPAPKKVEAPPAKVPEVPKKLIPEEKKPTPVPKKVEAPPPKVPKKREPVPVPVALPQEEEVLFEEEIVPEEEVLPEEEEVLPEEEEVLPEEEEVLPEEEEIPPEEEEVPPEEEYVPEEEEFVPEEEVLPEVKPKVPVPAPVPEIKKKVTEKKVVIPKKEEAPPAKVPEVPKKVEEKRIILPKEEEVLPVEVTEEPEEEPISEEEIPEEPPSIEEVEEVAPPRVPEVIKKAVPEAPTPVPKKVEAPPAKVSKKIPEEKVPVPVQKKEAPPAKVPEVPKKVPEKKVLVPKKEAVPPAKGRTVLEEKVSVAFRQEVVVKERLELEVVEAEVEEIPEEEEFHEVEEYFEEGEFHEVEEFIKLEQHRVEEEHRVEKVHRVIEVFEAEEVEVFEKPKAPPKGPEISEKIIPPKKPPTKVVPRKEPPAKVPEVPKKIVVEEKVRVPEEPRVPPTKVPEVLPPKEVVPEKKVPVPPAKKPEAPPPKVPEAPKEVVPEKKVPVPPPKKPEVPPTKVPEVPKAAVPEKKVPEAIPPKPESPPPEVPEAPKEVVPEKKVPAAPPKKPEVTPVKVPEAPKEVVPEKKVPVPPPKKPEVPPTKVPEVPKVAVPEKKVPEAIPPKPESPPPEVFEEPEEVALEEPPAEVVEEPEPAAPPQVTVPPKKPVPEKKAPAVVAKKPELPPVKVPEVPKEVVPEKKVPLVVPKKPEAPPAKVPEVPKEVVPEKKVAVPKKPEVPPAKVPEVPKKPVLEEKPAVPVPERAESPPPEVYEEPEEIAPEEEIAPEEEKPVPVAEEEEPEVPPPAVPEEPKKIIPEKKVPVIKKPEAPPPKEPEPEKVIEKPKLKPRPPPPPPAPPKEDVKEKIFQLKAIPKKKVPEKPQVPEKVELTPLKVPGGEKKVRKLLPERKPEPKEEVVLKSVLRKRPEEEEPKVEPKKLEKVKKPAVPEPPPPKPVEEVEVPTVTKRERKIPEPTKVPEIKPAIPLPAPEPKPKPEAEVKTIKPPPVEPEPTPIAAPVTVPVVGKKAEAKAPKEEAAKPKGPIKGVPKKTPSPIEAERRKLRPGSGGEKPPDEAPFTYQLKAVPLKFVKEIKDIILTESEFVGSSAIFECLVSPSTAITTWMKDGSNIRESPKHRFIADGKDRKLHIIDVQLSDAGEYTCVLRLGNKEKTSTAKLVVEELPVRFVKTLEEEVTVVKGQPLYLSCELNKERDVVWRKDGKIVVEKPGRIVPGVIGLMRALTINDADDTDAGTYTVTVENANNLECSSCVKVVEVIRDWLVKPIRDQHVKPKGTAIFACDIAKDTPNIKWFKGYDEIPAEPNDKTEILRDGNHLYLKIKNAMPEDIAEYAVEIEGKRYPAKLTLGEREVELLKPIEDVTIYEKESASFDAEISEADIPGQWKLKGELLRPSPTCEIKAEGGKRFLTLHKVKLDQAGEVLYQALNAITTAILTVKEIELDFAVPLKDVTVPERRQARFECVLTREANVIWSKGPDIIKSSDKFDIIADGKKHILVINDSQFDDEGVYTAEVEGKKTSARLFVTGIRLKFMSPLEDQTVKEGETATFVCELSHEKMHVVWFKNDAKLHTSRTVLISSEGKTHKLEMKEVTLDDISQIKAQVKELSSTAQLKVLEADPYFTVKLHDKTAVEKDEITLKCEVSKDVPVKWFKDGEEIVPSPKYSIKADGLRRILKIKKADLKDKGEYVCDCGTDKTKANVTVEARLIKVEKPLYGVEVFVGETAHFEIELSEPDVHGQWKLKGQPLTASPDCEIIEDGKKHILILHNCQLGMTGEVSFQAANAKSAANLKVKELPLIFITPLSDVKVFEKDEAKFECEVSREPKTFRWLKGTQEITGDDRFELIKDGTKHSMVIKSAAFEDEAKYMFEAEDKHTSGKLIIEGIRLKFLTPLKDVTAKEKESAVFTVELSHDNIRVKWFKNDQRLHTTRSVSMQDEGKTHSITFKDLSIDDTSQIRVEAMGMSSEAKLTVLEGDPYFTGKLQDYTGVEKDEVILQCEISKADAPVKWFKDGKEIKPSKNAVIKADGKKRMLILKKALKSDIGQYTCDCGTDKTSGKLDIEDREIKLVRPLHSVEVMETETARFETEISEDDIHANWKLKGEALLQTPDCEIKEEGKIHSLVLHNCRLDQTGGVDFQAANVKSSAHLRVKPRVIGLLRPLKDVTVTAGETATFDCELSYEDIPVEWYLKGKKLEPSDKVVPRSEGKVHTLTLRDVKLEDAGEVQLTAKDFKTHANLFVKEPPVEFTKPLEDQTVEEGATAVLECEVSRENAKVKWFKNGTEILKSKKYEIVADGRVRKLVIHDCTPEDIKTYTCDAKDFKTSCNLNVVPPHVEFLRPLTDLQVREKEMARFECELSRENAKVKWFKDGAEIKKGKKYDIISKGAVRILVINKCLLDDEAEYSCEVRTARTSGMLTVLEEEAVFTKNLANIEVSETDTIKLVCEVSKPGAEVIWYKGDEEIIETGRYEILTEGRKRILVIQNAHLEDAGNYNCRLPSSRTDGKVKVHELAAEFISKPQNLEILEGEKAEFVCSISKESFPVQWKRDDKTLESGDKYDVIADGKKRVLVVKDATLQDMGTYVVMVGAARAAAHLTVIEKLRIVVPLKDTRVKEQQEVVFNCEVNTEGAKAKWFRNEEAIFDSSKYIILQKDLVYTLRIRDAHLDDQANYNVSLTNHRGENVKSAANLIVEEEDLRIVEPLKDIETMEKKSVTFWCKVNRLNVTLKWTKNGEEVPFDNRVSYRVDKYKHMLTIKDCGFPDEGEYIVTAGQDKSVAELLIIEAPTEFVEHLEDQTVTEFDDAVFSCQLSREKANVKWYRNGREIKEGKKYKFEKDGSIHRLIIKDCRLDDECEYACGVEDRKSRARLFVEEIPVEIIRPPQDILEAPGADVVFLAELNKDKVEVQWLRNNMVVVQGDKHQMMSEGKIHRLQICDIKPRDQGEYRFIAKDKEARAKLELAAAPKIKTADQDLVVDVGKPLTMVVPYDAYPKAEAEWFKENEPLSTKTIDTTAEQTSFRILEAKKGDKGRYKIVLQNKHGKAEGFINLKVIDVPGPVRNLEVTETFDGEVSLAWEEPLTDGGSKIIGYVVERRDIKRKTWVLATDRAESCEFTVTGLQKGGVEYLFRVSARNRVGTGEPVETDNPVEARSKYDVPGPPLNVTITDVNRFGVSLTWEPPEYDGGAEITNYVIELRDKTSIRWDTAMTVRAEDLSATVTDVVEGQEYSFRVRAQNRIGVGKPSAATPFVKVADPIERPSPPVNLTSSDQTQSSVQLKWEPPLKDGGSPILGYIIERCEEGKDNWIRCNMKLVPELTYKVTGLEKGNKYLYRVSAENKAGVSDPSEILGPLTADDAFVEPTMDLSAFKDGLEVIVPNPITILVPSTGYPRPTATWCFGDKVLETGDRVKMKTLSAYAELVISPSERSDKGIYTLKLENRVKTISGEIDVNVIARPSAPKELKFGDITKDSVHLTWEPPDDDGGSPLTGYVVEKREVSRKTWTKVMDFVTDLEFTVPDLVQGKEYLFKVCARNKCGPGEPAYVDEPVNMSTPATVPDPPENVKWRDRTANSIFLTWDPPKNDGGSRIKGYIVERCPRGSDKWVACGEPVAETKMEVTGLEEGKWYAYRVKALNRQGASKPSRPTEEIQAVDTQEAPEIFLDVKLLAGLTVKAGTKIELPATVTGKPEPKITWTKADMILKQDKRITIENVPKKSTVTIVDSKRSDTGTYIIEAVNVCGRATAVVEVNVLDKPGPPAAFDITDVTNESCLLTWNPPRDDGGSKITNYVVERRATDSEVWHKLSSTVKDTNFKATKLIPNKEYIFRVAAENMYGVGEPVQASPITAKYQFDPPGPPTRLEPSDITKDAVTLTWCEPDDDGGSPITGYWVERLDPDTDKWVRCNKMPVKDTTYRVKGLTNKKKYRFRVLAENLAGPGKPSKSTEPILIKDPIDPPWPPGKPTVKDVGKTSVRLNWTKPEHDGGAKIESYVIEMLKTGTDEWVRVAEGVPTTQHLLPGLMEGQEYSFRVRAVNKAGESEPSEPSDPVLCREKLYPPSPPRWLEVINITKNTADLKWTVPEKDGGSPITNYIVEKRDVRRKGWQTVDTTVKDTKCTVTPLTEGSLYVFRVAAENAIGQSDYTEIEDSVLAKDTFTTPGPPYALAVVDVTKRHVDLKWEPPKNDGGRPIQRYVIEKKERLGTRWVKAGKTAGPDCNFRVTDVIEGTEVQFQVRAENEAGVGHPSEPTEILSIEDPTSPPSPPLDLHVTDAGRKHIAIAWKPPEKNGGSPIIGYHVEMCPVGTEKWMRVNSRPIKDLKFKVEEGVVPDKEYVLRVRAVNAIGVSEPSEISENVVAKDPDCKPTIDLETHDIIVIEGEKLSIPVPFRAVPVPTVSWHKDGKEVKASDRLTMKNDHISAHLEVPKSVRADAGIYTITLENKLGSATASINVKVIGLPGPCKDIKASDITKSSCKLTWEPPEFDGGTPILHYVLERREAGRRTYIPVMSGENKLSWTVKDLIPNGEYFFRVKAVNKVGGGEYIELKNPVIAQDPKQPPDPPVDVEVHNPTAEAMTITWKPPLYDGGSKIMGYIIEKIAKGEERWKRCNEHLVPILTYTAKGLEEGKEYQFRVRAENAAGISEPSRATPPTKAVDPIDAPKVILRTSLEVKRGDEIALDASISGSPYPTITWIKDENVIVPEEIKKRAAPLVRRRKGEVQEEEPFVLPLTQRLSIDNSKKGESQLRVRDSLRPDHGLYMIKVENDHGIAKAPCTVSVLDTPGPPINFVFEDIRKTSVLCKWEPPLDDGGSEIINYTLEKKDKTKPDSEWIVVTSTLRHCKYSVTKLIEGKEYLFRVRAENRFGPGPPCVSKPLVAKDPFGPPDAPDKPIVEDVTSNSMLVKWNEPKDNGSPILGYWLEKREVNSTHWSRVNKSLLNALKANVDGLLEGLTYVFRVCAENAAGPGKFSPPSDPKTAHDPISPPGPPIPRVTDTSSTTIELEWEPPAFNGGGEIVGYFVDKQLVGTNEWSRCTEKMIKVRQYTVKEIREGADYKLRVSAVNAAGEGPPGETQPVTVAEPQEPPAVELDVSVKGGIQIMAGKTLRIPAVVTGRPVPTKVWTKEEGELDKDRVVIDNVGTKSELIIKDALRKDHGRYVITATNSCGSKFAAARVEVFDVPGPVLDLKPVVTNRKMCLLNWSDPEDDGGSEITGFIIERKDAKMHTWRQPIETERSKCDITGLLEGQEYKFRVIAKNKFGCGPPVEIGPILAVDPLGPPTSPERLTYTERTKSTITLDWKEPRSNGGSPIQGYIIEKRRHDKPDFERVNKRLCPTTSFLVENLDEHQMYEFRVKAVNEIGESEPSLPLNVVIQDDEVPPTIKLRLSVRGDTIKVKAGEPVHIPADVTGLPMPKIEWSKNETVIEKPTDALQITKEEVSRSEAKTELSIPKAVREDKGTYTVTASNRLGSVFRNVHVEVYDRPSPPRNLAVTDIKAESCYLTWDAPLDNGGSEITHYVIDKRDASRKKAEWEEVTNTAVEKRYGIWKLIPNGQYEFRVRAVNKYGISDECKSDKVVIQDPYRLPGPPGKPKVLARTKGSMLVSWTPPLDNGGSPITGYWLEKREEGSPYWSRVSRAPITKVGLKGVEFNVPRLLEGVKYQFRAMAINAAGIGPPSEPSDPEVAGDPIFPPGPPSCPEVKDKTKSSISLGWKPPAKDGGSPIKGYIVEMQEEGTTDWKRVNEPDKLITTCECVVPNLKELRKYRFRVKAVNEAGESEPSDTTGEIPATDIQEEPEVFIDIGAQDCLVCKAGSQIRIPAVIKGRPTPKSSWEFDGKAKKAMKDGVHDIPEDAQLETAENSSVIIIPECKRSHTGKYSITAKNKAGQKTANCRVKVMDVPGPPKDLKVSDITRGSCRLSWKMPDDDGGDRIKGYVIEKRTIDGKAWTKVNPDCGSTTFVVPDLLSEQQYFFRVRAENRFGIGPPVETIQRTTARDPIYPPDPPIKLKIGLITKNTVHLSWKPPKNDGGSPVTHYIVECLAWDPTGTKKEAWRQCNKRDVEELQFTVEDLVEGGEYEFRVKAVNAAGVSKPSATVGPVTVKDQTCPPSIDLKEFMEVEEGTNVNIVAKIKGVPFPTLTWFKAPPKKPDNKEPVLYDTHVNKLVVDDTCTLVIPQSRRSDTGLYTITAVNNLGTASKEMRLNVLGRPGPPVGPIKFESVSADQMTLSWFPPKDDGGSKITNYVIEKREANRKTWVHVSSEPKECTYTIPKLLEGHEYVFRIMAQNKYGIGEPLDSEPETARNLFSVPGAPDKPTVSSVTRNSMTVNWEEPEYDGGSPVTGYWLEMKDTTSKRWKRVNRDPIKAMTLGVSYKVTGLIEGSDYQFRVYAINAAGVGPASLPSDPATARDPIAPPGPPFPKVTDWTKSSADLEWSPPLKDGGSKVTGYIVEYKEEGKEEWEKGKDKEVRGTKLVVTGLKEGAFYKFRVRAVNIAGIGEPGEVTDVIEMKDRLVSPDLQLDASVRDRIVVHAGGVIRIIAYVSGKPPPTVTWNMNERTLPQEATIETTAISSSMVIKNCQRSHQGVYSLLAKNEAGERKKTIIVDVLDVPGPVGTPFLAHNLTNESCKLTWFSPEDDGGSPITNYVIEKRESDRRAWTPVTYTVTRQNATVQGLIQGKAYFFRIAAENSIGMGPFVETSEALVIREPITVPERPEDLEVKEVTKNTVTLTWNPPKYDGGSEIINYVLESRLIGTEKFHKVTNDNLLSRKYTVKGLKEGDTYEYRVSAVNIVGQGKPSFCTKPITCKDELAPPTLHLDFRDKLTIRVGEAFALTGRYSGKPKPKVSWFKDEADVLEDDRTHIKTTPATLALEKIKAKRSDSGKYCVVVENSTGSRKGFCQVNVVDRPGPPVGPVSFDEVTKDYMVISWKPPLDDGGSKITNYIIEKKEVGKDVWMPVTSASAKTTCKVSKLLEGKDYIFRIHAENLYGISDPLVSDSMKAKDRFRVPDAPDQPIVTEVTKDSALVTWNKPHDGGKPITNYILEKRETMSKRWARVTKDPIHPYTKFRVPDLLEGCQYEFRVSAENEIGIGDPSPPSKPVFAKDPIAKPSPPVNPEAIDTTCNSVDLTWQPPRHDGGSKILGYIVEYQKVGDEEWRRANHTPESCPETKYKVTGLRDGQTYKFRVLAVNAAGESDPAHVPEPVLVKDRLEPPELILDANMAREQHIKVGDTLRLSAIIKGVPFPKVTWKKEDRDAPTKARIDVTPVGSKLEIRNAAHEDGGIYSLTVENPAGSKTVSVKVLVLDKPGPPRDLEVSEIRKDSCYLTWKEPLDDGGSVITNYVVERRDVASAQWSPLSATSKKKSHFAKHLNEGNQYLFRVAAENQYGRGPFVETPKPIKALDPLHPPGPPKDLHHVDVDKTEVSLVWNKPDRDGGSPITGYLVEYQEEGTQDWIKFKTVTNLECVVTGLQQGKTYRFRVKAENIVGLGLPDTTIPIECQEKLVPPSVELDVKLIEGLVVKAGTTVRFPAIIRGVPVPTAKWTTDGSEIKTDEHYTVETDNFSSVLTIKNCLRRDTGEYQITVSNAAGSKTVAVHLTVLDVPGPPTGPINILDVTPEHMTISWQPPKDDGGSPVINYIVEKQDTRKDTWGVVSSGSSKTKLKIPHLQKGCEYVFRVRAENKIGVGPPLDSTPTVAKHKFSPPSPPGKPVVTDITENAATVSWTLPKSDGGSPITGYYMERREVTGKWVRVNKTPIADLKFRVTGLYEGNTYEFRVFAENLAGLSKPSPSSDPIKACRPIKPPGPPINPKLKDKSRETADLVWTKPLSDGGSPILGYVVECQKPGTAQWNRINKDELIRQCAFRVPGLIEGNEYRFRIKAANIVGEGEPRELAESVIAKDILHPPEVELDVTCRDVITVRVGQTIRILARVKGRPEPDITWTKEGKVLVREKRVDLIQDLPRVELQIKEAVRADHGKYIISAKNSSGHAQGSAIVNVLDRPGPCQNLKVTNVTKENCTISWENPLDNGGSEITNFIVEYRKPNQKGWSIVASDVTKRLIKANLLANNEYYFRVCAENKVGVGPTIETKTPILAINPIDRPGEPENLHIADKGKTFVYLKWRRPDYDGGSPNLSYHVERRLKGSDDWERVHKGSIKETHYMVDRCVENQIYEFRVQTKNEGGESDWVKTEEVVVKEDLQKPVLDLKLSGVLTVKAGDTIRLEAGVRGKPFPEVAWTKDKDATDLTRSPRVKIDTRADSSKFSLTKAKRSDGGKYVVTATNTAGSFVAYATVNVLDKPGPVRNLKIVDVSSDRCTVCWDPPEDDGGCEIQNYILEKCETKRMVWSTYSATVLTPGTTVTRLIEGNEYIFRVRAENKIGTGPPTESKPVIAKTKYDKPGRPDPPEVTKVSKEEMTVVWNPPEYDGGKSITGYFLEKKEKHSTRWVPVNKSAIPERRMKVQNLLPDHEYQFRVKAENEIGIGEPSLPSRPVVAKDPIEPPGPPTNFRVVDTTKHSITLGWGKPVYDGGAPIIGYVVEMRPKIADASPDEGWKRCNAAAQLVRKEFTVTSLDENQEYEFRVCAQNQVGIGRPAELKEAIKPKEILEPPEIDLDASMRKLVIVRAGCPIRLFAIVRGRPAPKVTWRKVGIDNVVRKGQVDLVDTMAFLVIPNSTRDDSGKYSLTLVNPAGEKAVFVNVRVLDTPGPVSDLKVSDVTKTSCHVSWAPPENDGGSQVTHYIVEKREADRKTWSTVTPEVKKTSFHVTNLVPGNEYYFRVTAVNEYGPGVPTDVPKPVLASDPLSEPDPPRKLEVTEMTKNSATLAWLPPLRDGGAKIDGYITSYREEEQPADRWTEYSVVKDLSLVVTGLKEGKKYKFRVAARNAVGVSLPREAEGVYEAKEQLLPPKILMPEQITIKAGKKLRIEAHVYGKPHPTCKWKKGEDEVVTSSHLAVHKADSSSILIIKDVTRKDSGYYSLTAENSSGTDTQKIKVVVMDAPGPPQPPFDISDIDADACSLSWHIPLEDGGSNITNYIVEKCDVSRGDWVTALASVTKTSCRVGKLIPGQEYIFRVRAENRFGISEPLTSPKMVAQFPFGVPSEPKNARVTKVNKDCIFVAWDRPDSDGGSPIIGYLIERKERNSLLWVKANDTLVRSTEYPCAGLVEGLEYSFRIYALNKAGSSPPSKPTEYVTARMPVDPPGKPEVIDVTKSTVSLIWARPKHDGGSKIIGYFVEACKLPGDKWVRCNTAPHQIPQEEYTATGLEEKAQYQFRAIARTAVNISPPSEPSDPVTILAENVPPRIDLSVAMKSLLTVKAGTNVCLDATVFGKPMPTVSWKKDGTLLKPAEGIKMAMQRNLCTLELFSVNRKDSGDYTITAENSSGSKSATIKLKVLDKPGPPASVKINKMYSDRAMLSWEPPLEDGGSEITNYIVDKRETSRPNWAQVSATVPITSCSVEKLIEGHEYQFRICAENKYGVGDPVFTEPAIAKNPYDPPGRCDPPVISNITKDHMTVSWKPPADDGGSPITGYLLEKRETQAVNWTKVNRKPIIERTLKATGLQEGTEYEFRVTAINKAGPGKPSDASKAAYARDPQYPPGPPAFPKVYDTTRSSVSLSWGKPAYDGGSPIIGYLVEVKRADSDNWVRCNLPQNLQKTRFEVTGLMEDTQYQFRVYAVNKIGYSDPSDVPDKHYPKDILIPPEGELDADLRKTLILRAGVTMRLYVPVKGRPPPKITWSKPNVNLRDRIGLDIKSTDFDTFLRCENVNKYDAGKYILTLENSCGKKEYTIVVKVLDTPGPPVNVTVKEISKDSAYVTWEPPIIDGGSPIINYVVQKRDAERKSWSTVTTECSKTSFRVANLEEGKSYFFRVFAENEYGIGDPGETRDAVKASQTPGPVVDLKVRSVSKSSCSIGWKKPHSDGGSRIIGYVVDFLTEENKWQRVMKSLSLQYSAKDLTEGKEYTFRVSAENENGEGTPSEITVVARDDVVAPDLDLKGLPDLCYLAKENSNFRLKIPIKGKPAPSVSWKKGEDPLATDTRVSVESSAVNTTLIVYDCQKSDAGKYTITLKNVAGTKEGTISIKVVGKPGIPTGPIKFDEVTAEAMTLKWAPPKDDGGSEITNYILEKRDSVNNKWVTCASAVQKTTFRVTRLHEGMEYTFRVSAENKYGVGEGLKSEPIVARHPFDVPDAPPPPNIVDVRHDSVSLTWTDPKKTGGSPITGYHLEFKERNSLLWKRANKTPIRMRDFKVTGLTEGLEYEFRVMAINLAGVGKPSLPSEPVVALDPIDPPGKPEVINITRNSVTLIWTEPKYDGGHKLTGYIVEKRDLPSKSWMKANHVNVPECAFTVTDLVEGGKYEFRIRAKNTAGAISAPSESTETIICKDEYEAPTIVLDPTIKDGLTIKAGDTIVLNAISILGKPLPKSSWSKAGKDIRPSDITQITSTPTSSMLTIKYATRKDAGEYTITATNPFGTKVEHVKVTVLDVPGPPGPVEISNVSAEKATLTWTPPLEDGGSPIKSYILEKRETSRLLWTVVSEDIQSCRHVATKLIQGNEYIFRVSAVNHYGKGEPVQSEPVKMVDRFGPPGPPEKPEVSNVTKNTATVSWKRPVDDGGSEITGYHVERREKKSLRWVRAIKTPVSDLRCKVTGLQEGSTYEFRVSAENRAGIGPPSEASDSVLMKDAAYPPGPPSNPHVTDTTKKSASLAWGKPHYDGGLEITGYVVEHQKVGDEAWIKDTTGTALRITQFVVPDLQTKEKYNFRISAINDAGVGEPAVIPDVEIVEREMAPDFELDAELRRTLVVRAGLSIRIFVPIKGRPAPEVTWTKDNINLKNRANIENTESFTLLIIPECNRYDTGKFVMTIENPAGKKSGFVNVRVLDTPGPVLNLRPTDITKDSVTLHWDLPLIDGGSRITNYIVEKREATRKSYSTATTKCHKCTYKVTGLSEGCEYFFRVMAENEYGIGEPTETTEPVKASEAPSPPDSLNIMDITKSTVSLAWPKPKHDGGSKITGYVIEAQRKGSDQWTHITTVKGLECVVRNLTEGEEYTFQVMAVNSAGRSAPRESRPVIVKEQTMLPELDLRGIYQKLVIAKAGDNIKVEIPVLGRPKPTVTWKKGDQILKQTQRVNFETTATSTILNINECVRSDSGPYPLTARNIVGEVGDVITIQVHDIPGPPTGPIKFDEVSSDFVTFSWDPPENDGGVPISNYVVEMRQTDSTTWVELATTVIRTTYKATRLTTGLEYQFRVKAQNRYGVGPGITSACIVANYPFKVPGPPGTPQVTAVTKDSMTISWHEPLSDGGSPILGYHVERKERNGILWQTVSKALVPGNIFKSSGLTDGIAYEFRVIAENMAGKSKPSKPSEPMLALDPIDPPGKPVPLNITRHTVTLKWAKPEYTGGFKITSYIVEKRDLPNGRWLKANFSNILENEFTVSGLTEDAAYEFRVIAKNAAGAISPPSEPSDAITCRDDVEAPKIKVDVKFKDTVILKAGEAFRLEADVSGRPPPTMEWSKDGKELEGTAKLEIKIADFSTNLVNKDSTRRDSGAYTLTATNPGGFAKHIFNVKVLDRPGPPEGPLAVTEVTSEKCVLSWFPPLDDGGAKIDHYIVQKRETSRLAWTNVASEVQVTKLKVTKLLKGNEYIFRVMAVNKYGVGEPLESEPVLAVNPYGPPDPPKNPEVTTITKDSMVVCWGHPDSDGGSEIINYIVERRDKAGQRWIKCNKKTLTDLRYKVSGLTEGHEYEFRIMAENAAGISAPSPTSPFYKACDTVFKPGPPGNPRVLDTSRSSISIAWNKPIYDGGSEITGYMVEIALPEEDEWQIVTPPAGLKATSYTITGLTENQEYKIRIYAMNSEGLGEPALVPGTPKAEDRMLPPEIELDADLRKVVTIRACCTLRLFVPIKGRPAPEVKWARDHGESLDKASIESTSSYTLLIVGNVNRFDSGKYILTVENSSGSKSAFVNVRVLDTPGPPQDLKVKEVTKTSVTLTWDPPLLDGGSKIKNYIVEKRESTRKAYSTVATNCHKTSWKVDQLQEGCSYYFRVLAENEYGIGLPAETAESVKASERPLPPGKITLMDVTRNSVSLSWEKPEHDGGSRILGYIVEMQTKGSDKWATCATVKVTEATITGLIQGEEYSFRVSAQNEKGISDPRQLSVPVIAKDLVIPPAFKLLFNTFTVLAGEDLKVDVPFIGRPTPAVTWHKDNVPLKQTTRVNAESTENNSLLTIKDACREDVGHYVVKLTNSAGEAIETLNVIVLDKPGPPTGPVKMDEVTADSITLSWGPPKYDGGSSINNYIVEKRDTSTTTWQIVSATVARTTIKACRLKTGCEYQFRIAAENRYGKSTYLNSEPTVAQYPFKVPGPPGTPVVTLSSRDSMEVQWNEPISDGGSRVIGYHLERKERNSILWVKLNKTPIPQTKFKTTGLEEGVEYEFRVSAENIVGIGKPSKVSECYVARDPCDPPGRPEAIIVTRNSVTLQWKKPTYDGGSKITGYIVEKKELPEGRWMKASFTNIIDTHFEVTGLVEDHRYEFRVIARNAAGVFSEPSESTGAITARDEVDPPRISMDPKYKDTIVVHAGESFKVDADIYGKPIPTIQWIKGDQELSNTARLEIKSTDFATSLSVKDAVRVDSGNYILKAKNVAGERSVTVNVKVLDRPGPPEGPVVISGVTAEKCTLAWKPPLQDGGSDIINYIVERRETSRLVWTVVDANVQTLSCKVTKLLEGNEYTFRIMAVNKYGVGEPLESEPVVAKNPFVVPDAPKAPEVTTVTKDSMIVVWERPASDGGSEILGYVLEKRDKEGIRWTRCHKRLIGELRLRVTGLIENHDYEFRVSAENAAGLSEPSPPSAYQKACDPIYKPGPPNNPKVIDITRSSVFLSWSKPIYDGGCEIQGYIVEKCDVSVGEWTMCTPPTGINKTNIEVEKLLEKHEYNFRICAINKAGVGEHADVPGPIIVEEKLEAPDIDLDLELRKIINIRAGGSLRLFVPIKGRPTPEVKWGKVDGEIRDAAIIDVTSSFTSLVLDNVNRYDSGKYTLTLENSSGTKSAFVTVRVLDTPSPPVNLKVTEITKDSVSITWEPPLLDGGSKIKNYIVEKREATRKSYAAVVTNCHKNSWKIDQLQEGCSYYFRVTAENEYGIGLPAQTADPIKVAEVPQPPGKITVDDVTRNSVSLSWTKPEHDGGSKIIQYIVEMQAKHSEKWSECARVKSLQAVITNLTQGEEYLFRVVAVNEKGRSDPRSLAVPIVAKDLVIEPDVKPAFSSYSVQVGQDLKIEVPISGRPKPTITWTKDGLPLKQTTRINVTDSLDLTTLSIKETHKDDGGQYGITVANVVGQKTASIEIVTLDKPDPPKGPVKFDDVSAESITLSWNPPLYTGGCQITNYIVQKRDTTTTVWDVVSATVARTTLKVTKLKTGTEYQFRIFAENRYGQSFALESDPIVAQYPYKEPGPPGTPFATAISKDSMVIQWHEPVNNGGSPVIGYHLERKERNSILWTKVNKTIIHDTQFKAQNLEEGIEYEFRVYAENIVGVGKASKNSECYVARDPCDPPGTPEPIMVKRNEITLQWTKPVYDGGSMITGYIVEKRDLPDGRWMKASFTNVIETQFTVSGLTEDQRYEFRVIAKNAAGAISKPSDSTGPITAKDEVELPRISMDPKFRDTIVVNAGETFRLEADVHGKPLPTIEWLRGDKEIEESARCEIKNTDFKALLIVKDAIRIDGGQYILRASNVAGSKSFPVNVKVLDRPGPPEGPVQVTGVTSEKCSLTWSPPLQDGGSDISHYVVEKRETSRLAWTVVASEVVTNSLKVTKLLEGNEYVFRIMAVNKYGVGEPLESAPVLMKNPFVLPGPPKSLEVTNIAKDSMTVCWNRPDSDGGSEIIGYIVEKRDRSGIRWIKCNKRRITDLRLRVTGLTEDHEYEFRVSAENAAGVGEPSPATVYYKACDPVFKPGPPTNAHIVDTTKNSITLAWGKPIYDGGSEILGYVVEICKADEEEWQIVTPQTGLRVTRFEISKLTEHQEYKIRVCALNKVGLGEATSVPGTVKPEDKLEAPELDLDSELRKGIVVRAGGSARIHIPFKGRPTPEITWSREEGEFTDKVQIEKGVNYTQLSIDNCDRNDAGKYILKLENSSGSKSAFVTVKVLDTPGPPQNLAVKEVRKDSAFLVWEPPIIDGGAKVKNYVIDKRESTRKAYANVSSKCSKTSFKVENLTEGAIYYFRVMAENEFGVGVPVETVDAVKAAEPPSPPGKVTLTDVSQTSASLMWEKPEHDGGSRVLGYVVEMQPKGTEKWSIVAESKVCNAVVTGLSSGQEYQFRVKAYNEKGKSDPRVLGVPVIAKDLTIQPSLKLPFNTYSIQAGEDLKIEIPVIGRPRPNISWVKDGEPLKQTTRVNVEETATSTVLHIKEGNKDDFGKYTVTATNSAGTATENLSVIVLEKPGPPVGPVRFDEVSADFVVISWEPPAYTGGCQISNYIVEKRDTTTTTWHMVSATVARTTIKITKLKTGTEYQFRIFAENRYGKSAPLDSKAVIVQYPFKEPGPPGTPFVTSISKDQMLVQWHEPVNDGGTKIIGYHLEQKEKNSILWVKLNKTPIQDTKFKTTGLDEGLEYEFKVSAENIVGIGKPSKVSECFVARDPCDPPGRPEAIVITRNNVTLKWKKPAYDGGSKITGYIVEKKDLPDGRWMKASFTNVLETEFTVSGLVEDQRYEFRVIARNAAGNFSEPSDSSGAITARDEIDAPNASLDPKYKDVIVVHAGETFVLEADIRGKPIPDVVWSKDGKELEETAARMEIKSTIQKTTLVVKDCIRTDGGQYILKLSNVGGTKSIPITVKVLDRPGPPEGPLKVTGVTAEKCYLAWNPPLQDGGANISHYIIEKRETSRLSWTQVSTEVQALNYKVTKLLPGNEYIFRVMAVNKYGIGEPLESGPVTACNPYKPPGPPSTPEVSAITKDSMVVTWARPVDDGGTEIEGYILEKRDKEGVRWTKCNKKTLTDLRLRVTGLTEGHSYEFRVAAENAAGVGEPSEPSVFYRACDALYPPGPPSNPKVTDTSRSSVSLAWSKPIYDGGAPVKGYVVEVKEAAADEWTTCTPPTGLQGKQFTVTKLKENTEYNFRICAINSEGVGEPATLPGSVVAQERIEPPEIELDADLRKVVVLRASATLRLFVTIKGRPEPEVKWEKAEGILTDRAQIEVTSSFTMLVIDNVTRFDSGRYNLTLENNSGSKTAFVNVRVLDSPSAPVNLTIREVKKDSVTLSWEPPLIDGGAKITNYIVEKRETTRKAYATITNNCTKTTFRIENLQEGCSYYFRVLASNEYGIGLPAETTEPVKVSEPPLPPGRVTLVDVTRNTATIKWEKPESDGGSKITGYVVEMQTKGSEKWSTCTQVKTLEATISGLTAGEEYVFRVAAVNEKGRSDPRQLGVPVIARDIEIKPSVELPFHTFNVKAREQLKIDVPFKGRPQATVNWRKDGQTLKETTRVNVSSSKTVTSLSIKEASKEDVGTYELCVSNSAGSITVPITIIVLDRPGPPGPIRIDEVSCDSITISWNPPEYDGGCQISNYIVEKKETTSTTWHIVSQAVARTSIKIVRLTTGSEYQFRVCAENRYGKSSYSESSAVVAEYPFSPPGPPGTPKVVHATKSTMLVTWQVPVNDGGSRVIGYHLEYKERSSILWSKANKILIADTQMKVSGLDEGLMYEYRVYAENIAGIGKCSKSCEPVPARDPCDPPGQPEVTNITRKSVSLKWSKPHYDGGAKITGYIVERRELPDGRWLKCNYTNIQETYFEVTELTEDQRYEFRVFARNAADSVSEPSESTGPIIVKDDVEPPRVMMDVKFRDVIVVKAGEVLKINADIAGRPLPVISWAKDGIEIEERARTEIISTDNHTLLTVKDCIRRDTGQYVLTLKNVAGTRSVAVNCKVLDKPGPPAGPLEINGLTAEKCSLSWGRPQEDGGADIDYYIVEKRETSHLAWTICEGELQMTSCKVTKLLKGNEYIFRVTGVNKYGVGEPLESVAIKALDPFTVPSPPTSLEITSVTKESMTLCWSRPESDGGSEISGYIIERREKNSLRWVRVNKKPVYDLRVKSTGLREGCEYEYRVYAENAAGLSLPSETSPLIRAEDPVFLPSPPSKPKIVDSGKTTITIAWVKPLFDGGAPITGYTVEYKKSDDTDWKTSIQSLRGTEYTISGLTTGAEYVFRVKSVNKVGASDPSDSSDPQIAKEREEEPLFDIDSEMRKTLIVKAGASFTMTVPFRGRPVPNVLWSKPDTDLRTRAYVDTTDSRTSLTIENANRNDSGKYTLTIQNVLSAASLTLVVKVLDTPGPPTNITVQDVTKESAVLSWDVPENDGGAPVKNYHIEKREASKKAWVSVTNNCNRLSYKVTNLQEGAIYYFRVSGENEFGVGIPAETKEGVKITEKPSPPEKLGVTSISKDSVSLTWLKPEHDGGSRIVHYVVEALEKGQKNWVKCAVAKSTHHVVSGLRENSEYFFRVFAENQAGLSDPRELLLPVLIKEQLEPPEIDMKNFPSHTVYVRAGSNLKVDIPISGKPLPKVTLSRDGVPLKATMRFNTEITAENLTINLKESVTADAGRYEITAANSSGTTKAFINIVVLDRPGPPTGPVVISDITEESVTLKWEPPKYDGGSQVTNYILLKRETSTAVWTEVSATVARTMMKVMKLTTGEEYQFRIKAENRFGISDHIDSACVTVKLPYTTPGPPSTPWVTNVTRESITVGWHEPVSNGGSAVVGYHLEMKDRNSILWQKANKLVIRTTHFKVTTISAGLIYEFRVYAENAAGVGKPSHPSEPVLAIDACEPPRNVRITDISKNSVSLSWQQPAFDGGSKITGYIVERRDLPDGRWTKASFTNVTETQFIISGLTQNSQYEFRVFARNAVGSISNPSEVVGPITCIDSYGGPVIDLPLEYTEVVKYRAGTSVKLRAGISGKPAPTIEWYKDDKELQTNALVCVENTTDLASILIKDADRLNSGCYELKLRNAMGSASATIRVQILDKPGPPGGPIEFKTVTAEKITLLWRPPADDGGAKITHYIVEKRETSRVVWSMVSEHLEECIITTTKIIKGNEYIFRVRAVNKYGIGEPLESDSVVAKNAFVTPGPPGIPEVTKITKNSMTVVWSRPIADGGSDISGYFLEKRDKKSLGWFKVLKETIRDTRQKVTGLTENSDYQYRVCAVNAAGQGPFSEPSEFYKAADPIDPPGPPAKIRIADSTKSSITLGWSKPVYDGGSAVTGYVVEIRQGEEEEWTTVSTKGEVRTTEYVVSNLKPGVNYYFRVSAVNCAGQGEPIEMNEPVQAKDILEAPEIDLDVALRTSVIAKAGEDVQVLIPFKGRPPPTVTWRKDEKNLGSDARYSIENTDSSSLLTIPQVTRNDTGKYILTIENGVGEPKSSTVSVKVLDTPAACQKLQVKHVSRGTVTLLWDPPLIDGGSPIINYVIEKRDATKRTWSVVSHKCSSTSFKLIDLSEKTPFFFRVLAENEIGIGEPCETTEPVKAAEVPAPIRDLSMKDSTKTSVILSWTKPDFDGGSVITEYVVERKGKGEQTWSHAGISKTCEIEVSQLKEQSVLEFRVFAKNEKGLSDPVTIGPITVKELIITPEVDLSDIPGAQVTVRIGHNVHLELPYKGKPKPSISWLKDGLPLKESEFVRFSKTENKITLSIKNAKKEHGGKYTVILDNAVCRIAVPITVITLGPPSKPKGPIRFDEIKADSVILSWDVPEDNGGGEITCYSIEKRETSQTNWKMVCSSVARTTFKVPNLVKDAEYQFRVRAENRYGVSQPLVSSIIVAKHQFRIPGPPGKPVIYNVTSDGMSLTWDAPVYDGGSEVTGFHVEKKERNSILWQKVNTSPISGREYRATGLVEGLDYQFRVYAENSAGLSSPSDPSKFTLAVSPVDPPGTPDYIDVTRETITLKWNPPLRDGGSKIVGYSIEKRQGNERWVRCNFTDVSECQYTVTGLSPGDRYEFRIIARNAVGTISPPSQSSGIIMTRDENVPPIVEFGPEYFDGLIIKSGESLRIKALVQGRPVPRVTWFKDGVEIEKRMNMEITDVLGSTSLFVRDATRDHRGVYTVEAKNASGSAKAEIKVKVQDTPGKVVGPIRFTNITGEKMTLWWDAPLNDGCAPITHYIIEKRETSRLAWALIEDKCEAQSYTAIKLINGNEYQFRVSAVNKFGVGRPLDSDPVVAQIQYTVPDAPGIPEPSNITGNSITLTWARPESDGGSEIQQYILERREKKSTRWVKVISKRPISETRFKVTGLTEGNEYEFHVMAENAAGVGPASGISRLIKCREPVNPPGPPTVVKVTDTSKTTVSLEWSKPVFDGGMEIIGYIIEMCKADLGDWHKVNAEACVKTRYTVTDLQAGEEYKFRVSAINGAGKGDSCEVTGTIKAVDRLTAPELDIDANFKQTHVVRAGASIRLFIAYQGRPTPTAVWSKPDSNLSLRADIHTTDSFSTLTVENCNRNDAGKYTLTVENNSGSKSITFTVKVLDTPGPPGPITFKDVTRGSATLMWDAPLLDGGARIHHYVVEKREASRRSWQVISEKCTRQIFKVNDLAEGVPYYFRVSAVNEYGVGEPYEMPEPIVATEQPAPPRRLDVVDTSKSSAVLAWLKPDHDGGSRITGYLLEMRQKGSDFWVEAGHTKQLTFTVERLVEKTEYEFRVKAKNDAGYSEPREAFSSVIIKEPQIEPTADLTGITNQLITCKAGSPFTIDVPISGRPAPKVTWKLEEMRLKETDRVSITTTKDRTTLTVKDSMRGDSGRYFLTLENTAGVKTFSVTVVVIGRPGPVTGPIEVSSVSAESCVLSWGEPKDGGGTEITNYIVEKRESGTTAWQLVNSSVKRTQIKVTHLTKYMEYSFRVSSENRFGVSKPLESAPIIAEHPFVPPSAPTRPEVYHVSANAMSIRWEEPYHDGGSKIIGYWVEKKERNTILWVKENKVPCLECNYKVTGLVEGLEYQFRTYALNAAGVSKASEASRPIMAQNPVDAPGRPEVTDVTRSTVSLIWSAPAYDGGSKVVGYIIERKPVSEVGDGRWLKCNYTIVSDNFFTVTALSEGDTYEFRVLAKNAAGVISKGSESTGPVTCRDEYAPPKAELDARLHGDLVTIRAGSDLVLDAAVGGKPEPKIIWTKGDKELDLCEKVSLQYTGKRATAVIKFCDRSDSGKYTLTVKNASGTKAVSVMVKVLDSPGPCGKLTVSRVTQEKCTLAWSLPQEDGGAEITHYIVERRETSRLNWVIVEGECPTLSYVVTRLIKNNEYIFRVRAVNKYGPGVPVESEPIVARNSFTIPSPPGIPEEVGTGKEHIIIQWTKPESDGGNEISNYLVDKREKKSLRWTRVNKDYVVYDTRLKVTSLMEGCDYQFRVTAVNAAGNSEPSEASNFISCREPSYTPGPPSAPRVVDTTKHSISLAWTKPMYDGGTDIVGYVLEMQEKDTDQWYRVHTNATIRNTEFTVPDLKMGQKYSFRVAAVNVKGMSEYSESIAEIEPVERIEIPDLELADDLKKTVTIRAGASLRLMVSVSGRPPPVITWSKQGIDLASRAIIDTTESYSLLIVDKVNRYDAGKYTIEAENQSGKKSATVLVKVYDTPGPCPSVKVKEVSRDSVTITWEIPTIDGGAPVNNYIVEKREAAMRAFKTVTTKCSKTLYRISGLVEGTMYYFRVLPENIYGIGEPCETSDAVLVSEVPLVPAKLEVVDVTKSTVTLAWEKPLYDGGSRLTGYVLEACKAGTERWMKVVTLKPTVLEHTVTSLNEGEQYLFRIRAQNEKGVSEPRETVTAVTVQDLRVLPTIDLSTMPQKTIHVPAGRPVELVIPIAGRPPPAASWFFAGSKLRESERVTVETHTKVAKLTIRETTIRDTGEYTLELKNVTGTTSETIKVIILDKPGPPTGPIKIDEIDATSITISWEPPELDGGAPLSGYVVEQRDAHRPGWLPVSESVTRSTFKFTRLTEGNEYVFRVAATNRFGIGSYLQSEVIECRSSIRIPGPPETLQIFDVSRDGMTLTWYPPEDDGGSQVTGYIVERKEVRADRWVRVNKVPVTMTRYRSTGLTEGLEYEHRVTAINARGSGKPSRPSKPIVAMDPIAPPGKPQNPRVTDTTRTSVSLAWSVPEDEGGSKVTGYLIEMQKVDQHEWTKCNTTPTKIREYTLTHLPQGAEYRFRVLACNAGGPGEPAEVPGTVKVTEMLEYPDYELDERYQEGIFVRQGGVIRLTIPIKGKPFPICKWTKEGQDISKRAMIATSETHTELVIKEADRGDSGTYDLVLENKCGKKAVYIKVRVIGSPNSPEGPLEYDDIQVRSVRVSWRPPADDGGADILGYILERREVPKAAWYTIDSRVRGTSLVVKGLKENVEYHFRVSAENQFGISKPLKSEEPVTPKTPLNPPEPPSNPPEVLDVTKSSVSLSWSRPKDDGGSRVTGYYIERKETSTDKWVRHNKTQITTTMYTVTGLVPDAEYQFRIIAQNDVGLSETSPASEPVVCKDPFDKPSQPGELEILSISKDSVTLQWEKPECDGGKEILGYWVEYRQSGDSAWKKSNKERIKDKQFTIGGLLEATEYEFRVFAENETGLSRPRRTAMSIKTKLTSGEAPGIRKEMKDVTTKLGEAAQLSCQIVGRPLPDIKWYRFGKELIQSRKYKMSSDGRTHTLTVMTEEQEDEGVYTCIATNEVGEVETSSKLLLQATPQFHPGYPLKEKYYGAVGSTLRLHVMYIGRPVPAMTWFHGQKLLQNSENITIENTEHYTHLVMKNVQRKTHAGKYKVQLSNVFGTVDAILDVEIQDKPDKPTGPIVIEALLKNSAVISWKPPADDGGSWITNYVVEKCEAKEGAEWQLVSSAISVTTCRIVNLTENAGYYFRVSAQNTFGISDPLEVSSVVIIKSPFEKPGAPGKPTITAVTKDSCVVAWKPPASDGGAKIRNYYLEKREKKQNKWISVTTEEIRETVFSVKNLIEGLEYEFRVKCENLGGESEWSEISEPITPKSDVPIQAPHFKEELRNLNVRYQSNATLVCKVTGHPKPIVKWYRQGKEIIADGLKYRIQEFKGGYHQLIIASVTDDDATVYQVRATNQGGSVSGTASLEVEVPAKIHLPKTLEGMGAVHALRGEVVSIKIPFSGKPDPVITWQKGQDLIDNNGHYQVIVTRSFTSLVFPNGVERKDAGFYVVCAKNRFGIDQKTVELDVADVPDPPRGVKVSDVSRDSVNLTWTEPASDGGSKITNYIVEKCATTAERWLRVGQARETRYTVINLFGKTSYQFRVIAENKFGLSKPSEPSEPTITKEDKTRAMNYDEEVDETREVSMTKASHSSTKELYEKYMIAEDLGRGEFGIVHRCVETSSKKTYMAKFVKVKGTDQVLVKKEISILNIARHRNILHLHESFESMEELVMIFEFISGLDIFERINTSAFELNEREIVSYVHQVCEALQFLHSHNIGHFDIRPENIIYQTRRSSTIKIIEFGQARQLKPGDNFRLLFTAPEYYAPEVHQHDVVSTATDMWSLGTLVYVLLSGINPFLAETNQQIIENIMNAEYTFDEEAFKEISIEAMDFVDRLLVKERKSRMTASEALQHPWLKQKIERVSTKVIRTLKHRRYYHTLIKKDLNMVVSAARISCGGAIRSQKGVSVAKVKVASIEIGPVSGQIMHAVGEEGGHVKYVCKIENYDQSTQVTWYFGVRQLENSEKYEITYEDGVAILYVKDITKLDDGTYRCKVVNDYGEDSSYAELFVKGVREVYDYYCRRTMKKIKRRTDTMRLLERPPEFTLPLYNKTAYVGENVRFGVTITVHPEPHVTWYKSGQKIKPGDNDKKYTFESDKGLYQLTINSVTTDDDAEYTVVARNKYGEDSCKAKLTVTLHPPPTDSTLRPMFKRLLANAECQEGQSVCFEIRVSGIPPPTLKWEKDG

SEQ ID NO: 21764 - skipped

SEQ ID NO: 21765 - protein, 563 aa, Homo sapiens
MANSSFIGDHVHGAPHAVMPEVEFPDQFFTVLTMDHELVTLRDVVINFSQEEWEYLDSAQRNLYWDVMMENYSNLLSLDLESRNETKHLSVGKDIIQNTGSQWEVMESSKLCGLEGSIFRNDWQSKSKIDLQGPEVGYFSQMKIISENVPSYKTHESLTLPRRTHDSEKPYEYKEYEKVFSCDLEFDEYQKIHTGGKNYECNQCWKTFGIDNSSMLQLNIHTGVKPCKYMEYGNTCSFYKDFNVYQKIHNEKFYKCKEYRRTFERVGKVTPLQRVHDGEKHFECSFCGKSFRVHAQLTRHQKIHTDEKTYKCMECGKDFRFHSQLTEHQRIHTGEKPYKCMHCEKVFRISSQLIEHQRIHTGEKPYACKECGKAFGVCRELARHQRIHTGKKPYECKACGKVFRNSSSLTRHQRIHTGEKPYKCKECEKAFGVGSELTRHERIHSGQKPYECKECGKFFRLTSALIQHQRIHSGEKPYECKVCGKAFRHSSALTEHQRIHTGEKPYECKACGKAFRHSSSFTKHQRIHTDDKPYECKECGNSFSVVGHLTCQPKIYTGEKSFD

SEQ ID NO: 21766 - protein, 97 aa, Homo sapiens
MEPKVINQMLSKAAQSGQWKYGQHACFCQKQGSGNNWAYGYSVHGPRHEESIMNIIRKEVEKCDSFSGFFIIMSMAGGTGSGLGAFVTQNLEDQYSN

SEQ ID NO: 21767 - protein, 845 aa, Homo sapiens
MTIPDVFPHLPLIAITRNPVFPRFIKIIEVKNKKLVELLRRKVRLAQPYVGVFLKRDDSNESDVVESLDEIYHTGTFAQIHEMQDLGDKLRMIVMGHRRVHISRQLEVEPEEPEAENKHKPRRKSKRGKKEAEDELSARHPAELAMEPTPELPAEVLMVEVENVVHEDFQVTEEVKALTAEIVKTIRDIIALNPLYRESVLQMMQAGQRVVDNPIYLSDMGAALTGAESHELQDVLEETNIPKRLYKALSLLKKEFELSKLQQRLGREVEEKIKQTHRKYLLQEQLKIIKKELGLEKDDKDAIEEKFRERLKELVVPKHVMDVVDEELSKLGLLDNHSSEFNVTRNYLDWLTSIPWGKYSNENLDLARAQAVLEEDHYGMEDVKKRILEFIAVSQLRGSTQGKILCFYGPPGVGKTSIARSIARALNREYFRFSVGGMTDVAEIKGHRRTYVGAMPGKIIQCLKKTKTENPLILIDEVDKIGRGYQGDPSSALLELLDPEQNANFLDHYLDVPVDLSKVLFICTANVTDTIPEPLRDRMEMINVSGYVAQEKLAIAERYLVPQARALCGLDESKAKLSSDVLTLLIKQYCRESGVRNLQKQVEKVLRKSAYKIVSGEAESVEVTPENLQDFVGKPVFTVERMYDVTPPGVVMGLAWTAMGGSTLFVETSLRRPQDKDAKGDKDGSLEVTGQLGEVMKESARIAYTFARAFLMQHAPANDYLVTSHIHLHVPEGATPKDGPSAGCTIVTALLSLAMGRPVRQNLAMTGEVSLTGKILPVGGIKEKTIAAKRAGVTCIVLPAENKKDFYDLAAFITEGLEVHFVEHYREIFDIAFPDEQAEALAVER

SEQ ID NO: 21768 - protein, 881 aa, Homo sapiens
VMAFGILNYFRDAWNIFDFVTVLGSITDILVTEFGNPNNFINLSFLRLFRAARLIKLLRQGYTIRILLWTFVQSFKALPYVCLLIAMLFFIYAIIGMQVFGNIGIDVEDEDSDEDEFQITEHNNFRTFFQALMLLFRSATGEAWHNIMLSCLSGKPCDKNSGILTRECGNEFAYFYFVSFIFLCSFLMLNLFVAVIMDNFEYLTRDSSILGPHHLDEYVRVWAEYDPAAWGRMPYLDMYQMLRHMSPPLGLGKKCPARVAYKRLLRMDLPVADDNTVHFNSTLMALIRTALDIKIAKGGADKQQMDAELRKEMMAIWPNLSQKTLDLLVTPHKSTDLTVGKIYAAMMIMEYYRQSKAKKLQAMREEQDRTPLMFQRMEPPSPTQEGGPGQNALPSTQLDPGGALMAHESGLKESPSWVTQRAQEMFQKTGTWSPEQGPPTDMPNSQPNSQSVEMREMGRDGYSDSEHYLPMEGQGRAASMPRLPAENQTISDTSPMKRSASVLGPKARRLDDYSLERVPPEENQRHHQRRRDRSHRASERSLGRYTDVDTGLGTDLSMTTQSGDLPSKERDQERGRPKDRKHRQHHHHHHHHHHPPPPDKDRYAQERPDHGRARARDQRWSRSPSEGREHMAHRQGSSSVSGSPAPSTSGTSTPRRGRRQLPQTPSTPRPHVSYSPVIRKAGGSGPPQQQQQQQQQQQQQAVARPGRAATSGPRRYPGPTAEPLAGDRPPTGGHSSGRSPRMERRVPGPARSESPRACRHGGARWPASGPHVSEGPPGPRHHGYYRGSDYDEADGPGSGGGEEAMAGAYDAPPPVRHASSGATGRSPRTPRASGPACASPSRHGRRLPNGYYPAHGLARPRGPGSRKGLHEPYSESDDDWC

SEQ ID NO: 21769 - protein, 174 aa, Homo sapiens
GCDRGWHKFQGHCYRYFAHRRAWEDAEKDCRRRSGHLTSVHSPEEHSFINSFGHENTWIGLNDRIVERDFQWTDNTGLQFENWRENQPDNFFAGGEDCVVMVAHESGRWNDVPCNYNLPYVCKKGTARRSHRMRRHHHHHQHHHQHHHHKSRKERRKHKKHPTEDWEKDEGNFC

SEQ ID NO: 21770 - protein, 167 aa, Homo sapiens
QVIHQLGPGLRSKMAIQTQQSKFVNWQVDGEYRGSDFTAAVTLGNPDVLVGSGILVAHYLQSITPCLALGGELVYHRRPGEEGTVMSLAGKYTLNNWLATVTLGQAGMHATYYHKASDQLQVGVEFEASTRMQDTSVSFGYQLDLPKANLLFKGKGLGSPTRETGRR

SEQ ID NO: 21771 - protein, 261 aa, Homo sapiens
MERRRITSAARRSYVSSGEMMVGGLAPGRRLGPGTRLSLARMPPPLPTRVDFSLAGALNAGFKETRASERAEMMELNDRFASYIEKVRFLEQQNKALAAELNQLRAKEPTKLADVYQAELRELRLRLDQLTANSARLEVERDNLAQDLATVRQKLQDETNLRLEAENNLAAYRQEVRELQEQLARQQVHVELDVAKPDLTAALKEIRTQYEAMASSNMHEAEEWYRSKFADLTDAAARNAELLRQAKHEANDYRRQLQSLT

SEQ ID NO: 21772 - protein, 2055 aa, Homo sapiens
MFKGLSKGSQGKGSPKGSPAKGSPKGSPSRHSRAATQELALLISRMQANADQVERDILETQKRLQQDRLNSEQSQALQHQQETGRSLKEAEVLLKDLFLDVDKARRLKHPQAEEIEKDIKQLHERVTQECAEYRALYEKMVLPPDVGPRVDWARVLEQKQKQVCAGQYGPGMAELEQQIAEHNILQKEIDAYGQQLRSLVGPDAATIRSQYRDLLKAASWRGQSLGSLYTHLQGCTRQLSALAEQQRRILQQDWSDLMADPAGVRREYEHFKQHELLSQEQSVNQLEDDGERMVELRHPAVGPIQAHQEALKMEWQNFLNLCICQETQLQHVEDYRRFQEEADSVSQTLAKLNSNLDAKYSPAPGGPPGAPTELLQQLEAEEKRLAVTERATGDLQRRSRDVAPLPQRRNPPQQPLHVDSICDWDSGEVQLLQGERYKLVDNTDPHAWVVQGPGGETKRAPAACFCIPAPDPDAVARASRLASELQALKQKLATVQSRLKASAVESLRPSQQGTQGGPGRGGCGARRSRFRLPTAPSGSDLANPQAQKLLTQMTRLDGDLGQIERQVLAWARAPLSRPTPLEDLEGRIHSHEGTAQRLQSLGTEKETAQKECEAFLSTRPVGPAALQLPVALNSVKNKFSDVQVLCSLYGEKAKAALDLERQIQDADRVIRGFEATLVQEAPIPAEPGALQERVSELQRQRRELLEQQTCVLRLHRALKASEHACAALQNNFQEFCQDLPRQQRQVRALTDRYHAVGDQLDLREKVVQDAALTYQQFKNCKDNLSSWLEHLPRSQVRPSDGPSQIAYKLQAQKRLTQEIQSRERDRATASHLSQALQAALQDYELQADTYRCSLEPTLAVSAPKRPRVAPLQESIQAQEKNLAKAYTEVAAAQQQLLQQLEFARKMLEKKELSEDIRRTHDAKQGSESPAQAGRESEALKAQLEEERKRVARVQHELEAQRSQLLQLRTQRPLERLEEKEVVEFYRDPQLEGSLSRVKAQVEEEGKRRAGLQADLEVAAQKVVQLESKRKTMQPHLLTKEVTQVERDPGLDSQAAQLRIQIQQLRGEDAVISARLEGLKKELLALEKREVDVKEKVVVKEVVKVEKNLEMVKAAQALRLQMEEDAARRKQAEEAVAKLQARIEDLERAISSVEPKVIVKEVKKVEQDPGLLQESSRLRSLLEEERTKNATLARELSDLHSKYSVVEKQRPKVQLQERVHEIFQVDPETEQEITRLKAKLQEMAGKRSGVEKEVEKLLPDLEVLRAQKPTVEYKEVTQEVVRHERSPEVLREIDRLKAQLNELVNSHGRSQEQLIRLQGERDEWRRERAKVETKTVSKEVVRHEKDPVLEKEAERLRQEVREAAQKRRAAEDAVYELQSKRLLLERRKPEEKVVVQEVVVTQKDPKLREEHSRLSGSLDEEVGRRRQLELEVQQLRAGVEEQEGLLSFQEDRSKKLAVERELRQLTLRIQELEKRPPTVQEKIIMEEVVKLEKDPDLEKSTEALRWDLDQEKTQVTELNRECKNLQVQIDVLQKAKSQEKTIYKEVIRVQKDRVLEDERARVWEMLNRERTARQAREEEARRLRERIDRAETLGRTWSREESELQRARDQADQECGRLQQELRALERQKQQQTLQLQEESKLLSQKTESERQKAAQRGQELSRLEAAILREKDQIYEKERTLRDLHAKVSREELSQETQTRETNLSTKISILEPETGKDMSPYEAYKRGIIDRGQYLQLQELECDWEEVTTSGPCGEESVLLDRKSGKQYSIEAALRCRRISKEEYHLYKDGHLPISEFALLVAGETKPSSSLSIGSIISKSPLASPAPQSTSFFSPSFSLGLGDDSFPIAGIYDTTTDNKCSIKTAVAKNMLDPITGQKLLEAQAATGGIVDLLSRERYSVHKAMERGLIENTSTQRLLNAQKAFTGIEDPVTKKRLSVGEAVQKGWMPRESVLPHLQVQHLTGGLIDPKRTGRIPIQQALLSGMISEELAQLLQDESSYEKDLTDPISKERLSYKEAMGRCRKDPLSGLLLLPAALEGYRCYRSASPTVPRSLR

SEQ ID NO: 21773 - protein, 1754 aa, Homo sapiens
MNSLFRKRNKGKYSPTVQTRSISNKELSELIEQLQKNADQVEKNIVDTEAKMQSDLARLQEGRQPEHRDVTLQKVLDSEKLLYVLEADAAIAKHMKHPQGDMIAEDIRQLKERVTNLRGKHKQIYRLAVKEVDPQVNWAALVEEKLDKLNNQSFGTDLPLVDHQVEEHNIFHNEVKAIGPHLAKDGDKNSELRAKYQKLLAASQARQQHLSSLQDYMQRCTNELYWLDQQAKGRMQYDWSDRNLDYPSRRRQYENFINRNLEAKEERINKLHSEGDQLLAAEHPGRNSIEAHMEAVHADWKEYLNLLICEESHLKYMEDYHQFHEDVKDAQELLRKVDSDLNQKYGPDFKDRYQIELLLRELDDQEKVLDKYEDVVQGLQKRGQQVVPLKYRRETPLKPIPVEALCDFEGEQGLISRGYSYTLQKNNGESWELMDSAGNKLIAPAVCFVIPPTDPEALALADSLGSQYRSVRQKAAGSKRTLQQRYEVLKTENPGDASDLQGRQLLAGLDKVASDLDRQEKAITGILRPPLEQGRAVQDSAERAKDLKNITNELLRIEPEKTRSTAEGEAFIQALPGSGTTPLLRTRVEDTNRKYEHLLQLLDLAQEKVDVANRLEKSLQQSWELLATHENHLNQDDTVPESSRVLDSKGQELAAMACELQAQKSLLGEVEQNLQAAKQCSSTLASRFQEHCPDLERQEAEVHKLGQRFNNLRQQVERRAQSLQSAKAAYEHFHRGHDHVLQFLVSIPSYEPQETDSLSQMETKLKNQKNLLDEIASREQEVQKICANSQQYQQAVKDYELEAEKLRSLLDLENGRRSHVSKRARLQSPATKVKEEEAALAAKFTEVYAINRQRLQNLEFALNLLRQQPEVEVTHETLQRNRPDSGVEEAWKIRKELDEETERRRQLENEVKSTQEEIWTLRNQGPQESVVRKEVLKKVPDPVLEESFQQLQRTLAEEQHKNQLLQEELEALQLQLRALEQETRDGGQEYVVKEVLRIEPDRAQADEVLQLREELEALRRQKGAREAEVLLLQQRVAALAEEKSRAQEKVTEKEVVKLQNDPQLEAEYQQLQEDHQRQDQLREKQEEELSFLQDKLKRLEKERAMAEGKITVKEVLKVEKDAATEREVSDLTRQYEDEAAKARASQREKTELLRKIWALEEENAKVVVQEKVREIVRPDPKAESEVANLRLELVEQERKYRGAEEQLRSYQSELEALRRRGPQVEVKEVTKEVIKYKTDPEMEKELQRLREEIVDKTRLIERCDLEIYQLKKEIQALKDTKPQVQTKEVVQEILQFQEDPQTKEEVASLRAKLSEEQKKQVDLERERASQEEQIARKEEELSRVKERVVQQEVVRYEEEPGLRAEASAFAESIDVELRQIDKLRAELRRLQRRRTELERQLEELERERQARREAEREVQRLQQRLAALEQEEAEAREKVTHTQKVVLQQDPQQAREHALLRLQLEEEQHRRQLLEGELETLRRKLAALEKAEVKEKVVLSESVQVEKGDTEQEIQRLKSSLEEESRSKRELDVEVSRLEARLSELEFHNSKSSKELDFLREENHKLQLERQNLQLETRRLQSEINMAATETRDLRNMTVADSGTNHDSRLWSLERELDDLKRLSKDKDLEIDELQKRLGSVAVKREQRENHLRRSIVVIHPDTGRELSPEEAHRAGLIDWNMFVKLRSQECDWEEISVKGPNGESSVIHDRKSGKKFSIEEALQSGRLTPAQYDRYVNKDMSIQELAVLVSGQK

SEQ ID NO: 21774 - protein, 851 aa, Homo sapiens
MAQVLHVPAPFPGTPGPASPPAFPAKDPDPPYSVETPYGYRLDLDFLKYVDDIEKGHTLRRVAVQRRPRLSSLPRGPGSWWTSTESLCSNASGDSRHSAYSYCGRGFYPQYGALETRGGFNPRVERTLLDARRRLEDQAATPTGLGSLTPSAAGSTASLVGVGLPPPTPRSSGLSTPVPPSAGHLAHVREQMAGALRKLRQLEEQVKLIPVLQVKLSVLQEEKRQLTVQLKSQKFLGHPTAGRGRSELCLDLPDPPEDPVALETRSVGTWVRERDLGMPDGEAALAAKVAVLETQLKKALQELQAAQARQADPQPQAWPPPDSPVRVDTVRVVEGPREVEVVASTAAGAPAQRAQSLEPYGTGLRALAMPGRPESPPVFRSQEVVETMCPVPAAATSNVHMVKKISITERSCDGAAGLPEVPAESSSSPPGSEVASLTQPEKSTGRVPTQEPTHREPTRQAASQESEEAGGTGGPPAGVRSIMKRKEEVADPTAHRRSLQFVGVNGGYESSSEDSSTAENISDNDSTENEAPEPRERVPSVAEAPQLRPAGTAAAKTSRQECQLSRESQHIPTAEGASGSNTEEEIRMELSPDLISACLALEKYLDNPNALTERELKVAYTTVLQEWLRLACRSDAHPELVRRHLVTFRAMSARLLDYVVNIADSNGNTALHYSVSHANFPVVQQLLDSGVCKVDKQNRAGYSPIMLTALATLKTQDDIETVLQLFRLGNINAKASQAGQTALMLAVSHGRVDVVKALLACEADVNVQDDDGSTALMCACEHGHKEIAGLLLAVPSCDISLTDRDGSTALMVALDAGQSEIASMLYSRMNIKCSFAPMSDDESPTSSSAEE

SEQ ID NO: 21775 - protein, 499 aa, Homo sapiens
MDEFHPFIEALLPHVRAFAYTWFNLQARKRKYFKKHEKRMSKDEERAVKDELLGEKPEVKQKWASRLLAKLRKDIRPECREDFVLSITGKKAPGCVLSNPDQKGKMRRIDCLRQADKVWRLDLVMVILFKGIPLESTDGERLVKAAQCGHPVLCVQPHHIGVAVKELDLYLAYFVRERDAEQSGSPRTGMGSDQEDSKPITLDTTDFQESFVTSGVFSVTELIQVSRTPVVTGTGPNFSLGELQGHLAYDLNPASTGLRRTLPSTSSSGSKRHKSGSMEEDVDTSPGGDYYTSPSSPTSSSRNWTEDMEGGISSPVKKTEMDKSPFNSPSPQDSPRLSSFTQHHRPVIAVHSGIARSPHPSSALHFPTTSILPQTASTYFPHTAIRYPPHLNPQDPLKDLVSLACDPASQQPGPLNGSGQLKMPSHCLSAQMLAPPPPGLPRLALPPATKPATTSEGGATSPTSPSYSPPDTSPANRSFVGLGPRDPAGIYQAQSWYLG

SEQ ID NO: 21776 - protein, 281 aa, Homo sapiens
MAEKGDCIASVYGYDLGGRFVDFQPLGFGVNGLVLSAVDSRACRKVAVKKIALSDARSMKHALREIKIIRRLDHDNIVKVYEVLGPKGTDLQGELFKFSVAYIVQEYMETDLARLLEQGTLAEEHAKLFMYQLLRGLKYIHSANVLHRDLKPANIFISTEDLVLKIGDFGLARIVDQHYSHKSTDCITSIVGHIPEPSEKGEVREVPFVLLSVLCKSNWGEFQSCGVGAAVKRLESEGTLGPGGLMEDSVMLDYVVSLPSLPLHPLLWSRDNDSSHPGRAS

SEQ ID NO: 21777 - protein, 152 aa, Homo sapiens
GSFPPQSCIFSQVLNMGAALAAWICIVRYHQLRDWGVRRWPNQLILWTGLLCALGTSVVGNFQEKNQRPTHLAGAFLAFILGNVYFWLQLLLWRLKRLPQPGAAWIGPLRLGLCSVCTILIVAMIVLHACSLRSVSAACEWVVAMLLFALFG

SEQ ID NO: 21778 - protein, 621 aa, Homo sapiens
MADFEELRNMVSSFRVSELQVLLGFAGRNKSGRKHDLLMRALHLLKSGCSPAVQIKIRELYRRRYPRTLEGLSDLSTIKSSVFSLDGGSSPVEPDLAVAGIHSLPSTSVTPHSPSSPVGSVLLQDTKPTFEMQQPSPPIPPVHPDVQLKNLPFYDVLDVLIKPTSLVQSSIQRFQEKFFIFALTPQQVREICISRDFLPGGRRDYTVQVQLRLCLAETSCPQEDNYPNSLCIKVNGKLFPLPGYAPPPKNGIEQKRPGRPLNITSLVRLSSAVPNQISISWASEIGKNYSMSVYLVRQLTSAMLLQRLKMKGIRNPDHSRALIKEKLTADPDSEIATTSLRVSLMCPLGKMRLTIPCRAVTCTHLQCFDAALYLQMNEKKPTWICPVCDKKAAYESLILDGLFMEILNDCSDVDEIKFQEDGSWCPMRPKKEAMKVSSQPCTKIESSSVLSKPCSVTVASEASKKKVDVIDLTIESSSDEEEDPPAKRKCIFMSETQSSPTKGVLMYQPSSVRVPSVTSVDPAAIPPSLTDYSVPFHHTPISSMSSDLPGLDFLSLIPVDPQYCPPMFLDSLTSPLTASSTSVTTTSSHESSTHVSSSSSRSETGVITSSGSNIPDIISLD

SEQ ID NO: 21779 - protein, 292 aa, Homo sapiens
LAQRRGRGPGGPQSTPRNPRVSRGERSHCPTQTVKKLLEEQRRRQQQQPDAGGVQGQFLPPPEQPLTPSVNEAVTGHPPFPAHSETVGSGPSSLGFPDWDPNTHAAYTDSPYSCPASAAENFLPPDFYPPSDPGQPCPFPQGMEDPPDTQFYVGSSLPQAGPWRVSAPPSGPPQFPAVVPGPSLEVARAHMLALGPQQLLAQDEEGDTLLHLFAARGLRWAAYAAAEVLQVYRRLDIREHKGKTPLLVAAAANQPLIVEDLLNLGAEPNAADHQGRSVLHVAATYGLPGVLL

SEQ ID NO: 21780 - protein, 250 aa, Homo sapiens
MRKTRLWGLLWMLFVSELRAATKLTEEKYELKEGQTLDVKCDYTLEKFASSQKAWQIIRDGEMPKTLACTERPSKNSHPVQVGRIILEDYHDHGLLRVRMVNLQVEDSGLYQCVIYQPPKEPHMLFDRIRLVVTKGFSGTPGSNENSTQNVYKIPPTTTKALCPLYTSPRTVTQAPPKSTADVSTPDSEINLTNVTDIIREKSMTFGIRRLDVESHPLPPLHTGHFRISQFFSQAGTQSLHSCYKGKPTP

SEQ ID NO: 21781 - protein, 644 aa, Homo sapiens
MEAVCGAWGRGLVLGVSVLGSKEPGDPHANAPRALTVLSTSIQAPGSAQVAGLCGRLTLHRDLRTGRWEPDPQRSRRCLRDPQRVLEYCRQMYPELQIARVEQATQAIPMERWCGGSRSGSCAHPHHQVVPFRCLPGEFVSEALLVPEGCRFLHQERMDQCESSTRRHQEAQEACSSQGLILHGSGMLLPCGSDRFRGVEYVCCPPPGTPDPSGTAVGDPSTRSWPPGSRVEGAEDEEEEESFPQPVDDYFVEPPQAEEEEETVPPPSSHTLAVVGKVTPTPRPTDGVDIYFGMPGEISEHEGFLRAKMDLEERRMRQINEVMREWAMADNQSKNLPKADRQALNEHFQSILQTLEEQVSGERQRLVETHATRVIALINDQRRAALEGFLAALQADPPQAERVLLALRRYLRAEQKEQRHTLRHYQHVAAVDPEKAQQMRFQVHTHLQVIEERVNQSLGLLDQNPHLAQELRPQIQELLHSEHLGPSELEAPAPGGSSEDKGGLQPPDSKDDTPMTLPKGSTEQDAASPEKEKMNPLEQYERKVNASVPRGFPFHSSEIQRDELAPAGTGVSREAVSGLLIMGAGGGSLIVLSMLLLRRKKPYGAISHGVVEVDPMLTLEEQQLRELQRHGYENPTYRFLEERP

SEQ ID NO: 21782 - protein, 622 aa, Homo sapiens
MDGAAAVPEPSEDPTSKDPQSPEGQAQARIRNLEDSLFTLQSQLQLLQSASTGAQHKPSGRPSWRRQGHRPLSQSIVEAGSVGQTDLNKRASLPAGLVGTPPESPSEPREDVLGFLPGPRQVPGAAGDSSEANGPCPSPIPTPEQGLSQRAVPSEGRVGEAKGGGVVSVVWEGLRATEDCATGATGPELEAKVEEVVLEAIGDRKGAGSLELPAWVKEDRGIVEVVWEGVGGSDAEAMGEIGRVPEVVQTSSPRLQERLEAAASIEGEDVPQGSPEGDGQGGSGGEEGSFIWVERVTLSEEWEELLVEGLEGPEVAGRERGDESPLGAEGAKTGGGEETWEAEKRKAEESMGIGSEEKPGTGRDEAEMSPVVERKGGEKKLELESRGSAEKLGTEREGGEEPLGIERKVEGHLRAEKEGDEEKRGAEEEEVEEPLGVEKKGGEEEPEATKEPLEAERKGGEETLEAEKRGGEESLETEKTQGTEGDLNLEQGSREGSESQAEEMNEAGPPLEANTETRPEKEGPQPQEKPVGALEEEGVKPQTAAEGQGPLGDATPLLAETPAPEQPAECQPLLQGEGPSANPSAHPVPTYAPARQPEPSAPTEGEEASGPKQKTCQCCAVM

SEQ ID NO: 21783 - protein, 120 aa, Homo sapiens
MSAGALGALQLPGVLTRLRADLLSYLRHVQWLRRAGGSSLKTLEPELGTLQARLDRLLRRLQLLMSRLALPQPPPDPPAPPLAPPSSAWGGIRAAHAILGGLHLTLDWAVRGLLLLKTRL

SEQ ID NO: 21784 - protein, 677 aa, Homo sapiens
MQTPRASPPRPALLLLLLLLGGAHGLFPEEPPPLSVAPRDYLNHYPVFVGSGPGRLTPAEGADDLNIQRVLRVNRTLFIGDRDNLYRVELEPPTSTELRYQRKLTWRSNPSDINVCRMKGKQEGECRNFVKVLLLRDESTLFVCGSNAFNPVCANYSIDTLQPVGDNISGMARCPYDPKHANVALFSDGMLFTATVTDFLAIDAVIYRSLGDRPTLRTVKHDSKWFKEPYFVHAVEWGSHVYFFFREIAMEFNYLEKVVVSRVARVCKNDVGGSPRVLEKQWTSFLKARLNCSVPGDSHFYFNVLQAVTGVVSLGGRPVVLAVFSTPSNSIPGSAVCAFDLTQVAAVFEGRFREQKSPESIWTPVPEDQVPRPRPGCCAAPGMQYNASSALPDDILNFVKTHPLMDEAVPSLGHAPWILRTLMRHQLTRVAVDVGAGPWGNQTVVFLGSEAGTVLKFLVRPNASTSGTSGLSVFLEEFETYRPDRCGRPGGGETGQRLLSLELDAASGGLLAAFPRCVVRVPVARCQQYSGCMKNCIGSQDPYCGWAPDGSCIFLSPGTRAAFEQDVSGASTSGLGDCTGLLRASLSEDRAGLVSVNLLVTSSVAAFVVGAVVSGFSVGVCVRASEGCCGRVCQVGHACRVCVHERRSWWPQRPGRWLSRRWGFQKARGSPRCRLGV

SEQ ID NO: 21785 - protein, 673 aa, Homo sapiens
MNRKDSKRKSHQECTGKIGGRGRPRQVRRHKTCPSPREISKVMASMNLGLLSEGGCSEDELLEKCIQSFDSAGSLCHEDHMLNMVLAMHSWVLPSADLAARLLTSYQKATGDTQELRRLQICHLVRYWLMRHPEVMHQDPQLEEVIGRFWATVAREGNSAQRRLGDSSDLLSPGGPGPPLPMSSPGLGKKRKVSLLFDHLETGELAQHLTYLEFRSFQAITPQDLRSYVLQGSVRGCPALEGSVGLSNSVSRWVQVMVLSRPGPLQRAQVLDKFIHVAQRLHQLQNFNTLMAVTGGLCHSAISRLKDSHAHLSPDSTKALLELTELLASHNNYARYRRTWAGCAGFRLPVLGVHLKDLVSLHEAQPDRLPDGRLHLPKLNNLYLRLQELVALQGQHPPCSANEDLLHLLTLSLDLFYTEDEIYELSYAREPRCPKSLPPSPFNAPLVVEWAPGVTPKPDRVTLGRHVEQLVESVFKNYDPEGRGTISQEDFERLSGNFPFACHGLHPPPRQGRGSFSREELTGYLLRASAICSKLGLAFLHTFHEVTFRKPTFCDSCSGFLWGVTKQGYRCRECGLCCHKHCRDQVKVECKKRPGAKGDAGPPGAPVPSTPAPHASCGSEENHSYTLSLEPETGCQLRHAWTQTESPHPSWETDTVPCPVMDPPSTASSKLDS

SEQ ID NO: 21786 - protein, 1230 aa, Homo sapiens
MSALCWGRGAAGLKRALRPCGRPGLPGKEGTAGGVCGPRRSSSASPQEQDQDRRKDWGHVELLEVLQARVRQLQAESVSEVVVNRVDVARLPECGSGDGSLQPPRKVQMGAKDATPVPCGRWAKILEKDKRTQQMRMQRLKAKLQMPFQSGEFKALTRRLQVEPRLLSKQMAGCLEDCTRQAPESPWEEQLARLLQEAPGKLSLDVEQAPSGQHSQAQLSGQQQRLLAFFKCCLLTDQLPLAHHLLVVHHGQRQKRKLLTLDMYNAVMLGWARQGAFKELVYVLFMVKDAGLTPDLLSYAAALQCMGRQDQDAGTIERCLEQMSQEGLKLQALFTAVLLSEEDRATVLKAVHKVKPTFSLPPQLPPPVNTSKLLRDVYAKDGRVSYPKLHLPLKTLQCLFEKQLHMELASRVCVVSVEKPTLPSKEVKHARKTLKTLRDQWEKALCRALRETKNRLEREVYEGRFSLYPFLCLLDEREVVRMLLQVLQALPAQGESFTTLARELSARTFSRHVVQRQRVSGQVQALQNHYRKYLCLLASDAEVPEPCLPRQYWEELGAPEALREQPWPLPVQMELGKLLAEMLVQATQMPCSLDKPHRSSRLVPVLYHVYSFRNVQQIGILKPHPAYVQLLEKAAEPTLTFEAVDVPMLCPPLPWTSPHSGAFLLSPTKLMRTVEGATQHQELLETCPPTALHGALDALTQLGNCAWRVNGRVLDLVLQLFQAKGCPQLGVPAPPSEAPQPPEAHLPHSAAPARKAELRRELAHCQKVAREMHSLRAEALYRLSLAQHLRDRVFWLPHNMDFRGRTYPCPPHFNHLGSDVARALLEFAQGRPLGPHGLDWLKIHLVNLTGLKKREPLRKRLAFAEEVMDDILDSADQPLTGRKWWMGAEEPWQTLACCMEVANAVRASDPAAYVSHLPVHQDGSCNGLQHYAALGRDSVGAASVNLEPSDVPQDVYSGVAAQVEVFRRQDAQRGMRVAQVLEGFITRKVVKQTVMTVVYGVTRYGGRLQIEKRLRELSDFPQEFVWEASHYLVRQVFKSLQEMFSGTRAIQHWLTESARLISHMGSVVEWVTPLGVPVIQPYRLDSKVKQIGGGIQSITYTHNGDISRKPNTRKQKNGFPPNFIHSLDSSHMMLTALHCYRKGLTFVSVHDCYWTHAADVSVMNQVCREQFVRLHSEPILQDLSRFLVKRFCSEPQKILEASQLKETLQAVPKPGAFDLEQVKRSTYFFS

SEQ ID NO: 21787 - protein, 237 aa, Homo sapiens
VSFGRDVIHYRVLHRDGHLTIDEAVFFCNLMDMVERPPGNGTGCWGSPPWGWAHGCPTILQHYSKDKGAICTKLVRPKRKHGTKSAEEELARGPQLRHSSVTIIHHLSQKPGPEPPPTPSSSIPSLARFPRPAGWLLNLQHLTLGAQIGEGEFGAVLQGEYLGQKVAVKNIKCDVTAQAFLDETAVMTKMQHENLVRLLGVILHQGLYIVMEHVSKGNLVNFLRTRGRALVNTAQLL

SEQ ID NO: 21788 - protein, 462 aa, Homo sapiens
MCDLRRPAAGGMMDLAYVCEWEKWSKSTHCPSVPLACAWSCRNLIAFTMDLRSDDQDLTRMIHILDTEHPWDLHSIPSEHHEAITCLEWDQSGSRLLSADADGQIKCWSMADHLANSWESSVGSLVEGDPIVALSWLHNGVKLALHVEKVLLCASSQTSSIVECWSLRKEGLPVNNIFQQISPVVGDKQPTILKWRILSATNDLDRVSAVALPKLPISLTNTDLKVASDTQFYPGLGLALAFHDGSVHIVHRLSLQTMAVFYSSAAPRPVDEPAMKRPRTAGPAVHLKAMQLSWTSLALVGIDSHGKLSVLRLSPSMGHPLEVGLALRHLLFLLEYCMVTGYDWWDILLHVQPSMVQSLVEKLHEEYTRQTAALQQVLSTRILAMKASLCKLSPCTVTRVCDYHTKLFLIAISSTLKSLLRPHFLNTPDKSPGDRLTEICTKITDVDIDKVMINLKTEEFVL

SEQ ID NO: 21789 - protein, 949 aa, Homo sapiens
MEEASLCLGVSSAEPEAEPHLSGPVLNGQYAMSQKLHQITSQLSHAFPELHPRPNPEEKPPASLEEKAHVPMSGQPMGSQMALLANQLGREVDTSLNGRVDLQQFLNGQNLGIMSQMSDIEDDARKNRKYPCPLCGKRFRFNSILSLHMRTHTGEKPFKCPYCDHRAAQKGNLKIHLRTHKLGNLGKGRGRVREENRLLHELEERAILRDKQLKGSLLQPRPDLKPPPHAQQAPLAACTLALQANHSVPDVAHPVPSPKPASVQEDAVAPAAGFRCTFCKGKFKKREELDRHIRILHKPYKCTLCDFAASQEEELISHVEKAHITAESAQGQGPNGGGEQSANEFRCEVCGQVFSQAWFLKGHMRKHKDSFEHCCQICGRRFKEPWFLKNHMKVHLNKLSVKNKSPSDPEVPVPMGGMSQEAHANLYSRYLSCLQSGFMTPDKAGLSEPSQLYGKGELPMKEKEALGKLLSPISSMAHGVPEGDKHSLLGCLNLVPPLKSSCIERLQAAAKAAEMDPVNSYQAWQLMARGMAMEHGFLSKEHPLQRNHEDTLANAGVLFDKEKREYVLVGADGSKQKMPADLVHSTKVGSQRDLPSKLDPLESSRDFLSHGLNQTLEYNLQGPGNMKEKPTECPDCGRVFRTYHQVVVHSRVHKRDRKGEEDGLHVGLDERRGSGSDQESQSVSRSTTPGSSNVTEESGVGGGLSQTGSAQEDSPHPSSPSSSDIGEEAGRSAGVQQPALLRDRSLGSAMKDCPYCGKTFRTSHHLKVHLRIHTGEKPYKCPHCDYAGTQSASLKYHLERHHRERQNGAGPLSGQPPNQDHKDEMSSKASLFIRPDILRGAFKGLPGIDFRGGPASQQWTSGVLSSGDHSGQATGMSSEVPSDALKGTDLPSKSTHFSEIGRAYQSIVSNGVNFQGSLQAFMDSFVLSSLKKEKDMKDKALADPPSMKV

SEQ ID NO: 21790 - protein, 221 aa, Homo sapiens
MADRFSRFNEDRDFQDNIGHRLLQKHGWKLGQGLGKSLQGRTDPIPIVVKYDVMGMGRMEMELDYAEDATERRRVLEVEKEDTEELRQKYKDYVDKEKAIAKALEDLRANFYCELCDKQYQKHQEFDNHINSYDHAHKQRLKDLKQREFARNVSSRSRKDEKKQEKALRRLHELAEQRKQAECAPGSGPMFKPTTVAVDEEGGEDDKDESATNSGTGATAS

SEQ ID NO: 21791 - protein, 149 aa, Homo sapiens
MLAIGLSLCDHLSQDVFCLHESKFEEERMVAGWLTNYSQDSVTFEDVAVDFTQEEWTLLDQTQRNLYRDVMLENYKNLVAVDWESHINTKWSAPQQNFLQGKTSSVVEMSLTVSPRLECSGTISAHGSFHLPGSSNSCASASRVAGTCA

SEQ ID NO: 21792 - protein, 84 aa, Homo sapiens
MWGYLSLMPVFLAVWAISGVWIVFAIAVTNRTVDLSKGFPYISICGSFPPQSCIFSQVLNMGAALGKEPAAYALGRGLPCLHLG

SEQ ID NO: 21793 - protein, 668 aa, Homo sapiens
MTKRKKLRTSGEGLCPPKPLKNPRLGDFYGDPQSSMLGCLHHPEEPEGKLGPVPSTQQHGEEPGKAVSSSPDEETGSPCRLLRQPEKEPAPLPPSQNSFGRFVPQFAKSRKTVTRKEEMKDEDRGSGAFSLETIAESSAQSPGCQLLVETLGVPLQEATELGDPTQADSARPEQSSQSPVQAVPGSGDSQPDDPPDRGTGLSASQRASQDHLSEQGADDSKPETDRVPGDGGQKEHLPSIDSEGEKPDRGAPQEGGAQRTAGAGLPGGPQEEGDGVPCTPASAPTSGPAPGLGPASWCLEPGSVAQGSPDPQQTPSRMGREGEGTHSSLGCSSLGMVVIADLSTDPTELEERALEVAGPDGQASAISPASPRRKAADGGHRRALPGCTSLTGETTGESGEAGQDGKPPGDVLVGPTASLALAPGSGESMMGAGDSGHASPDTGPCVNQKQEPGPAQEEAELGGQNLERDLEGFRVSPQASVVLEHREIADDPLQEPGAQQGIPDTTSELAGQRDHLPHSADQGTWADSLAVELDFLLDSQIQDALDASDFEAPPEQLFPSGNKPGPCWPGPSSHANGDPVAVAKAQPRTFVGIQASEASRMEDATNVVRGLIVELSNLNRLIMGTHRDLEAFKRLNYRKTKLGGKAPLPYPSKGPGNIPRGDPPWREL

SEQ ID NO: 21794 - protein, 428 aa, Homo sapiens
MHLVTFCLGEDDGVHTVEDASRKLAVMDSQGRVWAQEMLLRVSPDHVTLLDPASKEELESYPLGAIVRCDAVMPPGRSRSLLLLVCQEPERAQPDVHFFQGLRLGAELIREDIQGALHNYRSGRGERRAAALRATQEELQRDRSPAAETPPLQRRPSVRAVISTVERGAGRGRPQAKPIPEAEEAQRPEPVGTSSNADSASPDLGPRGPDLAVLQAEREVDILNHVFDDVESFVSRLQKSAEAARVLEHRERGRRSRRRAAGEGLLTLRAKPPSEAEYTDVLQKIKYAFSLLARLRGNIADPSSPELLHFLFGPLQMIVNTSGGPEFASSVRRPHLTSDAVALLRDNVTPRENELWTSLGDSWTRPGLELSPEEGPPYRPEFFSGWEPPVTDPQSRAWEDPVEKQLQHERRRRQQSAPQVAVNGWVRW

SEQ ID NO: 21795 - protein, 194 aa, Homo sapiens
ETNIAVFWCLLTVTFSIKMFLTVTRLYFSAEEGGERSVCLTFAFLFLLLAMLVQVVREETLELGLEPGLASMTQNLEPLLKKQGWDWALPVAKLAIRVGLAVVGSVLGAFLTFPGLRLAQTHRDALTMSEDRPMLQLSDSAFDSGRLWLLVVLCLLRLAVTRPHLQAYLCLAKARVEQLRREAGRIEAREIQQR

SEQ ID NO: 21796 - protein, 374 aa, Homo sapiens
AINIGLTVLPPPRTIKIAILNFDEYALNKEGIEKILTMIPTDEEKQKIQEAQLANPEIPLGSAEQFLLTLSSISELSARLHLWAFKMDYETTEKEVAEPLLDLKEGIDQLENNKTLGFILSTLLAIGNFLNGTNAKAFELSYLEKVPEVKDTVHKQSLLHHVCTMVVENFPDSSDLYSEIGAITRSAKVDFDQLQDNLCQMERRCKASWDHLKAIAKHEMKPVLKQRMSEFLKDCAERIIILKIVHRRIINRFHSFLLFMGHPPYAIREVNINKFCRIISEFALEYRTTRERVLQQKQKRANHRERNKTRGKMITDDPLVPGLWELMTRPMSQMMQLMRSWTASSSQPPKCPVSEWCRGRGNDPGPTGNLCEEP

SEQ ID NO: 21797 - protein, 184 aa, Homo sapiens
MENLTKHSIECSSFRGDWECKNQFERKQGSQEGHFSEMIFTPEDMPTFSIQHQRIHTDEKLLECKECGKDFSFVSVLVRHQRIHTGEKPYECKECGKAFGSGANLAYHQRIHTGEKPFECKECGKAFGSGSNLTHHQRIHTGEKPYECKECGKAFSFGSGLIRHQIIHSGEKPYECKECGKSFS

SEQ ID NO: 21798 - protein, 150 aa, Homo sapiens
MRLLVLLWGCLLLPGYEALEGPEEISGFEGDTVSLQCTYREELRDHRKYWCRKGGILFSRCSGTIYAEEEGQETMKGRVSIRDSRQELSLIVTLWNLTLQDAGEYWCGVEKRGPDESLLISLFVFPGNRYLSFPRLGTGAAEGRGRGGGA

SEQ ID NO: 21799 - protein, 137 aa, Homo sapiens
MQLNEEINKGSVSFRDVAIDFSREEWRHLDLSQRNLYRDVMLETYSHLLSVGYQVPKPEVVMLEQGKEPWALQGERPRHSCPGEKLWDHNQHRKIIGYKPASSQDQKIYSGEKSYECAEFGKSFTWKSQFKVHLKVP

SEQ ID NO: 21800 - protein, 299 aa, Homo sapiens
MYTVLTGTPPFMASPLSEMYQNIREGHYPEPAHLSANARRLIVHLLAPNPAERPSLDHLLQDDFFTQGFTPDRLPAHSCHSPPIFAIPPPLGRIFRKVGQRLLTQCRPPCPFTPKEASGPGEGGPDPDSMEWDGESSLSAKEVPCLEGPIHLVAQGTLQSDLAGPEGSRRPEVEAALRHLQLCLDVGPPATQDPLGEQQPILWAPKWVDYSSKYGFGYQLLDGGRTGRHPHGPATPRRVSFSGVPAQLVLSGEGEGLQLTLWEQGSPGTSYSLDVPRSHGCAPTTGQHLHHALRMLQSI

SEQ ID NO: 21801 - protein, 94 aa, Homo sapiens
KKYASDKYKDIYTELSIAKAKADCDISRLKEQLKAATEALGEKSPDSATVSGYDIMKSKSNPDFLKKDRSCVTRQLRNIRSKVSLGSSPLVGGA

SEQ ID NO: 21802 - protein, 384 aa, Homo sapiens
MAVAAAAAAGPVFWRRLLGLLPGRPGLAALLGRLSDRLGRNRDRQRRRSPWLLLAPLLSPAVPQVTSPPCCLCPEGVHRFQWIRNLVPEFGVSSSHVRVLSSPAEFFELMKVDCLESTLEKSLQAKFPSNLKVSILLDFTRGSRGRKNSRTMLLPLLRRFPEQVRVSLFHTPHLRGLLRLLIPERFNETIGLQHIKVYLFDNSVILSGANLSDSYFTNRQDRYVFLQDCAEIADFFTELVDAVGDVSLQLQGDDTVQVVDGMVHPYKGDRAEYCKAANKRVMDVINSARTRQQMLHAQTFHSNSLLTQEDAAAAGDRRPAPDTWIYPLIQMKPFEIQIDEIVTETLLTEAERGAKVYLTTGYFNLTQAYMDLVLGTRAEYQILL

SEQ ID NO: 21803 - protein, 536 aa, Homo sapiens
MAEDWLDCPALGPGWKRREVFRKSGATCGRSDTYYQSPTGDRIRSKVELTRYLGPACDLTLFDFKQGILCYPAPKAHPVAVASKKRKKPSRPAKTRKRQVGPQSGEVRKEAPRDETKADTDTAPASFPAPGCCENCGISFSGDGTQRQRLKTLCKDCRAQRIAFNREQRMFKRVGCGECAACQVTEDCGACSTCLLQLPHDVASGLFCKCERRRCLRIVERSRGCGVCRGCQTQEDCGHCPICLRPPRPGLRRQWKCVQRRCLRGKHARRKGGCDSKMAARRRPGAQPLPPPPPSQSPEPTEPQPYTNRRQNRKCGACAACLRRMDCGRCDFCCDKPKFGGSNQKRQKCRWRQCLQFAMKRLLPSVWSESEDGAGSPPPYRRRKRPSSARRHHLGPTLKPTLATRTAQPDHTQAPTKQEAGGGFVLPPPGTDLVFLREGASSPVQVPGPVAASTEALLQAVDPGLPSVKQEPPDPEEDKEENKDDSASKLAPEEEAGGAGTPVITEIFSLGGTRFRDTAVWLPRSKDLKKPGARKQ

SEQ ID NO: 21804 - protein, 736 aa, Homo sapiens
RTVRFERAAEFLAACAGGDLDEARLMLRAADPGPGAELDPAAPPPARAVLDSTNADGISALHQACIDENLEVVRFLVEQGATVNQADNEGWTPLHVAASCGYLDIARYLLSHGANIAAVNSDGDLPLDLAESDAMEGLLKAEIARRGVDVEAAKRAEEELLLHDTRCWLNGGAMPEARHPRTGASALHVAAAKGYIEVMRLLLQAGYDPELRDGDGWTPLHAAAHWGVEDACRLLAEHGGGMDSLTHAGQRPCDLADEEVLSLLEELARKQEDLRNQKEASQSRGQEPQAPSSSKHRRSSVCRLSSREKISLQDLSKERRPGGAGGPPIQDEDEGEEGPTEPPPAEPRTLNGVSSPPHPSPKSPVLEEAPFSRRFGLLKTGSSGALGPPERRTAEGAPGAGLQRSASSSWLEGTSTQAKELRLARITPTPSPKLPEPSVLSEVTKPPPCLENSSPPSRIPEPESPAKPNVPTASTAPPADSRDRRRSYQMPVRDEESESQRKARSRLMRQSRRSTQGVTLTDLKEAEKAAGKAPESEKPAQSLDPSRRPRVPGVENSDSPAQREAPDGQGPGPQAAREHRKVGKEWRGPAEGEEAEPADRSQESSTLEGGPSARRQRWQRDLNPEPEPESEEPDGGFRTLYAELRRENERLREALTETTLRLAQLKVELERATQRQERFAERPALLELERFERRALERKAAELEEELKALSDLRADNQRLKDENAALIRVISKLSK

SEQ ID NO: 21805 - protein, 852 aa, Homo sapiens
MAVEDSTLQVVVRVRPPTPRELDSQRRPVVQVVDERVLVFNPEEPDGGFPGLKWGGTHDGPKKKGKDLTFVFDRVFGEAATQQDVFQHTTHSVLDSFLQGYNCSVFAYGATGAGKTHTMLGREGDPGIMYLTTVELYRRLEARQQEKHFEVLISYQEVYNEQIHDLLEPKGPLAIREDPDKGVVVQGLSFHQPASAEQLLEILTRGNRNRTQHPTDANATSSRSHAIFQIFVKQQDRVPGLTQAVQVAKMSLIDLAGSERASSTHAKGERLREGANINRSLLALINVLNALADAKGRKTHVPYRDSKLTRLLKDSLGGNCRTVMIAAISPSSLTYEDTYNTLKYADRAKEIRLSLKSNVTSLDCHISQYATICQQLQAEVAALRKKLQVYEGGGQPPPQDLPGSPKSGPPPEHQPCTPELPAGPRALQEESLGMEAQVERAMEGNSSDQEQSPEDEDEGPAEEVPTQMPEQNPTHALPESPRLTLQPKPVVGHFSARELDGDRSKQLALKVLCVAQRQYSLLQAANLLTPDMITEFETLQQLVQEEKIEPGAEALRTSGLARGAPLAQELCSESIPVPSPLCPEPPGYTGPVTRTMARRLSGPLHTLGIPPGPNCTPAQGSRWPMEKKRRRPSALEADSPMAPKRGTKRQRQSFLPCLRRGSLPDTQPSQGPSTPKGERASSPCHSPRVCPATVIKSRVPLGPSAMQNCSTPLALPTRDLNATFDLSEEPPSKPSFHECIGWDKIPQELSRLDQPFIPRAPVPLFTMKGPKPTSSLPGTSACKKKRVASSSVSHGRSRIARLPSSTLKRPAGPLVLPELPLSPLCPSNRRNGKDLIRVGRALSAGNGVTKVS

SEQ ID NO: 21806 - protein, 128 aa, Homo sapiens
MVDHLANTEINSQRIAAVESCFGASGQPLALPGRVLLGEGVLTKECRKKAKPRIFFLFNDILVYGSIVLNKRKYRSQHIIPLEEVTLELLPETLQAKNRWMIKTAKKSFVVSAASATERQEWISHIEE

SEQ ID NO: 21807 - protein, 165 aa, Homo sapiens
MRRRLWLGLAWLLLARAPDAAGTPSASRGPRSYPHLEGDVRWRRLFSSTHFFLRVDPGGRVQGTRWRHGQDSILEIRSVHVGVVVIKAVSSGFYVAMNRRGRLYGSVPGAHRRERPQHLRLTALAPPRPAHVPGAGQEGGAPARRPDAAVPPVRPLPARPGLLRP

SEQ ID NO: 21808 - protein, 450 aa, Homo sapiens
MAGAGPAPGLPGAGGPVVPGPGAGIPGKSGEERLKEMEAEMALFEQEVLGAPVPGIPTAVPAVPTVPTVPTVEAMQVPAAPVIRPIIATNTYQQVQQTLEARAAAAATVVPPMVGGPPFVGPVGFGPGDRSHLDSPEAREAMFLRRAAGPRPMALRPPHQALVGPPLPGPPGPPMMLPPMARAPGPPLGSMAALRPPLEEPAAPRELGLGLGLGLKEKEEAVVAAAAGLEEASAAVAVGAGGAPAGPAVIGPSLPLALAMPLPEPEPLPLPLEVVRGLLPPLRIPELLSLRPRPRPPRPEPPPGLMALEVPEPLGEDKKKGKPEKLKRCIRTAAGSSWEDPSLLEWDADDFRIFCGDLGNEVNDDILARAFSRFPSFLKAKVIRDKRTGKTKGYGFVSFKDPSDYVRAMREMNGKYVGSRPIKLRKSMWKDRNLDVVRKKQKEKKKLGLR

SEQ ID NO: 21809 - protein, 273 aa, Homo sapiens
MSGDKLLSELGYKLGRTIGEGSYSKVKVATSKKYKGTVAIKVVDRRRAPPDFVNKFLPRELSILRGVRHPHIVHVFEFIEVCNGKLYIVMEAAATDLLQAVQRNGRIPGVQARDLFAQIAGAVRYLHDHHLVHRDLKCENVLLSPDERRVKLTDFGFGRQAHGYPDLSTTYCGSAAYASPEVLLGIPYDPKKYDVWSMGVVLYVMVTGCMPFDDSDIAGLPRRQKRGVLYPEGLELSERCKALIAELLQFSPSARPSAGQVARNCWLRAGDSG

SEQ ID NO: 21810 - protein, 73 aa, Homo sapiens
MVQKKPAELQGFHRSFKGQNPFELAFSLDQPDHGDSDFGLQCSARPGEGPEGEEGTGQLLSLPWQWPAPAGGW

SEQ ID NO: 21811 - protein, 503 aa, Homo sapiens
MSVQVAAPGSAGLGPERLSPEELVRQTRQVVQGLEALRAEHHGLAGHLAEALAGQGPAAGLEMLEEKQQVVSHSLEAIELGLGEAQVLLALSAHVGALEAEKQRLRSQARRLAQENVWLREELEETQRRLRASEESVAQLEEEKRHLEFLGQLRQYDPPAESQSESPPRRDSLASLFPSEEEERKGPEAAGAAAAQQGGYEIPARLRTLHNLVIQYAGQGRYEVAVPLCRQALEDLERSSGHCHPDVATMLNILALVYRDQNKYKEATDLLHDALQIREQTLGPEHPAVAATLNNLAVLYGKRGRYREAEPLCQRALEIREKVLGADHPDVAKQLNNLALLCQNQGKFEDVERHYARALSIYEALGGPHDPNVAKTKNNLASAYLKQNKYQQAEELYKEILHKEDLPAPLGAPNTGTAGDAEQALRRSSSLSKIRESIRRGSEKLVSRLRGEAAAGAAGMKRAMSLNTLNVDAPRAPGTQFPSWHLDKAPRTLSASTQDLSPH

SEQ ID NO: 21812 - protein, 928 aa, Homo sapiens
MNEAMATDSPRRPSRCTGGVVVRPQAVTEQSYMESVVTFLQDVVPQAYSGTPLTEEKEKIVWVRFENADLNDTSRNLEFHEIHSTGNEPPLLIMIGYSDGMQVWSIPISGEAQELFSVRHGPIRAARILPAPQFGAQKCDNFAEKRPLLGVCKSIGSSGTSPPYCCVDLYSLRTGEMVKSIQFKTPIYDLHCNKRILVVVLQEKIAAFDSCTFTKKFFVTSCYPCPGPNMNPIALGSRWLAYAENKLIRCHQSRGGACGDNIQSYTATVISAAKTLKSGLTMVGKVVTQLTGTLPSGVTEDDVAIHSNSRRSPLVPGIITVIDTETVGEGQVLVSEDSDSDGIVAHFPAHEKPVCCMAFNTSGMLLVTTDTLGHDFHVFQILTHPWSSSQCAVHHLYTLHRGETEAKVQDICFSHDCRWVVVSTLRGTSHVFPINPYGGQPCVRTHMSPRVVNRMSRFQKSAGLEEIEQELTSKQGGRCSPVPGLSSSPSGSPLHGKLNSQDSYNNFTNNNPGNPRLSPLPSLMVVMPLAQIKQPMTLGTITKRTGKVKPPPQISPSKSMGGEFCVAAIFGTSRSWFANNAGLKREKDQSKQVVVESLYIISCYGTLVEHMMEPRPLSTAPKISDDTPLEMMTSPRASWTLVRTPQWNELQPPFNANHPLLLAADAVQYYQFLLAGLVPPGSPGPITRHGSYDSLASDHSGQEDEEWLSQVEIVTHTGPHRRLWMGPQFQFKTIHPSGQTTVISSSSSVLQSHGPSDTPQPLLDFDTDDLDLNSLRIQPVRSDPVSMPGSSRPVSDRRGVSTVIDAASGTFDRSVTLLEVCGSWPEGFGLRHMSSMEHTEEGLRERLADAMAESPSRDVVGSGTDTALDVAVKTFPPERHVAVKCFGKKKGKKKQCQQPSVREQPNSNKACVRDGGRTSARGKHRDSE

SEQ ID NO: 21813 - protein, 40 aa, Homo sapiens
MGWAAFNLSNVTGNSRILCSVYCNGSQITGSSNITVYRLP

SEQ ID NO: 21814 - protein, 329 aa, Homo sapiens
MGNVLAASSPPAGPPPPPAPALVGLPPPPPSPPGFTLPPLGGSLGAGTSTSRSSERTPGAATASASGAAEDGACGCLPNPGTFEECHRKCKELFPIQMEGVKLTVNKGLSNHFQVNHTVALSTIGESNYHFGVTYVGTKQLSPTEAFPVLVGDMDNSGSLNAQVIHQLGPGLRSKMAIQTQQSKFVNWQVDGEYRGSDFTAAVTLGNPDVLVGSGILVAHYLQSITPCLALGGELVYHRRPGEEGTVMSLAGKYTLNNWLATVTLGQAGMHATYYHKASDQLQVGVEFEASTRMQDTSVSFGYQLDLPKANLLFKGKGLGSPTRETGRR

SEQ ID NO: 21815 - protein, 688 aa, Homo sapiens
MMSIRQRREIRATEVSEDFPAQEENVKLENKLPSGCTSRRLWKILSLTIGGTIALCIGLLTSVYLATLHENDLWFSNIKEVEREISFRTECGLYYSYYKQMLQAPTLVQGFHGLIYDNKTESMKTINLLQRMNIYQEVFLSILYRVLPIQKYLEPVYFYIYTLFGLQAIYVTALYITSWLLSGTWLSGLLAAFWYVTNRIDTTRVEFTIPLRENWALPFFAIQIAAITYFLRPNLQPLSERLTLLAIFISTFLFSLTWQFNQFMMLMQALVLFTLDSLDMLPAVKATWLYGIQITSLLLVCILQFFNSMILGSLLISFNLSVFIARKLQKNLKTGSFLNRLGKLLLHLFMVLCLTLFLNNIIKKILNLKSDEHIFKFLKAKFGLGATRDFDANLYLCEEAFGLLPFNTFGRLSDTLLFYAYIFVLSITVIVAFVVAFHNLSDSTNQQSVGKMEKGTVDLKPETAYNLIHTILFGFLALSTMRMKYLWTSHMCVFASFGLCSPEIWELLLKSVHLYNPKRICIMRYSVPILILLYLCYKFWPGMMDELSELREFYDPDTVELMNWINSNTPRKAVFAGSMQLLAGVKLCTGRTLTNHPHYEDSSLRERTRAVYQIYAKRAPEEVHALLRSFGTDYVILEDSICYERRHRRGCRLRDLLDIANGHKPSLGTLVTATGAGQGRDDGWPRRE

SEQ ID NO: 21816 - protein, 567 aa, Homo sapiens
MAEDWLDCPALGPGWKRREVFRKSGATCGRSDTYYQSPTGDRIRSKVELTRYLGPACDLTLFDFKQGILCYPAPKAHPVAVASKKRKKPSRPAKTRKRQVGPQSGEVRKEAPRDETKADTDTAPASFPAPGCCENCGISFSGDGTQRQRLKTLCKDCRAQRIAFNREQRMFKSRGCGVCRGCQTQEDCGHCPICLRPPRPGLRRQWKCVQRRCLRGKHARRKGGCDSKMAARRRPGAQPLPPPPPSQSPEPTEPHPRALAPSPPAEFIYYCVDEDELPYTNRRQNRKCGACAACLRRMDCGRCDFCCDKPKFGGSNQKRQKCRWRQCLQFAMKRLLPSVWSESEDGAGSPPPYRRRKRPSSARRHHLGPTLKPTLATRTAQPDHTQAPTKQEAGGGFVLPPPGTDLVFLREGASSPVQVPGPVAASTEALLQEAQCSGLSWVVALPQVKQEKADTQDEWTPGTAVLTSPVLVPGCPSKAVDPGLPSVKQEPPDPEEDKEENKDDSASKLAPEEEAGGAGTPVITEIFSLGGTRFRDTAVWLPRYYHLALDWKCNCGYHLCCRSVLVP

SEQ ID NO: 21817 - protein, 504 aa, Homo sapiens
MANSAKAEEYEKMSLEQAKASVNSETESSFNINENTTASGTGLSEKTSVCRQVDIARKRKEFEDDLVKESSSCGKDTPSKKRKLDPEIVPEEKDCGDAEGNSKKRKRETEDVPKDKSSTGDGTQNKRKIALEDVPEKQKNLEEGHSSTVAAHYNELQEVGLEKRSQSRIFYLRNFNNWMKSVLIGEFLEKVRQKKKRDITVLDLGCGKGGDLLKWKKGRINKLVCTDIADVSVKQCQQRYEDMKNRRDSEYIFSAEFITADSSKELLIDKFRDPQMCFDICSCQFVCHYSFESYEQADMMLRNACERLSPGGYFIGTTPNSFELIRRLEASETESFGNEIYTVKFQKKGDYPLFGCKYDFNLEGVVDVPEFLVYFPLLNEMAKKYNMKLVYKKTFLEFYEEKIKNNENKMLLKRMQALEPYPANESSKLVSEKVDDYEHAAKYMKNSQVRLPLGTLSKSEWEATRLTVTIMREAWLSTVGPGRAPVAASSVKWGTPRPAMQFIL

SEQ ID NO: 21818 - protein, 144 aa, Homo sapiens
MADTPRDAGLKQAPASRNEKAPVDFGYVGIDSILEQMRRKAMKQGFEFNIMVVGQSGLGKSTLINTLFKSKISRKSVQPTSEERIPKTIEIKSITHDIEEKGVRMKLTVIDTPGFGDHINNENCWQPIMKFINDQYEKYLQEEV

SEQ ID NO: 21819 - protein, 173 aa, Homo sapiens
MYPELQIARVEQATQAIPMERWCGGSRSGSCAHPHHQVVPFRCLPGEFVSEALLVPEGCRFLHQERMDQCESSTRRHQEAQEACSSQGLILHGSGMLLPCGSDRFRGVEYVCCPPPGTPDPSGTAVGDPSTRSWPPGSRVEGAEDEEEEESFPQPVDDYFVEPPQAEEEEETV

SEQ ID NO: 21820 - protein, 143 aa, Homo sapiens
MFVGSDTVNEFKSEDGAIHVIERRCKLDVDAPRLLKKIAGVDYVYFVQKNSLNSRERTLHIEAYNETFSNRVIINEHCCYTVHPENEDWTCFEQSASLDIKSFFGFESTVEKIAMKQYTSNIKKGKEIIEYYLRQLEEEGITF

SEQ ID NO: 21821 - protein, 389 aa, Homo sapiens
MALYDEDLLKNPFYLALQKCRPDLCSKVAQIHGIVLVPCKGSLSSSIQSTCQFESYILIPVEEHFQTLNGKDVFIQGNRIKLGAGFACLLSVPILFEETFYNEKEESFSILCIAHPLEKRESSEEPLAPSDPFSLKTIEDVREFLGRHSERFDRNIASFHRTFRECERKSLRHHIDSANALYTKCLQQLLRDSHLKMLAKQEAQMNLMKQAVEIYVHHEIYNLIFKYVGTMEASEDAAFNKITRSLQDLQQKDIGVKPEFSFNIPRAKRELAQLNKCTSPQQKLVCLRKVVQLITQSPSQRVNLETMCADDLLSVLLYLLVKTEIPNWMANLSYIKNFRFSSLAKDELGYCLTSFEAAIEYIRQGSLSAKPPVRSHPCPGLPLWASWFP

SEQ ID NO: 21822 - protein, 76 aa, Homo sapiens
MVQKKPAELQGFHRSFKGQNPFELAFSLDQPDHGDSDFGLQCSARPGEGPEGEEGTGQLLSLPWQWPAPAGGWGHA

SEQ ID NO: 21823 - protein, 1562 aa, Homo sapiens
EGRTEGEGKPGPARAVPAETACVTSGTRLGSRIRNLQIDLAAQYIKAAVKNVPSVFLMTDSQVAEEQFLVLINDLLASGEIPGLFMEDEVENIISSMRPQVKSLGMNDTRETCWKFFIEKVRRQLKVILCFSPVGSVLRVRARKFPAVVNCTAIDWFHEWPEDALVSVSARFLEETEGIPWEVKASISFFMSYVHTTVNEMSRVYLATERRYNYTTPKTFLEQIKLYQNLLAKKRTELVAKIERLENGLMKLQSTASQVDDLKAKLAIQEAELKQKNESADQLIQVVGIEAEKVSKEKAIADQEEVKVEVINKNVTEKQKACETDLAKAEPALLAAQEALDTLNKNNLTELKSFGSPPDAVVNVTAAVMILTAPGGKIPKDKSWKAAKIMMGKVDTFLDSLKKFDKEHIPEACLKAFKPYQGNPTFDPEFIRSKSTAAAGLCSWCINIVRFYEVYCDVAPKRQALEEANAELAEAQEKLSRIKNKIAELNANLSNLTSAFEKATAEKIKCQQEADATNRVILLANRLVGGLASENIRWAESVENFRSQGVTLCGDVLLISAFVSYVGYFTKKYRNELMEKFWIPYIHNLKVPIPITNGLDPLSLLTDDADVATWNNQGLPSDRMSTENATILGNTERWPLIVDAQLQGIKWIKNKYRSELKAIRLGQKSYLDVIEQAISEGDTLLIENIGETVDPVLDPLLGRNTIKKGKYIKIGDKEVEYHPKFRLILHTKYFNPHYKPEMQAQCTLINFLVTRDGLEDQLLAAVVAKERPDLEQLKANLTKSQNEFKIVLKELEDSLLARLSAASGNFLGDTALVENLETTKHTASEIEEKVVEAKITEVKINEARENYRPAAERASLLYFILNDLNKINPVYQFSLKAFNVVFEKAIQRTTPANEVKQRVINLTDEITYSVYMYTARGLFERDKLIFLAQVTFQVLSMKKELNPVELDFLLRFPFKAGVVSPVDFLQHQGWGGIKALSEMDEFKNLDSDIEGSAKRWKKLVESEAPEKEIFPKEWKNKTALQKLCMVRCLRPDRMTYAIKNFVEEKMGSKFVEGRSVEFSKSYEESSPSTSIFFILSPGVDPLKDVEALGKKLGFTIDNGKLHNVSLGQGQEVVAENALDVAAEKGHWVILQNIHLVARWLGTLDKKLEHYSTGSHEDYRVFISAEPAPSPETHIIPQGILENAIKITNEPPTGMHANLHKALDLFTQDTLEMCTKEMEFKCMLFALCYFHAVVAERRKFGAQGWNRSYPFNNGDLTISINVLYNYLEANPKVPWDDLRYLFGEIMYGGHITDDWDRRLCRTYLAEYIRTEMLEGDVLLAPGFQIPPNLDYKGYHEYIDENLPPESPYLYGLHPNAEIGFLTVTSEKLFRTVLEMQPKETDSGAGTGVSREEKVKAVLDDILEKIPETFNMAEIMAKAAEKTPYVVVAFQECERMNILTNEMRRSLKELNLGLKGELTITTDVEDLSTALFYDTVPDTWVARAYPSMMGLAAWYADLLLRIRRLVCPCRNSRPGRQTLPCPPPCGWPASSTPSRSSRPSCSPWPGRTSGPWTRCVCLSR

SEQ ID NO: 21824 - protein, 159 aa, Homo sapiens
MGSFRTSKMPKPAEAPTAPSPAQTLENSEPAPVSQLQSRLEPKPQPPVAEATPRSQEATEAAPSCVGDMADTPRDAGLKQAPASRNEKAPVDFGYVGIDSILEQMRRKAMKQGFEFNIMVVGQSGLGKSTLINTLFKSKISRKSVQPTSEERIPKTIEI

SEQ ID NO: 21825 - protein, 107 aa, Homo sapiens
MADTPRDAGLKQAPASRNEKAPVDFGYVGIDSILEQMRRKAMKQGFEFNIMVVGQSGLGKSTLINTLFKSKISRKSVQPTSEERIPKTIEIKSITHDIEEKGVRMKL

SEQ ID NO: 21826 - protein, 269 aa, Homo sapiens
MSSDHLNNSTLKEAQFKDLFLKKAELEFAQIIIIVVVVTVMVVVIVCLLNHYKVSTRSFINRPNQSRRREDGLPQEGCLWPSDSAAPRLGASEIMHAPRSRDRFTAPSFIQRDRFSRFQPTYPYVQHEIDLPPTISLSDGEEPPPYQGPCTLQLRDPEQQMELNRESVRAPPNRTIFDSDLIDIAMYSGGPCPPSSNSGISASTCSSNGRMEGPPPTYSEVMGHHPGASFLHHQRSNAHRGSRLQFQQNNAESTIVPIKGKDRKPGNLV

SEQ ID NO: 21827 - protein, 716 aa, Homo sapiens
MPSTSFPVPSKFPLGPAAAVFGRGETLGPAPRAGGTMKSAEEEHYGYASSNVSPALPLPTAHSTLPAPCHNLQTSTPGIIPPADHPSGYGAALDGGPAGYFLSSGHTRPDGAPALESPRIEITSCLGLYHNNNQFFHDVEVEDVLPSSKRSPSTATLSLPSLEAYRDPSCLSPASSLSSRSCNSEASSYESNYSYPYASPQTSPWQSPCVSPKTTDPEEGFPRGLGACTLLGSPRHSPSTSPRASVTEESWLGARSSRPASPCNKRKYSLNGRQPPYSPHHSPTPSPHGSPRVSVTDDSWLGNTTQYTSSAIVAAINALTTDSSLDLGDGVPVKSRKTTLEQPPSVALKVEPVGEDLGSPPPPADFAPEDYSSFQHIRKGGFCDQYLAVPQHPYQWAKPKPLSPTSYMSPTLPALDWQLPSHSGPYELRIEVQPKSHHRAHYETEGSRGAVKASAGGHPIVQLHGYLENEPLMLQLFIGTADDRLLRPHAFYQVHRITGKTVSTTSHEAILSNTKVLEIPLLPENSMRAVIDCAGILKLRNSDIELRKGETDIGRKNTRVRLVFRVHVPQPSGRTLSLQVASNPIECSQRSAQELPLVEKQSTDSYPVVGGKKMVLSGHNFLQDSKVIFVEKAPDGHHVWEMEAKTDRDLCKPNSLVVEIPPFRNQRITSPVHVSFYVCNGKRKRSQYQRFTYLPANGNAIFLTVSREHERVGCFF

SEQ ID NO: 21828 - protein, 135 aa, Homo sapiens
MADTPRDAGLKQAPASRNEKAPVDFGYVGIDSILEQMRRKAMKQGFEFNIMVVGQSGLGKSTLINTLFKSKISRKSVQPTSEERIPKTIEIKSITHDIEEKGVRMKLTVIDTPGFGDHINNENCWQPIMKFINDQ

SEQ ID NO: 21829 - protein, 710 aa, Homo sapiens
MDSARHHISHSTSAGPIPSQKEEEMTESQGTVTFKDVAIDFTQEEWKRLDPAQRKLYRNVMLENYNNLITVGYPFTKPDVIFKLEQEEEPWVMEEEVLRRHWQGEIWGVDEHQKNQDRLLRQVEVKFQKTLTEEKGNECQKKFANVFPLNSDFFPSRHNLYEYDLFGKCLEHNFDCHNNVKCLMRKEHCEYNEPVKSYGNSSSHFVITPFKCNHCGKGFNQTLDLIRHLRIHTGEKPYECSNCRKAFSHKEKLIKHYKIHSREQSYKCNECGKAFIKMSNLIRHQRIHTGEKPYACKECEKSFSQKSNLIDHEKIHTGEKPYECNECGKAFSQKQSLIAHQKVHTGEKPYACNECGKAFPRIASLALHMRSHTGEKPYKCDKCGKAFSQFSMLIIHVRIHTGEKPYECNECGKAFSQSSALTVHMRSHTGEKPYECKECRKAFSHKKNFITHQKIHTREKPYECNECGKAFIQMSNLVRHQRIHTGEKPYICKECGKAFSQKSNLIAHEKIHSGEKPYECNECGKAFSQKQNFITHQKVHTGEKPYDCNECGKAFSQIASLTLHLRSHTGEKPYECDKCGKAFSQCSLLNLHMRSHTGEKPYVCNECGKAFSQRTSLIVHMRGHTGEKPYECNKCGKAFSQSSSLTIHIRGHTGEKPFDCSKCGKAFSQISSLTLHMRKHTGEKPYHCIECGKAFSQKSHLVRHQRIHTH

SEQ ID NO: 21830 - protein, 247 aa, Homo sapiens
MNVEVVKVMPQDLVTFKDVAIDFSQEEWQWMNPAQKRLYRSMMLENYQSLVSLGLCISKPYVISLLEQGREPWEMTSEMTRSPFSEFILVKNHMHVRNVEKPSSKGNTLLNITEHILERNSLNVKNVGKPSNKVNTLFSIKEFILEKNHINVRNAEKPSDSLHTLLSIREFILERNPMNVKNVAKPSVMARLLLDIRDVTLAKDPMNVLSVGRLLGITHLLFVTGGVIILERSLLIALIVGKPSVFT

SEQ ID NO: 21831 - protein, 233 aa, Homo sapiens
MAEKGDCIASVYGYDLGGRFVDFQPLGFGVNGLVLSAVDSRACRKVAVKKIALSDARSMKHALREIKIIRRLDHDNIVKVYEVLGPKGTDLQGELFKFSVAYIVQEYMETDLARLLEQGTLAEEHAKLFMYQLLRGLKYIHSANVLHRDLKPANIFISTEDLVLKIGDFGLARIVDQHYSHKGYLSEGLVTKWYRSPRLLLSPNNYTKAIDMWAAGCILAEMLTGRMLFAGTL

SEQ ID NO: 21832 - protein, 336 aa, Homo sapiens
MYTVLTGTPPFMASPLSEMYQNIREGHYPEPAHLSANARRLIVHLLAPNPAERPSLDHLLQDDFFTQGFTPDRLPAHSCHSPPIFAIPPPLGRIFRKVGQRLLTQCRPPCPFTPKEASGPGEGGPDPDSMEWDGESSLSAKEVPCLEGPIHLVAQGTLQSDLAGPEGSRRPEVEAALRHLQLCLDVGPPATQDPLGEQQPILWAPKWVDYSSKYGFGYQLLDGGRTGRHPHGPATPRREGTLPTPVPPAGPGLCLLRFLASEHALLLLFSNGMVQVSFSGVPAQLVLSGEGEGLQLTLWEQGSPGTSYSLDVPRSHGCAPTTGQHLHHALRMLQSI

SEQ ID NO: 21833 - protein, 1237 aa, Homo sapiens
MEDFRGIAEESFPSFLTNSLFGNSGILENVTLSSNLGLPVAVSTLARDRSSTDNRYPDIQASYLVEGRFSVPSGSSPGSQSDAEPRERLQLSFQDDDSISRKKSYVESQRLSNALSKQSALQMETAGPEEEPAGATESLQGQDLFNRASPLEQAQDSPIDFHLQSWMNNKEPKIVVLDAGKHFEDKTLKSDLSHTSLLENEKLILPTSLEDSSDDDIDDEMFYDDHLEAYFEQLAIPGMIYEDLEGPEPPEKGFKLPTNGLRQANENGSLNCKFQSENNSSLISLDSHSSETTHKESEESQVICLPGTSNSIGTGDSRRYTDGEFFAQRSEALGCLGGGNNVKRPSFGYFIRSPEKREPIALIRKSDVSRGNLEKEMAHLNHDLYSGDLNEQSQAQLSEGSITLQVEAVESTSQVDENDVTLTADKGKTEDTFFMSNKPQRYKDKLPDSGDSMLRISTIASAIAEASVNTDPSQLAAMIKALSNKTRDKTFQEDEKQKDYSHVRHFLPNDLEKSNGSNALDMEKYLKKTEVSRYESALENFSRASMSDTWDLSLPKEQTTQDIHPVDLSATSVSVRAPEENTAAIVYVENGESENQESFRTINSSNSVTNRENNSAVVDVKTCSIDNKLQDVGNDEKATSISTPSDSYSSVRNPRITSLCLLKDCEEIRDNRENQRQNECVSEISNSEKHVTFENHRIVSPKNSDLKNTSPEHGGRGSEDEQESFRPSTSPLSHSSPSEISGTSSSGCALESFGSAAQQQQPPCEQELSPLVCSPAGVSRLTYVSEPESSYPTTATDDALEDRKSDITSELSTTIIQGSPAALEERAMEKLREKVPFQNRGKGTLSSIIQNNSDTRKATETTSLSSKPEYVKPDFRWSKDPSSKSGNLLETSEVGWTSNPEELDPIRLALLGKSGLSCQVGSATSHPVSCQEPIDEDQRISPKDKSTAGREFSGQVSHQTTSENQCTPIPSSTVHSSVADMQNMPAAVHALLTQPSLSAAPFAQRYLGTLPSTGSTTLPQCHAGNATVCGFSGGLPYPAVAGEPVQNSVAVGICLGSNIGSGWMGTSSLCNPYSNTLNQNLLSTTKPFPVPSVGTNCGIEPWDSGVTSGLGSVRVPEELKLPHACCVGIASQTLLSVLNPTDRWLQVSIGVLSISVNGEKVDLSTYRCLVFKNKAIIRPHATEEIKVLFIPSSPGVFRCTFSVASWPCSTDAETIVQAEALASTVTLTAIAESPVIE

SEQ ID NO: 21834 - protein, 192 aa, Homo sapiens
ELSVLDSLNARMARPQGSSVHDGVPVPFQLPPGVSNEAQYVFTIQSIVMAQKLKGTLSFIAKNDEGATHEKLDFRLHFSCSSYLITTPCYSDAFAKLLESGDLSMSSIKVDGIRMSFQNLLAKICFHHHFSGLLKLWPRAAQEGGPCSGGGAAAMQCPGSLTLPALLQLWSEWTPAPPCTAAPSRATMSASW

SEQ ID NO: 21835 - protein, 1033 aa, Homo sapiens
MAESDSTDFDLLWYLENLSDKEFQSFKKYLARKILDFKLPQFPLIQMTKEELANVLPISYEGQYIWNMLFSIFSMMRKEDLCRKIIGRRNRNQEACKAVMRRKFMLQWESHTFGKFHYKFFRDVSSDVFYILQLAYDSTSYYSANNLNVFLMGERASGKTIVINLAVLRWIKGEMWQNMISYVVHLTAHEINQMTNSSLAELIAKDWPDGQAPIADILSDPKKLLFILEDLDNIRFELNVNESALCSNSTQKVPIPVLLVSLLKRKMAPGCWFLISSRPTRGNNVKTFLKEVDCCTTLQLSNGKREIYFNSFFKDRQRASAALQLVHEDEILVGLCRVAILCWITCTVLKRQMDKGRDFQLCCQTPTDLHAHFLADALTSEAGLTANQYHLGLLKRLCLLAAGGLFLSTLNFSGEDLRCVGFTEADVSVLQAANILLPSNTHKDRYKFIHLNVQEFCTAIAFLMAVPNYLIPSGSREYKEKREQYSDFNQVFTFIFGLLNANRRKILETSFGYQLPMVDSFKWYSVGYMKHLDRDPEKLTHHMPLFYCLYENREEEFVKTIVDALMEVTVYLQSDKDMMVSLYCLDYCCHLRTLKLSVQRIFQNKEPLIRPTASQMKSLVYWREICSLFYTMESLRELHIFDNDLNGISERILSKALEHSSCKLRTLKLSYVSTASGFEDLLKALARNRSLTYLSINCTSISLNMFSLLHDILHEPTCQISHLSLMKCDLRASECEEIASLLISGGSLRKLTLSSNPLRSDGMNILCDALLHPNCTLISLVLVFCCLTENCCSALGRVLLFSPTLRQLDLCVNRLKNYGVLHVTFPLLFPTCQLEELHLSGCFFSSDICQYIAIVIATNEKLRSLEIGSNKIEDAGMQLLCGGLRHPNCMLVNIGLEECMLTSACCRSLASVLTTNKTLERLNLLQNHLGNDGVAKLLESLISPDCVLKVVGLPLTGLNTQTQQLLMTVKERKPSLIFLSETWSLKEGREIGVTPASQPGSIIPNSNLDYMFFKFPRMSAAMRTSNTASRQPL

SEQ ID NO: 21836 - protein, 134 aa, Homo sapiens
MWGYLSLMPVFLAVWAISGVWIVFAIAVTNRTVDLSKGFPYISICGSFPPQSCIFSQVLNMGAALAAWICIVRYHQLRDWGVRRWPNQLILWTGLLCALGTSVVGNFQEKNQRPTHLAGAFLAFILGNVYFWLQ

SEQ ID NO: 21837 - protein, 134 aa, Homo sapiens
LGEGHFGKVSLYCYDPTNDGTGEMVAVKALKADCGPQHRSGWKQEIDILRTLYHEHIIKYKGCCEDQGHGLSARAALHPPRPSRAQRAAGQRQAGQDRGLWPSQGRARRPRVLPRARGWGQPRVLVCPRVPEGV

SEQ ID NO: 21838 - protein, 707 aa, Homo sapiens
MELEVPDEAESAEAGAVPSEAAWAAESGAAAGLAQKKAAPTEVLSMTAQPGPGHGKKLGHRGVDASGETTYKKTTSSTLKGAIQLGIGYTVGHLSSKPERDVLMQDFYVVESIFFPSEGSNLTPAHHFQDFRFKTYAPVAFRYFRELFGIRPDDYLYSLCNEPLIELSNPGASGSLFYVTSDDEFIIKTVMHKEAEFLQKLLPGYYMNLNQNPRTLLPKFYGLYCVQSGGKNIRVVVMNNILPRVVKMHLKFDLKGSTYKRRASKKEKEKSFPTYKDLDFMQDMPEGLLLDADTFSALVKTLQRDCLVLESFKIMDYSLLLGVHNIDQHERERQAQGAQSTSDEKRPVGQKALYSTAMESIQGGAARGEAIESDDTMGGIPAVNGRGERLLLHIGIIDILQSYRFIKKLEHTWKALVHDGDTVSVHRPSFYAERFFKFMSNTVFRKNSSLKSSPSKKGRGGALLAVKPLGPTAAFSASQIPSEREEAQYDLRGARSYPTLEDEGRPDLLPCTPPSFEEATTASIATTLSSTSLSIPERSPSETSEQPRYRRRTQSSGQDGRPQEEPPAEEDLQQITVQVEPACSVEIVVPKEEDAGVEASPAGASAAVEVETASQASDEEGAPASQASDEEDAPATDIYFFTDGRYWIYSPRHRRLRAVTLSASGTVSDRSRPPWGEGAVPLGQQGAAGPRPEAQCLTSVVFQKGFG

SEQ ID NO: 21839 - protein, 94 aa, Homo sapiens
MENLTKHSIECSSFRGDWECKNQFERKQGSQEGHFSEMIFTPEDMPTFSIQHQRIHTDEKLLECKECGKDFSFVSVLVRHQRIHTGEKPYECKE

SEQ ID NO: 21840 - protein, 131 aa, Homo sapiens
MRSLPSNGELDPDVLESMASLGCFRDRERLHRELRSEEENQEKMIYYLLLDRKERYPSCEDQDLPPRNDVDPPRKRVDSPMLSRHGKRRPERKSMEVLSITDAGGGGSPVPTRRALEMAQHSQRSRSVSGA

SEQ ID NO: 21841 - protein, 433 aa, Homo sapiens
MDEFHPFIEALLPHVRAFSYTWFNLQARKRKYFKKHEKRMSKDEERAVKDELLGEKPEIKQKWASRLLAKLRKDIRPEFREDFVLTITGKKPPCCVLSNPDQKGKIRRIDCLRQADKVWRLDLVMVILFKGIPLESTDGERLYKSPQCSNPGLCVQPHHIGVTIKELDLYLAYFVHTPESGQSDSSNQQGDADIKPLPNGHLSFQDCFVTSGVWNVTELVRVSQTPVATASGPNFSLADLESPSYYNINQVTLGRRSITSPPSTSTTKRPKSIDDSEMESPVDDVFYPGTGRSPAAGSSQSSGWPNDVDAGPASLKKSGKLDFCSALSSQGSSPRMAFTHHPLPVLAGVRPGSPRATASALHFPSTSIIQQSSPYFTHPTIRYHHHHGQDSLKEFVQFVCSDGSGQATGQHSQRQAPPLPTGLSASDPGTATF

SEQ ID NO: 21842 - protein, 520 aa, Homo sapiens
MPQLSLSSLGLWPMAASPWLLLLLVGASWLLARILAWTYTFYDNCCRLRCFPQPPKRNWFLGHLGLVTPTEQGMRVLTQLVATYPQGFKVWMGPIFPVIRFCHPNIIRSVINASAAIVPKDKVFYSFLKPWLGDGLLLSAGEKWSRHRRMLTPAFHFNILKPYMKIFNESVNIMHAKWQLLASEGSARLDMFEHISLMTLDSLQKCVFSFDSHCQEKPSEYIAAILELSALVTKRHQQILLYIDFLYYLTPDGQRFRRACRLVHDFTDAVIQERRRTLPSQGVDDFLQAKAKSKTLDFIDVLLLSKDEDGKKLSDEDIRAEADTFMFEGHDTTASGLSWVLYHLAKHPEYQERCRQEVQELLKDREPKEIEWDDLAQLPFLTMCIKESLRLHPPVPAVSRCCTQDIVLPDGRVIPKGIICLISVFGTHHNPAVWPDPEVYDPFRFDPKNIKERSPLAFIPFSAGPRNCIGQAFAMAEMKVVLGLTLLRFRVLPDHTEPRRKPELVLRAEGGLWLRVEPLS

SEQ ID NO: 21843 - protein, 88 aa, Homo sapiens
MVKKFKDSKSVLLITCKTCNRTVKHHGKSRSFVSTLKSNPATPTSKLSLKTPERRTANPNHDMSGSKGKSPASVFRTPTSGQSVSTCS

SEQ ID NO: 21844 - protein, 1163 aa, Homo sapiens
MFSRKKRELMKTPSISKKNRAGSPSPQPSGPHFISGETEAVSRPENPFNELPSDLPKELPRKDGADAVFPGPSLEPPAGSSGVKATGTLKRPTSLSRHASAAGFPLSGAASWTLGRSHRSPLTAASPGELPTEGAGPDVVEDISHLLADVARFAEGLEKLKECVLRDDLLEARRPRAHECLGEALRVMHQIISKYPLLNTVETLTAAGTLIAKVKAFHYESNNDLEKQEFEKALETIAVAFSSTVSEFLMGEVDSSTLLAVPPGDSSQSMESLYGPGSEGTPPSLEDCDAGCLPAEEVDVLLQRCEGGVDAALLYAKNMAKYMKDLISYLEKRTTLEMEFAKGLQKIAHNCRQSVMQEPHMPLLSIYSLALEQDLEFGHSMVQAVGTLQTQTFMQPLTLRRLEHEKRRKEIKEAWHRAQRKLQEAESNLRKAKQGYVQRCEDHDKARFLVAKAEEEQAGSAPGAGSTATKTLDKRRRLEEEAKNKAEEAMATYRTCVADAKTQKQELEDTKVTALRQIQEVIRQSDQTIKSATISYYQMMHMQTAPLPVHFQMLCESSKLYDPGQQYASHVRQLQRDQEPDVHYDFEPHVSANAWSPVMRARKSSFNVSDVARPEAAGSPPEEGGCTEGTPAKDHRAGRGHQVHKSWPLSISDSDSGLDPGPGAGDFKKFERTSSSGTMSSTEELVDPDGGAGASAFEQADLNGMTPELPVAVPSGPFRHEGLSKAARTHRLRKLRTPAKCRECNSYVYFQGAECEECCLACHKKCLETLAIQCGHKKLQGRLQLFGQDFSHAARSAPDGVPFIVKKCVCEIERRALRTKGIYRVNGVKTRVEKLCQAFENGKELVELSQASPHDISNVLKLYLRQLPEPLISFRLYHELVGLAKDSLKAEAEAKAASRGRQDGSESEAVAVALAGRLRELLRDLPPENRASLQYLLRHLRRIVEVEQDNKMTPGNLGIVFGPTLLRPRPTEATVSLSSLVDYPHQARVIETLIVHYGLVFEEEPEETPGGQDESSNQRAEVVVQVPYLEAGEAVVYPLQEAAADGCRESRVVSNDSDSDLEEASELLSSSEASALGHLSFLEQQQSEASLEVASGSHSGSEEQLEATAREDGDGDEDGPAQQLSGFNTNQSNNVLQAPLPPMRLRGGRMTLGSCRERQPEFV

SEQ ID NO: 21845 - protein, 205 aa, Homo sapiens
MAHAGRTGYDNREIVMKYIHYKLSQRGYEWDAGDVGAAPPGAAPAPGIFSSQPGHTPHPAASRDPVARTSPLQTPAAPGAAAGPALSPVPPVVHLTLRQAGDDFSRRYRRDFAEMSSQLHLTPFTARGRFATVVEELFRDGVNWGRIVAFFEFGGVMCVESVNREMSPLVDNIALWMTEYLNRHLHTWIQDNGGWVGALGDVSLG

SEQ ID NO: 21846 - protein, 152 aa, Homo sapiens
MDPAGGPRGVLPRPCRVLVLLNPRGGKGKALQLFRSHVQPLLAEAEISFTLMLTERRNHARELVRSEELGRWDALVVMSGDGLMHEVVNGLMERPDWETAIQKPLCSLPAGSGNALAASLNHYAGYEQVTNEDLLTNCTLLLCRRLLSPMNL

SEQ ID NO: 21847 - protein, 862 aa, Homo sapiens
HDVIQQLPPPHYRTLEYLLRHLARMARHSANTSMHARNLAIVWAPNLLRSMELESVGMGGAAAFREVRVQSVVVEFLLTHVDVLFSDTFTSAGLDPAGRCLLPRPKSLAGSCPSTRLLTLEEAQARTQGRLGTPTEPTTPKAPASPAERRKGERGEKQRKPGGSSWKTFFALGRGPSVPRKKPLPWLGGTRAPPQPSGSRPDTVTLRSAKSEESLSSQASGAGLQRLHRLRRPHSSSDAFPVGPAPAGSCESLSSSSSSESSSSESSSSSSESSAAGLGALSGSPSHRTSAWLDDGDELDFSPPRCLEGLRGLDFDPLTFRCSSPTPGDPAPPASPAPPAPASAFPPRVTPQAISPRGPTSPASPAALDISEPLAVSVPPAVLELLGAGGAPASATPTPALSPGRSLRPHLIPLLLRGAEAPLTDACQQEMCSKLRGAQGPLGPDMESPLPPPPLSLLRPGGAPPPPPKNPARLMALALAERAQQVAEQQSQQECGGTPPASQSPFHRSLSLEVGGEPLGTSGSGPPPNSLAHPGAWVPGPPPYLPRQQSDGSLLRSQRPMGTSRRGLRGPAQVSAQLRAGGGGRDAPEAAAQSPCSVPSQVPTPGFFSPAPRECLPPFLGVPKPGLYPLGPPSFQPSSPAPVWRSSLGPPAPLDRGENLYYEIGASEGSPYSGPTRSWSPFRSMPPDRLNASYGMLGQSPPLHRSPDFLLSYPPAPSCFPPDHLGYSAPQHPARRPTPPEPLYVNLALGPRGPSPASSSSSSPPAHPRSRSDPGPPVPRLPQKQRAPWGPRTPHRVPGPWGPPEPLLLYRAAPPAYGRGGELHRGSLYRNGGQRGEGAGPPPPYPTPSWSLHSEGQTRSYC

SEQ ID NO: 21848 - protein, 350 aa, Homo sapiens
MAEAPSSVRDDLKDVSSQRASSVNQMRPGEGQAHRELQILPRVPALSRRQGEDFLLHKSIDVTGDPKSLRPKQTLEKDLKENREENPGLTSPEPQLPKSPTDLVRAKEGKDPPKIASVENVDADTPSACVVEREASTHSGNRGDALNLSSPKRSKPDASSISQEEPQGEATPVGNRESPGQAGMNSIHSPGPASPVSHPDGQEAKALPPFACDVCEKRFTCNSKLVIHKRSHTGERLFQCNLCGKRFMQLISLQFHQRTHTGERPYTCDVCQKQFTQKSYLKCHKRSHTGEKPFECKDCKKVFTYRGSLKEHQRIHSGEKPYKCSKCPRAFSRLKLLRRHQKTHPEATSQ

SEQ ID NO: 21849 - protein, 226 aa, Homo sapiens
MEKVPGEMEIERRERSEELSEAERKAVQAMWARLYANCEDVGVAILVRFFVNFPSAKQYFSQFKHMEDPLEMERSPQLRKHACRVMGALNTVVENLHDPDKVSSVLALVGKAHALKHKVEPVYFKPTGHTALFGAVGPLTPPPSLAAPRAEGRVLKTLLDAPFLGAKEAGGIPDSTSPKEASVAARVPPWSCWEAALAAWMLTPARRAERGPLFLAFLLTVRERPS

SEQ ID NO: 21850 - protein, 191 aa, Homo sapiens
MLRMRVPALLVLLFCFRGRAGPSPHFLQQPEDLVVLLGEEARLPCALGAYWGLVQWTKSGLALGGQRDLPGWSRYWISGNAANGQHDLHIRPVELEDEASYECQATQAGLRSRPAQLHVLVPPEAPQVLGGPSVSLVAGVPANLTCRSRGDARPTPELLWFRDGVLLDGATFHQTLLKEGTPGSVESTLTL

SEQ ID NO: 21851 - protein, 104 aa, Homo sapiens
MKQTKLEIQKALAEDATVYEYDSIYDEMQKKKEENNPKLLLGKDRKPKYIHNLLKAVEIRKKEQEKRMEKKIQREREMEKGEFDDKEAFVTSAYKKKLQERAEE

SEQ ID NO: 21852 - protein, 118 aa, Homo sapiens
MAAADLSHGHYLSGDPVCLHEEKTPAGRIVADCLTDCYQDSVTFDDVAVDFTQEEWTLLDSTQRSLYSDVMLENYKNLATVGGQIIKPSLISWLEQEESRTVQGGVLQGRKTQWKGTL

SEQ ID NO: 21853 - protein, 475 aa, Homo sapiens
MDDSGLIRRRRLQKDLPLPRKSSSCRTSNRKSLILTSTSPTLPRPHSPLPGHLGSSPLDSPRNFSPNTPAHFSFASSRRADGRRWSLASLPSSGYGTNTPSSTVSSSCSSQERLHQLPYQPTVDELHFLSKHFGSTESITDEDGGRRSPAVRPRSRSLSPGRSPSSYDNEIVMMNHVYKERFPKATAQMEEKLRDFTRAYEPDSVLPLADGVLSFIHHQIIELARDCLTKSRDGLITTVYFYELQENLEKLLQDAYERSESLEVAFVTQLVKKLLIIISRPARLLECLEFNPEEFYHLLEAAEGHAKEGHLVKTDIPRYIIRQLGLTRDPFPDVVHLEEQDSGGSNTPEQDDLSEGRSSKAKKPPGENDFDTIKLISNGAYGAVYLVRHRDTRQRFAMKKINKQNLILRNQIQQAFVERDILTFAENPFVVGMFCSFETRRHLCMVMEYVEGVAACGAAGKMGPCSLVRAAGWPA

SEQ ID NO: 21854 - protein, 260 aa, Homo sapiens
EGKPYNQKSDIWALGCVLYELASLKRAFEAANLPALVLKIMSGTFAPISDRYSPELRQLVLSLLSLEPAQRPPLSHIMAQPLCIRALLNLHTDVGSVRMRRPVQGQRAVLGGRVWAPSGSTGGPHLSCRAEKSVAPSNTGSRTTSVRCRGIPRGPVRPAIPPPLSSVYAWGGGLGTPLRLPMLNTEVVQVAAGRTQKAGVTRSGRLILWEAPPLGAGGGSLLPGAVEQPQPQFISRFLEGQSGVTIKHVACGDFFTACLT

SEQ ID NO: 21855 - protein, 700 aa, Homo sapiens
MTGLEDQEFDFEFLFEFNQRDEGAAAAAPEHYGYASSNVSPALPLPTAHSTLPAPCHNLQTSTPGIIPPADHPSGYGAALDGGPAGYFLSSGHTRPDGAPALESPRIEITSCLGLYHNNNQFFHDVEVEDVLPSSKRSPSTATLSLPSLEAYRDPSCLSPASSLSSRSCNSEASSYESNYSYPYASPQTSPWQSPCVSPKTTDPEEGFPRGLGACTLLGSPRHSPSTSPRASVTEESWLGARSSRPASPCNKRKYSLNGRQPPYSPHHSPTPSPHGSPRVSVTDDSWLGNTTQYTSSAIVAAINALTTDSSLDLGDGVPVKSRKTTLEQPPSVALKVEPVGEDLGSPPPPADFAPEDYSSFQHIRKGGFCDQYLAVPQHPYQWAKPKPLSPTSYMSPTLPALDWQLPSHSGPYELRIEVQPKSHHRAHYETEGSRGAVKASAGGHPIVQLHGYLENEPLMLQLFIGTADDRLLRPHAFYQVHRITGKTVSTTSHEAILSNTKVLEIPLLPENSMRAVIDCAGILKLRNSDIELRKGETDIGRKNTRVRLVFRVHVPQPSGRTLSLQVASNPIECSQRSAQELPLVEKQSTDSYPVVGGKKMVLSGHNFLQDSKVIFVEKAPDGHHVWEMEAKTDRDLCKPNSLVVEIPPFRNQRITSPVHVSFYVCNGKRKRSQYQRFTYLPANVNEIIRNDLSSTSTHS

SEQ ID NO: 21856 - protein, 112 aa, Homo sapiens
MLAIGLSLCDHLSQDVFCLHESKFEEERMVAGWLTNYSQDSVTFEDVAVDFTQEEWTLLDQTQRNLYRDVMLENYKNLVAVDWESHINTKWSAPQQNFLQGKTSSVVEMNSE

SEQ ID NO: 21857 - protein, 335 aa, Homo sapiens
MSAKLGKSSSLLTQTSEECNGILTEKMEEEEQTCDPDSSLHWSSSYSPETFRQQFRQFGYQDSPGPHEALSRLWELCHLWLRPEVHTKEQILELLVLEQFLAILPKELQAWVQKHHPENGEETVTMLEDVERELDGPKQIFFGRRKDMIAEKLAPSEITEELPSSQLMPVKKQLQGASWELQSLRPHDEDIKTTNVKSASRQKTSLGIELHCNVSNILHMNGSQSSTYRGTYEQDGRFEKRQGNPSWKKQQKCDECGKIFSQSSALILHQRIHSGKKPYACDECAKAFSRSAILIQHRRTHTGEKPYKCHDCGKAFSQSSNLFRHRKRHIRKKVP

SEQ ID NO: 21858 - protein, 104 aa, Homo sapiens
MADTPRDAGLKQAPASRNEKAPVDFGYVGIDSILEQMRRKAMKQGFEFNIMVVGQSGLGKSTLINTLFKSKISRKSVQPTSEERIPKTIEIKSITHDIEEKGVR

SEQ ID NO: 21859 - protein, 744 aa, Homo sapiens
MYPQGRHPTPLQSGQPFKFSILEICDRIKEEFQFLQAQYHSLKLECEKLASEKTEMQRHYVMYYEMSYGLNIEMHKQAEIVKRLSGICAQIIPFLTQEHQQQVLQAVERAKQVTVGELNSLIGQQQLQPLSHHAPPVPLTPRPAGLVGGSATGLLALSGALAAQAQLAAAVKEDRAGVEAEGSRVERAPSRSASPSPPESLVEEERPSGPGGGGKQRADEKEPSGPYESDEDKSDYNLVVDEDQPSEPPSPATTPCGKVPICIPARRDLVDSPASLASSLGSPLPRAKELILNDLPASTPASKSCDSSPPQDASTPGPSSASHLCQLAAKPAPSTDSVALRSPLTLSSPFTTSFSLGSHSTLNGDLSVPSSYVSLHLSPQVSSSVVYGRSPVMAFESHPHLRGSSVSSSLPSIPGGKPAYSFHVSADGQMQPVPFPSDALVGAGIPRHARQLHTLAHGEVVCAVTISGSTQHVYTGGKGCVKVWDVGQPGAKTPVAQLDCLNRDNYIRSCKLLPDGRSLIVGGEASTLSIWDLAAPTPRIKAELTSSAPACYALAVSPDAKVCFSCCSDGNIVVWDLQNQTMVRQFQGHTDGASCIDISDYGTRLWTGGLDNTVRCWDLREGRQLQQHDFSSQIFSLGHCPNQDWLAVGMESSNVEILHVRKPEKYQLHLHESCVLSLKFASCGRWFVSTGKDNLLNAWRTPYGASIFQSKESSSVLSCDISRNNKYIVTGSGDKKATVYEVVY

SEQ ID NO: 21860 - protein, 184 aa, Homo sapiens
MAGAGPAPGLPGAGGPVVPGPGAGIPGKSGEERLKEMEAEMALFEQEVLGAPVPGIPTAVPAVPTVPTVPTVEAMQVPAAPVIRPIIATNTYQQVQQTLEARAAAAATVVPPMAKVIRDKRTGKTKGYGFVSFKDPSDYVRAMREMNGKYVGSRPIKLRKSMWKDRNLDVVRKKQKEKKKLGLR

SEQ ID NO: 21861 - protein, 184 aa, Homo sapiens
MNPIALGSRWLAYAENKLIRCHQSRGGACGDNIQSYTATVISAAKTLKSGLTMVGKVVTQLTGTLPSGVTEDDVAIHSNSRRSPLVPGIITVIDTETVGEGQVLVSEDSDSDGIVAHFPAHEKPVCCMAFNTSGMLLVTTDTLGHDFHVFQILTHPWSSSQCAVHHLYTLHRGETEAKVQDICF

SEQ ID NO: 21862 - protein, 1668 aa, Homo sapiens
MPPAVRRSACSMGWLWIFGAALGQCLGYSSQQQRVPFLQPPGQSQLQASYVEFRPSQGCSPGYYRDHKGLYTGRCVPCNCNGHSNQCQDGSGICVNCQHNTAGEHCERCQEGYYGNAVHGSCRACPCPHTNSFATGCVVNGGDVRCSCKAGYTGTQCERCAPGYFGNPQKFGGSCQPCSCNSNGQLGSCHPLTGDCINQEPKDSSPAEECDDCDSCVMTLLNDLATMGEQLRLVKSQLQGLSASAGLLEQMRHMETQAKDLRNQLLNYRSAISNHGSKIEGLERELTDLNQEFETLQEKAQVNSRKAQTLNNNVNRATQSAKELDVKIKNVIRNVHMLNRIRTWQKTHQGENNGLANSIRDSLNEYEAKLSDLRARLQEAAAQAKQANGLNQENERALGAIQRQVKEINSLQSDFTKYLTTADSSLLQTNIALQLMEKSQKEYEKLAASLNEARQELSDKVRELSRSAGKTSLVEEAEKHARSLQELAKQLEEIKRNASGDELVRCAVDAATAYENILNAIKAAEDAANRAASASESALQTVIKEDLPRKAKTLSSNSDKLLNEAKMTQKKLKQEVSPALNNLQQTLNIVTVQKEVIDTNLTTLRDGLHGIQRGDIDAMISSAKSMVRKANDITDEVLDGLNPIQTDVERIKDTYGRTQNEDFKKALTDADNSVNKLTNKLPDLWRKIESINQQLLPLGNISDNMDRIRELIQQARDAASKVAVPMRFNGKSGVEVRLPNDLEDLKGYTSLSLFLQRPNSRENGGTENMFVMYLGNKDASRDYIGMAVVDGQLTCVYNLGDREAELQVDQILTKSETKEAVMDRVKFQRIYQFARLNYTKGATSSKPETPGVYDMDGRNSNTLLNLDPENVVFYVGGYPPDFKLPSRLSFPPYKGCIELDDLNENVLSLYNFKKTFNLNTTEVEPCRRRKEESDKNYFEGTGYARVPTQPHAPIPTFGQTIQTTVDRGLLFFAENGDRFISLNIEDGKLMVRYKLNSELPKERGVGDAINNGRDHSIQIKIGKLQKRMWINVDVQNTIIDGEVFDFSTYYLGGIPIAIRERFNISTPAFRGCMKNLKKTSGVVRLNDTVGVTKKCSEDWKLVRSASFSRGGQLSFTDLGLPPTDHLQASFGFQTFQPSGILLDHQTWTRNLQVTLEDGYIELSTSDSGGPIFKSPQTYMDGLLHYVSVISDNSGLRLLIDDQLLRNSKRLKHISSSRQSLRLGGSNFEGCISNVFVQRLSLSPEVLDLTSNSLKRDVSLGGCSLNKPPFLMLLKGSTRFNKTKTFRINQLLQDTPVASPRSVKVWQDACSPLPKTQANHGALQFGDIPTSHLLFKLPQELLKPRSQFAVDMQTTSSRGLVFHTGTKNSFMALYLSKGRLVFALGTDGKKLRIKSKEKCNDGKWHTVVFGHDGEKGRLVVDGLRAREGSLPGNSTISIRAPVYLGSPPSGKPKSLPTNSFVGCLKNFQLDSKPLYTPSSSFGVSSCLGGPLEKGIYFSEEGGHVVLAHSVLLGPEFKLVFSIRPRSLTGILIHIGSQPGKHLCVYLEAGKVTASMDSGAGGTSTSVTPKQSLCDGQWHSVAVTIKQHILHLELDTDSSYTAGQIPFPPASTQEPLHLGGAPANLTTLRIPVWKSFFGCLRNIHVNHIPVPVTEALEVQGPVSLNGCPDQ

SEQ ID NO: 21863 - protein, 212 aa, Homo sapiens
LSLLNGSESAKLFAPPRDTPPKCIRCAVVGNGGILNGSRQGPNIDAHDYVFRLNGAVIKGFERDVGTKTSFYGFTVNTMKNSLVSYWNLGFTSVPQGQDLQYIFIPSDIRDYVMLRSAILGVPVPEGLDKGDRFLKSKLINTHFGDLYMPSTGALMLLTALHTCDQVSAYGFITSNYWKFSDHYFERKMKPLIFYANHDLSLEAALWRDLHK

SEQ ID NO: 21864 - protein, 523 aa, Homo sapiens
GKLGRYPPWPGKIVNPPKDLKKPRGKKCFFVKFFGTEDHAWIKVEQLKPYHAHKEEMIKINKGKRFQQAVDAVEEFLRRAKGKDQTSSHNSSDDKNRRNSSEERSRPNSGDEKRKLSLSEGKVKKNMGEGKKRVSSGSSERGSKSPLKRAQEQSPRKRGRPPKDEKDLTIPESSTVKGMMAGPMAAFKWQPTASEPVKDADPHFHHFLLSQTEKETGSTSIQAADSTAVNGSITPTDKKIGFLGLGLMGSGIVSNLLKMGHTVTVWNRTAEKCDLFIQEGARLGRTPAEVVSTCDITFACVSDPKAAKDLVLGPSGVLQGIRPGKCYVDMSTVDADTVTELAQVIVSRGGRFLEAPVSGNQQLSNDGMLVILAAGDRGLYEDCSSCFQAMGKTSFFLGEVGNAAKMMLIVNMVQGSFMATIAEGLTLAQVTGQSQQTLLDILNQGQLASIFLDQKCQNILQGNFKPDFYLKYIQKDLRLAIALGDAVNHPTPMAAAANEVYKRAKALDQSDNDMSAVYRAYIH

SEQ ID NO: 21865 - protein, 740 aa, Homo sapiens
MMHLRLFCILLAAVSGAEGWGYYGCDEELVGPLYARSLGASSYYSLLTAPRFARLHGISGWSPRIGDPNPWLQIDLMKKHRIRAVATQGSFNSWDWVTRYMLLYGDRVDSWTPFYQRGHNSTFFGNVNESAVVRHDLHFHFTARYIRIVPLAWNPRGKIGLRLGLYGCPYKADILYFDGDDAISYRFPRGVSRSLWDVFAFSFKTEEKDGLLLHAEGAQGDYVTLELEGAHLLLHMSLGSSPIQPRPGHTTVSAGGVLNDQHWHYVRVDRFGRDVNFTLDGYVQRFILNGDFERLNLDTEMFIGGLVGAARKNLAYRHNFRGCIENVIFNRVNIADLAVRRHSRITFEGKVAFRCLDPVPHPINFGGPHNFVQVPGFPRRGRLAVSFRFRTWDLTGLLLFSRLGDGLGHVELTLSEGQVNVSIAQSGRKKLQFAAGYRLNDGFWHEVNFVAQENHAVISIDDVEGAEVRVSYPLLIRTGTSYFFGGCPKPASRWDCHSNQTAFHGCMELLKVDGQLVNLTLVEGRRLGFYAEVLFDTCGITDRCSPNMCEHDGRCYQSWDDFICYCELTGYKGETCHTPLYKESCEAYRLSGKTSGNFTIDPDGSGPLKPFVVYCDIRENRAWTVVRHDRLWTTRVTGSSMERPFLGAIQYWNASWEEVSALANASQHCEQWIEFSCYNSRLLNTAAFGLAEMRSSTSTGEAPSLGSSAVPVVWTGAVWTLPCTATVTLTSPSGELTRDC

SEQ ID NO: 21866 - protein, 158 aa, Homo sapiens
MEYQLLDIKGNEQIEKYSWREACDTGSSRMDRKHGKYILNVEHSENQPVKEYCRNDWSMWKVFLACLLACVIMTAIGVLIICLVNNKGSANSSIVIQLSTNDGECVTVKPGTPSPACPPTMTTTSTVPASTATESTTSTATAATTSTEPITVAPTDHL

SEQ ID NO: 21867 - protein, 654 aa, Homo sapiens
MRRKFMLQWESHTFGKFHYKFFRDVSSDVFYILQLAYDSTSYYSANNLNVFLMGERASGKTIVINLAVLRWIKGEMWQNMISYVVHLTAHEINQMTNSSLAELIAKDWPDGQAPIADILSDPKKLLFILEDLDNIRFELNVNESALCSNSTQKVPIPVLLVSLLKRKMAPGCWFLISSRPTRGNNVKTFLKEVDCCTTLQLSNGKREIYFNSFFKDRQRASAALQLVHEDEILVGLCRVAILCWITCTVLKRQMDKGRDFQLCCQTPTDLHAHFLADALTSEAGLTANQYHLGLLKRLCLLAAGGLFLSTLNFSGEDLRCVGFTEADVSVLQAANILLPSNTHKDRYKFIHLNVQEFCTAIAFLMAVPNYLIPSGSREYKEKREQYSDFNQVFTFIFGLLNANRRKILETSFGYQLPMVDSFKWYSVGYMKHLDRDPEKLTHHMPLFYCLYENREEEFVKTIVDALMEVTVYLQSDKDMMVSLYCLDYCCHLRTLKLSVQRIFQNKEPLIRPTASQMKSLVYWREICSLFYTMESLRELHIFDNDLNGISERILSKALEHSSCKLRTLKLSYVSTASGFEDLLKALARNRSLTYLSINCTSISLNMFSLLHDILHEPTCQISHLRIHRPTRRLTPGIPTLWEAEAGRSPELDEM

SEQ ID NO: 21868 - protein, 432 aa, Homo sapiens
MERRRITSAARRSYVSSGEMMVGGLAPGRRLGPGTRLSLARMPPPLPTRVDFSLAGALNAGFKETRASERAEMMELNDRFASYIEKVRFLEQQNKALAAELNQLRAKEPTKLADVYQAELRELRLRLDQLTANSARLEVERDNLAQDLATVRQKLQDETNLRLEAENNLAAYRQEADEATLARLDLERKIESLEEEIRFLRKIHEEEVRELQEQLARQQVHVELDVAKPDLTAALKEIRTQYEAMASSNMHEAEEWYRSKFADLTDAAARNAELLRQAKHEANDYRRQLQSLTCDLESLRGTNESLERQMREQEERHVREAASYQEALARLEEEGQSLKDEMARHLQEYQDLLNVKLALDIEIATYRKLLEGEENRITIPVQTFSNLQIRETSLDTKSVSEGHLKRNIVVKTVEMRDGEVIKESKQEHKDVM

SEQ ID NO: 21869 - protein, 289 aa, Homo sapiens
RAALAAERKFFLSHPAYRHMADRMGTPHLQKTLNQQLTNHIRESLPALRSKLQSQLLSLEKEVEEYKNFRPDDPTRKTKALLQMVQQFGVDFEKRIEGSGDQVDTLELSGGARINRIFHERFPFELVKMEFDEKDLRREISYAIKNIHGVRTGLFTPDMAFEAIVKKQIVKLKEPSLKCVDLVVSELATVIKKCAEKLSSYPRLREETERIVTTYIREREGRTKDQILLLIDIEQSYINTNHEDFIGFANCYYTEQLVTCAQQRSTQLNKKRAIPNQVIRRGWLTINNI

SEQ ID NO: 21870 - protein, 646 aa, Homo sapiens
MACSLQKLFAVEEEFEDEDFLSAVEDAENRFTGSLPVNAGRLRPVSSRPQETVQAQSSRLLLLHPTAPSEALGLPDLDLCLPASSTPSADSRPSCIGAAPLRPVSTSSSWIGNQRRVTVTEVLRETARPQSSALHPLLTFESQQQQVGGFEGPEQDEFDKVLASMELEEPGMELECGVSSEAIPILPAQQREGSVLAKKARVVDLSGSCQKGPVPAIHKAGIMSAQDESLDPVIQCRTPRPPLRPGAVGHLPVPTALTVPTQQLHWEVCPQRSPVQALQPLQAARGTIQSSPQNRFPCQPFQSPSSWLSGKAHLPRPRTPNSSCSTPSRTSSGLFPRIPLQPQAPVSSIGSPVGTPKGPQGALQTPIVTNHLVQLVTAASRTPQQPTHPSTRAKTRRFPGPAGILPHQQSGRSLEDIMVSAPQTPTHGALAKFQTEIVASSQASVEEDFGRGPWLTMKSTLGLDERDPSCFLCTYSIVMVLRKAALKQLPRNKVPNMAVMIKSLTRSTMDASVVFKDPTGEMQGTVHRLLLETCQNELKPGSVLLLKQIGVFSPSLRNHYLNVTPNNLVHIYSPDSGDGSFLKPSQPFPKDSGSFQHDVAAKPEEGFRTAQNLEAEASPEEELPEADDLDGLLSELPEDFFCGTSS

SEQ ID NO: 21871 - protein, 169 aa, Homo sapiens
PVRIPPGIPPGVPRGYVGTGRLSWKKRLSVQTCSTATSSSTATLTADQKLTRSKLPSCRLRSRASKARSSVSIWMLRSSRVRMVSMDSYRAAGGEGSGLPPPIREQRPKKPGDTEGGCINPGRYSCKHRLVQAKFKSSPCHSLAVTMSNLINLSEPVSSSISFQIAVNI

SEQ ID NO: 21872 - protein, 123 aa, Homo sapiens
MGRPTQWPSLLLLLLLPGPPPVAGLEDAAFPHLGESLQPLPRACPLRCSCPRVDTVDCDGLDLRVFPDNITRAAQHLSLQNNQLQELPYNELSRLSGLRTLNLHNNLISSEEQSHLQGAPRSP

SEQ ID NO: 21873 - protein, 92 aa, Homo sapiens
MARTKQTARKSTGGKAPRKQLATKAARKSAPSTGGVKKPHRYRPGTVALREIRRYQKSTELLIRKLPFQRLVREIAQDFKTDLRFQSAAIGG

SEQ ID NO: 21874 - protein, 711 aa, Homo sapiens
MGDERPHYYGKHGTPQKYDPTFKGPIYNRGCTDIICCVFLLLAIVGYVAVGIIAWTHGDPRKVIYPTDSRGEFCGQKGTKNENKPYLFYFNIVKCASPLVLLEFQCPTPQICVEKCPDRYLTYLNARSSRDFEYYKQFCVPGFKNNKGVAEVLQDGDCPAVLIPSKPLARRCFPAIHAYKGVLMVGNETTYEDGHGSRKNITDLVEGAKKANGVLEARQLAMRIFEDYTVSWYWIIIGLVIAMAMSLLFIILLRFLAGIMVWVMIIMVILVLGYGIFHCYMEYSRLRGEAGSDVSLVDLGFQTDFRVYLHLRQTWLAFMIILSILEVIIILLLIFLRKRILIAIALIKEASRAVGYVMCSLLYPLVTFFLLCLCIAYWASTAVFLSTSNEAVYKIFDDSPCPFTAKTCNPETFPSSNESRQCPNARCQFAFYGGESGYHRALLGLQIFNAFMFFWLANFVLALGQVTLAGAFASYYWALRKPDDLPAFPLFSAFGRALRYHTGSLAFGALILAIVQIIRVILEYLDQRLKAAENKFAKCLMTCLKCCFWCLEKFIKFLNRNAYIMIAIYGTNFCTSARNAFFLLMRNIIRVAVLDKVTDFLFLLGKLLIVGSVGILAFFFFTHRIRIVQDTAPPLNYYWVPILTVIVGSYLIAHGFFSVYGMCVDTLFLCFCEDLERNDGSQERPYFMSPELRDILLKGSAEEGKRAEAEE

SEQ ID NO: 21875 - protein, 41 aa, Homo sapiens
MEPKVINQMLSKAAQSGQWKYGQHACFCQKQGSGNNWAYGY

SEQ ID NO: 21876 - protein, 656 aa, Homo sapiens
MVSILSSFESRLMKLENSIIPVHKQTENLQRLQENVEKTLSCLDHVISYYHVASDTEKIIREGPTGRLEEYLGSMAKIQKAVEYFQDNSPDSPELNKVKLLFERGKEALESEFRSLMTRHSKVVSPVLILDLISGDDDLEAQEDVTLEHLPESVLQDVIRISRWLVEYGRNQDFMNVYYQIRSSQLDRSIKGLKEHFHKSSSSSGVPYSPAIPNKRKDTPTKKPVKRPGTIRKAQNLLKQYSQHGLDGKKGGSNLIPLEGRDDMLDVETDAYIHCVSAFVKLAQSEYQLLADIIPEHHQKKTFDSLIQDALDGLMLEGENIVSAARKAIVRHDFSTVLTVFPILRHLKQTKPEFDQVLQGTAASTKNKLPGLITSMETIGAKALEDFADNIKNDPDKEYNMPKDGTVHELTSNAILFLQQLLDFQETAGAMLASQVLGDTYNIPLDPRETSSSATSYSSEFSKRLLSTYICKVLGNLQLNLLSKSKVYEDPALSAIFLHNNYNYILKSLEKSELIQLVAVTQKTAERSYREHIEQQIQTYQRSWLKVTDYIAEKNLPVFQPGVKLRDKERQIIKERFKGFNDGLEELCKIQKAWAIPDTEQRDRIRQAQKTIVKETYGAFLQKFGSVPFTKNPEKYIKYGVEQVGDMIDRLFDTSA

SEQ ID NO: 21877 - protein, 1059 aa, Homo sapiens
YDQCTWEIDDIDIPYYDNLKQAYWGHRELMLGEDTRLPKRLLKKGKKLRDDKQEKPPDTPIVDPTVKFDKQPWYIDSTGGTLHPYQLEGLNWLRFSWAQGTDTILADEMGLGKTVQTIVFLYSLYKEGHSKGPYLVSAPLSTIINWEREFEMWAPDFYVVTYTGDKESRSVIRENEFSFEDNAIRSGKKVFRMKKEVQIKFHVLLTSYELITIDQAILGSIEWACLVVDEAHRLKNNQSKFFRVLNSYKIDYKLLLTGTPLQNNLEELFHLLNFLTPERFNNLEGFLEEFADISKEDQIKKLHDLLGPHMLRRLKADVFKNMPAKTELIVRVELSQMQKKYYKFILTRNFEALNSKGGGNQVSLLNIMMDLKKCCNHPYLFPVAAVEAPVLPNGSYDGSSLVKSSGKLMLLQKMLKKLRDEGHRVLIFSQMTKMLDLLEDFLEYEGYKYERIDGGITGGLRQEAIDRFNAPGAQQFCFLLSTRAGGLGINLATADTVIIYDSDWNPHNDIQAFSRAHRIGQNKKVMIYRFVTRASVEERITQVAKRKMMLTHLVVRPGLGSKSGSMTKQELDDILKFGTEELFKDDVEGMMSQGQRPVTPIPDVQSSKGGNLAASAKKKHGSTPPGDNKDVEDSSVIHYDDAAISKLLDRNQDATDDTELQNMNEYLSSFKVAQYVVREEDGVEEVEREIIKQEENVDPDYWEKLLRHHYEQQQEDLARNLGKGKRIRKQVNYNDASQEDQEWQDELSDNQSEYSIGSEDEDEDFEERPEGQSGRRQSRRQLKSDRDKPLPPLLARVGGNIEVLGFNARQRKAFLNAIMRWGMPPQDAFNSHWLVRDLRGKSEKEFRAYVSLFMRHLCEPGADGAETFADGVPREGLSRQHVLTRIGVMSLVRKKVQEFEHVNGKYSTPDLIPEGPEGKKSGEVISSDPNTPVPASPAHLLPAPLGLPDKMEAQLGYMDEKDPGAQKPRQPLEVQALPAALDRVESEDKHESPASKERAREERPEETEKAPPSPEQLPRASCSVTQAGVQWRHLGSWEPLSPRLKRPSHLSFLNRGGAS

SEQ ID NO: 21878 - protein, 616 aa, Homo sapiens
MAATDLSYGLYRDPVCLQEKTEVERVVADCLTNCYQDSVTFDDLAVDFTPEEWTLLDPTQRNLYRDVMLENYKNLATVGYQLFKPSLISWLEQEESRTVQRGDFQASEWKVQLKTKELALQQDVLGEPTSSGIQMIGSHNGGEVSDVKQCGDVSSEHSCLKTHVRTQNSENTFECYLYGVDFLTLHKKTSTGEQRSVFSQCGKAFSLNPDVVCQRTCTGEKAFDCSDSGKSFINHSHLQGHLRTHNGESLHEWKECGRGFIHSTDLAVRIQTHRSEKPYKCKECGKGFRYSAYLNIHMGTHTGDNPYECKECGKAFTRSCQLTQHRKTHTGEKPYKCKDCGRAFTVSSCLSQHMKIHVGEKPYECKECGIAFTRSSQLTEHLKTHTAKDPFECKICGKSFRNSSCLSDHFRIHTGIKPYKCKDCGKAFTQNSDLTKHARTHSGERPYECKECGKAFARSSRLSEHTRTHTGEKPFECVKCGKAFAISSNLSGHLRIHTGEKPFECLECGKAFTHSSSLNNHMRTHSAKKPFTCMECGKAFKFPTCVNLHMRIHTGEKPYKCKQCGKSFSYSNSFQLHERTHTGEKPYECKECGKAFSSSSSFRNHERRHADERLSA

SEQ ID NO: 21879 - protein, 99 aa, Homo sapiens
MLDGRWTVTTLSGDMGPRAGFGHLARCHDLLICTAELLQMALTSPEEEEHVELTVFSLIVVDECHHTHKDTVYNVIMSQYLELKLQRAQPLPQVLGLTA

SEQ ID NO: 21880 - protein, 243 aa, Homo sapiens
MTKRKKLRTSGEGLCPPKPLKNPRLGDFYGDPQSSMLGCLHHPEEPEGKLGPVPSTQQHGEEPGKAVSSSPDEETGSPCRLLRQPEKEPAPLPPSQNSFGRFVPQFAKSRKTVTRKEEMKDEDRGSGAFSLLFPSGNKPGPCWPGPSSHANGDPVAVAKAQPRTFVGIQASEASRMEDATNVVRGLIVELSNLNRLIMGTHRDLEAFKRLNYRKTKLGGKAPLPYPSKGPGNIPRGDPPWREL

SEQ ID NO: 21881 - protein, 146 aa, Homo sapiens
LSCSSSLHRHERTHSGGKLYECQKCAKVFRCPTSLQAHERAHTGERPYECNKCGKTFNYPSCFRRHKKTHSGEKPYECTRCGKAFGWCSSLRRHEMTHTGEKPFDCKQCGKVFTFSNYLRLHERTHLAGRSQCFGRRQGDHLSPGV

SEQ ID NO: 21882 - protein, 52 aa, Homo sapiens
QTQRNLYRDVMLENYKNLVAVDWESHINTKWSAPQQNFLQGKTSSVVEMETN

SEQ ID NO: 21883 - protein, 145 aa, Homo sapiens
SDPFVQLTLEPRHEFPELAARETQKHKKDLHPLFDETFEFLVPAEPCRKAGACLLLTVLDYDTLGADDLEGEAFLPLREVPGLSGSEEPGEVPQTRLPLTYPAPNGDPILQLLEGRKGDREAQVFVRLRRHRAKQASQHALRPAP

SEQ ID NO: 21884 - protein, 239 aa, Homo sapiens
MARQLLSQVDMDCRVHMRPIGLTWVLQLTLAWILLEACGGSRPLQARSQQHHGLAADLGKGKLHLAGPCCPSEMDTTETSGPGNHPERCGVPSPECESFLEHLQRALRSRFRLRLLGVRQAQPLCEELCQAWFANCEDDITCGPTWLPLSEKRGCEPSCLTYGQTFADGTDLCRSALGHALPVAAPGARHCFNISISAVPRPRPGRRGREAPSRRSRSPRTSILDAAGSGSGSGSGSGP

SEQ ID NO: 21885 - protein, 229 aa, Homo sapiens
MVVVIVCLLNHYKVSTRSFINRPNQSRRREDGLPQEGCLWPSDSAAPRLGASEIMHAPRSRDRFTAPSFIQRDRFSRFQPTYPYVQHEIDLPPTISLSDGEEPPPYQGPCTLQLRDPEQQMELNRESVRAPPNRTIFDSDLIDIAMYSGGPCPPSSNSGISASTCSSNGRMEGPPPTYSEVMGHHPGASFLHHQRSNAHRGSRLQFQQNNAESTIVPIKGKDRKPGNLV

SEQ ID NO: 21886 - protein, 173 aa, Homo sapiens
GDVHDRYESRHGVRLHVTAAPRIVNISVLPSPAHAFRALCTAEGEPPPALAWSGPALGNSLAAVRSPREGHGHLVTAELPALTHDGRYTCTAANSLGRSEASVYLFRFHGASGASTVALLLGALGFKALLLLGVLAARAARRRPEHLDTPDTPPRPTTCPVSLFADLLSHQRP

SEQ ID NO: 21887 - protein, 254 aa, Homo sapiens
MASLLKVDQEVKLKVDSFRERITSEAEDLVANFFPKKLLELDSFLKEPILNIHDLTQIHSDMNLPVPDPILLTNSHDGLDGPTYKKRRLDECEEAFQGTKVFVMPNGMLKSNQQLVDIIEKVKPEIRLLIEKCNTVKMWVQLLIPRIEDGNNFGVSIQEETVAELRTVESEAASYLDQISRYYITRAKLVSKIAKYPHVEDYRRTVTEIDEKEYISLRLIISELRNQYVTLHDMILKNIEKIKRPRSSNAETLY

SEQ ID NO: 21888 - protein, 535 aa, Homo sapiens
MTSPLCRAASANALPPQDQASTPSSRVKGREASGKPSHLRGKGTAQAWTPGRSKGGSFHRGAGKPSVHSQVAELHKKIQLLEGDRKAFFESSQWNIKKNQETISQLRKETKALELKLLDLLKALEHLDHRLREKVKQQNALRHQVVLRQRRLEELQLQHSLRLLEMAEAQNRHTEVAKDESLNLENRLDSMEAEVVRTKHELEALHVVNQEALNARDIAKNQLQYLEETLVRERKKRERYISECKKRAEEKKLENERMERKTHREHLLLQSDDTIQDSLHAKEEELRQRWSMYQMEVIFGKVKDATGTDETHSLVRRFLAQGDTFAQLETLKSENEQTLVRLKQEKQQLQRELEDLKYSGEATLVSQQKLQAEAQERLKKEERRHAEAKDQLERALRAMQVAKDSLEHLASKLIHITVEDGRFAGKELDPQADNYVPNLLGLVEEKLLKLQAQLQGHDVQEMLCHIANREFLASLEGRLPEYNTRIALPLATSKDKFFDEESEEEDNEVVTRASLKIRSQKLIESHKKHRRSRRS

SEQ ID NO: 21889 - protein, 151 aa, Homo sapiens
WVRLLRRLIPNATGTGTFSPGASPGSEARTTGDISVEKLNLGTDSDSSPQKSSRDPPSSPSSLSSPIQESTAPELPSETQETPGPALCSPVGPAPATALCAHAVRPHRRQQLRRGVHRGGPHTEPAPRRAAPHSRGAGSLPGLRLRGRGLL

SEQ ID NO: 21890 - protein, 548 aa, Homo sapiens
MGRKAIVLAIANTSLAFPLCQHLVTFCLGEDDGVHTVEDASRKLAVMDSQGRVWAQEMLLRVSPDHVTLLDPASKEELESYPLGAIVRCDAVMPPGRSRSLLLLVCQEPERAQPDVHFFQGLRLGAELIREDIQGALHNYRSGRGERRAAALRATQEELQRDRSPAAETPPLQRRPSVRAVISTVERGAGRGRPQAKPIPEAEEAQRPEPVGTSSNADSASPDLGPRGPDLAVLQAEREVDILNHVFDDVESFVSRLQKSAEAARVLEHRERGRRSRRRAAGEGLLTLRAKPPSEAEYTDVLQKIKYAFSLLARLRGNIADPSSPELLHFLFGPLQMIVNTSGGPEFASSVRRPHLTSDAVALLRDNVTPRENELWTSLGDSWTRPGLELSPEEGPPYRPEFFSGWEPPVTDPQSRAWEDPVEKQLQHERRRRQVTQATQQGRGWEVRGRGRSAWPRLTRLSYFLQQSAPQVAVNGHRDLEPESEPQLESETAGKWVLCNYDFQARNSSELSVKQRDVLEDKEKVSELEAVMEKQKKKVEGEVEMEVI

SEQ ID NO: 21891 - protein, 537 aa, Homo sapiens
MCDLRRPAAGGMMDLAYVCEWEKWSKSTHCPSVPLACAWSCRNLIAFTMDLRSDDQDLTRMIHILDTEHPWDLHSIPSEHHEAITCLEWDQSGSRLLSADADGQIKCWSMADHLANSWESSVGSLVEGDPIVALSWLHNGVKLALHVEKSGASSFGEKFSRVKFSPSLTLFGGKPMEGWIAVTVSGLVTVSLLKPSGQVLTSTESLCRLRGRVALADIAFTGGGNIVVATADGSSASPVQFYKVCVSVVSEKCRIDTEILPSLFMRCTTDLNRKDKFPAITHLKFLARDMSEQVLLCASSQTSSIVECWSLRKEGLPVNNIFQQISPVVGDKQPTILKWRILSATNDLDRVSAVALPKLPISLTNTDLKVASDTQFYPGLGLALAFHDGSVHIVHRLSLQTMAVFYSSAAPRPVDEPAMKRPRTAGPAVHLKAMQLSWTSLALVGIDSHGKVLSTRILAMKASLCKLSPCTVTRVCDYHTKLFLIAISSTLKSLLRPHFLNTPDKSPGDRLTEICTKITDVDIDKVMINLKTEEFVL

SEQ ID NO: 21892 - protein, 331 aa, Homo sapiens
MTCPDKPGQLINWFICSLCVPRVRKLWSSRRPRTRRNLLLGTACAIYLGFLVSQVGRASLQHGQAAEKGPHRSRDTAEPSFPEIPLDGTLAPPESQGNGSTLQPNVVYITLRSKRSKPANIRGTVKPKRRKKHAVASAAPGQEALVGPSLQPQEAAREADAVAPGYAQGANLVKIGERPWRLVRGPGVRAGGPDFLQPSSRESNIRIYSESAPSWLSKDDIRRMRLLADSAVAGLRPVSSRSGARLLVLEGGAPGAVLRCGPSPCGLLKQPLDMSEVFAFHLDRILGLNRTLPSVSRKAEFIQGNRFTCFVICSCWGFWFIFFFPSLSFSK

SEQ ID NO: 21893 - protein, 121 aa, Homo sapiens
MMMGSARVAELLLLHGAEPNCADPATLTRPVHDAAREGFLDTLVVLHRAGARLDVRDAWGRLPVDLAEELGHRDVARYLRAAAGGTRGSNHARIDAAEGPSVTASIQVPGGEEGDFGSSYS

SEQ ID NO: 21894 - protein, 138 aa, Homo sapiens
KAKFHQTEGDHLTLLAVYNSWKNNKFSNPWCYENFIQARSLRRAQDIRKQMLGIMDRHKLDVVSCGKSTVRVQKAICSGFFRNAAKKDPQEGYRTLIDQQVVYIHPSSALFNRQPEWDLYSRFSEWKSGTNCSSLSGT

SEQ ID NO: 21895 - protein, 530 aa, Homo sapiens
MKPAQRNLYRDVMLENYSNLVTVGCQVTKPDVIFKLEQEEEPWVMEEEMFGRHCPEVWEVDEQIKKQQETLVRKVTSISKKILIKEKVIECKKVAKIFPLSSDIVTSRQSFYDCDSLDKGLEHNLDLLRYEKGCVREKQSNEFGKPFYHCASYVVTPFKCNQCGQDFSHKFDLIRHERIHAGEKPYECKECGKAFSRKENLITHQKIHTGEKPYKCNECGKAFIQMSNLIRHHRIHTGEKPYACKDCWKAFSQKSNLIEHERIHTGEKPYECKECGKSFSQKQNLIEHEKIHTGEKPYACNECGRAFSRMSSVTLHMRSHTGEKPYKCNKCGKAFSQCSVFIIHMRSHTGEKPYVCSECGKAFSQSSSLTVHMRNHTAEKPYECKECGKAFSRKENLITHQKIHTGEKPYECSECGKAFIQMSNLIRHQRIHTGEKPYACTVCGKAFSQKSNLTEHEKIHTGEKPYHCNQCGKAFSQRQNLLEHEKIHTGEKPFKCNECGKAFSRISSLTLHVRSHTGEKPYECNKCGKA

SEQ ID NO: 21896 - protein, 659 aa, Homo sapiens
MNRKDSKRKSHQECTGKIGGRGRPRQVRRHKTCPSPREISKVMASMNLGLLSEGGCSEDELLEKCIQSFDSAGSLCHEDHMLNMVLAMHSWVLPSADLAARLLTSYQKATGDTQELRRLQICHLVRYWLMRHPEVMHQDPQLEEVIGRFWATVAREGNSAQRRLGDSSDLPGLGKKRKVSLLFDHLETGELAQHLTYLEFRSFQAITPQDLRSYVLQGSVRGCPALEGSVGLSNSVSRWVQVMVLSRPGPLQRAQVLDKFIHVAQRLHQLQNFNTLMAVTGGLCHSAISRLKDSHAHLSPDSTKALLELTELLASHNNYARYRRTWAGCAGFRLPVLGVHLKDLVSLHEAQPDRLPDGRLHLPKLNNLYLRLQELVALQGQHPPCSANEDLLHLLTLSLDLFYTEDEIYELSYAREPRCPKSLPPSPFNAPLVVEWAPGVTPKPDRVTLGRHVEQLVESVFKNYDPEGRGTISQEDFERLSGNFPFACHGLHPPPRQGRGSFSREELTGYLLRASAICSKLGLAFLHTFHEVTFRKPTFCDSCSGFLWGVTKQGYRCRECGLCCHKHCRDQVKVECKKRPGAKGDAGPPGAPVPSTPAPHASCGSEENHSYTLSLEPETGCQLRHAWTQTESPHPSWETDTVPCPVMDPPSTASSKLDS

SEQ ID NO: 21897 - protein, 407 aa, Homo sapiens
MAPITTSREEFVSLFAWICCQRKSSKSNKTPPYKFVHVLKGVDIYPENLNSKKKFGADDKNEVKNKPAVPKNSLHLDLEKRDLNGNFPKTNLKPGSPSDLENATPKLFLEGEKESVSPESLKSSTSLTSEEKQEKLGTLFFSLEYNFERKAFVVNIKEARGLPAMDEQSMTSDPYIKMTILPEKKHKVKTRVLRKTLDPAFDETFTFYGIPYTQIQELALHFTILSFDRFSRDDIIGEVLIPLSGIELSEGKMLMNREIIKRNVRKSSGRGELLISLCYQSTTNTLTVVVLKARHLPKSDVSGLSDPYVKVNLYHAKKRISKKKTHVKKCTPNAVFNELFVFDIPCEGLEDISVEFLVLDSERGSRNEVIGQLVLGAAAEGTGGEHWKEICDYPRRQIAKWHVLCDG

SEQ ID NO: 21898 - protein, 191 aa, Homo sapiens
ELRFFPDMIPVSSIYMDSRAGCSKSCEAAQYWSSGFTVLQASIDAAIIQLKTNVSLWKELESTKAVIMGETAVVEIDTFPRGVILIYLVIAFSPFGYFLAIHIVAEKEKKIKEFLKIMGLHDTAFWLSWVLLYTSLIFLMSLLMAVIATASLLFPQSSSIVIFLLFFLYGLSSVSILTCDRNKELSKCLIT

SEQ ID NO: 21899 - protein, 410 aa, Homo sapiens
MPTTIEREFEELDTQRRWQPLYLEIRNESHDYPHRVAKFPENRNRNRYRDVSPYDHSRVKLQNAENDYINASLVDIEEAQRSYILTQGPLPNTCCHFWLMVWQQKTKAVVMLNRIVEKESVKCAQYWPTDDQEMLFKETGFSVKLLSEDVKSYYTVHLLQLENINYIENLWITLYLKLLMLDVKRSLKSGETRTISHFHYTTWPDFGVPESPASFLNFLFKVRESGSLNPDHGPAVIHCSAGIGRSGTFSLVDTCLVLMEKGDDINIKQVLLNMRKYRMGLIQTPDQLRFSYMAIIEGAKCIKGDSSIQKRWKELSKEDLSPAFDHSPNKIMTEKYNGNRIGLEEEKLTGDRCTGLSSKMQDTMEENSESALRKRIREDRKATTAQKVQQMKQRLNENERKRKRPRLTDT

SEQ ID NO: 21900 - protein, 1622 aa, Homo sapiens
MATLACRVQFLDDTDPFNSTNFPEPSRPPLFTFREDLALGTQLAGVHRLLQAPHKLDDCTLQLSHNGAYLDLEATLAEQRDELEGFQDDAGRGKKHSIILRTQLSVRVHACIEKLYNSSGRDLRRALFSLKQIFQDDKDLVHEFVVAEGLTCLIKVGAEADQNYQNYILRALGQIMLYVDGMNGVINRNETIQWLYTLIGSKFRLVVKTALKLLLVFVEYSESNAPLLIQAVTAVDTKRGVKPWSNIMEILEEKDGVDTELLVYAMTLVNKTLSGLPDQDTFYDVVDCLEELGIAAVSQRHLNKKGTDLDLVEQLNIYEVALRHEDGDETTEPPPSGCRDRRRASVCSSGGGEHRGLDRRRSRRHSVQSIKSTLSAPTSPCSQSAPSFKPNQVRDLREKEEEEEEEQPITEPSSEEEREDDASCQGKDSKVGAASGQSPTGRDAAPKSSALPAVSNASSQGKPLLVGTAGGTTWHSGSSGSEATPSALLSPPASAARPSSATPGSLKVSPTIDKLPYVPHSPFHLFSYDFEDSSLSTKEKEAESQKENSSSDSFSLSTYSASEPYHFRSFSSNRYSNFGNNSYHSSRPSSGSSVPTTPTSSVSPPQEARLERSSPSGLLTSSFRQHQESLAAERERRRQEREERLQRIEREERNKFSRDYLDKREEQRQAREERYKYLEQLAAEEHEKELRSRSVSRGRADLSLDLTSPAAPACLAPLSHSPSSSDSQEALTVSASSPGTPHHPQASAGDPEPESEAEPEAEAGAGQVADEAGQDIASAHEGAETEVEQALEQEPEERASLSEKERQNEGVNERDNCSASSVSSSSSTLEREEKEDKLSRDRTTGLWPAGVQDAGVNGQCGDILTNKRFMLDMLYAHNRKSPDDEEKGDGEAGRTQQEAEAVASLATRISTLQANSQTQDESVRRVDVGCLDNRGSVKAFAEKFNSGDLGRGSISPDAEPNDKVPETAPVQPKTESDYIWDQLMANPRELRIQDMDFTDLGEEDDIDVLDVDLGHREAPGPPPPPPPTFLGLPPPPPPPLLDSIPPPPVPGNLLVPPPPVFNAPQGLGWSQVPRGQPTFTKKKKTIRLFWNEVRPFDWPCKNNRRCREFLWSKLEPIKVDTSRLEHLFESKSKELSVSKKTAADGKRQEIIVLDSKRSNAINIGLTVLPPPRTIKIAILNFDEYALNKEGIEKILTMIPTDEEKQKIQEAQLANPEIPLGSAEQFLLTLSSISELSARLHLWAFKMDYETTEKEVAEPLLDLKEGIDQLENNKTLGFILSTLLAIGNFLNGTNAKAFELSYLEKVPEVKDTVHKQSLLHHVCTMVVENFPDSSDLYSEIGAITRSAKVDFDQLQDNLCQMERRCKASWDHLKAIAKHEMKPVLKQRMSEFLKDCAERIIILKIVHRRIINRFHSFLLFMGHPPYAIREVNINKFCRIISEFALEYRTTRERVLQQKQKRANHRERNKTRGKMITDTDEEEEVESGKFSGSSPAPPSQPQGLSYAEDAAEHENMKAVLKTSSPSVEDATPALGVRTRSRASRGSTSSWTMGTDDSPNVTDDAADEIMDRIVKSATQVPSQRVVPRERKRSRANRKSLRRTLKSGLTPEEARALGLVGTSELQL

SEQ ID NO: 21901 - protein, 1614 aa, Homo sapiens
MSTPDPPLGGTPRPGPSPGPGPSPGAMLGPSPGPSPGSAHSMMGPSPGPPSAGHPIPTQGPGGYPQDNMHQMHKPMESMHEKGMSDDPRYNQMKGMGMRSGGHAGMGPPPSPMDQHSQGYPSPLGGSEHASSPVPASGPSSGPQMSSGPGGAPLDGADPQALGQQNRGPTPFNQNQLHQLRAQIMAYKMLARGQPLPDHLQMAVQGKRPMPGMQQQMPTLPPPSVSATGPGPGPGPGPGPGPGPAPPNYSRPHGMGGPNMPPPGPSGVPPGMPGQPPGGPPKPWPEGPMANAAAPTSTPQKLIPPQPTGRPSPAPPAVPPAASPVMPPQTQSPGQPAQPAPMVPLHQKQSRITPIQKPRGLDPVEILQEREYRLQARIAHRIQELENLPGSLAGDLRTKATIELKALRLLNFQRQLRQEVVVCMRRDTALETALNAKAYKRSKRQSLREARITEKLEKQQKIEQERKRRQKHQEYLNSILQHAKDFKEYHRSVTGKIQKLTKAVATYHANTEREQKKENERIEKERMRRLMAEDEEGYRKLIDQKKDKRLAYLLQQTDEYVANLTELVRQHKAAQVAKEKKKKKKKKKAENAEGQTPAIGPDGEPLDETSQMSDLPVKVIHVESGKILTGTDAPKAGQLEAWLEMNPGYEVAPRSDSEESGSEEEEEEEEEEQPQAAQPPTLPVEEKKKIPDPDSDDVSEVDARHIIENAKQDVDDEYGVSQALARGLQSYYAVAHAVTERVDKQSALMVNGVLKQYQIKGLEWLVSLYNNNLNGILADEMGLGKTIQTIALITYLMEHKRINGPFLIIVPLSTLSNWAYEFDKWAPSVVKVSYKGSPAARRAFVPQLRSGKFNVLLTTYEYIIKDKHILAKIRWKYMIVDEGHRMKNHHCKLTQVLNTHYVAPRRLLLTGTPLQNKLPELWALLNFLLPTIFKSCSTFEQWFNAPFAMTGEKVDLNEEETILIIRRLHKVLRPFLLRRLKKEVEAQLPEKVEYVIKCDMSALQRVLYRHMQAKGVLLTDGSEKDKKGKGGTKTLMNTIMQLRKICNHPYMFQHIEESFSEHLGFTGGIVQGLDLYRASGKFELLDRILPKLRATNHKVLLFCQMTSLMTIMEDYFAYRGFKYLRLDGTTKAEDRGMLLKTFNEPGSEYFIFLLSTRAGGLGLNLQSADTVIIFDSDWNPHQDLQAQDRAHRIGQQNEVRVLRLCTVNSVEEKILAAAKYKLNVDQKVIQAGMFDQKSSSHERRAFLQAILEHEEQDEEEDEVPDDETVNQMIARHEEEFDLFMRMDLDRRREEARNPKRKPRLMEEDELPSWIIKDDAEVERLTCEEEEEKMFGRGSRHRKEVDYSDSLTEKQWLKAIEEGTLEEIEEEVRQKKSSRKRKRDSDAGSSTPTTSTRSRDKDDESKKQKKRGRPPAEKLSPNPPNLTKKMKKIVDAVIKYKDSSSGRQLSEVFIQLPSRKELPEYYELIRKPVDFKKIKERIRNHKYRSLNDLEKDVMLLCQNAQTFNLEGSLIYEDSIVLQSVFTSVRQKIEKEDDSEGEESEEEEEGEEEGSESESRSVKVKIKLGRKEKAQDRLKGGRRRPSRGSRAKPVVSDDDSEEEQEEDRSGSGSEED

SEQ ID NO: 21902 - protein, 338 aa, Homo sapiens
MSLRIDVDTNFPECVVDAGKVTLGTQQRQEMDPRLREKQNEIILRAVCALLNSGGGIIKAEIENKGYNYERHGVGLDVPPIFRSHLDKMQKENHFLIFVKSWNTEAGVPLATLCSNLYHRERTSTDVMDSQEALAFLKCRTQTPTNINVSNSLGPQAAQGSVQYEGNINVSAAALFDRKRLQYLEKLNLPESTHVEFVMFSTDVSHCVKDRLPKCVSAFANTEGGYVFFGVHDETCQVIGCEKEKIDLTSLRASIDGCIKKLPVHHFCTQRPEIKYVLNFLEVHDKGALRGYVCAIKVEKFCCAVFAKVPSSWQVKDNRVRQLPTREWTAWMMEADPG

SEQ ID NO: 21903 - protein, 722 aa, Homo sapiens
MAQWNQLQQLDTRYLEQLHQLYSDSFPMELRQFLAPWIESQDWAYAASKESHATLVFHNLLGEIDQQYSRFLQESNVLYQHNLRRIKQFLQSRYLEKPMEIARIVARCLWEESRLLQTAATAAQQGGQANHPTAAVVTEKQQMLEQHLQDVRKRVQDLEQKMKVVENLQDDFDFNYKTLKSQGDMQDLNGNNQSVTRQKMQQLEQMLTALDQMRRSIVSELAGLLSAMEYVQKTLTDEELADWKRRQQIACIGGPPNICLDRLENWITSLAESQLQTRQQIKKLEELQQKVSYKGDPIVQHRPMLEERIVELFRNLMKSAFVVERQPCMPMHPDRPLVIKTGVQFTTKVRLLVKFPELNYQLKIKVCIDKDSGDVAALRGSRKFNILGTNTKVMNMEESNNGSLSAEFKHLTLREQRCGNGGRANCDASLIVTEELHLITFETEVYHQGLKIDLETHSLPVVVISNICQMPNAWASILWYNMLTNNPKNVNFFTKPPIGTWDQVAEVLSWQFSSTTKRGLSIEQLTTLAEKLLGPGVNYSGCQITWAKFCKENMAGKGFSFWVWLDNIIDLVKKYILALWNEGYIMGFISKERERAILSTKPPGTFLLRFSESSKEGGVTFTWVEKDISGKTQIQSVEPYTKQQLNNMSFAEIIMGYKIMDATNILVSPLVYLYPDIPKEEAFGKYCRPESQEHPEADPGSAAPYLKTKFICVTPFIDAVWK

SEQ ID NO: 21904 - protein, 1147 aa, Homo sapiens
APKTKKGCKGSIDDFLGDLLGDDMTLPEKPVKLASHTRDTTGVSQMFPSSKARTKSLLGDDVFSTMAGLEEADAEVSGISEADPQALLQAMKDLDGMDADILGLKKSNSAPSKKAAKDPGKGELPNHPKPAGGAIPTKKSLPSPSSSGHQNRRFSSEDLEDPLRGLLSYDEGGITKQPPVTQSKTASDKSPSTVRDQGPSIPLTPGDTPIRKKEELLFDDGDDIMATLGFGDSPKAEKRQIGDQEGPRPARSTLDELLGRGMATKLLARPGTGEHREFKLDKKYQRPQDSEDMWGDEDFTFGAYQPTVVSSEGRQSRRQSVSRFFADSGADPKGEPGSKQSPPMASSPIQPRKGGADWLGLKDEDLDLFPASPTREAHRESSVPVTPSVPPPASQHSTPAGLPPSRAKPPTEGAGSPAKASQASKLRASKEEKEDWLSHALSRKKSQGLAREQHAGTSEGLHLAGTAGHPPSGSQPLTSTQGLEHAAAGGSSGTTARERPCVRPGVSGSPVTQNHAASALPTGSPKRGTAPGDLSATEPATCFPSTQKPTEPSVPVQPLLPESLARSLLPSTEYQKQLLAAQVQLQCSPAELQAELLHSQARLAELEAQVRKLELERAQHELLLGSLQQQHQADLELIESAHRSRIKVLETSYQQREERLRRENEELSARYLSQCQEAEQARAELTAQHQRRLAAIAQEKDQEMERLRELQRASILDMRRDHEEQLQRLKLLKDREVDAATSATSHTRSLNSIIHQMEKFSSSLHELSSRVEASHLTTSQERELGIRQRDEQLRALQERLGQQQRDMEEERSRQQEVIGKMEARLNEQSRLLEQERWRVTAEQSKAESMQRALEEQRKVTAQQMAMERAELERAKSALLEEQKSVMLKCGEERRRLAAEWAEFSAQQKLSKERAEREAERALQVDTQREGTLISLAKEQAELKIRASELRAEEKQLAAERAALEQERQELRLEKERINATALRVKLRAEEVESMSKVASEKYEEGERALREAQQVQAEQQARLQAVQQQQERLRKQEQHMHQEHLSLAQQRLQLDRARQDLPSSLVGLFPRAQGPAASSQSALMPPAPTTRWCSQPPTGLDPSPLHLHARLALLRHMAEQDRDFLENEQFFLETLKKGSYNLTSHSA

SEQ ID NO: 21905 - protein, 609 aa, Homo sapiens
MGEEDYYLELCERPVQFEKANPVNCVFFDEANKQVFAVRSGGATGVVVKGPDDRNPISFRMDDKGEVKCIKFSLENKILAVQRTSKTVVLPEKRSLKLLKSHNLNVNWYMYCPESAVILLSTTVLENVLQPFHFRAGTMSKLPKFEIELPAAPKSTKPSLSERDIAMATIYGQLYVLFLRHHSRTSNSTGAEVVLYHLPREGACKKMHILKLNRTGKFALNVVDNLVVVHHQDTETSVIFDIKLRGEFDGSVTFHHPVLPARSIQPYQIPITGPAAVTSQSPVPCKLYSSSWIVFQPDIIISASQGYLWNLQVKLEPIVNLLPDKGRLMDFLLQRKECKMVILSVCSQMLSESDRASLPVIATVFDKLNHEYKKYLDAEQSYAMAVEAGQSRSSPLLKRPVRTQAVLDQSDVYTHVLSAFVEKKEMPHKFVIAVLMEYIRSLNQFQIAVQHYLHELVIKTLVQHNLFYMLHQFLQYHVLSDSKPLACLLLSLESFYPPAHQLSLDMLKRLSTANDEIVEVLLSKHQVLAALRFIRGIGGHDNISARKFLDAAKQTEDNMLFYTIFRFFEQRNQRLRGSPNFTPGEHCEEHVAFFKQIFGDQALMRPTTF

SEQ ID NO: 21906 - protein, 219 aa, Homo sapiens
MDQTMLDDSAAESFNGNETLGHSSIASGGTHSREMGDSNSDGKTGLEQDEQPLNLSDSPLSAQLTSEYRIDDHNSNGKNKYKNLLISDLKMEREARENGSKSPAHSYSSYDSGKNESVDRGAEDLSLNRGDEDEDDHEDHDDSEKVNETDGVEAERLKAFNSRPIPSHLTSAVAESILASACESESRNAAKRMRLERQQDESAPADKQCKPEATQATYS

SEQ ID NO: 21907 - protein, 598 aa, Homo sapiens
MIDSGEKKPGRRAEEAVTFKDVAVIFTEEELGLLDPAQRKLYRDVMLENFRNLLSVGHQPFHGDTFHFLREEKFWVMGTTSQREGNLGTILLSLELCHSGLCKFPKVGGKMTMSKEAVTFKDVAVVFTEEELGLLDLAQRKLYRDVMLENFRNLLSVGHQPFHRDTFHFLREEKFWMMDIATQREGNSGGKIQPEMKTFPEAGPHEGWSCQQIWEEIASDLTRPQDSTIKSSQFFEQGDAHSQVEEGLSIMHTGQKPSNCGKCKQSFSDMSIFDLPQQIRSAEKSHSCDECGKSFCYISALHIHQRVHLGEKLFKCDVCGKEFSQSLHLQTHQRVHTGEKPFKCEQCGRGFRCRSALTVHCKLHMGEKHYNCEACGRAFIHDFQLQKHQRIHTGEKPFKCEICSVSFRLRSSLNRHCVVHTGKKPNSTGEYGKGFIRRLDLCKHQTIHTGEKPYNCKECGKSFRRSSYLLIHQRVHTGEKPYKCDKCGKSYITKSGLDLHHRAHTGERPYNCDDCGKSFRQASSILNHKRLHCRKKPFKCEDCGKKLVYRSYRKDQQKNHSGENPSKCEDCGKRYKRRLNLDIILSLFLNDTHNSVFS

SEQ ID NO: 21908 - protein, 841 aa, Homo sapiens
MAQVLHVPAPFPGTPGPASPPAFPAKDPDPPYSVETPYGYRLDLDFLKYVDDIEKGHTLRRVAVQRRPRLSSLPRGPGSWWTSTESLCSNASGDSRHSAYSYCGRGFYPQYGALETRGGFNPRVERTLLDARRRLEDQAATPTGLGSLTPSAAGSTASLVGVGLPPPTPRSSGLSTPVPPSAGHLAHVREQMAGALRKLRQLEEQVKLIPVLQVKLSVLQEEKRQLTVQLKSQKFLGHPTAGRGRSELCLDLPDPPEDPVALETRSVGTWVRERDLGMPDGEAALAAKVAVLETQLKKALQELQAAQARQADPQPQAWPPPDSPVRVDTVRVVEGPREVEVVASTAAGAPAQRAQSLEPYGTGLRALAMPGRPESPPVFRSQEVVETMCPVPAAATSNVHMVKKISITERSCDGAAGLPEVPAESSSSPPGSEVASLTQPEKSTGRVPTQEPTHREPTRQAASQESEEAGGTGGPPAGVRSIMKRKEEVADPTAHRRSLQFVGVNGGYESSSEDSSTAENISDNDSTENEAPEPRERVPSVAEAPQLRPAGTAAAKTSRQECQLSRESQHIPTAEGASGSNTEEEIRMELSPDLISACLALEKYLDNPNALTERELKVAYTTVLQEWLRLACRSDAHPELVRRHLVTFRAMSARLLDYVVNIADSNGNTALHYSVSHANFPVVQQLLDSGVCKVDKQNRAGYSPIMLTALATLKTQDDIETVLQLFRLGNINAKASQAGQTALMLAVSHGRVDVVKALLACEADVNVQDDDGSTALMCACEHGHKEIAGLLLAVPSCDISLTDRDGSTALMVALDAGQSEIASMLYSRMNIKCSVSLNPAG

SEQ ID NO: 21909 - protein, 2075 aa, Homo sapiens
GAECPHQNKTVLHMDGCLDTETPTVSIQENVDVASLKPISDSGINFTDAIWSPTCERRTCECHESIEKNKDKTDLPQSVVYQNEEGRWVTDLAYYTSFNSKQNLNVSLSDEMNEDFRSGSEAFDLIAQDEEEFNKEHQFIQPSFGYFIRSPEKREPIALIRKSDVSRGNLEKEMAHLNHDLYSGDLNEQSQAQLSEGSITLQVEAVESTSQVDENDVTLTADKGKTEDTFFMSNKPQRYKDKLPDSGDSMLRISTIASAIAEASVNTDPSQLAAMIKALSNKTRDKTFQEDEKQKDYSHVRHFLPNDLEKSNGSNALDMEKYLKKTEVSRYESALENFSRASMSDTWDLSLPKEQTTQDIHPVDLSATSVSVRAPEENTAAIVYVENGESENQESFRTINSSNSVTNRENNSAVVDVKTCSIDNKLQDVGNDEKATSISTPSDSYSSVRNPRITSLCLLKDCEEIRDNRENQRQNECVSEISNSEKHVTFENHRIVSPKNSDLKNTSPEHGGRGSEDEQESFRPSTSPLSHSSPSEISGTSSSGCALESFGSAAQQQQPPCEQELSPLVCSPAGVSRLTYVSEPESSYPTTATDDALEDRKSDITSELSTTIIQGSPAALEERAMEKLREKVPFQNRGKGTLSSIIQNNSDTRKATETTSLSSKPEYVKPDFRWSKDPSSKSGNLLETSEVGWTSNPEELDPIRLALLGKSGLSCQVGSATSHPVSCQEPIDEDQRISPKDKSTAGREFSGQVSHQTTSENQCTPIPSSTVHSSVADMQNMPAAVHALLTQPSLSAAPFAQRYLGTLPSTGSTTLPQCHAGNATVCGFSGGLPYPAVAGEPVQNSVAVGICLGSNIGSGWMGTSSLCNPYSNTLNQNLLSTTKPFPVPSVGTNCGIEPWDSGVTSGLGSVRVPEELKLPHACCVGIASQTLLSVLNPTDRWLQVSIGVLSISVNGEKVDLSTYRCLVFKNKAIIRPHATEEIKVLFIPSSPGVFRCTFSVASWPCSTDAETIVQAEALASTVTLTAIAESPVIEVETEKKDVLDFGDLTYGGWKALPLKLINRTHATVPIRLIINANAVAWRCFTFSKESVRAPVEVAPCADVVTRLAGPSVVNHMMPASYDGQDPEFLMIWVLFHSPKKQISSSDILDSAEEFSAKVDIEVDSPNPTPVLRSVSLRARAGIARIHAPRDLQTMHFLAKVASSRKQHLPLKNAGNIEVYLDIKVPEQGSHFSVDPKNLLLKPGEEHEVIVSFTPKDPEACEERILKIFVQPFGPQYEVVLKGEVISSGSKPLSPGPCLDIPSILSNKQFLAWGGVPLGRTQLQKLALRNNSASTTQHLRLLIRGQDQDCFQLQNTFGSEQRLTSNCEIRIHPKEDIFISVLFAPTRLSCMLARLEIKQLGNRSQPGIKFTIPLSGYGGTSNLILEGVKKLSDSYMVTVNGLVPGKESKIVFSVRNTGSRAAFVKAVGFKDSQKKVLLDPKVLRIFPDKFVLKERTQENVTLIYNPSDRGINNKTATELSTVYLFGGDEISRQQYRRALLHKPEMIKQILPEHSVLQNINFVEAFQDELLVTEVYDLPQRPNDVQLFYGSMCKIILSVIGEFRDCISSREFLQPSSKASLESTSDLGASGKHGGNVSLDVLPVKGPQGSPLLSRAARPPLDQLASEEPWTVLPEHLILVAPSPCDMAKTGRFQIVNNSVRLLRFELCWPAHCLTVTPQHGCVAPESKLQILVSPNSSLSTKQSMFPWSGLIYIHCDDGQKKIVKVQIREDLTQVELLTRLTSKPFGILSPVSEPSVSHLVKPMTKPPSTKVEIRNKSITFPTTEPGETSESCLELENHGTTDVKWHLSSLAPPYVKGVDESGDVFRATYAAFRCSPISGLLESHGIQKVSITFLPRGRGDYAQFWDVECHPLKEPHMKHTLRFQLSGQSIEAENEPENACLSTDSLIKIDHLVKPRRQAVSEASARIPEQLDVTARGVYAPEDVYRFRPTSVGESRTLKVNLRNNSFITHSLKFLSPREPFYVKHSKYSLRAQHYINMPVQFKPKSAGKFEALLVIQTDEGKSIAIRLIGEALGKN

SEQ ID NO: 21910 - protein, 189 aa, Homo sapiens
MPKPAEAPTAPSPAQTLENSEPAPVSQLQSRLEPKPQPPVAEATPRSQEATEAAPSCVGDMADTPRDAGLKQAPASRNEKAPVDFGYVGIDSILEQMRRKAMKQGFEFNIMVVGESSPCMPLNQCRKPASAPRAAHKPLGLVFPSVKWGSNPDLKDGLPVTLRVHACAWEEPTASSGSSEGPVLHIQGP

SEQ ID NO: 21911 - protein, 944 aa, Homo sapiens
MDAAEPGLPPGPEGRKRYSDIFRSLDNLEISLGNVTLEMLAGDPLLSEDPEPDKTPTATVTNEASCWSGPSPEGPVPLTGEELDLRLIRTKGGVDAALEYAKTWSRYAKELLAWTEKRASYELEFAKSTMKIAEAGKVSIQQQSHMPLQYIYTLFLEHDLSLGTLAMETVAQQKRDYYQPLAAKRTEIEKWRKEFKEQWMKEQKRMNEAVQALRRAQLQYVQRSEDLRARSQGSPEDSAPQASPGPSKQQERRRRSREEAQAKAQEAEALYQACVREANARQQDLEIAKQRIVSHVRKLVFQGDEVLRRVTLSLFGLRGAQAERGPRAFAALAECCAPFEPGQRYQEFVRALRPEAPPPPPPAFSFQEFLPSLNSSPLDIRKKLSGPLPPRLDENSAEPGPWEDPGTGWRWQGTPGPTPGSDVDSVGGGSESRSLDSPTSSPDLGDGLENGLGSPFGKWTLSSAAQTHQLRRLRGPAKCRECEAFMVSGTECEECFLTCHKRCLETLLILCGHRRLPARTPLFGVDFLQLPRDFPEEVPFVVTKCTAEIEHRALDVQGIYRVSGSRVRVERLCQAFENGRALVELSGNSPHDVSSVLKRFLQELTEPVIPFHLYDAFISLAKTLHADPGDDPGTPSPSPEVIRSLKTLLVQLPDSNYNTLRHLVAHLFRVAARFMENKMSANNLGIVFGPTLLRPPDGPRAASAIPVTCLLDSGHQAQLVEFLIVHYEQIFGMDELPQATEPPPQDSSPAPGPLTTSSQPPPPHLDPDSQPPVLASDPGPDPQHHSTLEQHPTATPTEIPTPQSDQREDVAEDTKDGGGEVSSQGPEDSLLGTQSRGHFSRQPVKYPRGGVRPVTHQLSSLALVASKLCEETPITSVPRGSLRGRGPSPAAASPEGSPLRRTPLPKHFEITQETARLLSKLDSEAVPRATCCPDVQPEEAEDHL

SEQ ID NO: 21912 - protein, 149 aa, Homo sapiens
MVTFKDVAVVFTEEELGLLDSVQRKLYRDVMLENFRNLLLVAHQPFKPDLISQLEREEKLLMVETETPRDGCSGRKNQQKMESIQEVTVSYFSPKELSSRQTWQQSAGGLIRCQDFLKVFQGKNSQLQEQGNSLGQVWAGIPVQISEDK

SEQ ID NO: 21913 - protein, 702 aa, Homo sapiens
MASSVAPYEQLVRQVEALKAENSHLRQELRDNSSHLSKLETETSGMKEVLKHLQGKLEQEARVLVSSGQTEVLEQLKALQMDITSLYNLKFQPPTLGPEPAARTPEGSPVHGSGPSKDSFGELSRATIRLLEELDRERCFLLNEIEKEEKEKLWYYSQLQGLSKRLDELPHVETQFSMQMDLIRQQLEFEAQHIRSLMEERFGTSDEMVQRAQIRASRLEQIDKELLEAQDRVQQTEPQALLAVKSVPVDEDPETEVPTHPEDGTPQPGNSKVEVVFWLLSMLATRDQEDTARTLLAMSSSPESCVAMRRSGCLPLLLQILHGTEAAAGGRAGAPGAPGAKDARMRANAALHNIVFSQPDQGLARKEMRVLHVLEQIRAYCETCWDWLQARDGGPEGGGAGSAPIPIEPQICQATCAVMKLSFDEEYRRAMNELGGLQAVAELLQVDYEMHKMTRDPLNLALRRYAGMTLTNLTFGDVANKATLCARRGCMEAIVAQLASDSEELHQVVSSILRNLSWRADINSKKVLREAGSVTALVQCVLRATKESTLKSVLSALWNLSAHSTENKAAICQVDGALGFLVSTLTYKCQSNSLAIIESGGGILRNVSSLVATREDYRQVLRDHNCLQTLLQHLTSHSLTIVSNACGTLWNLSARSARDQELLWDLGAVGMLRNLVHSKHKMIAMGSAAALRNLLAHRPAKH

SEQ ID NO: 21914 - protein, 431 aa, Homo sapiens
MSSILPFTPPVVKRLLGWKKSAGGSGGAGGGEQNGQEEKWCEKAVKSLVKKLKKTGRLDELEKAITTQNCNTKCVTIPRSLDGRLQVSHRKGLPHVIYCRLWRWPDLHSHHELKAIENCEYAFNLKKDEVCVNPYHYQRVETPVLPPVLVPRHTEILTELPPLDDYTHSIPENTNFPAGIEPQSNYIPETPPPGYISEDGETSDQQLNQSMDTGSPAELSPTTLSPVNHSLDLQPVTYSEPAFWCSIAYYELNQRVGETFHASQPSLTVDGFTDPSNSERFCLGLLSNVNRNATVEMTRRHIGRGVRLYYIGGEVFAECLSDSAIFVQSPNCNQRYGWHPATVCKIPPGCNLKIFNNQEFAALLAQSVNQGFEAVYQLTRMCTIRMSFVKGWGAEYRYEIHIWFLNFHSVIMFHCILAYSGVHLYLFSMRL

SEQ ID NO: 21915 - protein, 107 aa, Homo sapiens
MDPLGAAKPQWPWRRCLAALLFQLLVAVCFFSYLRVSRDDATGSPRAPSGSSRQDTTPTRPTLLILLRTWPFHIPVALSRCSEMVPGTADCHITADRKVYPQADMVI

SEQ ID NO: 21916 - protein, 286 aa, Homo sapiens
MEPPDAPAQARGAPRLLLLAVLLAAHPDAQAEVRLSVPPLVEVMRGKSVILDCTPTGTHDHYMLEWFLVTMHDTRGRSPPYQLDSQGRLVLAEAQVGDERDYVCVVRAGAAGTAEATARLNVFAKPEATEVSPNKGTLSVMEDSAQEIATCNSRNGNPAPKITWYRNGQRLEVPVEMNPEGYMTSRTVREASGLLSLTSTLYLRLRKDDRDASFHCAAHYSLPEGRHGRLDSPTFHLTLHYPTEHVQFWVGSPSTPAGWVREGDTVQLLCRGDGSPSPEYTLFRLQ

SEQ ID NO: 21917 - protein, 628 aa, Homo sapiens
MAHALVTFRDVAIDFSQKEWECLDTTQRKLYRDVMLENYNNLVSLGLLSRHKTKKLSSEKDIHEISLSKESIIEKSKTLRLKGSIFRNEWQNKSEFEGQQGLKERSISQKKIVSKKMSTDRKRPSFTLNQRIHNSEKSCDSHLVQHGKIDSDVKHDCKECGSTFNNVYQLTLHQKIHTGEKSCKCEKCGKVFSHSYQLTLHQRFHTGEKPYECQECGKTFTLYPQLNRHQKIHTGKKPYMCKKCDKGFFSRLELTQHKRIHTGKKSYECKECGKVFQLIFYFKEHERIHTGKKPYECKECGKAFSVCGQLTRHQKIHTGVKPYECKECGKTFRLSFYLTEHRRTHAGKKPYECKECGKSFNVRGQLNRHKTIHTGIKPFACKVCEKAFSYSGDLRVHSRIHTGEKPYECKECGKAFMLRSVLTEHQRLHTGVKPYECKECGKTFRVRSQISLHKKIHTDVKPYKCVRCGKTFRFGFYLTEHQRIHTGEKPYKCKECGKAFIRRGNLKEHLKIHSGLKPYDCKECGKSFSRRGQFTEHQKIHTGVKPYKCKECGKAFSRSVDLRIHQRIHTGEKPYECKQCGKAFRLNSHLTEHQRIHTGEKPYECKVCRKAFRQYSHLYQHQKTHNVI

SEQ ID NO: 21918 - protein, 1037 aa, Homo sapiens
MTSPQLEWTLQTLLEQLNEDELKSFKSLLWAFPLEDVLQKTPWSEVEEADGKKLAEILVNTSSENWIRNATVNILEEMNLTELCKMAKAEMMEDGQVQEIDNPELGDAEEDSELAKPGEKEGWRNSMEKQSLVWKNTFWQGDIDNFHDDVTLRNQRFIPFLNPRTPRKLTPYTVVLHGPAGVGKTTLAKKCMLDWTDCNLSPTLRYAFYLSCKELSRMGPCSFAELISKDWPELQDDIPSILAQAQRILFVVDGLDELKVPPGALIQDICGDWEKKKPVPVLLGSLLKRKMLPRAALLVTTRPRALRDLQLLAQQPIYVRVEGFLEEDRRAYFLRHFGDEDQAMRAFELMRSNAALFQLGSAPAVCWIVCTTLKLQMEKGEDPVPTCLTRTGLFLRFLCSRFPQGAQLRGALRTLSLLAAQGLWAQMSVFHREDLERLGVQESDLRLFLDGDILRQDRVSKGCYSFIHLSFQQFLTALFYALEKEEGEDRDGHAWDIGDVQKLLSGEERLKNPDLIQVGHFLFGLANEKRAKELEATFGCRMSPDIKQELLQCKAHLHANKPLSVTDLKEVLGCLYESQEEELAKVVVAPFKEISIHLTNTSEVMHCSFSLKHCQDLQKLSLQVAKGVFLENYMDFELDIEFERCTYLTIPNWARQDLRSLRLWTDFCSLFSSNSNLKFLEVKQSFLSDSSVRILCDHVTRSTCHLQKVEIKNVTPDTAYRDFCLAFIGKKTLTHLTLAGHIEWERTMMLMLCDLLRNHKCNLQYLRLGGHCATPEQWAEFFYVLKANQSLKHLRLSANVLLDEGAMLLYKTMTRPKHFLQMLSLENCRLTEASCKDLAAVLVVSKKLTHLCLAKNPIGDTGVKFLCEGLSYPDCKLQTLVLQQCSITKLGCRYLSEALQEACSLTNLDLSINQIARGLWILCQALENPNCNLKHLRLWSCSLMPFYCQHLGSALLSNQKLETLDLGQNHLWKSGIIKLFGVLRQRTGSLKILRLKTYETNLEIKKLLEEVKEKNPKLTIDCNASGATAPPCCDFFC

SEQ ID NO: 21919 - protein, 32759 aa, Homo sapiens
MTTQAPTFTQPLQSVVVLEGSTATFEAHISGFPVPEVSWFRDGQVISTSTLPGVQISFSDGRAKLTIPAVTKANSGRYSLKATNGSGQATSTAELLVKAETAPPNFVQRLQSMTVRQGSQVRLQVRVTGIPTPVVKFYRDGAEIQSSLDFQISQEGDLYSLLIAEAYPEDSGTYSVNATNSVGRATSTAELLVQGEEEVPAKKTKTIVSTAQISESRQTRIEKKIEAHFDARSIATVEMVIDGAAGQQLPHKTPPRIPPKPKSRSPTPPSIAAKAQLARQQSPSPIRHSPSPVRHVRAPTPSPVRSVSPAARISTSPIRSVRSPLLMRKTQASTVATGPEVPPPWKQEGYVASSSEAEMRETTLTTSTQIRTEERWEGRYGVQEQVTISGAAGAAASVSASASYAAEAVATGAKEVKQDADKSAAVATVVAAVDMARVREPVISAVEQTAQRTTTTAVHIQPAQEQVRKEAEKTAVTKVVVAADKAKEQELKSRTKEVITTKQEQMHVTHEQIRKETEKTFVPKVVISAAKAKEQETRISEEITKKQKQVTQEAIRQETEITAASMVVVATAKSTKLETVPGAQEETTTQQDQMHLSYEKIMKETRKTVVPKVIVATPKVKEQDLVSRGREGITTKREQVQITQEKMRKEAEKTALSTIAVATAKAKEQETILRTRETMATRQEQIQVTHGKVDVGKKAEAVATVVAAVDQARVREPREPGHLEESYAQQTTLEYGYKERISAAKVAEPPQRPASEPHVVPKAVKPRVIQAPSETHIKTTDQKGMHISSQIKKTTDLTTERLVHVDKRPRTASPHFTVSKISVPKTEHGYEASIAGSAIATLQKELSATSSAQKITKSVKAPTVKPSETRVRAEPTPLPQFPFADTPDTYKSEAGVEVKKEVGVSITGTTVREERFEVLHGREAKVTETARVPAPVEIPVTPPTLVSGLKNVTVIEGESVTLECHISGYPSPTVTWYREDYQIESSIDFQITFQSGIARLMIREAFAEDSGRFTCSAVNEAGTVSTSCYLAVQVSEEFEKETTAVTEKFTTEEKRFVESRDVVMTDTSLTEEQAGPGEPAAPYFITKPVVQKLVEGGSVVFGCQVGGNPKPHVYWKKSGVPLTTGYRYKVSYNKQTGECKLVISMTFADDAGEYTIVVRNKHGETSASASLLEEADYELLMKSQQEMLYQTQVTAFVQEPKVGETAPGFVYSEYEKEYEKEQALIRKKMAKDTVVVRTYVEDQEFHISSFEERLIKEIEYRIIKTTLEELLEEDGEEKMAVDISESEAVESGFDSRIKNYRILEGMGVTFHCKMSGYPLPKIAWYKDGKRIKHGERYQMDFLQDGRASLRIPVVLPEDEGIYTAFASNIKGNAICSGKLYVEPAAPLGAPTYIPTLEPVSRIRSLSPRSVSRSPIRMSPARMSPARMSPARMSPARMSPGRRLEETDESQLERLYKPVFVLKPVSFKCLEGQTARFDLKVVGRPMPETFWFHDGQQIVNDYTHKVVIKEDGTQSLIIVPATPSDSGEWTVVAQNRAGRSSISVILTVEAVEHQVKPMFVEKLKNVNIKEGSRLEMKVRATGNPNPDIVWLKNSDIIVPHKYPKIRIEGTKGEAALKIDSTVSQDSAWYTATAINKAGRDTTRCKVNVEVEFAEPEPERKLIIPRGTYRAKEIAAPELEPLHLRYGQEQWEEGDLYDKEKQQKPFFKKKLTSLRLKRFGPAHFECRLTPIGDPTMVVEWLHDGKPLEAANRLRMINEFGYCSLDYGVAYSRDSGIITCRATNKYGTDHTSATLIVKDEKSLVEESQLPEGRKGLQRIEELERMAHEGALTGVTTDQKEKQKPDIVLYPEPVRVLEGETARFRCRVTGYPQPKVNWYLNGQLIRKSKRFRVRYDGIHYLDIVDCKSYDTGEVKVTAENPEGVIEHKVKLEIQQREDFRSVLRRAPEPRPEFHVHEPGKLQFEVQKVDRPVDTTETKEVVKLKRAERITHEKVPEESEELRSKFKRRTEEGYYEAITAVELKSRKKDESYEELLRKTKDELLHWTKELTEEEKKALAEEGKITIPTFKPDKIELSPSMEAPKIFERIQSQTVGQGSDAHFRVRVVGKPDPECEWYKNGVKIERSDRIYWYWPEDNVCELVIRDVTAEDSASIMVKAINIAGETSSHAFLLVQAKQLITFTQELQDVVAKEKDTMATFECETSEPFVKVKWYKDGMEVHEGDKYRMHSDRKVHFLSILTIDTSDAEDYSCVLVEDENVKTTAKLIVEGAVVEFVKELQDIEVPESYSGELECIVSPENIEGKWYHNDVELKSNGKYTITSRRGRQNLTVKDVTKEDQGEYSFVIDGKKTTCKLKMKPRPIAILQGLSDQKVCEGDIVQLEVKVSLESVEGVWMKDGQEVQPSDRVHIVIDKQSHMLLIEDMTKEDAGNYSFTIPALGLSTSGRVSVYSVDVITPLKDVNVIEGTKAVLECKVSVPDVTSVKWYLNDEQIKPDDRVQAIVKGTKQRLVINRTHASDEGPYKLIVGRVETNCNLSVEKIKIIRGLRDLTCTETQNVVFEVELSHSGIDVLWNFKDKEIKPSSKYKIEAHGKIYKLTVLNMMKDDEGKYTFYAGENMTSGKLTVAGGAISKPLTDQTVAESQEAVFECEVANPDSKGEWLRDGKHLPLTNNIRSESDGHKRRLIIAATKLDDIGEYTYKVATSKTSAKLKVEAVKIKKTLKNLTVTETQDAVFTVELTHPNVKGVQWIKNGVVLESNEKYAISVKGTIYSLRIKNCAIVDESVYGFRLGRLGASARLHVETVKIIKKPKDVTALENATVAFEVSVSHDTVPVKWFHKSVEIKPSDKHRLVSERKVHKLMLQNISPSDAGEYTAVVGQLECKAKLFVETLHITKTMKNIEVPETKTASFECEVSHFNVPSMWLKNGVEIEMSEKFKIVVQGKLHQLIIMNTSTEDSAEYTFVCGNDQVSATLTVTPIMITSMLKDINAEEKDTITFEVTVNYEGISYKWLKNGVEIKSTDKCQMRTKKLTHSLNIRNVHFGDAADYTFVAGKATSTATLYVEARHIEFRKHIKDIKVLEKKRAMFECEVSEPDITVQWMKDDQELQITDRIKIQKEKYVHRLLIPSTRMSDAGKYTVVAGGNVSTAKLFVEGRDVRIRSIKKEVQVIEKQRAVVEFEVNEDDVDAHWYKDGIEINFQVQERHKYVVERRIHRMFISETRQSDAGEYTFVAGRNRSSVTLYVNAPEPPQVLQELQPVTVQSGKPARFCAVISGRPQPKISWYKEEQLLSTGFKCKFLHDGQEYTLLLIEAFPEDAAVYTCEAKNDYGVATTSASLSVEVPEVVSPDQEMPVYPPAIITPLQDTVTSEGQPARFQCRVSGTDLKVSWYSKDKKIKPSRFFRMTQFEDTYQLEIAEAYPEDEGTYTFVASNAVGQVSSTANLSLEGFSKFEENTSNSQWHVSLSVSFKKEPLGQKPSFIQPLSSLRVHNGETVRFHARVSGIPKPEIQWFHNQQLILPTKDVVFHFEESTGMALMLIVDAYSEHAGQYSCKAANSAGEATCAATLTVTPKVQALDRQSSGKDVRESTKSQAVADSSFTKEESKISQKEIKSFQGSSYEYEVQVFESVSQSSIHTAASVQDTQLCHTASLSQIAESTELSKECAKESTGEAPKIFLHLQDVTVKCGDTAQFLCVLKDDSFIDVTWTHEGAKIEESERLKQSQNGNIQFLTICNVQLVDQGLYSCIVHNDCGERTTSAVLSVEGAPESILHERIEQEIEMEMKEFSSSFLSAEEEGLHSAELQLSKINETLELLSESPVYPTKFDSEKEGTGPIFIKEVSNADISMGDVATLSVTVIGIPKPKIQWFFNGVLLTPSADYKFVFDGDDHSLIILFTKLEDEGEYTCMASNDYGKTICSAYLKINSKGEGHKDTETESAVAKSLEKLGGPCPPHFLKELKPIRCAQGLPAIFEYTVVGEPAPTVTWFKENKQLCTSVYYTIIHNPNGSGTFIVNDPQREDSGLYICKAENMLGESTCAAELLVLLEDTDMTDTPCKAKSTPEAPEDFPQTPLKGPAVEALDSEQEIATFVKDTILKAALITEENQQLSYEHIAKANELSSQLPLGAQELQSILEQDKLTPESTREFLCINGSIHFQPLKEPSPNLQLQIVQSQKTFSKEGILMPEEPETQAVLSDTEKIFPSAMSIEQINSLTVEPLKTLLAEPEGNYPQSSIEPPMHSYLTSVAEEVLSPKEKTVSDTNREQRVTLQKQEAQSALILSQSLAEGHVESLQSPDVMISQVNYEPLVPSEHSCTEGGKILIESANPLENAGQDSAVRIEEGKSLRFPLALEEKQVLLKEEHSDNVVMPPDQIIESKREPVAIKKVQEVQGRDLLSKESLLSGIPEEQRLNLKIQICRALQAAVASEQPGLFSEWLRNIEKVEVEAVNITQEPRHIMCMYLVTSAKSVTEEVTIIIEDVDPQMANLKMELRDALCAIIYEEIDILTAEGPRIQQGAKTSLQEEMDSFSGSQKVEPITEPEVESKYLISTEEVSYFNVQSRVKYLDATPVTKGVASAVVSDEKQDESLKPSEEKEESSSESGTEEVATVKIQEAEGGLIKEDGPMIHTPLVDTVSEEGDIVHLTTSITNAKEVNWYFENKLVPSDEKFKCLQDQNTYTLVIDKVNTEDHQGEYVCEALNDSGKTATSAKLTVVKRAAPVIKRKIEPLEVALGHLAKFTCEIQSAPNVRFQWFKAGREIYESDKCSIRSSKYISSLEILRTQVVDCGEYTCKASNEYGSVSCTATLTVTEAYPPTFLSRPKSLTTFVGKAAKFICTVTGTPVIETIWQKDGAALSPSPNWRISDAENKHILELSNLTIQDRGVYSCKASNKFGADICQAELIIIDKPHFIKELEPVQSAINKKVHLECQVDEDRKVTVTWSKDGQKLPPGKDYKICFEDKIATLEIPLAKLKDSGTYVCTASNEAGSSSCSATVTVREPPSFVKKVDPSYLMLPGESARLHCKLKGSPVIQVTWFKNNKELSESNTVRMYFVNSEAILDITDVKVEDSGSYSCEAVNDVGSDSCSTEIVIKEPPSFIKTLEPADIVRGTNALLQCEVSGTGPFEISWFKDKKQIRSSKKYRLFSQKSLVCLEIFSFNSADVGEYECVVANEVGKCGCMATHLLKEPPTFVKKVDDLIALGGQTVTLQAAVRGSEPISVTWMKGQEVIREDGKIKMSFSNGVAVLIIPDVQISFGGKYTCLAENEAGSQTSVGELIVKEPAKIIERAELIQVTAGDPATLEYTVAGTPELKPKWYKDGRPLVASKKYRISFKNNVAQLKFYSAELHDSGQYTFEISNEVGSSSCETTFTVLDRDIAPFFTKPLRNVDSVVNGTCRLDCKIAGSLPMRVSWFKDGKEIAASDRYRIAFVEGTASLEIIRVDMNDAGNFTCRATNSVGSKDSSGALIVQEPPSFVTKPGSKDVLPGSAVCLKSTFQGSTPLTIRWFKGNKELVSGGSCYITKEALESSLELYLVKTSDSGTYTCKVSNVAGGVECSANLFVKEPATFVEKLEPSQLLKKGDATQLACKVTGTPPIKITWFANDREIKESSKHRMSFVESTAVLRLTDVGIEDSGEYMCEAQNEAGSDHCSSIVIVKESPYFTKEFKPIEVLKEYDVMLLAEVAGTPPFEITWFKDNTILRSGRKYKTFIQDHLVSLQILKFVAADAGEYQCRVTNEVGSSICSARVTLREPPSFIKKIESTSSLRGGTAAFQATLKGSLPITVTWLKDSDEITEDDNIRMTFENNVASLYLSGIEVKHDGKYVCQAKNDAGIQRCSALLSVKEPATITEEAVSIDVTQGDPATLQVKFSGTKEITAKWFKDGQELTLGSKYKISVTDTVSILKIISTEKKDSGEYTFEVQNDVGRSSCKARINVLDLIIPPSFTKKLKKMDSIKGSFIDLECIVAGSHPISIQWFKDDQEISASEKYKFSFHDNTAFLEISQLEGTDSGTYTCSATNKAGHNQCSGHLTVKEPPYFVEKPQSQDVNPNTRVQLKALVGGTAPMTIKWFKDNKELHSGAARSVWKDDTSTSLELFAAKATDSGTYICQLSNDVGTATSKATLFVKEPPQFIKKPSPVLVLRNGQSTTFECQITGTPKIRVSWYLDGNEITAIQKHGISFIDGLATFQISGARVENSGTYVCEARNDAGTASCSIELKVKEPPTFIRELKPVEVVKYSDVELECEVTGTPPFEVTWLKNNREIRSSKKYTLTDRVSVFNLHITKCDPSDTGEYQCIVSNEGGSCSCSTRVALKEPPSFIKKIENTTTVLKSSATFQSTVAGSPPISITWLKDDQILDEDDNVYISFVDSVATLQIRSVDNGHSGRYTCQAKNESGVERCYAFLLVQEPAQIVEKAKSVDVTEKDPMTLECVVAGTPELKVKWLKDGKQIVPSRYFSMSFENNVASFRIQSVMKQDSGQYTFKVENDFGSSSCDAYLRVLDQNIPPSFTKKLTKMDKVLGSSIHMECKVSGSLPISAQWFKDGKEISTSAKYRLVCHERSVSLEVNNLELEDTANYTCKVSNVAGDDACSGILTVKEPPSFLVKPGRQQAIPDSTVEFKAILKGTPPFKIKWFKDDVELVSGPKCFIGLEGSTSFLNLYSVDASKTGQYTCHVTNDVGSDSCTTMLLVTEPPKFVKKLEASKIVKAGDSSRLECKIAGSPEIRVVWFRNEHELPASDKYRMTFIDSVAVIQMNNLSTEDSGDFICEAQNPAGSTSCSTKVIVKEPPVFSSFPPIVETLKNAEVSLECELSGTPPFEVVWYKDKRQLRSSKKYKIASKNFHTSIHILNVDTSDIGEYHCKAQNEVGSDTCVCTVKLKEPPRFVSKLNSLTVVAGEPAELQASIEGAQPIFVQWLKEKEEVIRESENIRITFVENVATLQFAKAEPANAGKYICQIKNDGGMRENMATLMVLEPAVIVEKAGPMTVTVGETCTLECKVAGTPELSVEWYKDGKLLTSSQKHKFSFYNKISSLRILSVERQDAGTYTFQVQNNVGKSSCTAVVDVSDRAVPPSFTRRLKNTGGVLGASCILECKVAGSSPISVAWFHEKTKIVSGAKYQTTFSDNVCTLQLNSLDSSDMGNYTCVAANVAGSDECRAVLTVQEPPSFVKEPEPLEVLPGKNVTFTSVIRGTPPFKVNWFRGARELVKGDRCNIYFEDTVAELELFNIDISQSGEYTCVVSNNAGQASCTTRLFVKEPAAFLKRLSDHSVEPGKSIILESTYTGTLPISVTWKKDGFNITTSEKCNIVTTEKTCILEILNSTKRDAGQYSCEIENEAGRDVCGALVSTLEPPYFVTELEPLEAAVGDSVSLQCQVAGTPEITVSWYKGDTKLRPTPEYRTYFTNNVATLVFNKVNINDSGEYTCKAENSIGTASSKTVFRIQERQLPPSFARQLKDIEQTVGLPVTLTCRLNGSAPIQVCWYRDGVLLRDDENLQTSFVDNVATLKILQTDLSHSGQYSCSASNPLGTASSSARLTAREPKKSPFFDIKPVSIDVIAGESADFECHVTGAQPMRITWSKDNKEIRPGGNYTITCVGNTPHLRILKVGKGDSGQYTCQATNDVGKDMCSAQLSVKEPPKFVKKLEASKVAKQGESIQLECKISGSPEIKVSWFRNDSELHESWKYNMSFINSVALLTINEASAEDSGDYICEAHNGVGDASCSTALTVKAPPVFTQKPSPVGALKGSDVILQCEISGTPPFEVVWVKDRKQVRNSKKFKITSKHFDTSLHILNLEASDVGEYHCKATNEVGSDTCSCSVKFKEPPRFVKKLSDTSTLIGDAVELRAIVEGFQPISVVWLKDRGEVIRESENTRISFIDNIATLQLGSPEASNSGKYICQIKNDAGMRECSAVLTVLEPARIIEKPEPMTVTTGNPFALECVVTGTPELSAKWFKDGRELSADSKHHITFINKVASLKIPCAEMSDKGLYSFEVKNSVGKSNCTVSVHVSDRIVPPSFIRKLKDVNAILGASVVLECRVSGSAPISVGWFQDGNEIVSGPKCQSSFSENVCTLNLSLLEPSDTGIYTCVAANVAGSDECSAVLTVQEPPSFEQTPDSVEVLPGMSLTFTSVIRGTPPFKVKWFKGSRELVPGESCNISLEDFVTELELFEVQPLESGDYSCLVTNDAGSASCTTHLFVKEPATFVKRLADFSVETGSPIVLEATYTGTPPISVSWIKDEYLISQSERCSITMTEKSTILEILESTIEDYAQYSCLIENEAGQDICEALVSVLEPPYFIEPLEHVEAVIGEPATLQCKVDGTPEIRISWYKEHTKLRSAPAYKMQFKNNVASLVINKVDHSDVGEYSCKADNSVGAVASSAVLVIKARKLPPFFARKLKDVHETLGFPVAFECRINGSEPLQVSWYKDGVLLKDDANLQTSFVHNVATLQILQTDQSHIGQYNCSASNPLGTASSSAKLILSEHEVPPFFDLKPVSVDLALGESGTFKCHVTGTAPIKITWAKDNREIRPGGNYKMTLVENTATLTVLKVGKGDAGQYTCYASNIAGKDSCSAQLGVQEPPRFIKKLEPSRIVKQDEFTRYECKIGGSPEIKVLWYKDETEIQESSKFRMSFVDSVAVLEMHNLSVEDSGDYTCEAHNAAGSASSSTSLKVKEPPIFRKKPHPIETLKGADVHLECELQGTPPFHVSWYKDKRELRSGKKYKIMSENFLTSIHILNVDAADIGEYQCKATNDVGSDTCVGSIALKAPPRFVKKLSDISTVVGKEVQLQTTIEGAEPISVVWFKDKGEIVRESDNIWISYSENIATLQFSRVEPANAGKYTCQIKNDAGMQECFATLSVLEPATIVEKPESIKVTTGDTCTLECTVAGTPELSTKWFKDGKELTSDNKYKISFFNKVSGLKIINVAPSDSGVYSFEVQNPVGKDSCTASLQVSDRTVPPSFTRKLKETNGLSGSSVVMECKVYGSPPISVSWFHEGNEISSGRKYQTTLTDNTCALTVNMLEESDSGDYTCIATNMAGSDECSAPLTVREPPSFVQKPDPMDVLTGTNVTFTSIVKGTPPFSVSWFKGSSELVPGDRCNVSLEDSVAELELFDVDTSQSGEYTCIVSNEAGKASCTTHLYIKAPAKFVKRLNDYSIEKGKPLILEGTFTGTPPISVTWKKNGINVTPSQRCNITTTEKSAILEIPSSTVEDAGQYNCYIENASGKDSCSAQILILEPPYFVKQLEPVKVSVGDSASLQCQLAGTPEIGVSWYKGDTKLRPTTTYKMHFRNNVATLVFNQVDINDSGEYICKAENSVGEVSASTFLTVQEQKLPPSFSRQLRDVQETVGLPVVFDCAISGSEPISVSWYKDGKPLKDSPNVQTSFLDNTATLNIFKTDRSLAGQYSCTATNPIGSASSSARLILTEGKNPPFFDIRLAPVDAVVGESADFECHVTGTQPIKVSWAKDSREIRSGGKYQISYLENSAHLTVLKVDKGDSGQYTCYAVNEVGKDSCTAQLNIKERLIPPSFTKRLSETVEETEGNSFKLEGRVAGSQPITVAWYKNNIEIQPTSNCEITFKNNTLVLQVRKAGMNDAGLYTCKVSNDAGSALCTSSIVIKEPKKPPVFDQHLTPVTVSEGEYVQLSCHVQGSEPIRIQWLKAGREIKPSDRCSFSFASGTAVLELRDVAKADSGDYVCKASNVAGSDTTKSKVTIKDKPAVAPATKKAAVDGRLFFVSEPQSIRVVEKTTATFIAKVGGDPIPNVKWTKGKWRQLNQGGRVFIHQKGDEAKLEIRDTTKTDSGLYRCVAFNEHGEIESNVNLQVDERKKQEKIEGDLRAMLKKTPILKKGAGEEEEIDIMELLKNVDPKEYEKYARMYGITDFRGLLQAFELLKQSQEEETHRLEIEEIERSERDEKEFEELVSFIQQRLSQTEPVTLIKDIENQTVLKDNDAVFEIDIKINYPEIKLSWYKGTEKLEPSDKFEISIDGDRHTLRVKNCQLKDQGNYRLVCGPHIASAKLTVIEPAWERHLQDVTLKEGQTCTMTCQFSVPNVKSEWFRNGRILKPQGRHKTEVEHKVHKLTIADVRAEDQGQYTCKYEDLETSAELRIEAEPIQFTKRIQNIVVSEHQSATFECEVSFDDAIVTWYKGPTELTESQKYNFRNDGRCHYMTIHNVTPDDEGVYSVIARLEPRGEARSTAELYLTTKEIKLELKPPDIPDSRVPIPTMPIRAVPPEEIPPVVAPPIPLLLPTPEEKKPPPKRIEVTKKAVKKDAKKVVAKPKEMTPREEIVKKPPPPTTLIPAKAPEIIDVSSKAEEVKIMTITRKKEVQKEKEAVYEKKQAVHKEKRVFIESFEEPYDELEVEPYTEPFEQPYYEEPDEDYEEIKVEAKKEVHEEWEEDFEEGQEYYEREEGYDEGEEEWEEAYQEREVIQVQKEVYEESHERKVPAKVPEKKAPPPPKVIKKPVIEKIEKTSRRMEEEKVQVTKVPEVSKKIVPQKPSRTPVQEEVIEVKVPAVHTKKMVISEEKMFFASHTEEEVSVTVPEVQKEIVTEEKIHVAISKRVEPPPKVPELPEKPAPEEVAPVPIPKKVEPPAPKVPEVPKKPVPEEKKPVPVPKKEPAAPPKVPEVPKKPVPEEKIPVPVAKKKEAPPAKVPEVQKGVVTEEKITIVTQREESPPPAVPEIPKKKVPEERKPVPRKEEEVPPPPKVPALPKKPVPEEKVAVPVPVAKKAPPPRAEVSKKTVVEEKRFVAEEKLSFAVPQRVEVTRHEVSAEEEWSYSEEEEGVSISVYREEEREEEEEAEVTEYEVMEEPEEYVVEEKLHIISKRVEAEPAEVTERQEKKIVLKPKIPAKIEEPPPAKVPEAPKKIVPEKKVPAPVPKKEKVPPPKVPEEPKKPVPEKKVPPKVIKMEEPLPAKVTERHMQITQEEKVLVAVTKKEAPPKARVPEEPKRAVPEEKVLKLKPKREEEPPAKVTEFRKRVVKEEKVSIEAPKREPQPIKEVTIMEEKERAYTLEEEAVSVQREEEYEEYEEYDYKEFEEYEPTEEYDQYEEYEEREYERYEEHEEYITEPEKPIPVKPVPEEPVPTKPKAPPAKVLKKAVPEEKVPVPIPKKLKPPPPKVPEEPKKVFEEKIRISITKREKEQVTEPAAKVPMKPKRVVAEEKVPVPRKEVAPPVRVPEVPKELEPEEVAFEEEVVTHVEEYLVEEEEEYIHEEEEFITEEEVVPVIPVKVPEVPRKPVPEEKKPVPVPKKKEAPPAKVPEVPKKPEEKVPVLIPKKEKPPPAKVPEVPKKPVPEEKVPVPVPKKVEAPPAKVPEVPKKPVPEKKVPVPAPKKVEAPPAKVPEVPKKLIPEEKKPTPVPKKVEAPPPKVPKKREPVPVPVALPQEEEVLFEEEIVPEEEVLPEEEEVLPEEEEVLPEEEEVLPEEEEIPPEEEEVPPEEEYVPEEEEFVPEEEVLPEVKPKVPVPAPVPEVPKKPVPEKKVPVPAPKKVEPPPPPKVPEIKKKVTEKKVVIPKKEEAPPAKVSVVPKKPEPEKKVPPPGLKKAVAPPAKVPEVPKKVEEKRIILPKEEEVLPVEVTEEPEEEPISEEEIPEEPPSIEEVEEVAPPRVPEVIKKAVPEAPTPVPKKVEAPPAKVSKKIPEEKVPVPVQKKEAPPAKVPEVPKKVPEKKVLVPKKEAVPPAKGRTVLEEKVSVAFRQEVVVKERLELEVVEAEVEEIPEEEEFHEVEEYFEEGEFHEVEEFIKLEQHRVEEEHRVEKVHRVIEVFEAEEVEVFEKPKAPPKGPEISEKIIPPKKPPTKVVPRKEPPAKVPEVPKKIVVEEKVRVPEEPRVPPTKAPEVPKKIVPEEKVREAVLKKPEVPPAKVPGMPKKSVQEEKSPIVISEDTEMYIYEASEEAVLEEKVLVTQPQKTKPKLAKVPEPPKKVVPEDKIYVTIPKKRETPATKEPDTTRGIFPEVEPPEAIPEIPEHPPTEEFEVFKEVIPEGETPIVKRRKTPSPTVPESPREIVPVKETPMAAPLEIEIPPTKAPEAMKEVVPEMKIFEDVPEEPETPRMKTPEAPQEIIPAKTVPSKKREPPSVKVPEALQEIVPEKKTLVVPLRKPEVLPDEVPEALREVVPEKKVHPPQRAEVVPVKVHEAPKEIIPEKKVSVVPPKKPEVPPVKVPEASKEVIREEKVPLAPPKEPEVPPVKVPEPPKEVVPEKKAPVAPPKEPEVPPVKVPEAPKEVVPEKKVPVPPPKKPEVPPTKVPEVPKAAVPEKKLPEAIPPKPESPPPEVPEVLPPKEVVPEKKVPVPPAKKPEAPPPKVPEAPKEVVLEKKASVAVPKKPEAPRAKVPEAAQEVVPEKKIPKAPIKKPEAPAVTVPEVPQEATEKEIPVAPPKKPEAPIVPVPEAQEVVPEKKVPKAPPTKPEAPPATVPEVPQEIVPEKKTLVLPKKPEVPPVTVPEAPKEVVLEKKVPSAPPKKPEVPPVKVPEAPKEVVPEKKVPVPPPKKPEVPPTKVPEVPKAAVPEKKVPEAIPPKPESPPPEVPEVLPPKEVVPEKKVPVPPAKKPEAPPPKVPEAPKEVVLEKKASVAVPKKPEAPRAKVPEAAQEVVPEKKIPKAPIKKPEAPAVTVPEVPQEAAEKEIPVAPPKKPEAPIVPVPEAQEVVPEKKVPKAPPTKPEAPPATVPEVPQEIVPEKKTLVLPKKPEVPPVTVPEAPKEVVLEKKVPSTPPKKPEVPPVKVPEAPKEVVPEKKVPVPPPKKPEVPPTKVPEVPKAAVPEKKVPEAIPPKPESPPPEVPEVLPPKEVVPEKKVPVPPAKKPEAPPPKVPEAPKEVVLEKKVSVAVPKKPEAPRAKVPEAAQEVVPEKKIPKAPIKKPEAPAVTVPEVPQEAAEKEIPVAPPKKPEAPIVPVPEAQEVVPEKKVPKAPPTKPEAPPATVPEVPQEIVPEKKTLVLPKKPEVPPVTVPEAPKEVVLEKKVPLAPPKKPEVPPVKVPEAPKEVVPEKKVPVTPPKKPEVPPVKVPEAPIEVVPEKKMPLAPPKKPEVPPVKVPEAPKEVVPEKKVPSAPPKKPEVPPVKVPEAPKEVVPEKKVPAAPPKKPEVTPVKVPEAPKEVVPEKKVPVPPPKKPEVPPTKVPEVPKVAVPEKKVPEAIPPKPESPPPEVFEEPEEVALEEPPAEVVEEPEPAAPPQVTVPPKKPVPEKKAPAVVAKKPELPPVKVPEVPKEVVPEKKVPLVVPKKPEAPPAKVPEVPKEVVPEKKVAVPKKPEVPPAKVPEVPKKPVLEEKPAVPVPERAESPPPEVYEEPEEIAPEEEIAPEEEKPVPVAEEEEPEVPPPAVPEEPKKIIPEKKVPVIKKPEAPPPKEPEMPKKVVPVKKVPTVKKPETPAAKVPEVPKKLVPVKKEPVPVTKKPEVLPEKVPKVPEKIIPEKEVSVPIPAEPEVPPAEVEETPEEIIYEEKASITIGRKETPPVEEREIEKYIKPEEPEPEPQPEEIPVKEPEPEKVIEKPKLKPRPPPPPPAPPKEDVKEKIFQLKAIPKKKVPEKPQVPEKVELTPLKVPGGEKKVRKLLPERKPEPKEEVVLKSVLRKRPEEEEPKVEPKKLEKVKKPAVPEPPPPKPVEEVEVPTVTKRERKIPEPTKVPEIKPAIPLPAPEPKPKPEAEVKTIKPPPVEPEPTPIAAPVTVPVVGKKAEAKAPKEEAAKPKGPIKGVPKKTPSPIEAERRKLRPGSGGEKPPDEAPFTYQLKAVPLKFVKEIKDIILTESEFVGSSAIFECLVSPSTAITTWMKDGSNIRESPKHRFIADGKDRKLHIIDVQLSDAGEYTCVLRLGNKEKTSTAKLVVEELPVRFVKTLEEEVTVVKGQPLYLSCELNKERDVVWRKDGKIVVEKPGRIVPGVIGLMRALTINDADDTDAGTYTVTVENANNLECSSCVKVVEVIRDWLVKPIRDQHVKPKGTAIFACDIAKDTPNIKWFKGYDEIPAEPNDKTEILRDGNHLYLKIKNAMPEDIAEYAVEIEGKRYPAKLTLGEREVELLKPIEDVTIYEKESASFDAEISEADIPGQWKLKGELLRPSPTCEIKAEGGKRFLTLHKVKLDQAGEVLYQALNAITTAILTVKEIELDFAVPLKDVTVPERRQARFECVLTREANVIWSKGPDIIKSSDKFDIIADGKKHILVINDSQFDDEGVYTAEVEGKKTSARLFVTGIRLKFMSPLEDQTVKEGETATFVCELSHEKMHVVWFKNDAKLHTSRTVLISSEGKTHKLEMKEVTLDDISQIKAQVKELSSTAQLKVLEADPYFTVKLHDKTAVEKDEITLKCEVSKDVPVKWFKDGEEIVPSPKYSIKADGLRRILKIKKADLKDKGEYVCDCGTDKTKANVTVEARLIKVEKPLYGVEVFVGETAHFEIELSEPDVHGQWKLKGQPLTASPDCEIIEDGKKHILILHNCQLGMTGEVSFQAANAKSAANLKVKELPLIFITPLSDVKVFEKDEAKFECEVSREPKTFRWLKGTQEITGDDRFELIKDGTKHSMVIKSAAFEDEAKYMFEAEDKHTSGKLIIEGIRLKFLTPLKDVTAKEKESAVFTVELSHDNIRVKWFKNDQRLHTTRSVSMQDEGKTHSITFKDLSIDDTSQIRVEAMGMSSEAKLTVLEGDPYFTGKLQDYTGVEKDEVILQCEISKADAPVKWFKDGKEIKPSKNAVIKADGKKRMLILKKALKSDIGQYTCDCGTDKTSGKLDIEDREIKLVRPLHSVEVMETETARFETEISEDDIHANWKLKGEALLQTPDCEIKEEGKIHSLVLHNCRLDQTGGVDFQAANVKSSAHLRVKPRVIGLLRPLKDVTVTAGETATFDCELSYEDIPVEWYLKGKKLEPSDKVVPRSEGKVHTLTLRDVKLEDAGEVQLTAKDFKTHANLFVKEPPVEFTKPLEDQTVEEGATAVLECEVSRENAKVKWFKNGTEILKSKKYEIVADGRVRKLVIHDCTPEDIKTYTCDAKDFKTSCNLNVVPPHVEFLRPLTDLQVREKEMARFECELSRENAKVKWFKDGAEIKKGKKYDIISKGAVRILVINKCLLDDEAEYSCEVRTARTSGMLTVLEEEAVFTKNLANIEVSETDTIKLVCEVSKPGAEVIWYKGDEEIIETGRYEILTEGRKRILVIQNAHLEDAGNYNCRLPSSRTDGKVKVHELAAEFISKPQNLEILEGEKAEFVCSISKESFPVQWKRDDKTLESGDKYDVIADGKKRVLVVKDATLQDMGTYVVMVGAARAAAHLTVIEKLRIVVPLKDTRVKEQQEVVFNCEVNTEGAKAKWFRNEEAIFDSSKYIILQKDLVYTLRIRDAHLDDQANYNVSLTNHRGENVKSAANLIVEEEDLRIVEPLKDIETMEKKSVTFWCKVNRLNVTLKWTKNGEEVPFDNRVSYRVDKYKHMLTIKDCGFPDEGEYIVTAGQDKSVAELLIIEAPTEFVEHLEDQTVTEFDDAVFSCQLSREKANVKWYRNGREIKEGKKYKFEKDGSIHRLIIKDCRLDDECEYACGVEDRKSRARLFVEEIPVEIIRPPQDILEAPGADVVFLAELNKDKVEVQWLRNNMVVVQGDKHQMMSEGKIHRLQICDIKPRDQGEYRFIAKDKEARAKLELAAAPKIKTADQDLVVDVGKPLTMVVPYDAYPKAEAEWFKENEPLSTKTIDTTAEQTSFRILEAKKGDKGRYKIVLQNKHGKAEGFINLKVIDVPGPVRNLEVTETFDGEVSLAWEEPLTDGGSKIIGYVVERRDIKRKTWVLATDRAESCEFTVTGLQKGGVEYLFRVSARNRVGTGEPVETDNPVEARSKYDVPGPPLNVTITDVNRFGVSLTWEPPEYDGGAEITNYVIELRDKTSIRWDTAMTVRAEDLSATVTDVVEGQEYSFRVRAQNRIGVGKPSAATPFVKVADPIERPSPPVNLTSSDQTQSSVQLKWEPPLKDGGSPILGYIIERCEEGKDNWIRCNMKLVPELTYKVTGLEKGNKYLYRVSAENKAGVSDPSEILGPLTADDAFVEPTMDLSAFKDGLEVIVPNPITILVPSTGYPRPTATWCFGDKVLETGDRVKMKTLSAYAELVISPSERSDKGIYTLKLENRVKTISGEIDVNVIARPSAPKELKFGDITKDSVHLTWEPPDDDGGSPLTGYVVEKREVSRKTWTKVMDFVTDLEFTVPDLVQGKEYLFKVCARNKCGPGEPAYVDEPVNMSTPATVPDPPENVKWRDRTANSIFLTWDPPKNDGGSRIKGYIVERCPRGSDKWVACGEPVAETKMEVTGLEEGKWYAYRVKALNRQGASKPSRPTEEIQAVDTQEAPEIFLDVKLLAGLTVKAGTKIELPATVTGKPEPKITWTKADMILKQDKRITIENVPKKSTVTIVDSKRSDTGTYIIEAVNVCGRATAVVEVNVLDKPGPPAAFDITDVTNESCLLTWNPPRDDGGSKITNYVVERRATDSEVWHKLSSTVKDTNFKATKLIPNKEYIFRVAAENMYGVGEPVQASPITAKYQFDPPGPPTRLEPSDITKDAVTLTWCEPDDDGGSPITGYWVERLDPDTDKWVRCNKMPVKDTTYRVKGLTNKKKYRFRVLAENLAGPGKPSKSTEPILIKDPIDPPWPPGKPTVKDVGKTSVRLNWTKPEHDGGAKIESYVIEMLKTGTDEWVRVAEGVPTTQHLLPGLMEGQEYSFRVRAVNKAGESEPSEPSDPVLCREKLYPPSPPRWLEVINITKNTADLKWTVPEKDGGSPITNYIVEKRDVRRKGWQTVDTTVKDTKCTVTPLTEGSLYVFRVAAENAIGQSDYTEIEDSVLAKDTFTTPGPPYALAVVDVTKRHVDLKWEPPKNDGGRPIQRYVIEKKERLGTRWVKAGKTAGPDCNFRVTDVIEGTEVQFQVRAENEAGVGHPSEPTEILSIEDPTSPPSPPLDLHVTDAGRKHIAIAWKPPEKNGGSPIIGYHVEMCPVGTEKWMRVNSRPIKDLKFKVEEGVVPDKEYVLRVRAVNAIGVSEPSEISENVVAKDPDCKPTIDLETHDIIVIEGEKLSIPVPFRAVPVPTVSWHKDGKEVKASDRLTMKNDHISAHLEVPKSVRADAGIYTITLENKLGSATASINVKVIGLPGPCKDIKASDITKSSCKLTWEPPEFDGGTPILHYVLERREAGRRTYIPVMSGENKLSWTVKDLIPNGEYFFRVKAVNKVGGGEYIELKNPVIAQDPKQPPDPPVDVEVHNPTAEAMTITWKPPLYDGGSKIMGYIIEKIAKGEERWKRCNEHLVPILTYTAKGLEEGKEYQFRVRAENAAGISEPSRATPPTKAVDPIDAPKVILRTSLEVKRGDEIALDASISGSPYPTITWIKDENVIVPEEIKKRAAPLVRRRKGEVQEEEPFVLPLTQRLSIDNSKKGESQLRVRDSLRPDHGLYMIKVENDHGIAKAPCTVSVLDTPGPPINFVFEDIRKTSVLCKWEPPLDDGGSEIINYTLEKKDKTKPDSEWIVVTSTLRHCKYSVTKLIEGKEYLFRVRAENRFGPGPPCVSKPLVAKDPFGPPDAPDKPIVEDVTSNSMLVKWNEPKDNGSPILGYWLEKREVNSTHWSRVNKSLLNALKANVDGLLEGLTYVFRVCAENAAGPGKFSPPSDPKTAHDPISPPGPPIPRVTDTSSTTIELEWEPPAFNGGGEIVGYFVDKQLVGTNEWSRCTEKMIKVRQYTVKEIREGADYKLRVSAVNAAGEGPPGETQPVTVAEPQEPPAVELDVSVKGGIQIMAGKTLRIPAVVTGRPVPTKVWTKEEGELDKDRVVIDNVGTKSELIIKDALRKDHGRYVITATNSCGSKFAAARVEVFDVPGPVLDLKPVVTNRKMCLLNWSDPEDDGGSEITGFIIERKDAKMHTWRQPIETERSKCDITGLLEGQEYKFRVIAKNKFGCGPPVEIGPILAVDPLGPPTSPERLTYTERTKSTITLDWKEPRSNGGSPIQGYIIEKRRHDKPDFERVNKRLCPTTSFLVENLDEHQMYEFRVKAVNEIGESEPSLPLNVVIQDDEVPPTIKLRLSVRGDTIKVKAGEPVHIPADVTGLPMPKIEWSKNETVIEKPTDALQITKEEVSRSEAKTELSIPKAVREDKGTYTVTASNRLGSVFRNVHVEVYDRPSPPRNLAVTDIKAESCYLTWDAPLDNGGSEITHYVIDKRDASRKKAEWEEVTNTAVEKRYGIWKLIPNGQYEFRVRAVNKYGISDECKSDKVVIQDPYRLPGPPGKPKVLARTKGSMLVSWTPPLDNGGSPITGYWLEKREEGSPYWSRVSRAPITKVGLKGVEFNVPRLLEGVKYQFRAMAINAAGIGPPSEPSDPEVAGDPIFPPGPPSCPEVKDKTKSSISLGWKPPAKDGGSPIKGYIVEMQEEGTTDWKRVNEPDKLITTCECVVPNLKELRKYRFRVKAVNEAGESEPSDTTGEIPATDIQEEPEVFIDIGAQDCLVCKAGSQIRIPAVIKGRPTPKSSWEFDGKAKKAMKDGVHDIPEDAQLETAENSSVIIIPECKRSHTGKYSITAKNKAGQKTANCRVKVMDVPGPPKDLKVSDITRGSCRLSWKMPDDDGGDRIKGYVIEKRTIDGKAWTKVNPDCGSTTFVVPDLLSEQQYFFRVRAENRFGIGPPVETIQRTTARDPIYPPDPPIKLKIGLITKNTVHLSWKPPKNDGGSPVTHYIVECLAWDPTGTKKEAWRQCNKRDVEELQFTVEDLVEGGEYEFRVKAVNAAGVSKPSATVGPVTVKDQTCPPSIDLKEFMEVEEGTNVNIVAKIKGVPFPTLTWFKAPPKKPDNKEPVLYDTHVNKLVVDDTCTLVIPQSRRSDTGLYTITAVNNLGTASKEMRLNVLGRPGPPVGPIKFESVSADQMTLSWFPPKDDGGSKITNYVIEKREANRKTWVHVSSEPKECTYTIPKLLEGHEYVFRIMAQNKYGIGEPLDSEPETARNLFSVPGAPDKPTVSSVTRNSMTVNWEEPEYDGGSPVTGYWLEMKDTTSKRWKRVNRDPIKAMTLGVSYKVTGLIEGSDYQFRVYAINAAGVGPASLPSDPATARDPIAPPGPPFPKVTDWTKSSADLEWSPPLKDGGSKVTGYIVEYKEEGKEEWEKGKDKEVRGTKLVVTGLKEGAFYKFRVRAVNIAGIGEPGEVTDVIEMKDRLVSPDLQLDASVRDRIVVHAGGVIRIIAYVSGKPPPTVTWNMNERTLPQEATIETTAISSSMVIKNCQRSHQGVYSLLAKNEAGERKKTIIVDVLDVPGPVGTPFLAHNLTNESCKLTWFSPEDDGGSPITNYVIEKRESDRRAWTPVTYTVTRQNATVQGLIQGKAYFFRIAAENSIGMGPFVETSEALVIREPITVPERPEDLEVKEVTKNTVTLTWNPPKYDGGSEIINYVLESRLIGTEKFHKVTNDNLLSRKYTVKGLKEGDTYEYRVSAVNIVGQGKPSFCTKPITCKDELAPPTLHLDFRDKLTIRVGEAFALTGRYSGKPKPKVSWFKDEADVLEDDRTHIKTTPATLALEKIKAKRSDSGKYCVVVENSTGSRKGFCQVNVVDRPGPPVGPVSFDEVTKDYMVISWKPPLDDGGSKITNYIIEKKEVGKDVWMPVTSASAKTTCKVSKLLEGKDYIFRIHAENLYGISDPLVSDSMKAKDRFRVPDAPDQPIVTEVTKDSALVTWNKPHDGGKPITNYILEKRETMSKRWARVTKDPIHPYTKFRVPDLLEGCQYEFRVSAENEIGIGDPSPPSKPVFAKDPIAKPSPPVNPEAIDTTCNSVDLTWQPPRHDGGSKILGYIVEYQKVGDEEWRRANHTPESCPETKYKVTGLRDGQTYKFRVLAVNAAGESDPAHVPEPVLVKDRLEPPELILDANMAREQHIKVGDTLRLSAIIKGVPFPKVTWKKEDRDAPTKARIDVTPVGSKLEIRNAAHEDGGIYSLTVENPAGSKTVSVKVLVLDKPGPPRDLEVSEIRKDSCYLTWKEPLDDGGSVITNYVVERRDVASAQWSPLSATSKKKSHFAKHLNEGNQYLFRVAAENQYGRGPFVETPKPIKALDPLHPPGPPKDLHHVDVDKTEVSLVWNKPDRDGGSPITGYLVEYQEEGTQDWIKFKTVTNLECVVTGLQQGKTYRFRVKAENIVGLGLPDTTIPIECQEKLVPPSVELDVKLIEGLVVKAGTTVRFPAIIRGVPVPTAKWTTDGSEIKTDEHYTVETDNFSSVLTIKNCLRRDTGEYQITVSNAAGSKTVAVHLTVLDVPGPPTGPINILDVTPEHMTISWQPPKDDGGSPVINYIVEKQDTRKDTWGVVSSGSSKTKLKIPHLQKGCEYVFRVRAENKIGVGPPLDSTPTVAKHKFSPPSPPGKPVVTDITENAATVSWTLPKSDGGSPITGYYMERREVTGKWVRVNKTPIADLKFRVTGLYEGNTYEFRVFAENLAGLSKPSPSSDPIKACRPIKPPGPPINPKLKDKSRETADLVWTKPLSDGGSPILGYVVECQKPGTAQWNRINKDELIRQCAFRVPGLIEGNEYRFRIKAANIVGEGEPRELAESVIAKDILHPPEVELDVTCRDVITVRVGQTIRILARVKGRPEPDITWTKEGKVLVREKRVDLIQDLPRVELQIKEAVRADHGKYIISAKNSSGHAQGSAIVNVLDRPGPCQNLKVTNVTKENCTISWENPLDNGGSEITNFIVEYRKPNQKGWSIVASDVTKRLIKANLLANNEYYFRVCAENKVGVGPTIETKTPILAINPIDRPGEPENLHIADKGKTFVYLKWRRPDYDGGSPNLSYHVERRLKGSDDWERVHKGSIKETHYMVDRCVENQIYEFRVQTKNEGGESDWVKTEEVVVKEDLQKPVLDLKLSGVLTVKAGDTIRLEAGVRGKPFPEVAWTKDKDATDLTRSPRVKIDTRADSSKFSLTKAKRSDGGKYVVTATNTAGSFVAYATVNVLDKPGPVRNLKIVDVSSDRCTVCWDPPEDDGGCEIQNYILEKCETKRMVWSTYSATVLTPGTTVTRLIEGNEYIFRVRAENKIGTGPPTESKPVIAKTKYDKPGRPDPPEVTKVSKEEMTVVWNPPEYDGGKSITGYFLEKKEKHSTRWVPVNKSAIPERRMKVQNLLPDHEYQFRVKAENEIGIGEPSLPSRPVVAKDPIEPPGPPTNFRVVDTTKHSITLGWGKPVYDGGAPIIGYVVEMRPKIADASPDEGWKRCNAAAQLVRKEFTVTSLDENQEYEFRVCAQNQVGIGRPAELKEAIKPKEILEPPEIDLDASMRKLVIVRAGCPIRLFAIVRGRPAPKVTWRKVGIDNVVRKGQVDLVDTMAFLVIPNSTRDDSGKYSLTLVNPAGEKAVFVNVRVLDTPGPVSDLKVSDVTKTSCHVSWAPPENDGGSQVTHYIVEKREADRKTWSTVTPEVKKTSFHVTNLVPGNEYYFRVTAVNEYGPGVPTDVPKPVLASDPLSEPDPPRKLEVTEMTKNSATLAWLPPLRDGGAKIDGYITSYREEEQPADRWTEYSVVKDLSLVVTGLKEGKKYKFRVAARNAVGVSLPREAEGVYEAKEQLLPPKILMPEQITIKAGKKLRIEAHVYGKPHPTCKWKKGEDEVVTSSHLAVHKADSSSILIIKDVTRKDSGYYSLTAENSSGTDTQKIKVVVMDAPGPPQPPFDISDIDADACSLSWHIPLEDGGSNITNYIVEKCDVSRGDWVTALASVTKTSCRVGKLIPGQEYIFRVRAENRFGISEPLTSPKMVAQFPFGVPSEPKNARVTKVNKDCIFVAWDRPDSDGGSPIIGYLIERKERNSLLWVKANDTLVRSTEYPCAGLVEGLEYSFRIYALNKAGSSPPSKPTEYVTARMPVDPPGKPEVIDVTKSTVSLIWARPKHDGGSKIIGYFVEACKLPGDKWVRCNTAPHQIPQEEYTATGLEEKAQYQFRAIARTAVNISPPSEPSDPVTILAENVPPRIDLSVAMKSLLTVKAGTNVCLDATVFGKPMPTVSWKKDGTLLKPAEGIKMAMQRNLCTLELFSVNRKDSGDYTITAENSSGSKSATIKLKVLDKPGPPASVKINKMYSDRAMLSWEPPLEDGGSEITNYIVDKRETSRPNWAQVSATVPITSCSVEKLIEGHEYQFRICAENKYGVGDPVFTEPAIAKNPYDPPGRCDPPVISNITKDHMTVSWKPPADDGGSPITGYLLEKRETQAVNWTKVNRKPIIERTLKATGLQEGTEYEFRVTAINKAGPGKPSDASKAAYARDPQYPPGPPAFPKVYDTTRSSVSLSWGKPAYDGGSPIIGYLVEVKRADSDNWVRCNLPQNLQKTRFEVTGLMEDTQYQFRVYAVNKIGYSDPSDVPDKHYPKDILIPPEGELDADLRKTLILRAGVTMRLYVPVKGRPPPKITWSKPNVNLRDRIGLDIKSTDFDTFLRCENVNKYDAGKYILTLENSCGKKEYTIVVKVLDTPGPPVNVTVKEISKDSAYVTWEPPIIDGGSPIINYVVQKRDAERKSWSTVTTECSKTSFRVANLEEGKSYFFRVFAENEYGIGDPGETRDAVKASQTPGPVVDLKVRSVSKSSCSIGWKKPHSDGGSRIIGYVVDFLTEENKWQRVMKSLSLQYSAKDLTEGKEYTFRVSAENENGEGTPSEITVVARDDVVAPDLDLKGLPDLCYLAKENSNFRLKIPIKGKPAPSVSWKKGEDPLATDTRVSVESSAVNTTLIVYDCQKSDAGKYTITLKNVAGTKEGTISIKVVGKPGIPTGPIKFDEVTAEAMTLKWAPPKDDGGSEITNYILEKRDSVNNKWVTCASAVQKTTFRVTRLHEGMEYTFRVSAENKYGVGEGLKSEPIVARHPFDVPDAPPPPNIVDVRHDSVSLTWTDPKKTGGSPITGYHLEFKERNSLLWKRANKTPIRMRDFKVTGLTEGLEYEFRVMAINLAGVGKPSLPSEPVVALDPIDPPGKPEVINITRNSVTLIWTEPKYDGGHKLTGYIVEKRDLPSKSWMKANHVNVPECAFTVTDLVEGGKYEFRIRAKNTAGAISAPSESTETIICKDEYEAPTIVLDPTIKDGLTIKAGDTIVLNAISILGKPLPKSSWSKAGKDIRPSDITQITSTPTSSMLTIKYATRKDAGEYTITATNPFGTKVEHVKVTVLDVPGPPGPVEISNVSAEKATLTWTPPLEDGGSPIKSYILEKRETSRLLWTVVSEDIQSCRHVATKLIQGNEYIFRVSAVNHYGKGEPVQSEPVKMVDRFGPPGPPEKPEVSNVTKNTATVSWKRPVDDGGSEITGYHVERREKKSLRWVRAIKTPVSDLRCKVTGLQEGSTYEFRVSAENRAGIGPPSEASDSVLMKDAAYPPGPPSNPHVTDTTKKSASLAWGKPHYDGGLEITGYVVEHQKVGDEAWIKDTTGTALRITQFVVPDLQTKEKYNFRISAINDAGVGEPAVIPDVEIVEREMAPDFELDAELRRTLVVRAGLSIRIFVPIKGRPAPEVTWTKDNINLKNRANIENTESFTLLIIPECNRYDTGKFVMTIENPAGKKSGFVNVRVLDTPGPVLNLRPTDITKDSVTLHWDLPLIDGGSRITNYIVEKREATRKSYSTATTKCHKCTYKVTGLSEGCEYFFRVMAENEYGIGEPTETTEPVKASEAPSPPDSLNIMDITKSTVSLAWPKPKHDGGSKITGYVIEAQRKGSDQWTHITTVKGLECVVRNLTEGEEYTFQVMAVNSAGRSAPRESRPVIVKEQTMLPELDLRGIYQKLVIAKAGDNIKVEIPVLGRPKPTVTWKKGDQILKQTQRVNFETTATSTILNINECVRSDSGPYPLTARNIVGEVGDVITIQVHDIPGPPTGPIKFDEVSSDFVTFSWDPPENDGGVPISNYVVEMRQTDSTTWVELATTVIRTTYKATRLTTGLEYQFRVKAQNRYGVGPGITSACIVANYPFKVPGPPGTPQVTAVTKDSMTISWHEPLSDGGSPILGYHVERKERNGILWQTVSKALVPGNIFKSSGLTDGIAYEFRVIAENMAGKSKPSKPSEPMLALDPIDPPGKPVPLNITRHTVTLKWAKPEYTGGFKITSYIVEKRDLPNGRWLKANFSNILENEFTVSGLTEDAAYEFRVIAKNAAGAISPPSEPSDAITCRDDVEAPKIKVDVKFKDTVILKAGEAFRLEADVSGRPPPTMEWSKDGKELEGTAKLEIKIADFSTNLVNKDSTRRDSGAYTLTATNPGGFAKHIFNVKVLDRPGPPEGPLAVTEVTSEKCVLSWFPPLDDGGAKIDHYIVQKRETSRLAWTNVASEVQVTKLKVTKLLKGNEYIFRVMAVNKYGVGEPLESEPVLAVNPYGPPDPPKNPEVTTITKDSMVVCWGHPDSDGGSEIINYIVERRDKAGQRWIKCNKKTLTDLRYKVSGLTEGHEYEFRIMAENAAGISAPSPTSPFYKACDTVFKPGPPGNPRVLDTSRSSISIAWNKPIYDGGSEITGYMVEIALPEEDEWQIVTPPAGLKATSYTITGLTENQEYKIRIYAMNSEGLGEPALVPGTPKAEDRMLPPEIELDADLRKVVTIRACCTLRLFVPIKGRPAPEVKWARDHGESLDKASIESTSSYTLLIVGNVNRFDSGKYILTVENSSGSKSAFVNVRVLDTPGPPQDLKVKEVTKTSVTLTWDPPLLDGGSKIKNYIVEKRESTRKAYSTVATNCHKTSWKVDQLQEGCSYYFRVLAENEYGIGLPAETAESVKASERPLPPGKITLMDVTRNSVSLSWEKPEHDGGSRILGYIVEMQTKGSDKWATCATVKVTEATITGLIQGEEYSFRVSAQNEKGISDPRQLSVPVIAKDLVIPPAFKLLFNTFTVLAGEDLKVDVPFIGRPTPAVTWHKDNVPLKQTTRVNAESTENNSLLTIKDACREDVGHYVVKLTNSAGEAIETLNVIVLDKPGPPTGPVKMDEVTADSITLSWGPPKYDGGSSINNYIVEKRDTSTTTWQIVSATVARTTIKACRLKTGCEYQFRIAAENRYGKSTYLNSEPTVAQYPFKVPGPPGTPVVTLSSRDSMEVQWNEPISDGGSRVIGYHLERKERNSILWVKLNKTPIPQTKFKTTGLEEGVEYEFRVSAENIVGIGKPSKVSECYVARDPCDPPGRPEAIIVTRNSVTLQWKKPTYDGGSKITGYIVEKKELPEGRWMKASFTNIIDTHFEVTGLVEDHRYEFRVIARNAAGVFSEPSESTGAITARDEVDPPRISMDPKYKDTIVVHAGESFKVDADIYGKPIPTIQWIKGDQELSNTARLEIKSTDFATSLSVKDAVRVDSGNYILKAKNVAGERSVTVNVKVLDRPGPPEGPVVISGVTAEKCTLAWKPPLQDGGSDIINYIVERRETSRLVWTVVDANVQTLSCKVTKLLEGNEYTFRIMAVNKYGVGEPLESEPVVAKNPFVVPDAPKAPEVTTVTKDSMIVVWERPASDGGSEILGYVLEKRDKEGIRWTRCHKRLIGELRLRVTGLIENHDYEFRVSAENAAGLSEPSPPSAYQKACDPIYKPGPPNNPKVIDITRSSVFLSWSKPIYDGGCEIQGYIVEKCDVSVGEWTMCTPPTGINKTNIEVEKLLEKHEYNFRICAINKAGVGEHADVPGPIIVEEKLEAPDIDLDLELRKIINIRAGGSLRLFVPIKGRPTPEVKWGKVDGEIRDAAIIDVTSSFTSLVLDNVNRYDSGKYTLTLENSSGTKSAFVTVRVLDTPSPPVNLKVTEITKDSVSITWEPPLLDGGSKIKNYIVEKREATRKSYAAVVTNCHKNSWKIDQLQEGCSYYFRVTAENEYGIGLPAQTADPIKVAEVPQPPGKITVDDVTRNSVSLSWTKPEHDGGSKIIQYIVEMQAKHSEKWSECARVKSLQAVITNLTQGEEYLFRVVAVNEKGRSDPRSLAVPIVAKDLVIEPDVKPAFSSYSVQVGQDLKIEVPISGRPKPTITWTKDGLPLKQTTRINVTDSLDLTTLSIKETHKDDGGQYGITVANVVGQKTASIEIVTLDKPDPPKGPVKFDDVSAESITLSWNPPLYTGGCQITNYIVQKRDTTTTVWDVVSATVARTTLKVTKLKTGTEYQFRIFAENRYGQSFALESDPIVAQYPYKEPGPPGTPFATAISKDSMVIQWHEPVNNGGSPVIGYHLERKERNSILWTKVNKTIIHDTQFKAQNLEEGIEYEFRVYAENIVGVGKASKNSECYVARDPCDPPGTPEPIMVKRNEITLQWTKPVYDGGSMITGYIVEKRDLPDGRWMKASFTNVIETQFTVSGLTEDQRYEFRVIAKNAAGAISKPSDSTGPITAKDEVELPRISMDPKFRDTIVVNAGETFRLEADVHGKPLPTIEWLRGDKEIEESARCEIKNTDFKALLIVKDAIRIDGGQYILRASNVAGSKSFPVNVKVLDRPGPPEGPVQVTGVTSEKCSLTWSPPLQDGGSDISHYVVEKRETSRLAWTVVASEVVTNSLKVTKLLEGNEYVFRIMAVNKYGVGEPLESAPVLMKNPFVLPGPPKSLEVTNIAKDSMTVCWNRPDSDGGSEIIGYIVEKRDRSGIRWIKCNKRRITDLRLRVTGLTEDHEYEFRVSAENAAGVGEPSPATVYYKACDPVFKPGPPTNAHIVDTTKNSITLAWGKPIYDGGSEILGYVVEICKADEEEWQIVTPQTGLRVTRFEISKLTEHQEYKIRVCALNKVGLGEATSVPGTVKPEDKLEAPELDLDSELRKGIVVRAGGSARIHIPFKGRPTPEITWSREEGEFTDKVQIEKGVNYTQLSIDNCDRNDAGKYILKLENSSGSKSAFVTVKVLDTPGPPQNLAVKEVRKDSAFLVWEPPIIDGGAKVKNYVIDKRESTRKAYANVSSKCSKTSFKVENLTEGAIYYFRVMAENEFGVGVPVETVDAVKAAEPPSPPGKVTLTDVSQTSASLMWEKPEHDGGSRVLGYVVEMQPKGTEKWSIVAESKVCNAVVTGLSSGQEYQFRVKAYNEKGKSDPRVLGVPVIAKDLTIQPSLKLPFNTYSIQAGEDLKIEIPVIGRPRPNISWVKDGEPLKQTTRVNVEETATSTVLHIKEGNKDDFGKYTVTATNSAGTATENLSVIVLEKPGPPVGPVRFDEVSADFVVISWEPPAYTGGCQISNYIVEKRDTTTTTWHMVSATVARTTIKITKLKTGTEYQFRIFAENRYGKSAPLDSKAVIVQYPFKEPGPPGTPFVTSISKDQMLVQWHEPVNDGGTKIIGYHLEQKEKNSILWVKLNKTPIQDTKFKTTGLDEGLEYEFKVSAENIVGIGKPSKVSECFVARDPCDPPGRPEAIVITRNNVTLKWKKPAYDGGSKITGYIVEKKDLPDGRWMKASFTNVLETEFTVSGLVEDQRYEFRVIARNAAGNFSEPSDSSGAITARDEIDAPNASLDPKYKDVIVVHAGETFVLEADIRGKPIPDVVWSKDGKELEETAARMEIKSTIQKTTLVVKDCIRTDGGQYILKLSNVGGTKSIPITVKVLDRPGPPEGPLKVTGVTAEKCYLAWNPPLQDGGANISHYIIEKRETSRLSWTQVSTEVQALNYKVTKLLPGNEYIFRVMAVNKYGIGEPLESGPVTACNPYKPPGPPSTPEVSAITKDSMVVTWARPVDDGGTEIEGYILEKRDKEGVRWTKCNKKTLTDLRLRVTGLTEGHSYEFRVAAENAAGVGEPSEPSVFYRACDALYPPGPPSNPKVTDTSRSSVSLAWSKPIYDGGAPVKGYVVEVKEAAADEWTTCTPPTGLQGKQFTVTKLKENTEYNFRICAINSEGVGEPATLPGSVVAQERIEPPEIELDADLRKVVVLRASATLRLFVTIKGRPEPEVKWEKAEGILTDRAQIEVTSSFTMLVIDNVTRFDSGRYNLTLENNSGSKTAFVNVRVLDSPSAPVNLTIREVKKDSVTLSWEPPLIDGGAKITNYIVEKRETTRKAYATITNNCTKTTFRIENLQEGCSYYFRVLASNEYGIGLPAETTEPVKVSEPPLPPGRVTLVDVTRNTATIKWEKPESDGGSKITGYVVEMQTKGSEKWSTCTQVKTLEATISGLTAGEEYVFRVAAVNEKGRSDPRQLGVPVIARDIEIKPSVELPFHTFNVKAREQLKIDVPFKGRPQATVNWRKDGQTLKETTRVNVSSSKTVTSLSIKEASKEDVGTYELCVSNSAGSITVPITIIVLDRPGPPGPIRIDEVSCDSITISWNPPEYDGGCQISNYIVEKKETTSTTWHIVSQAVARTSIKIVRLTTGSEYQFRVCAENRYGKSSYSESSAVVAEYPFSPPGPPGTPKVVHATKSTMLVTWQVPVNDGGSRVIGYHLEYKERSSILWSKANKILIADTQMKVSGLDEGLMYEYRVYAENIAGIGKCSKSCEPVPARDPCDPPGQPEVTNITRKSVSLKWSKPHYDGGAKITGYIVERRELPDGRWLKCNYTNIQETYFEVTELTEDQRYEFRVFARNAADSVSEPSESTGPIIVKDDVEPPRVMMDVKFRDVIVVKAGEVLKINADIAGRPLPVISWAKDGIEIEERARTEIISTDNHTLLTVKDCIRRDTGQYVLTLKNVAGTRSVAVNCKVLDKPGPPAGPLEINGLTAEKCSLSWGRPQEDGGADIDYYIVEKRETSHLAWTICEGELQMTSCKVTKLLKGNEYIFRVTGVNKYGVGEPLESVAIKALDPFTVPSPPTSLEITSVTKESMTLCWSRPESDGGSEISGYIIERREKNSLRWVRVNKKPVYDLRVKSTGLREGCEYEYRVYAENAAGLSLPSETSPLIRAEDPVFLPSPPSKPKIVDSGKTTITIAWVKPLFDGGAPITGYTVEYKKSDDTDWKTSIQSLRGTEYTISGLTTGAEYVFRVKSVNKVGASDPSDSSDPQIAKEREEEPLFDIDSEMRKTLIVKAGASFTMTVPFRGRPVPNVLWSKPDTDLRTRAYVDTTDSRTSLTIENANRNDSGKYTLTIQNVLSAASLTLVVKVLDTPGPPTNITVQDVTKESAVLSWDVPENDGGAPVKNYHIEKREASKKAWVSVTNNCNRLSYKVTNLQEGAIYYFRVSGENEFGVGIPAETKEGVKITEKPSPPEKLGVTSISKDSVSLTWLKPEHDGGSRIVHYVVEALEKGQKNWVKCAVAKSTHHVVSGLRENSEYFFRVFAENQAGLSDPRELLLPVLIKEQLEPPEIDMKNFPSHTVYVRAGSNLKVDIPISGKPLPKVTLSRDGVPLKATMRFNTEITAENLTINLKESVTADAGRYEITAANSSGTTKAFINIVVLDRPGPPTGPVVISDITEESVTLKWEPPKYDGGSQVTNYILLKRETSTAVWTEVSATVARTMMKVMKLTTGEEYQFRIKAENRFGISDHIDSACVTVKLPYTTPGPPSTPWVTNVTRESITVGWHEPVSNGGSAVVGYHLEMKDRNSILWQKANKLVIRTTHFKVTTISAGLIYEFRVYAENAAGVGKPSHPSEPVLAIDACEPPRNVRITDISKNSVSLSWQQPAFDGGSKITGYIVERRDLPDGRWTKASFTNVTETQFIISGLTQNSQYEFRVFARNAVGSISNPSEVVGPITCIDSYGGPVIDLPLEYTEVVKYRAGTSVKLRAGISGKPAPTIEWYKDDKELQTNALVCVENTTDLASILIKDADRLNSGCYELKLRNAMGSASATIRVQILDKPGPPGGPIEFKTVTAEKITLLWRPPADDGGAKITHYIVEKRETSRVVWSMVSEHLEECIITTTKIIKGNEYIFRVRAVNKYGIGEPLESDSVVAKNAFVTPGPPGIPEVTKITKNSMTVVWSRPIADGGSDISGYFLEKRDKKSLGWFKVLKETIRDTRQKVTGLTENSDYQYRVCAVNAAGQGPFSEPSEFYKAADPIDPPGPPAKIRIADSTKSSITLGWSKPVYDGGSAVTGYVVEIRQGEEEEWTTVSTKGEVRTTEYVVSNLKPGVNYYFRVSAVNCAGQGEPIEMNEPVQAKDILEAPEIDLDVALRTSVIAKAGEDVQVLIPFKGRPPPTVTWRKDEKNLGSDARYSIENTDSSSLLTIPQVTRNDTGKYILTIENGVGEPKSSTVSVKVLDTPAACQKLQVKHVSRGTVTLLWDPPLIDGGSPIINYVIEKRDATKRTWSVVSHKCSSTSFKLIDLSEKTPFFFRVLAENEIGIGEPCETTEPVKAAEVPAPIRDLSMKDSTKTSVILSWTKPDFDGGSVITEYVVERKGKGEQTWSHAGISKTCEIEVSQLKEQSVLEFRVFAKNEKGLSDPVTIGPITVKELIITPEVDLSDIPGAQVTVRIGHNVHLELPYKGKPKPSISWLKDGLPLKESEFVRFSKTENKITLSIKNAKKEHGGKYTVILDNAVCRIAVPITVITLGPPSKPKGPIRFDEIKADSVILSWDVPEDNGGGEITCYSIEKRETSQTNWKMVCSSVARTTFKVPNLVKDAEYQFRVRAENRYGVSQPLVSSIIVAKHQFRIPGPPGKPVIYNVTSDGMSLTWDAPVYDGGSEVTGFHVEKKERNSILWQKVNTSPISGREYRATGLVEGLDYQFRVYAENSAGLSSPSDPSKFTLAVSPVDPPGTPDYIDVTRETITLKWNPPLRDGGSKIVGYSIEKRQGNERWVRCNFTDVSECQYTVTGLSPGDRYEFRIIARNAVGTISPPSQSSGIIMTRDENVPPIVEFGPEYFDGLIIKSGESLRIKALVQGRPVPRVTWFKDGVEIEKRMNMEITDVLGSTSLFVRDATRDHRGVYTVEAKNASGSAKAEIKVKVQDTPGKVVGPIRFTNITGEKMTLWWDAPLNDGCAPITHYIIEKRETSRLAWALIEDKCEAQSYTAIKLINGNEYQFRVSAVNKFGVGRPLDSDPVVAQIQYTVPDAPGIPEPSNITGNSITLTWARPESDGGSEIQQYILERREKKSTRWVKVISKRPISETRFKVTGLTEGNEYEFHVMAENAAGVGPASGISRLIKCREPVNPPGPPTVVKVTDTSKTTVSLEWSKPVFDGGMEIIGYIIEMCKADLGDWHKVNAEACVKTRYTVTDLQAGEEYKFRVSAINGAGKGDSCEVTGTIKAVDRLTAPELDIDANFKQTHVVRAGASIRLFIAYQGRPTPTAVWSKPDSNLSLRADIHTTDSFSTLTVENCNRNDAGKYTLTVENNSGSKSITFTVKVLDTPGPPGPITFKDVTRGSATLMWDAPLLDGGARIHHYVVEKREASRRSWQVISEKCTRQIFKVNDLAEGVPYYFRVSAVNEYGVGEPYEMPEPIVATEQPAPPRRLDVVDTSKSSAVLAWLKPDHDGGSRITGYLLEMRQKGSDFWVEAGHTKQLTFTVERLVEKTEYEFRVKAKNDAGYSEPREAFSSVIIKEPQIEPTADLTGITNQLITCKAGSPFTIDVPISGRPAPKVTWKLEEMRLKETDRVSITTTKDRTTLTVKDSMRGDSGRYFLTLENTAGVKTFSVTVVVIGRPGPVTGPIEVSSVSAESCVLSWGEPKDGGGTEITNYIVEKRESGTTAWQLVNSSVKRTQIKVTHLTKYMEYSFRVSSENRFGVSKPLESAPIIAEHPFVPPSAPTRPEVYHVSANAMSIRWEEPYHDGGSKIIGYWVEKKERNTILWVKENKVPCLECNYKVTGLVEGLEYQFRTYALNAAGVSKASEASRPIMAQNPVDAPGRPEVTDVTRSTVSLIWSAPAYDGGSKVVGYIIERKPVSEVGDGRWLKCNYTIVSDNFFTVTALSEGDTYEFRVLAKNAAGVISKGSESTGPVTCRDEYAPPKAELDARLHGDLVTIRAGSDLVLDAAVGGKPEPKIIWTKGDKELDLCEKVSLQYTGKRATAVIKFCDRSDSGKYTLTVKNASGTKAVSVMVKVLDSPGPCGKLTVSRVTQEKCTLAWSLPQEDGGAEITHYIVERRETSRLNWVIVEGECPTLSYVVTRLIKNNEYIFRVRAVNKYGPGVPVESEPIVARNSFTIPSPPGIPEEVGTGKEHIIIQWTKPESDGGNEISNYLVDKREKKSLRWTRVNKDYVVYDTRLKVTSLMEGCDYQFRVTAVNAAGNSEPSEASNFISCREPSYTPGPPSAPRVVDTTKHSISLAWTKPMYDGGTDIVGYVLEMQEKDTDQWYRVHTNATIRNTEFTVPDLKMGQKYSFRVAAVNVKGMSEYSESIAEIEPVERIEIPDLELADDLKKTVTIRAGASLRLMVSVSGRPPPVITWSKQGIDLASRAIIDTTESYSLLIVDKVNRYDAGKYTIEAENQSGKKSATVLVKVYDTPGPCPSVKVKEVSRDSVTITWEIPTIDGGAPVNNYIVEKREAAMRAFKTVTTKCSKTLYRISGLVEGTMYYFRVLPENIYGIGEPCETSDAVLVSEVPLVPAKLEVVDVTKSTVTLAWEKPLYDGGSRLTGYVLEACKAGTERWMKVVTLKPTVLEHTVTSLNEGEQYLFRIRAQNEKGVSEPRETVTAVTVQDLRVLPTIDLSTMPQKTIHVPAGRPVELVIPIAGRPPPAASWFFAGSKLRESERVTVETHTKVAKLTIRETTIRDTGEYTLELKNVTGTTSETIKVIILDKPGPPTGPIKIDEIDATSITISWEPPELDGGAPLSGYVVEQRDAHRPGWLPVSESVTRSTFKFTRLTEGNEYVFRVAATNRFGIGSYLQSEVIECRSSIRIPGPPETLQIFDVSRDGMTLTWYPPEDDGGSQVTGYIVERKEVRADRWVRVNKVPVTMTRYRSTGLTEGLEYEHRVTAINARGSGKPSRPSKPIVAMDPIAPPGKPQNPRVTDTTRTSVSLAWSVPEDEGGSKVTGYLIEMQKVDQHEWTKCNTTPTKIREYTLTHLPQGAEYRFRVLACNAGGPGEPAEVPGTVKVTEMLEYPDYELDERYQEGIFVRQGGVIRLTIPIKGKPFPICKWTKEGQDISKRAMIATSETHTE

SEQ ID NO: 21920 - skipped

SEQ ID NO: 21921 - protein, 549 aa, Homo sapiens
MLENYKNLATVGYQLFKPSLISWLEQEESRTVQRGDFQASEWKVQLKTKELALQQDVLGEPTSSGIQMIGSHNGGEVSDVKQCGDVSSEHSCLKTHVRTQNSENTFECYLYGVDFLTLHKKTSTGEQRSVFSQCGKAFSLNPDVVCQRTCTGEKAFDCSDSGKSFINHSHLQGHLRTHNGESLHEWKECGRGFIHSTDLAVRIQTHRSEKPYKCKECGKGFRYSAYLNIHMGTHTGDNPYECKECGKAFTRSCQLTQHRKTHTGEKPYKCKDCGRAFTVSSCLSQHMKIHVGEKPYECKECGIAFTRSSQLTEHLKTHTAKDPFECKICGKSFRNSSCLSDHFRIHTGIKPYKCKDCGKAFTQNSDLTKHARTHSGERPYECKECGKAFARSSRLSEHTRTHTGEKPFECVKCGKAFAISSNLSGHLRIHTGEKPFECLECGKAFTHSSSLNNHMRTHSAKKPFTCMECGKAFKFPTCVNLHMRIHTGEKPYKCKQCGKSFSYSNSFQLHERTHTGEKPYECKECGKAFSSSSSFRNHERRHADERLSA

SEQ ID NO: 21922 - protein, 113 aa, Homo sapiens
MARTKQTARKSTGGKAPRKQLATKAARKSAPSTGGVKKPHRYRPGTVALREIRRYQKSTELLIRKLPFQRRLAKRTWWVCSKIPTCVPSTLRESPSCPKTSSWLAGYGERELK

SEQ ID NO: 21923 - protein, 698 aa, Homo sapiens
MQNSEGGADSPASVALRPSAAAPPVPASPQRVLVQAASSNPKGAQMQPISLPRVQQVPQQVQPVQHVYPAQVQYVEGGDAVYTNGAIRTAYTYNPEPQMYAPSSTASYFEAPGGAQVTVAASSPPAVPSHSMVGITMDVGGSPIVSSAGAYLIHGGMDSTRHSLAHTSRSSPATLQWLLDNYETAEGVSLPRSSLYNHYLRHCQEHKLDPVNAASFGKLIRSVFMGLRTRRLGTRGNSKYHYYGIRLKPDSPLNRLQEDTQYMAMRQQPMHQKPRYRPAQKTDSLGDSGSHSGLHSTPEQTMAVQSQHHQQYIDVSHVFPEFPAPDLGSFLLQDGVTLHDVKALQLVYRRHCEATVDVVMNLQFHYIEKLWLSFWNSKASSSDGPTSLPASDEDPEGAVLPKDKLISLCQCDPILRWMRSCDHILYQALVEILIPDVLRPVPSTLTQAIRNFAKSLEGWLTNAMSDFPQQVIQTKVGVVSAFAQTLRRYTSLNHLAQAARAVLQNTSQINQMLSDLNRVDFANVQEQASWVCQCEESVVQRLEQDFKLTLQQQSSLDQWASWLDSVVTQVLKQHAGSPSFPKAARQFLLKWSFYSSMVIRDLTLRSAASFGSFHLIRLLYDEYMFYLVEHRVAEATGETPIAVMGEFNDLASLSLTLLDKDDMGDEQRGSEAGPDARSLGEPLVKRERSDPNHSLQGI

SEQ ID NO: 21924 - protein, 298 aa, Homo sapiens
MKSVLIGEFLEKVRQKKKRDITVLDLGCGKGGDLLKWKKGRINKLVCTDIADVSVKQCQQRYEDMKNRRDSEYIFSAEFITADSSKELLIDKFRDPQMCFDICSCQFVCHYSFESYEQADMMLRNACERLSPGGYFIGTTPNSFELIRRLEASETESFGNEIYTVKFQKKGDYPLFGCKYDFNLEGVVDVPEFLVYFPLLNEMAKKYNMKLVYKKTFLEFYEEKIKNNENKMLLKRMQALEPYPANESSKLVSEKVDDYEHAAKYMKNSQVRLPLGTLSKSEWEATSIYLVFAFEKQQ

SEQ ID NO: 21925 - protein, 703 aa, Homo sapiens
MTGLEDQEFDFEFLFEFNQRDEGAAAAAPEHYGYASSNVSPALPLPTAHSTLPAPCHNLQTSTPGIIPPADHPSGYGAALDGGPAGYFLSSGHTRPDGAPALESPRIEITSCLGLYHNNNQFFHDVEVEDVLPSSKRSPSTATLSLPSLEAYRDPSCLSPASSLSSRSCNSEASSYESNYSYPYASPQTSPWQSPCVSPKTTDPEEGFPRGLGACTLLGSPRHSPSTSPRASVTEESWLGARSSRPASPCNKRKYSLNGRQPPYSPHHSPTPSPHGSPRVSVTDDSWLGNTTQYTSSAIVAAINALTTDSSLDLGDGVPVKSRKTTLEQPPSVALKVEPVGEDLGSPPPPADFAPEDYSSFQHIRKGGFCDQYLAVPQHPYQWAKPKPLSPTSYMSPTLPALDWQLPSHSGPYELRIEVQPKSHHRAHYETEGSRGAVKASAGGHPIVQLHGYLENEPLMLQLFIGTADDRLLRPHAFYQVHRITGKTVSTTSHEAILSNTKVLEIPLLPENSMRAVIDCAGILKLRNSDIELRKGETDIGRKNTRVRLVFRVHVPQPSGRTLSLQVASNPIECSQRSAQELPLVEKQSTDSYPVVGGKKMVLSGHNFLQDSKVIFVEKAPDGHHVWEMEAKTDRDLCKPNSLVVEIPPFRNQRITSPVHVSFYVCNGKRKRSQYQRFTYLPANGNAIFLTVSREHERVGCFF

SEQ ID NO: 21926 - protein, 701 aa, Homo sapiens
PASLEWILSLLSPFAFMLGMAQLLHLDYDLNSNAFPHPSDGSNLIVATNFMLAFDTCLYLALAIYFEKILPNEYGHRRPPLFFLKSSFWSQTQKTDHVALEDEMDADPSFHDSFEQAPPEFQGKEAIRIRNVTKEYKGKPDKIEALKDLVFDIYEGQITAILGHSGAGKSTLLNILSGLSVPTKGSVTIYNNKLSEMADLENLSKLTGVCPQSNVQFDFLTVRENLRLFAKIKGILPQEVDKEIQRVLLELEMKNIQDVLAQNLSGGQKRKLTFGIAILGDPQIFLLDEPTAGLDPFSRHQVWNLLKERKTDRVILFSTQFMDEADILADRKVFLSQGKLKCAGSSLFLKKKWGIGYHLSLQLNEICVEENITSLVKQHIPDAKLSAKSEGKLIYTLPLERTNKFPELYKDLDSYPDLGIENYGVSMTTLNEVFLKLEGKSTINESDIAILGEVQAEKADDTERLVEMEQVLSSLNKMRKTIGGVALWRQQICAIARVRLLKLKHERKALLALLLILMAGFCPLLVEYTMVKIYQNSYTWELSPHLYFLAPGQQPHDPLTQLLIINKTGASIDDFIQSVEHQNIALEVDAFGTRNGTDDPSYNGAITVCCNEKNYSFSLACNAKRLNCFPVLMDIVSNGLLGMVKPSVHIRTERSTFLEVNIYNLTIPDSPLSGISQITLLSAGILFLLSKPLHNKLTFGL

SEQ ID NO: 21927 - protein, 635 aa, Homo sapiens
MAMRPRSHPPVGAGTGGGPACVPVAEASTGAWTAEGAAGTRCRASRAPCRPPPVPAPSQLPASSPTKCEICVKNTAILAITLITPQDPHLDPVPRGQPTFTKKKKTIRLFWNEVRPFDWPCKNNRRCREFLWSKLEPIKVDTSRLEHLFESKSKELSVSKKTAADGKRQEIIVLDSKRSNAINIGLTVLPPPRTIKIAILNFDEYALNKEGIEKILTMIPTDEEKQKIQEAQLANPEIPLGSAEQFLLTLSSISELSARLHLWAFKMDYETTEKEVAEPLLDLKEGIDQLENNKTLGFILSTLLAIGNFLNGTNAKAFELSYLEKVPEVKDTVHKQSLLHHVCTMVVENFPDSSDLYSEIGAITRSAKVDFDQLQDNLCQMERRCKASWDHLKAIAKHEMKPVLKQRMSEFLKDCAERIIILKIVHRRIINRFHSFLLFMGHPPYAIREVNINKFCRIISEFALEYRTTRERVLQQKQKRANHRERNKTRGKMITDSGKFSGSSPAPPSQPQGLSYAEDAAEHENMKAVLKTSSPSVEDATPALGVRTRSRASRGSTSSWTMGTDDSPNVTDDAADEIMDRIVKSATQVPSQRVVPRERKRSRANRKSLRRTLKSGLTPEEARALGLVGTSELQL

SEQ ID NO: 21928 - protein, 592 aa, Homo sapiens
MCMYLFFLDFSIVGSGLRSGVWVSGSSSQAICVTPVRVESSEATAISQEKSQEEERMAVGLLKAMYQELVTFRDVAVDFSQEEWDCLDSSQRHLYSNVMLENYRILVSLGLCFSKPSVILLLEQGKAPWMVKRELTKGLCSGWEPICETEELTPKQDFYEEHQSQKIIETLTSYNLEYSSLREEWKCEGYFERQPGNQKACFKEEIITHEEPLFDEREQEYKSWGSFHQNPLLCTQKIIPKEEKVHKHDTQKRSFKKNLMAIKPKSVCAEKKLLKCNDCEKVFSQSSSLTLHQRIHTGEKPYKCIECGKAFSQRSNLVQHQRIHTGEKPYECKECRKAFSQNAHLVQHLRVHTGEKPYECKVCRKAFSQFAYLAQHQRVHTGEKPYECIECGKAFSNRSSIAQHQRVHTGEKPYECNVCGKAFSLRAYLTVHQRIHTGERPYECKECGKAFSQNSHLAQHQRIHTGEKPYKCQECRKAFSQIAYLAQHQRVHTGEKPYECIECGKAFSNDSSLTQHQRVHTGEKPYECTVCGKAFSYCGSLAQHQRIHTGERPYECKECKKTFRQHAHLAHHQRIHIGESLSPPNPVNHQVL

SEQ ID NO: 21929 - protein, 70 aa, Homo sapiens
MTSPQLEWTLQTLLEQLNEDELKSFKSLLWAFPLEDVLQKTPWSEVEEADGKKLAEILVNTSSENWIRNA

SEQ ID NO: 21930 - protein, 495 aa, Homo sapiens
MAANCTSSWSLGESCNRPGLELPRSMASSETQLGNHDVDPEISHVNFRMFSCPKESDPIQALRKLTELCHLWLRPDLHTKEQILDMLVMEQFMISMPQELQVLVMMNGVQSCKDLEDLLRNNRRPKKWSVVTFHGKEYIVQDSDIEMAEAPSSVRDDLKDVSSQRASSVNQMRPGEGQAHRELQILPRVPALSRRQGEDFLLHKSIDVTGDPKSLRPKQTLEKDLKENREENPGLTSPEPQLPKSPNLVRAKEGKDPPKIASVENVDADTPSACVVEREASTHSGNRGDALNLSSPKRSKPDASSISQEEPQGEATPVGNRESPGQAGMNSIHSPGPASPVSHPDGQEAKALPPFACDVCEKRFTCNSKLVIHKRSHTGERLFQCNLCGKRFMQLISLQFHQRTHTGERPYTCDVCQKQFTQKSYLKCHKRSHTGEKPFECKDCKKVFTYRGSLKEHQRIHSGEKPYKCSKCPRAFSRLKLLRRHQKTHPEATSQ

SEQ ID NO: 21931 - protein, 15 aa, Homo sapiens
HPAVSSMQENSVNSG

SEQ ID NO: 21932 - protein, 432 aa, Homo sapiens
MEVVDPQQLGMFTEGELMSVGMDTFIHRIDSTEVIYQPRRKRAKLIGKYLMGDLLGEGSYGKVKEVLDSETLCRRAVKILKKKKLRRIPNGEANVKKEIQLLRRLRHKNVIQLVDVLYNEEKQKMYMVMEYCVCGMQEMLDSVPEKRFPVCQAHGYFCQLIDGLEYLHSQGIVHKDIKPGNLLLTTGGTLKISDLGVAEALHPFAADDTCRTSQGSPAFQPPEIANGLDTFSGFKVDIWSAGVTLYNITTGLYPFEGDNIYKLFENIGKGSYAIPGDCGPPLSDLLKGMLEYEPAKRFSIRQIRQHSWFRKKHPPAEAPVPIPPSPDTKDRWRSMTVVPYLEDLHGADEDEDLFDIEDDIIYTQDFTVPGQVPEEEASHNGQRRGLPKAVCMNGTEAAQLSTKSRAEAGPPTLPARPAASSKIRRLSACKQQ

SEQ ID NO: 21933 - protein, 87 aa, Homo sapiens
FVRLLELFPSGNKPGPCWPGPSSHANGDPVAVAKAQPSRLIMGTHRDLEAFKRLNYRKTKLGGKAPLPYPSKGPGNIPRGDPPWREL

SEQ ID NO: 21934 - protein, 431 aa, Homo sapiens
VEFFVTVAFGFIGLMIILIESFPKSLVWLFSPFCHCTFVIGIAQVMHLEDFNEGASFSNLTAGPYPLIITIIMLTLNSIFYVLLAVYLDQVIPGEFGLRRSSLYFLKPSYWSKSKRNYEELSEGNVNGNISFSEIIEPVSSEFVGKEAIRISGIQKTYRKKGENVEALRNLSFDIYEGQITALLGHSGTGKSTLMNILCGLCPPSDGFASIYGHRVSEIDEMFEARKMIGICPQLDIHFDVLTVEENLSILASIKGIPANNIIQEVQKVLLDLDMQTIKDNQAKKLSGGQKRKLSLGIAVLGNPKILLLDEPTAGMDPCSRHIVWNLLKYRKANRVTVFSTHFMDEADILADRKAVISQGMLKCVGSSMFLKSKWGIGYRLSMYIDKYCATESLSSLVKQHIPGATLLQQNDQQLVYSLPFKDMDKFSGIA

SEQ ID NO: 21935 - protein, 951 aa, Homo sapiens
MRVLACLLAALVGIQAVERLRLADGPHGCAGRLEVWHGGRWGTVCDDGWDLRDAAVACRQLGCGGALAAPGGAFFGEGAGPVWLSELACRGNEGQLGLCHHRGWKAHICSHEEDAGVVCAGQRVANSRDDSTSPLDGAPWPGLLLELSPSTEEPLVTHAPRPAGNPQNASRKKSPRPKQAKSTRAPLLTTGAPRQERLRLVSGPHRCAGRLEVWHGGRWGTVCDDGWDLRDAAVACRELGCGGALAAPGGARFGPGAGPVWMDDVGCGGGEQALRDCPRSPWGRSNCDHSEDAGLVCTGPAPRLRLADGPHGCAGRLEVWHGGRWGSVCDDAWDLRDAAVACRELGCGGALAAPGGAFFGEGSGPIILDDLRCRGNETALRFCPARPWGQHDCHHREDAGAVCDGMPLGYVPPTAPTDSNNSTPREAASRPPSTMTSQAPGTAGVSPPPASPTVLWEPGPEAGSPQLRLVAGPSKCSGRLEVWHDQRWGTVCDDSWDMRDSAVVCRELGCGGPQQPDPAAGRFGWGAGPIWLDDVGCVGTEASLSDCPAAPWGKHNCAHNEDVGVTCTGPPGLDSISDPFSWSWIPGLGRDRDAWLPGELATKPSASVTASVLEKTTTKAPGKMPKSTKKWVTKNAKRPTTQPPVMPTTKHSRAQSPPDLTSQTTAALTTEASRRPTSEFTRRPTTEAPQRWTSHTTATLTPQAPRERTTKTMAMLTTQGPQEMTSESTIKSIPQASLEPSAEIPEGSPESPKDPAPSPSVSTTGESGLFRVRLADGPNRCAGRLEVWHAGRWGTVCDDNWDLRDATVACWELGCGKVRPRVGKTHYGPGTGPIWLDDMGCKGSEASLSDCPSGAWGKHNCDHEEDVGLTCTGYTDYDDYPPWTWDPTSREDLAKGTTTAGVPGHTLPWRTTRRPGSSSPAIRRLPDTEPEAGAPRGDAPRSRTARVAAPP

SEQ ID NO: 21936 - protein, 1621 aa, Homo sapiens
MRKRKISVCQQTWALLCKNFLKKWRMKRESLMEWLNSLLLLLCLYIYPHSHQVNDFSSLLTMDLGRVDTFNESRFSVVYTPVTNTTQQIMNKVASTPFLAGKEVLGLPDEESIKEFTANYPEEIVRVTFTNTYSYHLKFLLGHGMPAKKEHKDHTAHCYETNEDVYCEVSVFWKEGFVALQAAINAAIIEITTNHSVMEELMSVTGKNMKMHSFIGQSGVITDLYLFSCIISFSSFIYYASVNVTRERKRMKALMTMMGLRDSAFWLSWGLLYAGFIFIMALFLALVIRSTQFIILSGFMVVFSLFLLYGLSLVALAFLMSILVKKSFLTGLVVFLLTVFWGCLGFTSLYRHLPASLEWILSLLSPFAFMLGMAQLLHLDYDLNSNAFPHPSDGSNLIVATNFMLAFDTCLYLALAIYFEKILPNEYGHRRPPLFFLKSSFWSQTQKTDHVALEDEMDADPSFHDSFEQAPPEFQGKEAIRIRNVTKEYKGKPDKIEALKDLVFDIYEGQITAILGHSGAGKSTLLNILSGLSVPTKGSVTIYNNKLSEMADLENLSKLTGVCPQSNVQFDFLTVRENLRLFAKIKGILPQEVDKEIQRVLLELEMKNIQDVLAQNLSGGQKRKLTFGIAILGDPQIFLLDEPTAGLDPFSRHQVWNLLKERKTDRVILFSTQFMDEADILADRKVFLSQGKLKCAGSSLFLKKKWGIGYHLSLQLNEICVEENITSLVKQHIPDAKLSAKSEGKLIYTLPLERTNKFPELYKDLDSYPDLGIENYGVSMTTLNEVFLKLEGKSTINESDIAILGEVQAEKADDTERLVEMEQVLSSLNKMRKTIGGVALWRQQICAIARVRLLKLKHERKALLALLLILMAGFCPLLVEYTMVKIYQNSYTWELSPHLYFLAPGQQPHDPLTQLLIINKTGASIDDFIQSVEHQNIALEVDAFGTRNGTDDPSYNGAITVCCNEKNYSFSLACNAKRLNCFPVLMDIVSNGLLGMVKPSVHIRTERSTFLENGQDNPIGFLAYIMFWLVLTSSCPPYIAMSSIDDYKNRARSQLRISGLSPSAYWFGQALVDVSLYFLVFVFIYLMSYISNFEDMLLTIIHIIQIPCAVGYSFSLIFMTYVISFIFRKGRKNSGIWSFCFYVVTVFSVAGFAFSIFESDIPFIFTFLIPPATMIGCLFLSSHLLFSSLFSEERMDVQPFLVFLIPFLHFIIFLFTLRCLEWKFGKKSMRKDPFFRISPRSSDVCQNPEEPEGEDEDVQMERVRTANALNSTNFDEKPVIIASCLRKEYAGKRKGCFSKRKNKIATRNVSFCVRKGEVLGLLGHNGAGKSTSIKVITGDTKPTAGQVLLKGSGGGDALEFLGYCPQENALWPNLTVRQHLEVYAAVKGLRKGDAEVAITRLVDALKLQDQLKSPVKTLSEGIKRKLCFVLSILGNPSVVLLDEPSTGMDPEGQQQMWQAIRATFRNTERGALLTTHYMAEAEAVCDRVAIMVSGRLRCIGSIQHLKSKFGKDYLLEMKVKNLAQVEPLHAEILRLFPQAARQERYSSLMVYKLPVEDVQPLAQAFFKLEKVKQSFDLEEYSLSQSTLEQVFLELSKEQELGDFEEDFDPSVKWKLLPQEEP

SEQ ID NO: 21937 - protein, 458 aa, Homo sapiens
MAGAGPAPGLPGAGGPVVPGPGAGIPGKSGEERLKEMEAEMALFEQEVLGAPVPGIPTAVPAVPTVPTVPTVEAMQVPAAPVIRPIIATNTYQQVQQTLEARAAAAATVVPPMVGGPPFVGPVGFGPGDRSHLDSPEAREAMFLRRADSALSSAAAGPRPMALRPPHQALVGPPLPGPPGPPMMLPPMARAPGPPLGSMAALRPPLEEPAAPRELGLGLGLGLKEKEEAVVAAAAGLEEASAAVAVGAGGAPAGPAVIGPSLPLALAMPLPEPEPLPLPLEVVRGLLPPLRIPELLSLRPRPRPPRPEPPPGLMALEVPEPLGEDKKKGKPEKLKRCIRTAAGSSWEDPSLLEWDADDFRIFCGDLGNEVNDDILARAFSRFPSFLKAKVIRDKRTGKTKGYGFVSFKDPSDYVRAMREMNGKYVGSRPIKLRKSMWKDRNLDVVRKKQKEKKKLGLR

SEQ ID NO: 21938 - protein, 414 aa, Homo sapiens
MPCCSHRSCREDPGTSESREMDPVACEDVAVNFTQEEWALLDISQRKLYREVMLETFRNLTSIGKKWKDQNIEYEYQNPRRNFRSLIEGNVNEIKEDSHCGETFTQVPDDRLNFQEKKASPEAKSCDNFVCGEVGIGNSSFNMNIRGDIGHKAYEYQDYAPKPYKCQQPKKAFRYHPSFRTQERNHTGEKPYACKECGKTFISHSGIRRRMVMHSGDGPYKCKFCGKAVHCLRLYLIHERTHTGEKPYECKQCVKSFSYSATHRIHERTHTGEKPYECQQCGKAFHSSSSFQAHKRTHTGGKPYECKQCGKSFSWCHSFQIHERTHTGEKPCECSKCNKAFRSYRSYLRHKRSHTGEKPYQCKECRKAFTYPSSLRRHERTHSAKKPYECKQCGKALSYKFSNTPKNALWRKTL

SEQ ID NO: 21939 - protein, 888 aa, Homo sapiens
MQTPRASPPRPALLLLLLLLGGAHGLFPEEPPPLSVAPRDYLNHYPVFVGSGPGRLTPAEGADDLNIQRVLRVNRTLFIGDRDNLYRVELEPPTSTELRYQRKLTWRSNPSDINVCRMKGKQEGECRNFVKVLLLRDESTLFVCGSNAFNPVCANYSIDTLQPVGDNISGMARCPYDPKHANVALFSDGMLFTATVTDFLAIDAVIYRSLGDRPTLRTVKHDSKWFKEPYFVHAVEWGSHVYFFFREIAMEFNYLEKVVVSRVARVCKNDVGGSPRVLEKQWTSFLKARLNCSVPGDSHFYFNVLQAVTGVVSLGGRPVVLAVFSTPSNSIPGSAVCAFDLTQVAAVFEGRFREQKSPESIWTPVPEDQVPRPRPGCCAAPGMQYNASSALPDDILNFVKTHPLMDEAVPSLGHAPWILRTLMRHQLTRVAVDVGAGPWGNQTVVFLGSEAGTVLKFLVRPNASTSGTSGLSVFLEEFETYRPDRCGRPGGGETGQRLLSLELDAASGGLLAAFPRCVVRVPVARCQQYSGCMKNCIGSQDPYCGWAPDGSCIFLSPGTRAAFEQDVSGASTSGLGDCTGLLRASLSEDRAGLVSVNLLVTSSVAAFVVGAVVSGFSVGWFVGLRERRELARRKDKEAILAHGAGEAVLSVSRLGERRAQGPGGRGGGGGGGAGVPPEALLAPLMQNGWAKATLLQGGPHDLDSGLLPTPEQTPLPQKRLPTPHPHPHALGPRAWDHGHPLLPASASSSLLLLAPARAPEQPPAPGEPTPDGRLYAARPGRASHGDFPLTPHASPDRRRVVSAPTGPLDPASAADGLPRPWSPPPTGSLRRPLGPHAPPAATLRRTHTFNSGEARPGDRHRGCHARPGTDLAHLLPYGGADRTAPPVP

SEQ ID NO: 21940 - protein, 457 aa, Homo sapiens
MPPPEEAAAVSAPPPAPAGTLLPGPSKWQKPAGTPVPRIRRLLEASHRGQGDPPSLRPLKPPPPPRQLSVKDTVPRAPSQFPPPLETWKPPPPLPSERQPADRRITPALATPASPPTESQAGPRNQGQTAGRARGGAPPHAGEGEMAQPADSESGLSLLCKITFKSRPSLAPPAASSSLAAKASLGGGGGGGLFAASGAISYAEVLKQGPLPPGAARPLGEVSRGAQEAEGGDGDGEGCSGPPSAPASQARALPPPPYTTFPGSKPKFDWVSAPDGPERHFRFNGAGGGIGAPRRRAAALSGPWGSPPPPPEQIHSAPGPRRPAPALLAPPTFIFPAPTNGEPMRPGPPGLQELPPLPPPTPPPTLQPPALQPTPLPVAPPLTPGLGHKESALAPTAAPALPPALAADQAPAPSPAPAPTVAEPSPPVSAPAPAAAPIKTRTRRNKGSRAARGATRA

SEQ ID NO: 21941 - protein, 291 aa, Homo sapiens
MCPRKEQDSWSEAGGILFKGKVPMVVLQDILAVRPPQIKSLPATPQGKNMTPESEVLESFPEEDSVLSHSSLSSPSSTSSPEGPPAPPKQHSSTSPFPTSTPLRRDQERLGKQLKLRAEREEKEKLKEEAKRAKEEAKKKKEEEKELKEKERREKREKDEKEKAEKQRLKEERRKERQEALEAKLEEKRKKEEEKRLREEEKRIKAEKAEITRFFQKPKTPQAPKTLAGSCGKFAPFEIKEHMVLAPRRRTAFHPDLCSQLDQLLQQQSGEFSFLKDLKGRQPLRSGPTHV

SEQ ID NO: 21942 - protein, 899 aa, Homo sapiens
GVFRCTFSVASWPCSTDAETIVQAEALASTVTLTAIAESPVIEVETEKKDVLDFGDLTYGGWKALPLKLINRTHATVPIRLIINANAVAWRCFTFSKESVRAPVEVAPCADVVTRLAGPSVVNHMMPASYDGQDPEFLMIWVLFHSPKKQISSSDILDSAEEFSAKVDIEVDSPNPTPVLRSVSLRARAGIARIHAPRDLQTMHFLAKVASSRKQHLPLKNAGNIEVYLDIKVPEQGSHFSVDPKNLLLKPGEEHEVIVSFTPKDPEACEERILKIFVQPFGPQYEVVLKGEVISSGSKPLSPGPCLDIPSILSNKQFLAWGGVPLGRTQLQKLALRNNSASTTQHLRLLIRGQDQDCFQLQNTFGSEQRLTSNCEIRIHPKEDIFISVLFAPTRLSCMLARLEIKQLGNRSQPGIKFTIPLSGYGGTSNLILEGVKKLSDSYMVTVNGLVPGKESKIVFSVRNTGSRAAFVKAVGFKDSQKKVLLDPKVLRIFPDKFVLKERTQENVTLIYNPSDRGINNKTATELSTVYLFGGDEISRQQYRRALLHKPEMIKQILPEHSVLQNINFVEAFQDELLVTEVYDLPQRPNDVQLFYGSMCKIILSVIGEFRDCISSREFLQPSSKASLESTSDLGASGKHGGNVSLDVLPVKGPQGSPLLSRAARPPLDQLASEEPWTVLPEHLILVAPSPCDMAKTGRFQIVNNSVRLLRFELCWPAHCLTVTPQHGCVAPESKLQILVSPNSSLSTKQSMFPWSGLIYIHCDDGQKKIVKVQIREDLTQVELLTRLTSKPFGILSPVSEPSVSHLVKPMTKPPSTKVEIRNKSITFPTTEPGETSESCLELENHGTTDVKWHLSSLAPPYVKGVDESGDVFRATYAAFRCSPISGLLESHGIQKQAA

SEQ ID NO: 21943 - protein, 454 aa, Homo sapiens
MAVLGVQLVVTLLTATLMHRLAPHCSFARWLLCNGSLFRYKHPSEEELRALAGKPRPRGRKERWANGLSEEKPLSVPRDAPFQLETCPLTTVDALEAYYYMLGPAKETNIAVFWCLLTVTFSIKMFLTVTRLYFSAEEGGERSVCLTFAFLFLLLAMLVQVVREETLELGLEPGLASMTQNLEPLLKKQGWDWALPVAKLAIRVGLAVVGSVLGAFLTFPGLRLAQTHRDALTMSEDRPMLQFLLHTSFLSPLFILWLWTKPIARDFLHQPPFGETRFSLLSDSAFDSGRLWLLVVLCLLRLAVTRPHLQAYLCLAKARVEQLRREAGRIEAREIQQRVVRVYCYVTVVSLQYLTPLILTLNCTLLLKTLGGYSWGLGPAPLLSPDPSSASAAPIGSGEDEVQQTAARIAGALGGLLTPLFLRGVLAYLIWWTAACQLLASLFGLYFHQHLAGS

SEQ ID NO: 21944 - protein, 265 aa, Homo sapiens
MTTSPILQLLLRLSLCGLLLQRAETGSKGQTAGELYQRWERYRRECQETLAAAEPPSGLACNGSFDMYVCWDYAAPNATARASCPWYLPWHHHVAAGFVLRQCGSDGQWGLWRDHTQCENPEKNEAFLDQRLILERLQVMYTVGYSLSLATLLLALLILSLFRRLHCTRNYIHINLFTSFMLRAAAILSRDRLLPRPGPYLGDQALALWNQALAACRTAQIVTQYCVGANYTWLLVEGVYLHSLLVLVGGSEEGHFRYYLLLGWD

SEQ ID NO: 21945 - protein, 156 aa, Homo sapiens
VHPENEDWTCFEQSASLDIKSFFGFESTVEKIAMKQYTSNIKKGKEIIEYYLRQLEEEGITFVPRWSPPSITTSSETSSSSSKKQAASMAVVIPEAALKEGLSGDALSSPSAPEPVVGTPDGGSGRGFIPRARLGKSALPFSLCLLCLFPLPWNIR

SEQ ID NO: 21946 - protein, 455 aa, Homo sapiens
MDTVVFEDVVVDFTLEEWALLNPAQRKLYRDVMLETFKHLASVDNEAQLKASGSISQQDTSGEKLSLKQKIEKFTRKNIWASLLGKNWEEHSVKDKHNTKERHLRNPRVERPCKSSKGNKRGRTFRKTRNCNRHLRKNCCTSVRRYECSQCGKLFTHSSSLIRHKRAHSGQKLYKCKECGKAFSRPSYLQTHEKTHSGEKPYACQSCGKTFLRSHSLTEHVRTHTGEKPYECGQCGKGFSCPKSFRAHVMMHAGGRPYECKHCGKAFRCQKSFRVHMIMHAGGRPYECKQCGKAYCWATSFQRHVRIHNGEKPYKCGKCGKAFGWPSSLHKHARTHAKKKPVSGGSVGKSSARPRPSTDVKSQTREKVYKCETCGKTYGWSSSLHKHERKHTGEKPVNAASVGKPSGGLCSSKNVRTQIGQKPSKCEKCGKAFSCPKAFQGHVRSHTGKKSCTSK

SEQ ID NO: 21947 - protein, 289 aa, Homo sapiens
MADQIPLYPVRSAAAAAANRKRAAYYSAAGPRPGADRHSRYQLEDESAHLDEMPLMMSEEGFENEESDYHTLPRARIMQRKRGLEWFVCDGWKFLCTSCCGWLINICRRKKELKARTVWLGCPEKCEEKHPRNSIKNQKYNVFTFIPGVLYEQFKFFLNLYFLVISCSQFVPALKIGYLYTYWAPLGFVLAVTMTREAIDEFRRFQRDKEVNSQLYSKLTVRGKVQVKSSDIQVGDLIIVEKNQRIPSDMVFLRTSEKAGPFFYQCLCLCSETTNGHSQFRRHIYQGRQ

SEQ ID NO: 21948 - protein, 574 aa, Homo sapiens
MWPSLLLLLLLPGPPPVAGLEDAAFPHLGESLQPLPRACPLRCSCPRVDTVDCDGLDLRVFPDNITRAAQHLSLQNNQLQELPYNELSRLSGLRTLNLHNNLISSEGLPDEAFESLTQLQHLCVAHNKLSVAPQFLPRSLRVADLAANQVMEIFPLTFGEKPALRSVYLHNNQLSNAGLPPDAFRGSEAIATLSLSNNQLSYLPPSLPPSLERLHLQNNLISKVPRGALSRQTQLRELYLQHNQLTDSGLDATTFSKLHSLEYLDLSHNQLTTVPAGLPRTLAILHLGRNRIRQVEAARLHGARGLRYLLLQHNQLGSSGLPAGALRPLRGLHTLHLYGNGLDRVPPALPRRLRALVLPHNHVAALGARDLVATPGLTELNLAYNRLASARVHHRAFRRLRALRSLDLAGNQLTRLPMGLPTGLRTLQLQRNQLRMLEPEPLAGLDQLRELSLAHNRLRVGDIGPGTWHELQALQMLDLSHNELSFVPPDLPEALEELHLEGNRIGHVGPEAFLSTPRLRALFLRANRLHMTSIAAEAFLGLPNLRVVDTAGNPEQVLIRLPPTTPRGPRAGGP

SEQ ID NO: 21949 - protein, 1501 aa, Homo sapiens
MAPTWGPGMVSVVGPMGLLVVLLVGGCAAEEPPRFIKEPKDQIGVSGGVASFVCQATGDPKPRVTWNKKGKKVNSQRFETIEFDESAGAVLRIQPLRTPRDENVYECVAQNSVGEITVHAKLTVLREDQLPSGFPNIDMGPQLKVVERTRTATMLCAASGNPDPEITWFKDFLPVDPSASNGRIKQLRSGALQIESSEETDQGKYECVATNSAGVRYSSPANLYVRVRRVAPRFSILPMSHEIMPGGNVNITCVAVGSPMPYVKWMQGAEDLTPEDDMPVGRNVLELTDVKDSANYTCVAMSSLGVIEAVAQITVKSLPKAPGTPMVTENTATSITITWDSGNPDPVSYYVIEYKSKSQDGPYQIKEDITTTRYSIGGLSPNSEYEIWVSAVNSIGQGPPSESVVTRTGEQAPASAPRNVQARMLSATTMIVQWEEPVEPNGLIRGYRVYYTMEPEHPVGNWQKHNVDDSLLTTVGSLLEDETYTVRVLAFTSVGDGPLSDPIQVKTQQGVPGQPMNLRAEARSETSITLSWSPPRQESIIKYELLFREGDHGREVGRTFDPTTSYVVEDLKPNTEYAFRLAARSPQGLGAFTPVVRQRTLQSISPKNFKVKMIMKTSVLLSWEFPDNYNSPTPYKIQYNGLTLDVDGRTTKKLITHLKPHTFYNFVLTNRGSSLGGLQQTVTAWTAFNLLNGKPSVAPKPDADGFIMVYLPDGQSPVPVQSYFIVMVPLRKSRGGQFLTPLGSPEDMDLEELIQDISRLQRRSLRHSRQLEVPRPYIAARFSVLPPTFHPGDQKQYGGFDNRGLEPGHRYVLFVLAVLQKSEPTFAASPFSDPFQLDNPDPQPIVDGEEGLIWVIGPVLAVVFIICIVIAILLYKNKPDSKRKDSEPRTKCLLNNADLAPHHPKDPVEMRRINFQTPGMLSHPPIPIADMAEHTERLKANDSLKLSQEYESIDPGQQFTWEHSNLEVNKPKNRYANVIAYDHSRVILQPIEGIMGSDYINANYVDGYRCQNAYIATQGPLPETFGDFWRMVWEQRSATIVMMTRLEEKSRIKCDQYWPNRGTETYGFIQVTLLDTIELATFCVRTFSLHKNGSSEKREVRQFQFTAWPDHGVPEYPTPFLAFLRRVKTCNPPDAGPIVVHCSAGVGRTGCFIVIDAMLERIKPEKTVDVYGHVTLMRSQRNYMVQTEDQYSFIHEALLEAVGCGNTEVPARSLYAYIQKLAQVEPGEHVTGMELEFKRLANSKAHTSRFISANLPCNKFKNRLVNIMPYESTRVCLQPIRGVEGSDYINASFIDGYRQQKAYIATQGPLAETTEDFWRMLWENNSTIVVMLTKLREMGREKCHQYWPAERSARYQYFVVDPMAEYNMPQYILREFKVTDARDGQSRTVRQFQFTDWPEQGVPKSGEGFIDFIGQVHKTKEQFGQDGPISVHCSAGVGRTGVFITLSIVLERMRYEGVVDIFQTVKMLRTQRPAMVQTEDEYQFCYQAALEYLGSFDHYAT

SEQ ID NO: 21950 - protein, 1162 aa, Homo sapiens
MASLLPLLCLCVVAAHLAGARDATPTEEPMATALGLERRSVYTGQPSPALEDWEARAVPAEASEWTSWFNVDHPGGDGDFESLAAIRFYYGPARVCPRPLALEARTTDWALPSAVGERVHLNPTRGFWCLNREQPRGRRCSNYHVRFRCPLEASWGAWGPWGPCSGSCGPGRRLRRRHCPSPAGDACPGRPLEAQKCVRPRCPGCSLDTCECPDHILLGSVVTPSGQPLLGARVSLRDQPGTVATSDAHGTFRVPGVCADSRANIRAQMDGFSAGEAQAQANGSISVVTIILDKLEKPYLVKHPESRVREAGQNVTFCCKASGTPMPKKYSWFHNGTLLDRRAHGYGAHLELRGLRPDQAGIYHCKAWNEAGAVRSGTARLTVLAPGQPACDPRPREYLIKLPEDCGQPGSGPAYLDVGLCPDTRCPSLAGSSPRCGDASSRCCSVRRLERREIHCPGYVLPVKVVAECGCQKCLPPRGLVRGRVVAADSGEPLRFARILLGQEPIGFTAYQGDFTIEVPPSTQRLVVTFVDPSGEFMDAVRVLPFDPRGAGVYHEVKAMRKKAPVILHTSQSNTIPLGELEDEAPLGELVLPSGAFRRADGKPYSGPVEARVTFVDPRDLTSAASAPSDLRFVDSDGELAPLRTYGMFSVDLRAPGSAEQLQVGPVAVRVAASQIHMPGHVEALKLWSLNPETGLWEEESGFRREGSSGPRVRREERVFLVGNVEIRERRLFNLDVPERRRCFVKVRAYANDKFTPSEQVEGVVVTLVNLEPAPGFSANPRAWGRFDSAVTGPNGACLPAFCDADRPDAYTALVTATLGGEELEPAPSLPRPLPATVGVTQPYLDRLGYRRTDHDDPAFKRNGFRINLAKPRPGDPAEANGPVYPWRSLRECQGAPVTASHFRFARVEADKYEYNVVPFREGTPASWTGDLLAWWPNPQEFRACFLKVKIQGPQEYMVRSHNAGGSHPRTRGQLYGLRDARSVRDPERPGTSAACVEFKCSGMLFDQRQVDRTLVTIMPQGSCRRVAVNGLLRDYLTRHPPPVPAEDPAAFSMLAPLDPLGHNYGVYTVTDQSPRLAKEIAIGRCFDGSSDGFSREMKADAGTAVTFQCREPPAGRPSLFQRLLESPATALGDIRREMSEAAQAQARASGPLRTRRGRVRQ

SEQ ID NO: 21951 - protein, 471 aa, Homo sapiens
APAVPAPSQKAPAVPAPSQKAPAIPAPSRKASAASASPRKASAVPAPPQKTPPPSQKAPSVPTIPQKAVSPTAPKKKSLLLPAPSQKALPTSPTEYQMALSPPASRGKLPGDFDVLPTGIPGRAVLERSQSGGKPEPVVTVRTQETDVVEMTTQAKSPESPFTVTKKESKDILISQTKEVTLEAFRGQGKLEDWAHWAKLEERSPDLPGVRSKELEQRKRWVKAKELAVEGPSQEHSRPFSVEALTLTKLMITANSKEQPSKSALVSLPSWLLATPQASATSMMASVPSRPGQLSLLEGKPVVVREQPESHTWVKEGKRPWGEMKEQPWGEMKEPPWDPKGPPKVPFRSKPTSASLKREGISQAPIPLTASPWEDLRPSPLSETLISKMEATARASQQPKRVSQEPMRMPAQHPLATVGSSSEILLPMLLELETVRNTATKAEEIQEESGVLNLLPSLQHSQHSEWPDAGA

SEQ ID NO: 21952 - protein, 917 aa, Homo sapiens
MAETLSGLGDSGAAGAAALSSASSETGTRRLSDLRVIDLRAELRKRNVDSSGNKSVLMERLKKAIEDEGGNPDEIEITSEGNKKTSKRSSKGRKPEEEGVEDNGLEENSGDGQEDVETSLENLQDIDIMDISVLDEAEIDNGSVADCVEDDDADNLQESLSDSRELVEGEMKELPEQLQEHAIEDKETINNLDTSSSDFTILQEIEEPSLEPENEKILDILGETCKSEPVKEESSELEQPFAQDTSSVGPDRKLAEEEDLFDSAHPEEGDLDLASESTAHAQSSKADSLLAVVKREPAEQPGDGERTDCEPVGLEPAVEQSSAASELAEASSEELAEAPTEAPSPEARDSKEDGRKFDFDACNEVPPAPKESSTSEGADQKMSSPEDDSDTKRLSKEEKGRSSCGRNFWVSGLSSTTRATDLKNLFSKYGKVVGAKVVTNARSPGARCYGFVTMSTAEEATKCINHLHKTELHGKMISVEKAKNEPVGKKTSDKRDSDGKKEKSSNSDRSTNLKRDDKCDRKDDAKKGDDGSGEKSKDQDDQKPGPSERSRATKSGSRGTERTVVMDKSKGVPVISVKTSGSKERASKSQDRKSASREKRSVVSFDKVKEPRKSRDSESHSRVRERSEREQRMQAQWEREERERLEIARERLAFQRQRLERERMERERLERERMHVEHERRREQERIHREREELRRQQELRYEQERRPAVRRPYDLDRRDDAYWPEAKRAALDERYHSDFNRQDRFHDFDHRDRGRYPDHSVDRREGSRSMMGEREGQHYPERHGGPERHGRDSRDGWGGYGSDKRMSEGRGLPPPPRGRRDWGDHGRREDDRSWQGTADGGMMDRDHKRWQGGERSMSGHSGPGHMMNRGGMSGRGSFAPGGASRGHPIPHGGMQGGFGGQSRGSRPSDARFTRRY

SEQ ID NO: 21953 - protein, 118 aa, Homo sapiens
DAGAVCDGMPLGYVPPTAPTDSNNSTPREAASRPPSTMTSQAPGTAGVSPPPASPTVLWEPGPEAGPPGLDSISDPFSWSWIPGLGRDRDAWLPGELATKPSASVTASVLEKTTTKAP

SEQ ID NO: 21954 - protein, 917 aa, Homo sapiens
MSTAIREVGVWRQTRTLLLKNYLIKCRTKKSSVQEILFPLFFLFWLILISMMHPNKKYEEVPNIELNPMDKFTLSNLILGYTPVTNITSSIMQKVSTDHLPDVIITEEYTNEKEMLTSSLSKPSNFVGVVFKDSMSYELRFFPDMIPVSSIYMDSRAGCSKSCEAAQYWSSGFTVLQASIDAAIIQLKTNVSLWKELESTKAVIMGETAVVEIDTFPRGVILIYLVIAFSPFGYFLAIHIVAEKEKKIKEFLKIMGLHDTAFWLSWVLLYTSLIFLMSLLMAVIATASLLFPQSSSIVIFLLFFLYGLSSVFFALMLTPLFKKSKHVGIVEFFVTVAFGFIGLMIILIESFPKSLVWLFSPFCHCTFVIGIAQVMHLEDFNEGASFSNLTAGPYPLIITIIMLTLNSIFYVLLAVYLDQVIPGEFGLRRSSLYFLKPSYWSKSKRNYEELSEGNVNGNISFSEIIEPVSSEFVGKEAIRISGIQKTYRKKGENVEALRNLSFDIYEGQITALLGHSGTGKSTLMNILCGLCPPSDGFASIYGHRVSEIDEMFEARKMIGICPQLDIHFDVLTVEENLSILASIKGIPANNIIQEVQKVLLDLDMQTIKDNQAKKLSGGQKRKLSLGIAVLGNPKILLLDEPTAGMDPCSRHIVWNLLKYRKANRVTVFSTHFMDEADILADRKAVISQGMLKCVGSSMFLKSKWGIGYRLSMYIDKYCATESLSSLVKQHIPGATLLQQNDQQLVYSLPFKDMDKFSGLFSALDSHSNLGVISYGVSMTTLEDVFLKLEVEAEIDQADYSVFTQQPLEEEMDSKSFDEMEQSLLILSETKAALVSTMSLWKQQMYTIAKFHFFTLKRESKSVRSVLLLLLIFFTVQIFMFLVHHSFKNAVVPIKLVPDLYFLKPGDKPHKYKTSLLL

SEQ ID NO: 21955 - protein, 528 aa, Homo sapiens
RLFWNEVRPFDWPCKNNRRCREFLWSKLEPIKVDTSRLEHLFESKSKELSVSKKTAADGKRQEIIVLDSKRSNAINIGLTVLPPPRTIKIAILNFDEYALNKEGIEKILTMIPTDEEKQKIQEAQLANPEIPLGSAEQFLLTLSSISELSARLHLWAFKMDYETTEKEVAEPLLDLKEGIDQLENNKTLGFILSTLLAIGNFLNGTNAKAFELSYLEKVPEVKDTVHKQSLLHHVCTMVVENFPDSSDLYSEIGAITRSAKVDFDQLQDNLCQMERRCKASWDHLKAIAKHEMKPVLKQRMSEFLKDCAERIIILKIVHRRIINRFHSFLLFMGHPPYAIREVNINKFCRIISEFALEYRTTRERVLQQKQKRANHRERNKTRGKMITDSGKFSGSSPAPPSQPQGLSYAEDAAEHENMKAVLKTSSPSVEDATPALGVRTRSRASRGSTSSWTMGTDDSPNVTDDAADEIMDRIVKSATQVPSQRVVPRERKRSRANRKSLRRTLKSGLTPEEARALGLVGTSELQL

SEQ ID NO: 21956 - protein, 856 aa, Homo sapiens
MIQAHISVSTQPNEVGPVAVLEFWVQALISQHLWYREQPILFLMDHLCKAAFQLMQEDCIQKLLYQQHKNALGYHCDRSLLSSLVSWIVAGNITPSFVEGLATPTQVWFAWTVLNMESIFEEDSQLRRVIEGELVINSAFTPDQALKKAQTQLKLPIVPSLQRLLIYRWAHQALVTPSDHPLLPLIWQKFFLLYLHRPGPQYGLPIDGCIGRRFFQSPAHINLLKEMKRRLTEVADFHHAASKALRVPAEGSEGLPESHSGTPGYLTSPELHKELVRLFNVYILWLEDENFQKGDTYIPSLPKHYDIHRLAKVMQNQQDLWMEYLNMERIYHEFQETVGLWTQAKLESHSTPCSLSVQLDFTDPLLAKERVLSNLRKHEAPQPPLALHPTKPPVPVISSAVLLSQKDATQLVCTDLNLLQQQARTAALRESQQVALDGELLDTMPKQYVNREEQTTLHLECRGSSGKKCQGAAVVTVQFEGMHKNEAISQQLHVLRKEVKQLQAEAAKPPSLNIVEAAVHAENLITALVNAYKLQPTPGIQKVGISLFFTIVDYVSDETQRHPPTRQFFTSCIEILGQVFISGIKSECRKVLETILKNSRLCSLLSPFFTPNAAPAEFIQLYEQVVKFLSEDNSDMIFMLLTKFDLKQWLSATKPPLSDRTRLLESIHLALTAWGLEPDEDILMPFNLFCKHWTYLLLYQFPDQYSDILRLLMQSSAEQLLSPECWKATLRALGCCAPSCQQGAASTEGAVLPSSSDALLSDKQVMETIQWLSDFFYKLRLSKMDFKSFGLFSKWSPYMADVKTFLGYLVKRLIDLEMTCLAQDPTASRKTVLKSLHSVIIQLFKPWILVLEDNER

SEQ ID NO: 21957 - protein, 154 aa, Homo sapiens
EKLVRVLFELARYHAPSTIFLDELESVMSQRGTASGGEHEGSLRMKTELLVQMDGLARSEDLVFVLAASNLPCLKAIALQPGDRARLRLKKKKSVLVHFHAAGEDISKTGKKKKLTGLTVSHGWGASESWRGAKDTSYMVAARENEEDARSGNP

SEQ ID NO: 21958 - protein, 466 aa, Homo sapiens
MTTSPILQLLLRLSLCGLLLQRAETGSKGQTAGELYQRWERYRRECQETLAAAEPPSGLACNGSFDMYVCWDYAAPNATARASCPWYLPWHHHVAAGFVLRQCGSDGQWGLWRDHTQCENPEKNEAFLDQRLILERLQVMYTVGYSLSLATLLLALLILSLFRRLHCTRNYIHINLFTSFMLRAAAILSRDRLLPRPGPYLGDQALALWNQALAACRTAQIVTQYCVGANYTWLLVEGVYLHSLLVLVGGSEEGHFRYYLLLGWGAPALFVIPWVIVRYLYENTQCWERNEVKAIWWIIRTPILMTILINFLIFIRILGILLSKLRTRQMRCRDYRLRLARSTLTLVPLLGVHEVVFAPVTEEQARGALRFAKLGFEIFLSSFQGFLVSVLYCFINKEVQSEIRRGWHHCRLRRSLGEEQRQLPERAFRALPSGSGPGEVPTSRGLSSGTLPGPGNEASRELESYC

SEQ ID NO: 21959 - protein, 161 aa, Homo sapiens
RETFSNFTASTEAQVKGLSTQGGNVGRKMKSLESQLEKQQKDLSEDHSSLLLHVKQFVSDLRSLSCQMAALQGNGSERTCCPVNWVEHERSCYWFSRSGKAWADADNYCRLEDAHLVVVTSWEEQKFVQHHIGPVNTWMGLHDQNGPWKWVDGTDYETGFK

SEQ ID NO: 21960 - protein, 250 aa, Homo sapiens
MSTAIREVGVWRQTRTLLLKNYLIKCRTKKSSVQEILFPLFFLFWLILISMMHPNKKYEEVPNIELNPMDKFTLSNLILGYTPVTNITSSIMQKVSTDHLPDVIITEEYTNEKEMLTSSLSKPSNFVGVVFKDSMSYELRFFPDMIPVSSIYMDSRAGCSKSCEAAQYWSSGFTVLQASIDAAIIQLKTNVSLWKELESTKAVIMGETAVVEIDTFPRGVILIYLVIAFSPFGYFLAIHIVAEKEKKIKE

SEQ ID NO: 21961 - protein, 950 aa, Homo sapiens
MHKRKGPPGPPGRGAAAARQLGLLVDLSPDGLMIPEDGANDEELEAEFLALVGGQPPALEKLKGKGPLPMEAIEKMASLCMRDPDEDEEEGTDEDDLEADDDLLAELNEVLGEEQKASETPPPVAQPKPEAPHPGLETTLQERLALYQTAIESARQAGDSAKMRRYDRGLKTLENLLASIRKGNAIDEADIPPPVAIGKGPASTPTYSPAPTQPAPRIASAPEPRVTLEGPSATAPASSPGLAKPQMPPGPCSPGPLAQLQSRQRDYKLAALHAKQQGDTTAAARHFRVAKSFDAVLEALSRGEPVDLSCLPPPPDQLPPDPPSPPSQPPTPATAPSTTEVPPPPRTLLEALEQRMERYQVAAAQAKSKGDQRKARMHERIVKQYQDAIRAHKAGRAVDVAELPVPPGFPPIQGLEATKPTQQSLVGVLETAMKLANQDEGPEDEEDEVPKKQNSPVAPTAQPKAPPSRTPQSGSAPTAKAPPKATSTRAQQQLAFLEGRKKQLLQAALRAKQKNDVEGAKMHLRQAKGLEPMLEASRNGLPVDITKVPPAPVNKDDFALVQRPGPGLSQEAARRYGELTKLIRQQHEMCLNHSNQFTQLGNITETTKFEKLAEDCKRSMDILKQAFVRGLPTPTARFEQRTFSVIKIFPDLSSNDMLLFIVKGINLPTPPGLSPGDLDVFVRFDFPYPNVEEAQKDKTSVIKNTDSPEFKEQFKLCINRSHRGFRRAIQTKGIKFEVVHKGGLFKTDRVLGTAQLKLDALEIACEVREILEVLDGRRPTGGRLEVMVRIREPLTAQQLETTTERWLVIDPVPAAVPTVAGPKGKAPPVPAPARESGNRSARPLHSLSVLAFDQERLERKILALRQARRPVPPEVAQQYQDIMQRSQWQRAQLEQGGVGIRREYAAQLERQLQFYTEAARRLGNDGSRDAAKEALYRRNLVESELQRLRR

SEQ ID NO: 21962 - protein, 1948 aa, Homo sapiens
MAPTWGPGMVSVVGPMGLLVVLLVGGCAAEEPPRFIKEPKDQIGVSGGVASFVCQATGDPKPRVTWNKKGKKVNSQRFETIEFDESAGAVLRIQPLRTPRDENVYECVAQNSVGEITVHAKLTVLREDQLPSGFPNIDMGPQLKVVERTRTATMLCAASGNPDPEITWFKDFLPVDPSASNGRIKQLRSETFESTPIRGALQIESSEETDQGKYECVATNSAGVRYSSPANLYVRELREVRRVAPRFSILPMSHEIMPGGNVNITCVAVGSPMPYVKWMQGAEDLTPEDDMPVGRNVLELTDVKDSANYTCVAMSSLGVIEAVAQITVKSLPKAPGTPMVTENTATSITITWDSGNPDPVSYYVIEYKSKSQDGPYQIKEDITTTRYSIGGLSPNSEYEIWVSAVNSIGQGPPSESVVTRTGEQAPASAPRNVQARMLSATTMIVQWEEPVEPNGLIRGYRVYYTMEPEHPVGNWQKHNVDDSLLTTVGSLLEDETYTVRVLAFTSVGDGPLSDPIQVKTQQGVPGQPMNLRAEARSETSITLSWSPPRQESIIKYELLFREGDHGREVGRTFDPTTSYVVEDLKPNTEYAFRLAARSPQGLGAFTPVVRQRTLQSKPSAPPQDVKCVSVRSTAILVSWRPPPPETHNGALVGYSVRYRPLGSEDPEPKEVNGIPPTTTQILLEALEKWTQYRITTVAHTEVGPGPESSPVVVRTDEDVPSAPPRKVEAEALNATAIRVLWRSPAPGRQHGQIRGYQVHYVRMEGAEARGPPRIKDVMLADAQWETDDTAEYEMVITNLQPETAYSITVAAYTMKGDGARSKPKVVVTKGAVLGRPTLSVQQTPEGSLLARWEPPAGTAEDQVLGYRLQFGREDSTPLATLEFPPSEDRYTASGVHKGATYVFRLAARSRGGLGEEAAEVLSIPEDTPRGHPQILEAAGNASAGTVLLRWLPPVPAERNGAIVKYTVAVREAGALGPARETELPAAAEPGAENALTLQGLKPDTAYDLQVRAHTRRGPGPFSPPVRYRTFLRDQVSPKNFKVKMIMKTSVLLSWEFPDNYNSPTPYKIQYNGLTLDVDGRTTKKLITHLKPHTFYNFVLTNRGSSLGGLQQTVTAWTAFNLLNGKPSVAPKPDADGFIMVYLPDGQSPVPVQSYFIVMVPLRKSRGGQFLTPLGSPEDMDLEELIQDISRLQRRSLRHSRQLEVPRPYIAARFSVLPPTFHPGDQKQYGGFDNRGLEPGHRYVLFVLAVLQKSEPTFAASPFSDPFQLDNPDPQPIVDGEEGLIWVIGPVLAVVFIICIVIAILLYKNKPDSKRKDSEPRTKCLLNNADLAPHHPKDPVEMRRINFQTPDSGLRSPLREPGFHFESMLSHPPIPIADMAEHTERLKANDSLKLSQEYESIDPGQQFTWEHSNLEVNKPKNRYANVIAYDHSRVILQPIEGIMGSDYINANYVDGYRCQNAYIATQGPLPETFGDFWRMVWEQRSATIVMMTRLEEKSRIKCDQYWPNRGTETYGFIQVTLLDTIELATFCVRTFSLHKNGSSEKREVRQFQFTAWPDHGVPEYPTPFLAFLRRVKTCNPPDAGPIVVHCSAGVGRTGCFIVIDAMLERIKPEKTVDVYGHVTLMRSQRNYMVQTEDQYSFIHEALLEAVGCGNTEVPARSLYAYIQKLAQVEPGEHVTGMELEFKRLANSKAHTSRFISANLPCNKFKNRLVNIMPYESTRVCLQPIRGVEGSDYINASFIDGYRQQKAYIATQGPLAETTEDFWRMLWENNSTIVVMLTKLREMGREKCHQYWPAERSARYQYFVVDPMAEYNMPQYILREFKVTDARDGQSRTVRQFQFTDWPEQGVPKSGEGFIDFIGQVHKTKEQFGQDGPISVHCSAGVGRTGVFITLSIVLERMRYEGVVDIFQTVKMLRTQRPAMVQTEDEYQFCYQAALEYLGSFDHYAT

SEQ ID NO: 21963 - protein, 146 aa, Homo sapiens
MGDERPHYYGKHGTPQKYDPTFKGPIYNRNKPYLFYFNIVKCASPLVLLEFQCPTPQICVEKCPDRYLTYLNARSSRDFEYYKQFCVPGFKNNKGVAEVLQDGDCPAVLIPSKPLARRCFPAIHAYKGVLMVGNETTYEDGHGSRK

SEQ ID NO: 21964 - protein, 1502 aa, Homo sapiens
MADRFSRFNEDRDFQGNHFDQYEEGHLEIEQASLDKPIESDNIGHRLLQKHGWKLGQGLGKSLQGRTDPIPIVVKYDVMGMGRMEMELDYAEDATERRRVLEVEKEDTEELRQKYKDYVDKEKAIAKALEDLRANFYCELCDKQYQKHQEFDNHINSYDHAHKQRLKDLKQREFARNVSSRSRKDEKKQEKALRRLHELAEQRKQAECAPGSGPMFKPTTVAVDEEGGEDDKDESATNSGTGATASCGLGSEFSTDKGGPFTAVQITNTTGLAQAPGLASQGISFGIKNNLGTPLQKLGVSFSFAKKAPVKLESIASVFKDHAEEGTSEDGTKPDEKSSDQGLQKVGDSDGSSNLDGKKEDEDPQDGGSLASTLSKLKRMKREEGAGATEPEYYHYIPPAHCKVKPNFPFLLFMRASEQMDGDNTTHPKNAPESKKGSSPKPKSCIKAAASQGAEKTVSEVSEQPKETSMTEPSEPGSKAEAKKALGGDVSDQSLESHSQKVSETQMCESNSSKETSLATPAGKESQEGPKHPTGPFFPVLSKDESTALQWPSELLIFTKAEPSISYSCNPLYFDFKLSRNKDARTKGTEKPKDIGSSSKDHLQGLDPGEPNKSKEVGGEKIVRSSGGRMDAPASGSACSGLNKQEPGGSHGSETEDTGRSLPSKKERSGKSHRHKKKKKHKKSSKHKRKHKADTEEKSSKAESGEKSKKRKKRKRKKNKSSAPADSERGPKPEPPGSGSPAPPRRRRRAQDDSQRRSLPAEEGSSGKKDEGGGGSSSQDHGGRKHKGELPPSSCQRRAGTKRSSRSSHRSQPSSGDEDSDDASSHRLHQKSPSQYSEEEEEEDSGSEHSRSRSRSGRRHSSHRSSRRSYSSSSDASSDQSCYSRQRSYSDDSYSDYSDRSRRHSKRSHDSDDSDYASSKHRSKRHKYSSSDDDYSLSCSQSRSRSRSHTRERSRSRGRSRSSSCSRSRSKRRSRSTTAHSWQRSRSYSRDRSRSTRSPSQRSGSRKRSWGHESPEERHSGRRDFIRSKIYRSQSPHYFRSGRGEGPGKKDDGRGDDSKATGPPSQNSNIGTGRGSEGDCSPEDKNSVTAKLLLEKIQSRKVERKPSVSEEVQATPNKAGPKLKDPPQGYFGPKLPPSLGNKPVLPLIGKLPATRKPNKKCEESGLERGEEQEQSETEEGPPGSSDALFGHQFPSEETTGPLLDPPPEESKSGEATADHPVAPLGTPAHSDCYPGDPTISHNYLPDPSDGDTLESLDSSSQPGPVESSLLPIAPDLEHFPSYAPPSGDPSIESTDGAEDASLAPLESQPITFTPEEMEKYSKLQQAAQQHIQQQLLAKQVKAFPASAALAPATPALQPIHIQQPATASATSITTVQHAILQHHAAAAAAAIGIHPHPHPQPLAQVHHIPQPHLTPISLSHLTHSIIPGHPATFLASHPIHIIPASAIHPGPFTFHPVPHAALYPTLLAPRPAAAAATALHLHPLLHPIFSGQDLQHPPSHGT

SEQ ID NO: 21965 - protein, 457 aa, Homo sapiens
MILQKCRKVLTENPNQEIATSLEFLLLQNSPGSLRAQQRMSYYGSSYHIINADAKYPGYPPEHIIAEKRRARRRLLHKDGSCNVYFKHIFGEWGSYVVDIFTTLVDTKWRHMFVIFSLSYILSWLIFGSVFWLIAFHHGDLLNDPDITPCVDNVHSFTGAFLFSLETQTTIGYGYRCVTEECSVAVLMVILQSILSCIINTFIIGAALAKMATARKRAQTIRFSYFALIGMRDGKLCLMWRIGDFRPNHVVEGTVRAQLLRYTEDSEGRMTMAFKDLKLVNDQIILVTPVTIVHEIDHESPLYALDRKAVAKDNFEILVTFIYTGDSTGTSHQSRSSYVPREILWGHRFNDVLEVKRKYYKVNCLQFEGSVEVYAPFCSAKQLDWKDQQLHIEKAPPVRESCTSDTKARRRSFSAVAIVSSCENPEETTTSATHEYRETPYQKALLTLNRISVESQM

SEQ ID NO: 21966 - protein, 53 aa, Homo sapiens
MTSPQLEWTLQTLLEQLNEDELKSFKSLLWAFPLEDVLQKTPWSEVEEADGKK

SEQ ID NO: 21967 - protein, 659 aa, Homo sapiens; identical to SEQ ID NO: 21896

SEQ ID NO: 21968 - protein, 327 aa, Homo sapiens
MNNSGADEIGKLFVGGLDWSTTQETLRSYFSQYGEVVDCVIMKDKTTNQSRGFGFVKFKDPNCVGTVLASRPHTLDGRNQKGPRSDNSKSNKIFVGGIPHNCGETELREYFKKFGVVTEVVMIYDAEKQRPRGFGFITFEDEQSVDQAVNMHFHDIMGKKVEVKRAEPRDSKSQAPGQPGASQWGSRVVPNAANGWAGQPPPTWQQGYGPQGMWVPAGQAIGGYGPPPAGRGAPPPPPPFTSYIVSTPPGGFPPPQGFPQGYGAPPQFSFGYGPPPPPPDQFAPPGVPPPPATPGAAPLAFPPPPSQAAPDMSKPPTAQPDFPYGQY

SEQ ID NO: 21969 - protein, 426 aa, Homo sapiens
MAGAGPAPGLPGAGGPVVPGPGAGIPGKSGEERLKEMEAEMALFEQEVLGAPVPGIPTAVPAVPTVPTVPTVEAMQVPAAPVIRPIIATNTYQQVQQTLEARAAAAATVVPPMVGGPPFVGPAAGPRPMALRPPHQALVGPPLPGPPGPPMMLPPMARAPGPPLGSMAALRPPLEEPAAPRELGLGLGLGLKEKEEAVVAAAAGLEEASAAVAVGAGGAPAGPAVIGPSLPLALAMPLPEPEPLPLPLEVVRGLLPPLRIPELLSLRPRPRPPRPEPPPGLMALEVPEPLGEDKKKGKPEKLKRCIRTAAGSSWEDPSLLEWDADDFRIFCGDLGNEVNDDILARAFSRFPSFLKAKVIRDKRTGKTKGYGFVSFKDPSDYVRAMREMNGKYVGSRPIKLRKSMWKDRNLDVVRKKQKEKKKLGLR

SEQ ID NO: 21970 - protein, 57 aa, Homo sapiens
MADTPRDAGLKQAPASRNEKAPVDFGYVGIDSILEQMRRKAMKQGFEFNIMVVERLG

SEQ ID NO: 21971 - protein, 558 aa, Homo sapiens
RTYGDSGKTKTVTRKKYERIVQLLNGSESSSTDNAKFKFWVKSKGFQLGQPDEVRGGGGGAKQVLYVPVKTTDGVGVDEKLSLRRVAVVEDFFDIIYSMHVETGPNGEQIRKHAGQKRTYKAISESYAFLPREAVTRFLMSCSECQKRMHLNPDGTDHKDNGKPPTLVTSMIDYNMPITMAYMKHMKLQLLNSQQDEDESSIESDEFDMSDSTRMSAVNSDLSSNLEERMQSPQNLHGQQDDDSAAESFNGNETLGHSSIASGGTHSREMGDSNSDGKTGLEQDEQPLNLSDSPLSAQLTSEYRIDDHNSNGKNKYKNLLISDLKMEREARENGSKSPAHSYSSYDSGKNESVDRGAEDLSLNRGDEDEDDHEDHDDSEKVNETDGVEAERLKAFNSRPIPSHLTSAVAESILASACESESRNAAKRMRLERQQDESAPADKQCKPEATQATYSTSAVPGSQDVLYINGNGTYSYHSYRGLGGGLLNLNDASSSGPTDLSMKRQLATSSGSSSSSNSRPQLSPTEINAVRQLVAGYRESAAFLLRSADELENLILQQN

SEQ ID NO: 21972 - protein, 44 aa, Homo sapiens
MDPLGAAKPQWPWRRCLAALLFQLLVAVCFFSYLRVSRDDATGS

SEQ ID NO: 21973 - protein, 613 aa, Homo sapiens
MEGDGSDPEPPDAGEDSKSENGENAPIYCICRKPDINCFMIGCDNCNEWFHGDCIRITEKMAKAIREWYCRECREKDPKLEIRYRHKKSRERDGNERDSSEPRDEGGGRKRPVPDPDLQRRAGSGTGVGAMLARGSASPHKSSPQPLVATPSQHHQQQQQQIKRSARMCGECEACRRTEDCGHCDFCRDMKKFGGPNKIRQKCRLRQCQLRARESYKYFPSSLSPVTPSESLPRPRRPLPTQQQPQPSQKLGRIREDEGAVASSTVKEPPEATATPEPLSDEDLPLDPDLYQDFCAGAFDDHGLPWMSDTEESPFLDPALRKRAVKVKHVKRREKKSEKKKEERYKRHRQKQKHKDKWKHPERADAKDPASLPQCLGPGCVRPAQPSSKYCSDDCGMKLAANRIYEILPQRIQQWQQSPCIAEEHGKKLLERIRREQQSARTRLQEMERRFHELEAIILRAKQQAVREDEESNEGDSDDTDLQIFCVSCGHPINPRVALRHMERCYAKYESQTSFGSMYPTRIEGAKHTVSGSRCCAPSTHGTPKCQLTRYAGAPLYVMSLSSRVTSAACPSASAIAITAGRSCGVRKWTWSACVCGTSWTSCLSRSAMCAQP

SEQ ID NO: 21974 - protein, 970 aa, Homo sapiens
APWTILGLDAMYVIMWITYMAFLLVFFGAFFAVWCYRKRYFVSEYTPIDSNIAFSVNASDKGTAWLLTSTFPSSPVLPGEASCCDPVSAAFEGCLRRLFTRWGSFCVRNPGCVIFFSLVFITACSSGLVFVRVTTNPVDLWSAPSSQARLEKEYFDQHFGPFFRTEQLIIRAPLTDKHIYQPYPSGADVPFGPPLDIQILHQVLDLQIAIENITASYDNETVTLQDICLAPLSPYNTNCTILSVLNYFQNSHSVLDHKKGDDFFVYADYHTHFLYCVRFINFVKNYKNPNLTISFTAERSIEDELNRESDSDVFTVVISYAIMFLYISLALGHMKSCRRLLVDSKVSLGIAGILIVLSSVACSLGVFSYIGLPLTLIVIEVIPFLVLAVGVDNIFILVQAYQRDERLQGETLDQQLGRVLGEVAPSMFLSSFSETVAFFLGALSVMPAVHTFSLFAGLAVFIDFLLQITCFVSLLGLDIKRQEKNRLDIFCCVRGAEDGTSVQASESCLFRFFKNSYSPLLLKDWMRPIVIAIFVGVLSFSIAVLNKVDIGLDQSLSMPDDSYMVDYFKSISQYLHAGPPVYFVLEEGHDYTSSKGQNMVCGGMGCNNDSLVQQIFNAAQLDNYTRIGFAPSSWIDDYFDWVKPQSSCCRVDNITDQFCNASVVDPACVRCRPLTPEGKQRPQGGDFMRFLPMFLSDNPNPKCGKGGHAAYSSAVNILLGHGTRVGATYFMTYHTVLQTSADFIDALKKARLIASNVTETMGINGSAYRVFPYSVFYVFYEQYLTIIDDTIFNLGVSLGAIFLVTMVLLGCELWSAVIMCATIAMVLVNMFGVMWLWGISLNAVSLVNLVMSCGISVEFCSHITRAFTVSMKGSRVERAEEALAHMGSSVFSGITLTKFGGIVVLAFAKSQIFQIFYFRMYLAMVLLGATHGLIFLPVLLSYIGPSVNKAKSCATEERYKGTERERLLNF

SEQ ID NO: 21975 - protein, 622 aa, Homo sapiens
TNFATLRWIDYGKVATQCTCRKDMVKISMDVFVRILQPERYELWKQGKDLTVLDHTRPTALTSPELSSWSASRASLKAKLLRRQISLKENRHWRKTEEERKPSLERKKEQTKRPGLSSHRKRSQPKKPKPEDPKFPGEGTAGAALLEEAGGSVKEEAGPEVDPEEEEEEPQPLPHGREAEGAEEDGRGKLRPTKAKSERKKKSFGLLPPQLPPPPAHFPSEEALWLPSPLEPPVLGPGPAAMEESPLPAPLNVVPPEVPSEELEAKPRPIIPMLYVVPRPGKAAFNQEHVSCQQAFEHFAQKGPTWKEPVSPMELTGPEDGAASSGAGRMETKARAGEGQAPSTFSKLKMEIKKSRRHPLGRPPTRSPLSVVKQEASSDEEASPFSGEEDVSDPDALRPLLSLQWKNRAASFQAERKFNAAAARTEPYCAICTLFYPYCQALQTEKEAPIASLGEGCPATLPSKSRQKTRPLIPEMCFTSGGENTEPLPANSYIGDDGTSPLIACGKCCLQVHASCYGIRPELVNEGWTCSRCAAHAWTAECCLCNLRGGALQMTTDRRWIHVICAIAVPEARFLNVIERHPVDISAIPEQRWKLVRSLGPGGAWPIMAWAAALQGCLLHTL

SEQ ID NO: 21976 - protein, 406 aa, Homo sapiens
MNNSGADEIGKLFVGGLDWSTTQETLRSYFSQYGEVVDCVIMKDKTTNQSRGFGFVKFKDPNCVGTVLASRPHTLDGRNIDPKPCTPRGMQPERTRPKEGWQKGPRSDNSKSNKIFVGGIPHNCGETELREYFKKFGVVTEVVMIYDAEKQRPRGFGFITFEDEQSVDQAVNMHFHDIMGKKVEVKRAEPRDSKSQAPGQPGASQWGSRVVPNAANGWAGQPPPTWQQGYGPQGMWVPAGQAIGGYGPPPAGRGAPPPPPPFTSYIVSTPPGGFPPPQGFPQGYGAPPQFSFGYGPPPPPPDQFAPPGVPPPPATPGAAPLAFPPPPSQAAPDMSKPPTAQPDFPYGQYGYGQDLSGFGQGFSDPSQQPPSYGGPSVPGSGGPPAGGSGFGRGQNHNVQGFHPYRR

SEQ ID NO: 21977 - protein, 1090 aa, Homo sapiens
MAVALGTRRRDRVKLWADTFGGDLYNTVTKYSGSLLLQKKYKDVESSLKIEEVDGLELVRKFSEDMENMLRRKVEAVQNLVEAAEEADLNHEFNESLVFDYYNSVLINERDEKGNFVELGAEFLLESNAHFSNLPVNTSISSVQLPTNVYNKDPDILNGVYMSEALNAVFVENFQRDPTLTWQYFGSATGFFRIYPGIKWTPDENGVITFDCRNRGWYIQAATSPKDIVILVDVSGSMKGLRMTIAKHTITTILDTLGENDFINIIAYNDYVHYIEPCFKGILVQADRDNREHFKLLVEELMVKGVGVVDQALREAFQILKQFQEAKQGSLCNQAIMLISDGAVEDYEPVFEKYNWPDCKVRVFTYLIGREVSFADRMKWIACNNKGYYTQISTLADTQENVMEYLHVLSRPMVINHDHDIIWTEAYMDSKLLSSQAQSLTLLTTVAMPVFSKKNETRSHGILLGVVGSDVALRELMKLAPRYKLGVHGYAFLNTNNGYILSHPDLRPLYREGKKLKPKPNYNSVDLSEVEWEDQAESLRTAMINRETGTLSMDVKVPMDKGKRVLFLTNDYFFTDISDTPFSLGVVLSRGHGEYILLGNTSVEEGLHDLLHPDLALAGDWIYCITDIDPDHRKLSQLEAMIRFLTRKDPDLECDEELVREVLFDAVVTAPMEAYWTALALNMSEESEHVVDMAFLGTRAGLLRSSLFVGSEKVSDRKFLTPEDEASVFTLDRFPLWYRQASEHPAGSFVFNLRWAEGPESAGEPMVVTASTAVAVTVDKRTAIAAAAGVQMKLEFLQRKFWAATRQCSTVDGPCTQSCEDSDLDCFVIDNNGFILISKRSRETGRFLGEVDGAVLTQLLSMGVFSQVTMYDYQAMCKPSSHHHSAAQPLVSPISAFLTATRWLLQELVLFLLEWSVWGSWYDRGAEAKSVFHHSHKHKKQDPLQPCDTEYPVFVYQPAIREANGIVECGPCQKVFVVQQIPNSNLLLLVTDPTCDCSIFPPVLQEATEVKYNASVKCDRMRSQKLRRRPDSCHAFHPEVRVEADRGWAGFSSPNPLCLGLCPCRQEHIGMPMNTPVPVLLGGNIRVYAL

SEQ ID NO: 21978 - protein, 1115 aa, Homo sapiens
MQSDLARLQEGRQPEHRDVTLQKVLDSEKLLYVLEADAAIAKHMKHPQGDMIAEDIRQLKERVTNLRGKHKQIYRLAVKEVDPQAQKSLLGEVEQNLQAAKQCSSTLASRFQEHCPDLERQEAEVHKLGQRFNNLRQQVERRAQSLQSAKAAYEHFHRGHDHVLQFLVSIPSYEPQETDSLSQMETKLKNQKNLLDEIASREQEVQKICANSQQYQQAVKDYELEAEKLRSLLDLENGRRSHVSKRARLQSPATKVKEEEAALAAKFTEVYAINRQRLQNLEFALNLLRQQPEVEVTHETLQRNRPDSGVEEAWKIRKELDEETERRRQLENEVKSTQEEIWTLRNQGPQESVVRKEVLKKVPDPVLEESFQQLQRTLAEEQHKNQLLQEELEALQLQLRALEQETRDGGQEYVVKEVLRIEPDRAQADEVLQLREELEALRRQKGAREAEVLLLQQRVAALAEEKSRAQEKVTEKEVVKLQNDPQLEAEYQQLQEDHQRQDQLREKQEEELSFLQDKLKRLEKERAMAEGKITVKEVLKVEKDAATEREVSDLTRQYEDEAAKARASQREKTELLRKIWALEEENAKVVVQEKVREIVRPDPKAESEVANLRLELVEQERKYRGAEEQLRSYQSELEALRRRGPQVEVKEVTKEVIKYKTDPEMEKELQRLREEIVDKTRLIERCDLEIYQLKKEIQALKDTKPQVQTKEVVQEILQFQEDPQTKEEVASLRAKLSEEQKKQVDLERERASQEEQIARKEEELSRVKERVVQQEVVRYEEEPGLRAEASAFAESIDVELRQIDKLRAELRRLQRRRTELERQLEELERERQARREAEREVQRLQQRLAALEQEEAEAREKVTHTQKVVLQQDPQQAREHALLRLQLEEEQHRRQLLEGELETLRRKLAALEKAEVKEKVVLSESVQVEKGDTEQEIQRLKSSLEEESRSKRELDVEVSRLEARLSELEFHNSKSSKELDFLREENHKLQLERQNLQLETRRLQSEINMAATETRDLRNMTVADSGTNHDSRLWSLERELDDLKRLSKDKDLEIDELQKRLGSVAVKREQRENHLRRSIVVIHPDTGRELSPEEAHRAGLIDWNMFVKLRSQECD

SEQ ID NO: 21979 - protein, 2092 aa, Homo sapiens
MVLKVDTSESLWHIQISRSRFLLDSDGKRLICEVSLCKINSKVLKSGQLEDTCLVELSLALDLCLKVGISSRHLTAITVDVWTLHAELHEGLFQSQLLCQGPSLASKPVPCSEVTENLVEPTLPGLFLLQQLPDQVKVKMENTSVVLSMNSQKRHLTWTLKLLQFLYHRDEDQLPLRSFTANSDMAQMSTELLLEDGLLLSQSRQRIVCLNSLKASVQVTTIDLSASLVLNTCIIHYRHQEFSHWLHLLALETQGSSSPVLKQRKKRTFPQILAPIIFSTSISNVNISIQLGDTPPFALGFNSISLDYQHLRPQSIHQRGVLTVDHLCWRVGSDSHIQRAPHPPNMHVWGEALVLDSFTLQGSYNQPLGLSSTQSDTLFLDCTIRGLQVEASDTCAQCLSRILSLMGPQSGKSAVSRHSSFGESVSLLWKVDLKVEDMNLFTLSALVGASEVRLDTLTILGSAETSTVGIQGLVLALVKSVTEKMQPCCKAPDIPTPVLSLSMLSITYHSSIRSLEVQCGAGLTLLWSPPDHMYLYQHVLATLQCRDLLRATVFPETVPSLALETSGTTSELEGRAPEPLPPKRLLNLTLEVSTAKLTAFVAEDKFITLAAESVSLSRHGGSLQAYCPELAAGFDGNSIFNFKEVEVQLLPELEEMILHRNPFPALQTLRNRVWLLSFGSVSVEFPYQYDFSRTLDEAVGVQKWLKGLHQGTRAWASPSPVPLPPDLLLKVEHFSWVFLDDVFEVKLHDNYELMKDESKESAKRLQLLDAKVAALRKQHGELLPARKIEELYASLERKNIEIYIQRSRRLYGNTPMRRALLTWSLAGLELVALADASFHGPEHVVEQVQELDPGSPFPPEGLDLVIQWCRMLKCNVKSFLVRIRDYPRYLFEIRDWRLMGRLVGTEQSGQPCSRRRQILHLGLPWGNVAVERNMPPLKFYHDFHSEIFQYTVVWGPCWDPAWTLIGQCVDLLTKPSADPSPPLPWWDKSRLLFHGDWHMDIEQANLHQLATEDPYNTTENMHWEWSHLSFHWKPGQFVFKGDLDINVRTASKYDDCCFLHLPDLCMTLDLQWLCHGNPHDHHSVTLRAPEFLPEVPLGQLHDSYRAFRSENLNLSIKMDLTRHSGTISQPRILLYSSTLRWMQNFWATWTSVTRPICRGKLFNNLKPSKKKLGQHYKQLSYTALFPQLQVHYWASFAQQRGIQIECSQGHVFTRGTQRLIPQAGTVMRRLISDWSVTQMVSDLSQVTVHLMASPTEENADHCLDPLVTKTHLLSLSSLTYQRHSNRTAEEELSARDGDPTFHTHQLHLVDLRISWTTTNRDIAFGLYDGYKKAAVLKRNLSTEALKGLKIDPQMPAKKPKRGVPTSASAPPRVNTPSFSGQPDKGSSGGAYMLQKLIEETDRFVVFTEEESGMSDQLCGIAACQTDDIYNRNCLIELVNCQMVLRGAETEGCVIVSAAKAQLLQCQHHPAWYGDTLKQKTSWTCLLDGMQYFATTESSPTEQDGRQLWLEVKNIEEHRQRSLDSVQELMESGQAVGGMVTTTTDWNQPAEAQQAQQVQRIISRCNCRMYYISYSHDIDPELATQIKPPEVLENQEKEDLLKKQEGAVDTFTLIHHELEISTNPAQYAMILDIVNNLLLHVEPKRKEHSEKKQRVRFQLEISSNPEEQRSSILHLQEAVRQHVAQIRQLEKQMYSIMKSLQDDSKNENLLDLNQKLQLQLNQEKANLQLESEELNILIRCFKDFQLQRANKMELRKQQEDVSVVRRTEFYFAQARWRLTEEDGQLGIAELELQRFLYSKVNKSDDTAEHLLELGWFTMNNLLPNAVYKAILRPQSSCQSGRQLALRLFSKVRPPVGGISVKEHFEVNVVPLTIQLTHQFFHRMMGFFFPGRSVEDDEVGDEEDKSKLVTTGIPVVKPRQLIATDDAVPLGPGKGVAQGLTRSSGVRRSFRKSPEHPVDDIDKMKERAAMNNSFIYIKIPQVPLCVSYKGEKNSVDWGDLNLVLPCLEYHNNTWTWLDFAMAVKRDSRKALVAQVIKEKLRLKSATGSEVRGKLETKSDLNMQQQEEEEKARLLIGLSVGDKNPGKKSIFGRRK

SEQ ID NO: 21980 - protein, 391 aa, Homo sapiens
MFPDQPEKPLNLAHIVPPRPVTSMNDTLFSHSVPSSGSPFITRSSPPKDSEVEQNKLLARAAPAFLKGKGMLESSNRLDEEHRLIARYAARLAAESSSSQPPQQRSAPDISFTIDANKQQRQLIAELENKNREILQEIQRLRLEHEQASQPTPEKAQQNPTLLAELRLLRQRKDELEQRMSALQESRRELMVQLEGLMKLLKTQGAGSPRSSPSHTISRPIPMPIRSASACSTPTHTPQDSLTGVGGDVQEAFAQSSRRNLRNDLLVAADSITNTMSSLVKELNSEVGSETESNVDSEFARTQFEDLVPSPTSEKAFLAQIHARKPGYIHSGATTSTMRGDMVTEDADPYVQPEDENYENDSVRQLENELQMEEYLKQKLQDEAYQVSLQG

SEQ ID NO: 21981 - protein, 981 aa, Homo sapiens
QEQGDKMMEEYSLEKNERACIDFAISAKPLTRHMPQNKQSFQYRMWQFVVSPPFEYTIMAMIALNTIVLMMKFYGASVAYENALRVFNIVFTSLFSLECVLKVMAFGILNYFRDAWNIFDFVTVLGSITDILVTEFGNNFINLSFLRLFRAARLIKLLRQGYTIRILLWTFVQSFKALPYVCLLIAMLFFIYAIIGMQVFGNIGIDVEDEDSDEDEFQITEHNNFRTFFQALMLLFRSATGEAWHNIMLSCLSGKPCDKNSGILTRECGNEFAYFYFVSFIFLCSFLMLNLFVAVIMDNFEYLTRDSSILGPHHLDEYVRVWAEYDPAACGRIHYKDMYSLLRVISPPLGLGKKCPHRVACKRLLRMDLPVADDNTVHFNSTLMALIRTALDIKIAKGGADKQQMDAELRKEMMAIWPNLSQKTLDLLVTPHKSTDLTVGKIYAAMMIMEYYRQSKAKKLQAMREEQDRTPLMFQRMEPPSPTQEGGPGQNALPSTQLDPGGALMAHESGLKESPSWVTQRAQEMFQKTGTWSPEQGPPTDMPNSQPNSQSVEMREMGRDGYSDSEHYLPMEGQGRAASMPRLPAENQTISDTSPMKRSASVLGPKARRLDDYSLERVPPEENQRHHQRRRDRSHRASERSLGRYTDVDTGLGTDLSMTTQSGDLPSKERDQERGRPKDRKHRQHHHHHHHHHHPPPPDKDRYAQERPDHGRARARDQRWSRSPSEGREHMAHRQGSSSVSGSPAPSTSGTSTPRRGRRQLPQTPSTPRPHVSYSPVIRKAGGSGPPQQQQQQQQQQQQQAVARPGRAATSGPRRYPGPTAEPLAGDRPPTGGHSSGRSPRMERRVPGPARSESPRACRHGGARWPASGPHVSEGPPGPRHHGYYRGSDYDEADGPGSGGGEEAMAGAYDAPPPVRHASSGATGRSPRTPRASGPACASPSRHGRRLPNGYYPAHGLARPRGPGSRKGLHEPYSESDDDWC

SEQ ID NO: 21982 - protein, 101 aa, Homo sapiens
GLHACLQLGRLKDQDKAAPEMVSLLKRNNCGKALDIARQARDMLGGNGISDEYHVIRHAMNLEAVNTYEGELIHSTAAAETMTPTEPSPDPHPTPSSGSES

SEQ ID NO: 21983 - protein, 917 aa, Homo sapiens
MEVRGSFLAACRRRMATWRKNRDKDGFSNPGYRVRQKDLGMIHKAAIAGDVNKVMESILLRLNDLNDRDKKNRTALLLACAHGRPGVVADLVARKCQLNLTDSENRTALIKAVQCQEEVCASILLEHGANPNVRDMYGNTALHYAIDNENISMARKLLAYGADIEARSQDGHTSLLLAVNRKKEQMVAFLLKKKPDLTAIDNFGRTALILAARNGSTSVVYQLLQHNIDVFCQDISGWTAEDYAVASKFQAIRGMISEYKANKRCKSLQNSNSEQDLEMTSEGEQERLEGCESSQPQVEEKMKKCRNKKMEVSRNVHADDSDNYNDDVDELIHKIKNRKPDNHQSPGKENGEFDRLARKTSNEKSKVKSQIYFTDDLNDISGSSEKTSEDDELPYSDDENFMLLIEQSGMECKDFVSLSKSKNATAACGRSIEDQKCYCERLKVKFQKMKNNISVLQKVLSETDKTKSQSEHQNLQGKKKLCNLRFILQQQEEERIKAEELYEKDIEELKIMEEQYRTQTEVKKQSKLTLKSLEVELKTVRSNSNQNFHTHERERDLWQENHLMRDEIARLRLEIDTIKHQNQETENKYFKDIEIIKENNEDLEKTLKRNEEALTKTITRYSKELNVLMDENTMLNSELQKEKQSMSRLETEMESYRCRLAAALCDHDQRQSSKRDLQLAFQSTVNEWCHLQEDTNSHIQILSQQLSKAESTSSGLETELHYEREALKEKTLHIEHMQGVLSRTQRRLEDIEHMYQNDQPILEKYVRKQQSVEDGLFQLQSQNLLYQQQCNDARKKADNQEKTIINIQVKCEDTVEKLQAECRKLEENNKGLMKECTLLKERQCQYEKEKEEREVVRRQLQREVDDALNKQLLLEAMLEISSERRINLEDEAQSLKKKLGQMRSQVCMKLSMSTVTL

SEQ ID NO: 21984 - protein, 592 aa, Homo sapiens
MTCWLCVLSLPLLLLPAAPPPAGGCPARCECTVQTRAVACTRRRLTAVPDGIPAETRLLELSRNRIRCLNPGDLAALPALEELDLSENAIAHVEPGAFANLPRLRVLRLRGNQLKLIPPGVFTRLDNLTLLDLSENKLVILLDYTFQDLHSLRRLEVGDNDLVFVSRRAFAGLLALEELTLERCNLTALSGESLGHLRSLGALRLRHLAIASLEDQNFRRLPGLLHLEIDNWPLLEEVAAGSLRGLNLTSLSVTHTNITAVPAAALRHQAHLTCLNLSHNPISTVPRGSFRDLVRLRELHLAGALLAVVEPQAFLGLRQIRLLNLSNNLLSTLEESTFHSVNTLETLRVDGNPLACDCRLLWIVQRRKTLNFDGRLPACATPAEVRGDALRNLPDSVLFEYFVCRKPKIRERRLQRVTATAGEDVRFLCRAEGEPAPTVAWVTPQHRPVTATSAGRARVLPGGTLEIQDARPQDSGTYTCVASNAGGNDTYFATLTVRPEPAANRTPGEAHNETLAALRAPLDLTTILVSTAMGCITFLGVVLFCFVLLFVWSRGRGQHKNNFSVEYSFRKVDGPAAAAGQGGARKFNMKMI

SEQ ID NO: 21985 - protein, 231 aa, Homo sapiens
RMRGHYHCLRTGCYFVTNITTKLPWHIKKHEKAERRAANGFKYFTKREECGRLGCKYNQVNSHFHCIREGCQFSFLLKHQMTSHARKHMRRMLGKNFDRVPPSQGPPGLMDAETDECMDYTGCSPGAMSSESSTMDRSCSSTPVGNESTAAGCPAPPPPPLPPPAAAGDEAARTAPQPPATPSFSPATLRPPLPPLPCLFSPSCLSYSLLSATLGAGRGLAHPTCSPPSFP

SEQ ID NO: 21986 - protein, 132 aa, Homo sapiens
MLDQSLFWPPSEFSPVSDGFYLSHWTMKAGTLLSRHKERGVKCTDCPSSEKIALETSLSKELVASGMGWAAFNLSNVTGNSRILCSVYCNGSQITGSSNITVYRLPERVELAPLPPWQPVGQNFTLRCQVED

SEQ ID NO: 21987 - protein, 165 aa, Homo sapiens
MADTPRDAGLKQAPASRNEKAPVDFGYVGIDSILEQMRRKAMKQGFEFNIMVVGQSGLGKSTLINTLFKSKISRKSVQPTSEERIPKTIEIKSITHDIEEKGVRMKLTVIDTPGFGDHINNENCWQPIMKFINDQYEKYLQEEVNINRKKRIPDTRVHCCLYFIP

SEQ ID NO: 21988 - protein, 115 aa, Homo sapiens
MADTPRDAGLKQAPASRNEKAPVDFGYVGIDSILEQMRRKAMKQGFEFNIMVVGQSGLGKSTLINTLFKSKISRKSVQPTSEERIPKTIEIKSITHDIEEKGVRMKLTVIDTPGF

SEQ ID NO: 21989 - protein, 348 aa, Homo sapiens
EEDEVPDDETVNQMIARHEEEFDLFMRMDLDRRREEARNPKRKPRLMEEDELPSWIIKDDAEVERLTCEEEEEKMFGRGSRHRKEVDYSDSLTEKQWLKAIEEGTLEEIEEEVRQKKSSRKRKRDSDAGSSTPTTSTRSRDKDDESKKQKKRGRPPAEKLSPNPPNLTKKMKKIVDAVIKYKDSSSGRQLSEVFIQLPSRKELPEYYELIRKPVDFKKIKERIRNHKYRSLNDLEKDVMLLCQNAQTFNLEGSLIYEDSIVLQSVFTSVRQKIEKEDDSEGEESEEEEEGEEEGSESESRSVKVKIKLGRKEKAQDRLKGGRRRPSRGSRAKPVVSDDDSEEEQEEAS

SEQ ID NO: 21990 - protein, 185 aa, Homo sapiens
GGAEEGAGGAGGSAGAGEGPVITALTPMTIPDVFPHLPLIAITRNPVFPRFIKIIEVKNKKLVELLRRKVRLAQPYVGVFLKRDDSNESDVVESLDEIYHTGTFAQIHEMQDLGDKLRMIVMGHRREASAGSSSQPQRLIHTCLAPVSESISADSWRWSPRSRRRRTSTSPAGSQSGARRRRRTS

SEQ ID NO: 21991 - protein, 328 aa, Homo sapiens
MDHLGASLWPQVGSLCLLLAGAAWAPPPNLPDPKFESKAALLAARGPEELLCFTERLEDLVCFWEEAASAGVGPGNYSFSYQLEDEPWKLCRLHQAPTARGAVRFWCSLPTADTSSFVPLELRVTAASGAPRYHRVIHINEVVLLDAPVGLVARLADESGHVVLRWLPPPETPMTSHIRYEVDVSAGNGAGSVQRVEILEGRTECVLSNLRGRTRYTFAVRARMAEPSFGGFWSAWSEPVSLLTPSDLDPLILTLSLILVVILVLLTVLALLSHRRALKQKIWPGIPSPESEFEGLFTTHKGNFQVGGLVVPSVPGLPCFLQPNCRPL

SEQ ID NO: 21992 - protein, 937 aa, Homo sapiens
MEPQVTLNVTFKNEIQSFLVSDPENTTWADIEAMVKVSFDLNTIQIKYLDEENEEVSINSQGEYEEALKMAVKQGNQLQMQVHEGHHVVDEAPPPVVGAKRLAARAGKKPLAHYSSLVRVLGSDMKTPEDPAVQSFPLVPCDTDQPQDKPPDWFTSYLETFREQVVNETVEKLEQKLHEKLVLQNPSLGSCPSEVSMPTSEETLFLPENQFSWHIACNNCQRRIVGVRYQCSLCPSYNICEDCEAGPYGHDTNHVLLKLRRPVVGSSEPFCHSKYSTPRLPAALEQVRLQKQVDKNFLKAEKQRLRAEKKQRKAEVKELKKQLKLHRKIHLWNSIHGLQSPKSPLGRPESLLQSNTLMLPLQPCTSVMPMLSAAFVDENLPDGTHLQPGTKFIKHWRMKNTGNVKWSADTKLKFMWGNLTLASTEKKDVLVPCLKAGHVGVVSVEFIAPALEGTYTSHWRLSHKGQQFGPRVWCSIIVDPFPSEESPDNIEKGMISSSKTDDLTCQQEETFLLAKEERQLGEVTEQTEGTAACIPQKAKNVASERELYIPSVDLLTAQDLLSFELLDINIVQELERVPHNTPVDVTPCMSPLPHDSPLIEKPGLGQIEEENEGAGFKALPDSMVSVKRKAENIASVEEAEEDLSGTQFVCETVIRSLTLDAAPDHNPPCRQKSLQMTFALPEGPLGNEKEEIIHIAEEEAVMEEEEDEEDEEEEDELKDEVQSQSSASSEDYIIILPECFDTSRPLGDSMYSSALSQPGLERGAEGKPGVEAGQEPAEAGERLPGGENQPQEHSISDILTTSQTLETVPLIPEVVELPPSLPRSSPCVHHHGSPGVDLPVTIPEVSSVPDQIRGEPRGSSGLVNSRQKSYDHSRHHHGSSIAGGLVKGALSVAASAYKALFAGPPVTAQGLWGLLSFLHLAKKCFFLKAPSEAFSWF

SEQ ID NO: 21993 - protein, 386 aa, Homo sapiens
MYGKDGKGTNWMDQGDMECRMQEIDDHSRVKLQNAENDYINASLVDIEEAQRSYILTQGPLPNTCCHFWLMVWQQKTKAVVMLNRIVEKESVKCAQYWPTDDQEMLFKETGFSVKLLSEDVKSYYTVHLLQLENINSGETRTISHFHYTTWPDFGVPESPASFLNFLFKVRESGSLNPDHGPAVIHCSAGIGRSGTFSLVDTCLVLMEKGDDINIKQVLLNMRKYRMGLIQTPDQLRFSYMAIIEGAKCIKGDSSIQKRWKELSKEDLSPAFDHSPNKIMTEKYNGNRIGLEEEKLTGDRCTGLSSKMQDTMEENSESALRKRIREDRKATTAQKVQQMKQRLNENERKRKRWLYWQPILTKMGFMSVILVGAFVGWTLFFQQNAL

SEQ ID NO: 21994 - protein, 705 aa, Homo sapiens
MPLPGGLWWLLCCRRGFTLLHRDYGDGELSGDGDEDEDEETFELRTPSPAGGGRGPLEVTLTQPVRSGPVSNRLQSWEETWSLIPEKGLPEDDPDIVVKGWLYREPRGGGARPWLPPRRAWFVLTRDSLDQFSSSGKGARRLGSLVLTSLCSVTGPERRRKETGLWSVTVSGRKHSVRLCSPRQAEAERWGVALREVIASKAPLETPTQLLLRDIQESCGDPEAVALIYLRNPILRHTSGALYAPLLPLPYGVSAPGPGYAPLREEAVRLFLALQALEGARRPGPLMQGVLQTCRDLPALRDELFLQLAKQTSGPAGPPGLPATQDPAALRYWQLLTCMSCTFRPGGAVRGHLLGHLERTEQALPDSELAEYARFIRKALGRTRGRELVPSLAEISALSQRQELLCTVHCPGAGACAVAIDSHTTAGEVARELVGRLGLARSRNAFALYEQRGAQERALAGGTLVADVLTRFENLAAEEAGLEDSPDSGWRLCLRLHGPLHPEGLSPDGHELPFLFEQAHALLLRGRPPPPDDTLRALAALRLQSLQRDFSPRVPLPRLDRLLPPPAPPREDPPRPTPRPPPSAALLAGALWSPGLAKRRAERARRGGAGRTAGSIAREGGGGAGTAAAVLGGWKRLRGMGRAEAMAAYLALAAQCPGFGAARSLVGVLHRSCAWAWEPRPCPSPGQGRRSPSTVSAMAMWPPAS

SEQ ID NO: 21995 - protein, 175 aa, Homo sapiens
MVAGWLTNYSQDSVTFEDVAVDFTQEEWTLLDQTQRNLYRDVMLENYKNLVAVDWESHINTKWSAPQQNFLQGKTSSVVEMVRFRRYNLLSSMLEEDWKFLKMEKQHNNLETFETSVFHPKIICLLERLWIMSLTNTLNIPQNIFVYIFPSTFPYVSQMFLINNSLLGRYQLSSI

SEQ ID NO: 21996 - protein, 294 aa, Homo sapiens
MYPELQIARVEQATQAIPMERWCGGSRSGSCAHPHHQVVPFRCLPGEFVSEALLVPEGCRFLHQERMDQCESSTRRHQEAQEACSSQGLILHGSGMLLPCGSDRFRGVEYVCCPPPGTPDPSGTAVGDPSTRSWPPGSRVEGAEDEEEEESFPQPVDDYFVEPPQAEEEEETVPPPSSHTLAVVGKVTPTPRPTDGVDIYFGMPGEISEHEGFLRAKMDLEERRMRQINEVMREWAMADNQSKNLPKADRQALNEHFQSILQTLEEQVSGERQRLVETHATRVIALINDQRRAA

SEQ ID NO: 21997 - protein, 938 aa, Homo sapiens
MNLCGLMPIFPAPLDQVADMEELTIWEQHTATLSKDPRRGFGIAISGGRDRPGGSMVVSDVVPGGPAEGRLQTGDHIVMVNGVSMENATSAFAIQILKTCTKMANITVKRPRRIHLPATKASPSSPGRQDSDEDDGPQRVEEVDQGRGYDGDSSSGSGRSWDERSRRPRPGRRGRAGSHGRRSPGGGSEANGLALVSGFKRLPRQDVQMKPVKSVLVKRRDSEEFGVKLGSQIFIKHITDSGLAARHRGLQEGDLILQINGVSSQNLSLNDTRRLIEKSEGKLSLLVLRDRGQFLVNIPPAVSDSDSSPLEDISDLASELSQAPPSHIPPPPRHAQRSPEASQTDSPVESPRLRRESSVDSRTISEPDEQRSELPRESSYDIYRVPSSQSMEDRGYSPDTRVVRFLKGKSIGLRLAGGNDVGIFVSGVQAGSPADGQGIQEGDQILQVNDVPFQNLTREEAVQFLLGLPPGEEMELVTQRKQDIFWKMVQSRVGDSFYIRTHFELEPSPPSGLGFTRGDVFHVLDTLHPGPGQSHARGGHWLAVRMGRDLREQERGIIPNQSRAEQLASLEAAQRAVGVGPGSSAGSNARAEFWRLRGLRRGAKKTTQRSREDLSALTRQGRYPPYERVVLREASFKRPVVILGPVADIAMQKLTAEMPDQFEIAETVSRTDSPSKIIKLDTVRVIAEKDKHALLDVTPSAIERLNYVQYYPIVVFFIPESRPALKALRQWLAPASRRSTRRLYAQAQKLRKHSSHLFTATIPLNGTSDTWYQELKAIIREQQTRPIWTAEDQLDGSLEDNLDLPHHGLADSSADLSCDSRVNSDYETDGEGGAYTDGEGYTDGEGGPYTDVDDEPPAPALARSSEPVQADESQSPRDRGRISAHQGAQVDSRHPQGQWRQDSMRTYEREALKKKFMRVHDAESSDEDGYDWGPATDL

SEQ ID NO: 21998 - protein, 707 aa, Homo sapiens
MEIPNPPTSKCITYWKRKVKSEYMRLRQLKRLQANMGAKALYVANFAKVQEKTQILNEEWKKLRVQPVQSMKPVSGHPFLKKVEDETVLCNIPYMGDEVKEEDETFIEELINNYDGKVHGEEEMIPGSVLISDAVFLELVDALNQYSDEEEEGHNDTSDGKQDDSKEDLPVTRKRKRHAIEGNKKSSKKQFPNDMIFSAIASMFPENGVPDDMKERYRELTEMSDPNALPPQCTPNIDGPNAKSVQREQSLHSFHTLFCRRCFKYDCFLHPFHATPNVYKRKNKEIKIEPEPCGTDCFLLLEGAKEYAMLHNPRSKCSGRRRRRHHIVSASCSNASASAVAETKEGDSDRDTGNDWASSSSEANSRCQTPTKQKASPAPPQLCVVEAPSEPVEWTGAEESLFRVFHGTYFNNFCSIARLLGTKTCKQVFQFAVKESLILKLPTDELMNPSQKKKRKHRLWAAHCRKIQLKKDNSSTQVYNYQPCDHPDRPCDSTCPCIMTQNFCEKFCQCNPDCQNRFPGCRCKTQCNTKQCPCYLAVRECDPDLCLTCGASEHWDCKVVSCKNCSIQRGLKKHLLLAPSDVAGWGTFIKESVQKNEFISEYCGELISQDEADRRGKVYDKYMSSFLFNLNNDFVVDATRKGNKIRFANHSVNPNCYAKVVMVNGDHRIGIFAKRAIQAGEELFFDYRYSQADALKYVGIERETDVL

SEQ ID NO: 21999 - protein, 627 aa, Homo sapiens
MDSVVFEDVAVDFTLEEWALLDSAQRDLYRDVMLETFQNLASVDDETQFKASGSVSQQDIYGEKIPKESKIATFTRNVSWASVLGKIWDSLSIEDQTTNQGRNLRNHGLERLCESNDQCGEALSQIPHLNLYKKIPPGVKQYEYNTYGKVFMHRRTSLKSPITVHTGHKPYQCQECGQAYSCRSHLRMHVRTHNGERPYVCKLCGKTFPRTSSLNRHVRIHTAEKTYECKQCGKAFIDFSSLTSHLRSHTGEKPYKCKECGKAFSYSSTFRRHTITHTGEKPYKCKECAEAFSYSSTFRRHMISHTGEKPHKCKECGEAFSYSSAFRRHMITHTGEKPYECKQCGKTFIYLQSFRRHERIHTGEKPYECKQCGKTFIYPQSFRRHERTHGGEKPYECNQCGKAFSHPSSFRGHMRVHTGEKPYECKQCGKTFNWPISLRKHMRTHTREKPYECKQCGKAFSLSACFREHVRMHPEDKSYECKLCGKAFYCHISLQKHMRRHTAEKLYKCKQCGKAFSWPELLQQHVRTHTVEKPYECKECGKVFKWPSSLPIHMRLHTGEKPYQCKHCGKAFNCSSSLRRHVRIHTTEKQYKCNVGHPPANEFMCSASEKSHQERDLIKVVNMVLPL

SEQ ID NO: 22000 - protein, 667 aa, Homo sapiens
MSQRPRAPRSALWLLAPPLLRWAPPLLTVLHSDLFQALLDILDYYEASLSESQKYRYQDEDTPPLEHSPAHLPNQANSPPVIVNTDTLEAPGYELQVNGTEGEMEYEEITLERGNSGLGFSIAGGTDNPHIGDDPSIFITKIIPGGAAAQDGRLRVNDSILFVNEVDVREVTHSAAVEALKEAGSIVRLYVMRRKPPAEKVMEIKLIKGPKGLGFSIAGGVGNQHIPGDNSIYVTKIIEGGAAHKDGRLQIGDKILAVNSVGLEDVMHEDAVAALKNTYDVVYLKVAKPSNAYLSDSYAPPDITTSYSQHLDNEISHSSYLGTDYPTAMTPTSPRRYSPVAKDLLGEEDIPREPRRIVIHRGSTGLGFNIVGGEDGEGIFISFILAGGPADLSGELRKGDQILSVNGVDLRNASHEQAAIALKNAGQTVTIIAQYKPEEYSRFEAKIHDLREQLMNSSLGSGTASLRSNPKRGFYIRALFDYDKTKDCGFLSQALSFRFGDVLHVIDASDEEWWQARRVHSDSETDDIGFIPSKRRVERREWSRLKAKDWGSSSGSQGREDSVLSYETVTQMEVHYARPIIILGPTKDRANDDLLSEFPDKFGSCVPHTTRPKREYEIDGRDYHFVSSREKMEKDIQAHKFIEAGQYNSHLYGTSVQSVREVAEQRD

SEQ ID NO: 22001 - protein, 1036 aa, Homo sapiens
MNFSVITCPNGGTNQGLLPYLMALDQYQLEEFKLCLEPQQLMDFWSAPQGHFPRIPWANLRAADPLNLSFLLDEHFPKGQAWKVVLGIFQTMNLTSLCEKVRAEMKENVQTQELQDPTQEDLEMLEAAAGNMQTQGCQDPNQEELDELEEETGNVQAQGCQDPNQEEPEMLEEADHRRKYRENMKAELLETWDNISWPKDHVYIRNTSKDEHEELQRLLDPNRTRAQAQTIVLVGRAGVGKTTLAMQAMLHWANGVLFQQRFSYVFYLSCHKIRYMKETTFAELISLDWPDFDAPIEEFMSQPEKLLFIIDGFEEIIISESRSESLDDGSPCTDWYQELPVTKILHSLLKKELVPLATLLITIKTWFVRDLKASLVNPCFVQITGFTGDDLRVYFMRHFDDSSEVEKILQQLRKNETLFHSCSAPMVCWTVCSCLKQPKVRYYDLQSITQTTTSLYAYFFSNLFSTAEVDLADDSWPGQWRALCSLAIEGLWSMNFTFNKEDTEIEGLEVPFIDSLYEFNILQKINDCGGCTTFTHLSFQEFFAAMSFVLEEPREFPPHSTKPQEMKMLLQHVLLDKEAYWTPVVLFFFGLLNKNIARELEDTLHCKISPRVMEELLKWGEELGKAESASLQFHILRLFHCLHESQEEDFTKKMLGRIFEVDLNILEDEELQASSFCLKHCKRLNKLRLSVSSHILERDLEILETSKFDSRMHAWNSICSTLVTNENLHELDLSNSKLHASSVKGLCLALKNPRCKVQKLTCKSVTPEWVLQDLIIALQGNSKLTHLNFSSNKLGMTVPLILKALRHSACNLKYLCLEKCNLSAASCQDLALFLTSIQHVTRLCLGFNRLQDDGIKLLCAALTHPKCALERLELWFCQLAAPACKHLSDALLQNRSLTHLNLSKNSLRDEGVKFLCEALGRPDGNLQSLNLSGCSFTREGCGELANALSHNHNVKILDLGENDLQDDGVKLLCEALKPHRALHTLGLAKCNLTTACCQHLFSVLSSSKSLVNLNLLGNELDTDGVKMLCFKKTCTM

SEQ ID NO: 22002 - protein, 157 aa, Homo sapiens
MADTPRDAGLKQAPASRNEKAPVDFGYVGIDSILEQMRRKAMKQGFEFNIMVVGQSGLGKSTLINTLFKSKISRKSVQPTSEERIPKTIEIKSITHDIEEKGVRMKLTVIDTPGFGDHINNENCWQPIMKFINDQYEKYLQEEVNINRKKRIPDTRV

SEQ ID NO: 22003 - protein, 153 aa, Homo sapiens
MEVVDPQQLGMFTEGELMSVGMDTFIHRIDSTEVIYQPRRKRAKLIGKYLMGDLLGEGSYGKVKEVLDSETLCRRAVKILKKKKLRRIPNGEANVKKYFCQLIDGLEYLHSQGIVHKDIKPGNLLLTTGGTLKISDLGVAEALHPFAADDTCR

SEQ ID NO: 22004 - protein, 125 aa, Homo sapiens
MSIVTVQLGQCGNQIGFEVFDALLSDSHSSQGLCSMRENEAYQASCKERFFSEEENGVPIARAVLVDMEPKVINQMLSKAAQSGQWKYGQHACFCQKQGSGNNWAYGRDKDSACYPDWSGTPGLQ

SEQ ID NO: 22005 - protein, 563 aa, Homo sapiens
MAHELVMFRDVAIDVSQEEWECLNPAQRNLYKEVMLENYSNLVSLGLSVSKPAVISSLEQGKEPWMVVREETGRWCPGTWKTWGFHNNFLDNNEATDINADLASRDEPQKLSPKRDIYETELSQWVNMEEFKSHSPERSIFSAIWEGNCHFEQHQGQEEGYFRQLMINHENMPIFSQHTLLTQEFYDREKISECKKCRKIFSYHLFFSHHKRTHSKELSECKECTEIVNTPCLFKQQTIQNGDKCNECKECWKAFVHCSQLKHLRIHNGEKRYECNECGKAFNYGSELTLHQRIHTGEKPYECKECGKAFRQRSQLTQHQRLHTGEKPYECKQCGKAFIRGFQLTEHLRLHTGEKPYECKECGKTFRHRSHLTIHQRIHTGEKPYECRECGKAFSYHSSFSHHQKIHSGKKPYECHECGKAFCDGLQLTLHQRIHTGEKPYECKECGKTFRQCSHLKRHQRIHTGEKPHECMICGKAFRLHSHLIQHQRIHTGEKPYECKECGKAFSYHSSFSHHQRIHSGKKPYQCGKAFNHRLQLNLHQTLHTGEKPVRFPLLPPHPSLAS

SEQ ID NO: 22006 - protein, 390 aa, Homo sapiens
MTLDDFRIKFEMEQNLRQGVDADINGLRQVLDNLTMEKSDLEMQYETLQEELMALKKNHKEEMSQLTGQNSGDVNVEINVAPGKDLTKTLNDMRQEYEQLIAKNRKDIENQYETQITQIEHEVSSSGQEVQSSAKEVTQLRHGVQELEIELQSQLSKKAALEKSLEDTKNRYCGQLQMIQEQISNLEAQITDVRQEIECQNQEYSLLLSIKMRLEKEIETYHNLLEGGQEDFESSGAGKIGLGGRGGSGGSYGRGSRGGSGGSYGGGGSGGGYGGGSGSRGGSGGSYGGGSGSGGGSGGGYGGGSGGGHSGGSGGGHSGGSGGNYGGGSGSGGGSGGGYGGGSGSRGGSGGSHGGGSGFGGESGGSYGGGEEASGSGGGYGGGSGKSSHS

SEQ ID NO: 22007 - protein, 116 aa, Homo sapiens
MSKGRAEAAAGAAGILLRYLQEQNRPYSSQDVFGNLQREHGLGKAVVVKTLEQLAQQGKIKEKMYGKQKIYFADQDQFDMVSDADLQVLDGKIVALTAKVQSLQQSCRYMEAGRTG

SEQ ID NO: 22008 - protein, 751 aa, Homo sapiens
MAESDSTDFDLLWYLENLSDKEFQSFKKYLARKILDFKLPQFPLIQMTKEELANVLPISYEGQYIWNMLFSIFSMMRKEDLCRKIIGRRNRNQEACKAVMRRKFMLQWESHTFGKFHYKFFRDVSSDVFYILQLAYDSTSYYSANNLNVFLMGERASGKTIVINLAVLRWIKGEMWQNMISYVVHLTAHEINQMTNSSLAELIAKDWPDGQAPIADILSDPKKLLFILEDLDNIRFELNVNESALCSNSTQKVPIPVLLVSLLKRKMAPGCWFLISSRPTRGNNVKTFLKEVDCCTTLQLSNGKREIYFNSFFKDRQRASAALQLVHEDEILVGLCRVAILCWITCTVLKRQMDKGRDFQLCCQTPTDLHAHFLADALTSEAGLTANQYHLGLLKRLCLLAAGGLFLSTLNFSGEDLRCVGFTEADVSVLQAANILLPSNTHKDRYKFIHLNVQEFCTAIAFLMAVPNYLIPSGSREYKEKREQYSDFNQVFTFIFGLLNANRRKILETSFGYQLPMVDSFKWYSVGYMKHLDRDPEKLTHHMPLFYCLYENREEEFVKTIVDALMEVTVYLQSDKDMMVSLYCLDYCCHLRTLKLSVQRIFQNKEPLIRPTASQMKSLVYWREICSLFYTMESLRELHIFDNDLNGISERILSKALEHSSCKLRTLKLSYVSTASGFEDLLKALARNRSLTYLSINCTSISLNMFSLLHDILHEPTCQISHLRWSFALVAQARVQWHSLSSPQPLTSRFK

SEQ ID NO: 22009 - protein, 146 aa, Homo sapiens
MGLGPRSLPFSRKRKRKMTKFQEMVTFKDVAVVFTEEELGLLDSVQRKLYRDVMLENFRNLLLVAHQPFKPDLISQLEREEKLLMVETETPRDGCSGRKNQQKMESIQEVTVSYFSPKELSSRQTWQQSAGGLIRCQDFLKVFQGK

SEQ ID NO: 22010 - protein, 724 aa, Homo sapiens
MFQDPVAFEDVAVNFTQEEWTLLDISQKNLFREVMLETFRNLTSIGKKWSDQNIEYEYQNPRRSFRSLIEEKVNEIKEDSHCGETFTQVPDDRLNFQEKKASPEVKSCDSFVCAEVGIGNSSFNMSIRGDTGHKAYEYQEYGPKPYKCQQPKNKKAFRYRPSIRTQERDHTGEKPYACKVCGKTFIFHSSIRRHMVMHSGDGTYKCKFCGKAFHSFSLYLIHERTHTGEKPYECKQCGKSFTYSATLQIHERTHTGEKPYECSKCDKAFHSSSSYHRHERSHMGEKPYQCKECGKAFAYTSSLRRHERTHSGKKPYECKQYGEGLSYLISFQTHIRMNSGERPYKCKICGKGFYSAKSFQTHEKTHTGEKRYKCKQCGKAFNLSSSFRYHERIHTGEKPYECKQCGKAFRSASQLRVHGGTHTGEKPYECKECGKAFRSTSHLRVHGRTHTGEKPYECKECGKAFRYVKHLQIHERTEKHIRMPSGERPYKCSICEKGFYSAKSFQTHEKTHTGEKPYECNQCGKAFRCCNSLRYHERTHTGEKPYECKQCGKAFRSASHLRMHERTHTGEKPYECKQCGKAFSCASNLRKHGRTHTGEKPYECKQCGKAFRSASNLQMHERTHTGEKPYECKECEKAFCKFSSFQIHERKHRGEKPYECKHCGNGFTSAKILQIHARTHIGEKHYECKECGKAFNYFSSLHIHARTHMGEKPYECKDCGKAFS

SEQ ID NO: 22011 - protein, 859 aa, Homo sapiens
MAQVLHVPAPFPGTPGPASPPAFPAKDPDPPYSVETPYGYRLDLDFLKYVDDIEKGHTLRRVAVQRRPRLSSLPRGPGSWWTSTESLCSNASGDSRHSAYSYCGRGFYPQYGALETRGGFNPRVERTLLDARRRLEDQAATPTGLGSLTPSAAGSTASLVGVGLPPPTPRSSGLSTPVPPSAGHLAHVREQMAGALRKLRQLEEQVKLIPVLQVKLSVLQEEKRQLTVQLKSQKFLGHPTAGRGRSELCLDLPDPPEDPVALETRSVGTWVRERDLGMPDGEAALAAKVAVLETQLKKALQELQAAQARQADPQPQAWPPPDSPVRVDTVRVVEGPREVEVVASTAAGAPAQRAQSLEPYGTGLRALAMPGRPESPPVFRSQEVVETMCPVPAAATSNVHMVKKISITERSCDGAAGLPEVPAESSSSPPGSEVASLTQPEKSTGRVPTQEPTHREPTRQAASQESEEAGGTAPPLSSPPGGPPAGVRSIMKRKEEVADPTAHRRSLQFVGVNGGYESSSEDSSTAENISDNDSTENEAPEPRERVPSVAEAPQLRPAGTAAAKTSRQECQLSRESQHIPTAEGASGSNTEEEIRMELSPDLISACLALEKYLDNPNALTERELKVAYTTVLQEWLRLACRSDAHPELVRRHLVTFRAMSARLLDYVVNIADSNGNTALHYSVSHANFPVVQQLLDSGVCKVDKQNRAGYSPIMLTALATLKTQDDIETVLQLFRLGNINAKASQAGQTALMLAVSHGRVDVVKALLACEADVNVQDDDGSTALMCACEHGHKEIAGLLLAVPSCDISLTDRDGSTALMVALDAGQSEIASMLYSRMNIKCSFAPMSDDESPTSSSAEE

SEQ ID NO: 22012 - protein, 1122 aa, Homo sapiens
MNSPNESDGMSGREPSLEILPRTSLHSIPVTVEVKPVLPRAMPSSMGGGGGGSPSPVELRGALVGSVDPTLREQQLQQELLALKQQQQLQKQLLFAEFQKQHDHLTRQHEVQLQKHLKQQQEMLAAKQQQEMLAAKRQQELEQQRQREQQRQEELEKQRLEQQLLILRNKEKSKESAIASTEVKLRLQEFLLSKSKEPTPGGLNHSLPQHPKCWGAHHASLDQSSPPQSGPPGTPPSYKLPLPGPYDSRDDFPLRKTASEPNLKVRSRLKQKVAERRSSPLLRRKDGTVISTFKKRAVEITGAGPGASSVCNSAPGSGPSSPNSSHSTIAENGFTGSVPNIPTEMLPQHRALPLDSSPNQFSLYTSPSLPNISLGLQATVTVTNSHLTASPKLSTQQEAERQALQSLRQGGTLTGKFMSTSSIPGCLLGVALEGDGSPHGHASLLQHVLLLEQARQQSTLIAVPLHGQSPLVTGERVATSMRTVGKLPRHRPLSRTQSSPLPQSPQALQQLVMQQQHQQFLEKQKQQQLQLGKILTKTGELPRQPTTHPEETEEELTEQQEVLLGEGALTMPREGSTESESTQEDLEEEDEEDDGEEEEDCIQVKDEEGESGAEEGPDLEEPGAGYKKLFSDAQPLQPLQVYQAPLSLATVPHQALGRTQSSPAAPGGMKSPPDQPVKHLFTTGVVYDTFMLKHQCMCGNTHVHPEHAGRIQSIWSRLQETGLLSKCERIRGRKATLDEIQTVHSEYHTLLYGTSPLNRQKLDSKKLLGPISQKMYAVLPCGGIGVDSDTVWNEMHSSSAVRMAVGCLLELAFKVAAGELKNGFAIIRPPGHHAEESTAMGFCFFNSVAITAKLLQQKLNVGKVLIVDWDIHHGNGTQQAFYNDPSVLYISLHRYDNGNFFPGSGAPEEVGGGPGVGYNVNVAWTGGVDPPIGDVEYLTAFRTVVMPIAHEFSPDVVLVSAGFDAVEGHLSPLGGYSVTARCFGHLTRQLMTLAGGRVVLALEGGHDLTAICDASEACVSALLSVELQPLDEAVLQQKPNINAVATLEKVIEIQSKHWSCVQKFAAGLGRSLREAQAGETEEAETVSAMALLSVGAEQAQAAAAREHSPRPAEEPMEQEPAL

SEQ ID NO: 22013 - protein, 122 aa, Homo sapiens
DALCSGEICNTEGISSVVQPDKYKPVPDEPPNPTNIEEILKRVRSNDKELEEVNLNNIQAVADMLRENRSLQSLNIESNFISSTGLMAVLKAVRENATLTELRVDNQVASKRRDNTAFPFTN

SEQ ID NO: 22014 - protein, 171 aa, Homo sapiens
CYNPMTNQWSPCAPMSVPRNRIGVGVIDGHIYAVGGSHGCIHHNSVERYEPERDEWHLVAPMLTRRIGVGVAVLNRLLYAVGGFDGTNRLNSAECYYPERNEWRMITAMNTIRSGAGGYDGHTFLDSVECYDPDTDTWSEVTRMTSGRSGVGVAVTMEPCRKQIDQQNCTC

SEQ ID NO: 22015 - protein, 665 aa, Homo sapiens
MEEQDEKPPEPPKVCAQDSFLPQEIIIKVEGEDTGSLTIPSQEGVNFKIVTVDFTREEQGTCNPAQRTLDRDVILENHRDLVSWDLATAVGKKDSTSKQRIFDEEPANGVKIERFTRDDPWLSSCEEVDDCKDQLEKQQEKQEILLQEVAFTQRKAVIHERVCKSDETGEKSGLNSSLFSSPVIPIRNHFHKHVSHAKKWHLNAAVNSHQKINENETLYENNECGKPPQSIHLIQFTRTQTKDKSYGFSDRIQSFCHGTPLHIHEKIHGGGKTFDFKECGQVLNPKISHNEQQRIPFEESQYKCSETSHSSSLTQNMRNNSEEKPFECNQCGKSFSWSSHLVAHQRTHTGEKPYECSECGKSFSRSSHLVSHQRTHTGEKPYRCNQCGKSFSQSYVLVVHQRTHTGEKPYECNQCGKSFRQSYKLIAHQRTHTGEKPYECNQCGKSFIQSYKLIAHQRIHTGEKPYECNQCGKSFSQSYKLVAHQRTHTGEKPFECNQCGKSFSWSSQLVAHQRTHTGEKPYECSECGKSFNRSSHLVMHQRIHTGEKPYECNQCGKSFSQSYVLVVHQRTHTGEKPYECSQCGKSFRQSSCLTQHQRTHTGEKPFECNQCGKTFSLSARLIVHQRTHTGEKPFTCIQCGKAFINSYKLIRHQATHTEEKLYECN

SEQ ID NO: 22016 - protein, 506 aa, Homo sapiens
MAGRGSLVSWRAFHGCDSAEELPRVSPRFLRAWHPPPVSARMPTRRWAPGTQCITKCEHTRPKPGELAFRKGDVVTILEACENKSWYRVKHHTSGQEGLLAAGALREREALSADPKLSLMPWFHGKISGQEAVQQLQPPEDGLFLVRESARHPGDYVLCVSFGRDVIHYRVLHRDGHLTIDEAVFFCNLMDMVEHYSKDKGAICTKLVRPKRKHGTKSAEEELARAGWLLNLQHLTLGAQIGEGEFGAVLQGEYLGQKVAVKNIKCDVTAQAFLDETAVMTKMQHENLVRLLGVILHQGLYIVMEHVSKGNLVNFLRTRGRALVNTAQLLQFSLHVAEGMEYLESKKLVHRDLAARNILVSEDLVAKVSDFGLAKAERKGLDSSRLPVKWTAPEALKHGFTSKSDVWSFGVLLWEVFSYGRAPYPKMSLKEVSEAVEKGYRMEPPEGCPGPVHVLMSSCWEAEPARRPPFRKLAEKLARELRSAGAPASVSGQDADGSTSPRSQEP

SEQ ID NO: 22017 - protein, 604 aa, Homo sapiens
MEGDGSDPEPPDAGEDSKSENGENAPIYCICRKPDINCFMIGCDNCNEWFHGDCIRITEKMAKAIREWYCRECREKDPKLEIRYRHKKSRERDGNERDSSEPRDEGGGRKRPVPDPDLQRRAGSGTGVGAMLARGSASPHKSSPQPLVATPSQHHQQQQQQIKRSARMCGECEACRRTEDCGHCDFCRDMKKFGGPNKIRQKCRLRQCQLRARLSPVTPSESLPRPRRPLPTQQQPQPSQKLGRIREDEGAVASSTVKEPPEATATPEPLSDEDLPLDPDLYQDFCAGAFDDHGLPWMSDTEESPFLDPALRKRAVKVKHVKRREKKSEKKKEERYKRHRQKQKHKDKWKHPERADAKDPASLPQCLGPGCVRPAQPSSKYCSDDCGMKLAANRIYEILPQRIQQWQQSPCIAEEHGKKLLERIRREQQSARTRLQEMERRFHELEAIILRAKQQAVREDEESNEGDSDDTDLQIFCVSCGHPINPRVALRHMERCYAKYESQTSFGSMYPTRIEGAKHTVSGSRCCAPSTHGTPKCQLTRYAGAPLYVMSLSSRVTSAACPSASAIAITAGRSCGVRKWTWSACVCGTSWTSCLSRSAMCAQP

SEQ ID NO: 22018 - protein, 548 aa, Homo sapiens
MEPGWRWELSPMHLLRLRRHTQDDDTLSPVLQLDTFKMAVHTPVPVAELLLRRLEASDGGLDSAELAAELGMEHQAVVGAVKSLQALGEVIEAELRSTKHWELTAEGEEIAREGSHEARVFRSIPPEGLAQSELMRLPSGKVGFSKAMSNKWIRVDKSAADGPRVFRVVDSMEDEVQRRLQLVRGGQAEKLGEKERSELRKRKLLAEVTLKTYWVSKGSAFSTSISKQETELSPEMISSGSWRDRPFKPYNFLAHGVLPDSGHLHPLLKVRSQFRQIFLEMGFTEMPTDNFIESSFWNFDALFQPQQHPARDQHDTFFLRDPAEALQLPMDYVQRVKRTHSQGGYGSQGYKYNWKLDEARKNLLRTHTTSASARALYRLAQKKPFTPVKYFSIDRVFRNETLDATHLAEFHQIEGVVADHGLTLGHLMGVLREFFTKLGITQLRFKPAYNPYTEPSMEVFSYHQGLKKWVEVGNSGVFRPEMLLPMGLPENVSVIAWGLSLERPTMIKYGINNIRELVGHKVNLQMVYDSPLCRLDAEPRPPPTQEAA

SEQ ID NO: 22019 - protein, 386 aa, Homo sapiens
MAGAGPAPGLPGAGGPVVPGPGAGIPGKSGEERLKEMEAEMALFEQEVLGAPVPGIPTAVPAVPTVPTVPTVEAMQVPAAPVIRPIIATNTYQQVQQTLEARAAAAATVVPPMVGGPPFVGPVGFGPGDRSHLDSPEAREAMFLRRAAAGPRPMALRPPHQALVGPPLPGPPGPPMMLPPMARAPGPPLGSMAALRPPLEEPAAPRELGLGLGLGLKEKEEAVVAAAAGLEEASAAVAVGAGGAPAGPAVIGPSLPLALAMPLPEPEPLPLPLEVVRGLLPPLRIPELLSLRPRPRPPRPEPPPGLMALEVPEPLGEDKKKGKPEKLKRCIRTAAGSSWEDPSLLEWDAGKYVGSRPIKLRKSMWKDRNLDVVRKKQKEKKKLGLR

SEQ ID NO: 22020 - protein, 780 aa, Homo sapiens
MVCGCSALLPLPNPRPTMPATPNFLANPSSSSRWIPLQPMPVAWAFVQKTSALLWLLLLGTSLSPAWGQAKIPLETVKLWADTFGGDLYNTVTKYSGSLLLQKKYKDVESSLKIEEVDGLELVRKFSEDMENMLRRKVEAVQNLVEAAEEADLNHEFNESLVFDYYNSVLINERDEKGNFVELGAEFLLESNAHFSNLPVNTSISSVQLPTNVYNKDPDILNGVYMSEALNAVFVENFQRDPTLTWQYFGSATGFFRIYPGILVQADRDNREHFKLLVEELMVKGVGVVDQALREAFQILKQFQEAKQGSLCNQAIMLISDGAVEDYEPVFEKYNWPDCKISTLADTQENVMEYLHVLSRPMVINHDHDIIWTEAYMDSKLLSSQAQSLTLLTTVAMPVFSKKNETRSHGILLGVVGSDVALRELMKLAPRYKLGVHGYAFLNTNNGYILSHPDLRPLYREGKKLKPKPNYNSVDLSEVEWEDQAESKRVLFLTNDYFFTDISDTPFSLGVVLSRGHGEYILLGNTSVEEGLHDLLHPDLALAGDWIYCITDIDPDHRKLSQLEAMIRFLTRKDPDLECDEELVREVLFDAVVTAPMEAYWTALALNMSEESEHVVDMAFLGTRAGLLRSSLFVGSEKVSDRKFLTPEDEASVFTLDRFPLWYRQASEHPAGSFVFNLRWAEGPESAGEPMVVTASTAVAVTVDKRTAIAAAAGVQMKLEFLQRKFWAATRQCSTVDGPCTQSCEDSDLDCFVIDNNGFILISKRSREPGIKLRKKPIQT

SEQ ID NO: 22021 - protein, 979 aa, Homo sapiens
MAESDSTDFDLLWYLENLSDKEFQSFKKYLARKILDFKLPQFPLIQMTKEELANVLPISYEGQYIWNMLFSIFSMMRKEDLCRKIIGRRNRNQEACKAVMRRKFMLQWESHTFGKFHYKFFRDVSSDVFYILQLAYDSTSYYSANNLNVFLMGERASGKTIVINLAVLRWIKGEMWQNMISYVVHLTAHEINQMTNSSLAELIAKDWPDGQAPIADILSDPKKLLFILEDLDNIRFELNVNESALCSNSTQKVPIPVLLVSLLKRKMAPGCWFLISSRPTRGNNVKTFLKEVDCCTTLQLSNGKREIYFNSFFKDRQRASAALQLVHEDEILVGLCRVAILCWITCTVLKRQMDKGRDFQLCCQTPTDLHAHFLADALTSEAGLTANQYHLGLLKRLCLLAAGGLFLSTLNFSGEDLRCVGFTEADVSVLQAANILLPSNTHKDRYKFIHLNVQEFCTAIAFLMAVPNYLIPSGSREYKEKREQYSDFNQVFTFIFGLLNANRRKILETSFGYQLPMVDSFKWYSVGYMKHLDRDPEKLTHHMPLFYCLYENREEEFVKTIVDALMEVTVYLQSDKDMMVSLYCLDYCCHLRTLKLSVQRIFQNKEPLIRPTARLSYVSTASGFEDLLKALARNRSLTYLSINCTSISLNMFSLLHDILHEPTCQISHLSLMKCDLRASECEEIASLLISGGSLRKLTLSSNPLRSDGMNILCDALLHPNCTLISLVLVFCCLTENCCSALGRVLLFSPTLRQLDLCVNRLKNYGVLHVTFPLLFPTCQLEELHLSGCFFSSDICQYIAIVIATNEKLRSLEIGSNKIEDAGMQLLCGGLRHPNCMLVNIGLEECMLTSACCRSLASVLTTNKTLERLNLLQNHLGNDGVAKLLESLISPDCVLKVVGLPLTGLNTQTQQLLMTVKERKPSLIFLSETWSLKEGREIGVTPASQPGSIIPNSNLDYMFFKFPRMSAAMRTSNTASRQPL

SEQ ID NO: 22022 - protein, 146 aa, Homo sapiens
MDLIDILWRQDIDLGVSREVFDFSQRRKEYELEKQKKLEKERQEQLQKEQEKAFFAQLQLDEETGEFLPIQPAQHIQSETSGSANYSQVAHIPKSDALYFDDCMQLLAQTFPFVDDNEVSSATFQSLVPDIPGHIESPVFIATNQA

SEQ ID NO: 22023 - protein, 516 aa, Homo sapiens
MDSVTFDDVAVDFTQEEWTLLDSTQRSLYSDVMLENYKNLATVGGQIIKPSLISWLEQEESRTVQGGVLQGWEMRLETQWSILQQDFLRGQTSIGIQLEGKHNGRELCDCEQCGEVFSEHSCLKTHVRTQSTGNTHDCNQYGKDFLTLCEKTSTGEKLSEFNQSEKIFSLTPNIVYQRTSTQEKSFECSHCGKSFINESYLQAHMRTHNGEKLYEWRNYGPGFIDSTSLSVLIETLNAKKPYKCKECGKGYRYPAYLSIHMRTHTGEKPYECKECGKAFNYSNSFQIHGRTHTGEKPYVCKECGKAFTQYSGLSMHVRSHSGDKPYECKECGKSFLTSSRLIQHIRTHTGEKPFVCVECGKAFAVSSNLSGHLRTHTEEKACECKICGKVFGYPSCLNNHMRTHSAQKPYTCKECGKAFNYSTHLKIHMRIHTGEKPYECKQCGKAFSHSSSFQIHERTHTGEKPYECKECGKAFTCSSSFRIHEKTHTEEKPYKCQQCGKAYSHPRSLRRHEQIH

SEQ ID NO: 22024 - protein, 766 aa, Homo sapiens
MDWQPDEQGLQQVLQLLKDSQSPNTATQRIVQDKLKQLNQFPDFNNYLIFVLTRLKSEDEPTRSLSGLILKNNVKAHYQSFPPPVADFIKQECLNNIGDASSLIRATIGILITTIASKGELQMWPELLPQLCNLLNSEDYNTCEGAFGALQKICEDSSELLDSDALNRPLNIMIPKFLQFFKHCSPKIRSHAIACVNQFIMDRAQALMDNIDTFIEHLFALAVDDDPEVRKNVCRALVMLLEVRIDRLIPHMHSIIQYMLQRTQDHDENVALEACEFWLTLAEQPICKEVLASHLVQLIPILVNGMKYSEIDIILLKGDVEEDEAVPDSEQDIKPRFHKSRTVTLPHEAERPDGSEDAEDDDDDDALSDWNLRKCSAAALDVLANVFREELLPHLLPLLKGLLFHPEWVVKESGILVLGAIAEGCMQGMVPYLPELIPHLIQCLSDKKALVRSIACWTLSRYAHWVVSQPPDMHLKPLMTELLKRILDGNKRVQEAACSAFATLEEEACTELVPYLSYILDTLVFAFGKYQHKNLLILYDAIGTLADSVGHHLNQPEYIQKLMPPLIQKWNELKDEDKDLFPLLECLSSVATALQSGFLPYCEPVYQRCVTLVQKTLAQAMMYTQHPEQYEAPDKDFMIVALDLLSGLAEGLGGHVEQLVARSNIMTLLFQCMQDSMPEVRQSSFALLGDLTKACFIHVKPCIAEFMPILGTNLNPEFISVCNNATWAIGEICMQMGAEMQPYVQMVLNNLVEIINRPNTPKTLLE

SEQ ID NO: 22025 - protein, 454 aa, Homo sapiens
MYIKMATLANGQADNASLSTNGLGSSPGSAGHMNGLSHSPGNPSTIPMKDHDAIKLFIGQIPRNLDEKDLKPLFEEFGKIYELTVLKDRFTGMHKGCAFLTYCERESALKAQSALHEQKTLPGMNRPIQVKPADSESRGDRKLFVGMLNKQQSEDDVRRLFEAFGNIEECTILRGPDGNSKGCAFVKYSSHAEAQAAINALHGSQTMPGASSSLVVKFADTDKERTMRRMQQMAGQMGMFNPMAIPFGAYGAYAQALMQQQAALMASVAQGGYLNPMAAFAAAQMQQMAALNMNGLAAAPMTPTSGGSTPPGITAPAVPSIPSPIGVNGFTGLPPQANGQPAAEAVFANGIHPYPAQSPTAADPLQQAYAGVQQYAGPAYPAAYGQISQAFPQPPPMIPQQQREGPEGCNLFIYHLPQEFGDAELMQMFLPFGNVISSKVFVDRATNQSKCFGG

SEQ ID NO: 22026 - protein, 151 aa, Homo sapiens
MADTPRDAGLKQAPASRNEKAPVDFGYVGIDSILEQMRRKAMKQGFEFNIMVVGQSGLGKSTLINTLFKSKISRKSVQPTSEERIPKTIEIKSITHDIEEKGVRMKLTVIDTPGFGDHINNENCWQPIMKFINDQYEKYLQEEVNINRKKR

SEQ ID NO: 22027 - protein, 639 aa, Homo sapiens
MPSTSFPVPSKFPLGPAAAVFGRGETLGPAPRAGGTMKSAEEEHYGYASSNVSPALPLPTAHSTLPAPCHNLQTSTPGIIPPADHPSGYGAALDGGPAGYFLSSGHTRPDGAPALESPRIEITSCLGLYHNNNQFFHDVEVEDVLPSSKRSPSTATLSLPSLEAYRDPSCLSPASSLSSRSCNSEASSYESNYSYPYASPQTSPWQSPCVSPKTTDPEEGFPRGLGACTLLGSPRHSPSTSPRASVTEESWLGARSSRPASPCNKRKYSLNGRQPPYSPHHSPTPSPHGSPRVSVTDDSWLGNTTQYTSSAIVAAINALTTDSSLDLGDGVPVKSRKTTLEQPPSVALKVEPVGEDLGSPPPPADFAPEDYSSFQHIRKGGFCDQYLAVPQHPYQWAKPKPLSPTSYMSPTLPALDWQLPSHSGPYELRIEVQPKSHHRAHYETEGSRGAVKASAGGHPIVQLHGYLENEPLMLQLFIGTADDRLLRPHAFYQVHRITGKTVSTTSHEAILSNTKVLEIPLLPENSMRAVIDCAGILKLRNSDIELRKGETDIGRKNTRPSAQLRSCLWWRSRARTAIRSWAGRRWSCLATTSCRTPRSFSWRKPQMATMSGRWKRKLTGTCASRILWWLRSRHFGIRG

SEQ ID NO: 22028 - protein, 469 aa, Homo sapiens
MLPPWTLGLLLLATVRGKEVCYGQLGCFSDEKPWAGTLQRPVKLLPWSPEDIDTRFLLYTNENPNNFQLITGTEPDTIEASNFQLDRKTRFIIHGFLDKAEDSWPSDMCKKMFEVEKVNCICVDWRHGSRAMYTQAVQNIRVVGAETAFLIQALSTQLGYSLEDVHVIGHSLGAHTAAEAGRRLGGRVGRITGLDPAGPCFQDEPEEVRLDPSDAVFVDVIHTDSSPIVPSLGFGMSQKVGHLDFFPNGGKEMPGCKKNVLSTITDIDGIWEGIGGFVSCNHLRSFEYYSSSVLNPDGFLGYPCASYDEFQESKCFPCPAEGCPKMGHYADQFKGKTSAVEQTFFLNTGESGNFTSWRYKISVTLSGKEKVNGYIRIALYGSNENSKQYEIFKGSLKPDASHTCAIDVDFNVGKIQKVKFLWNKRGINLSEPKLGASQITVQSGEDGTEYNFCSSDTVEENVLQSLYPC

SEQ ID NO: 22029 - protein, 362 aa, Homo sapiens
MAGAGCTGTWSWLWGTATEAAPSCVGDMADTPRDAGLKQAPASRNEKAPVDFGYVGIDSILEQMRRKAMKQGFEFNIMVVGQSGLGKSTLINTLFKSKISRKSVQPTSEERIPKTIEIKSITHDIEEKGVRMKLTVIDTPGFGDHINNENCWQPIMKFINDQYEKYLQEEVNINRKKRIPDTRVHCCLYFIPATGHSLRPLDIEFMKRLSKVVNIVPVIAKADTLTLEERVHFKQRITADLLSNGIDVYPQKEFDEDSEDRLVNEKFREMIPFAVVGSDHEYQVNGKRILGRKTKWGTIEVENTTHCEFAYLRDLLIRTHMQNIKDITSSIHFEAYRVKRLNEGSSAMANGMEEKEPEAPEM

SEQ ID NO: 22030 - protein, 1029 aa, Homo sapiens
MSDVNPPSDTPIPFSSSSTHSSHIPPWTFSCYPGSPCENGVMLYMRNVSHEELQRFKQLLLTELSTGTMPITWDQVETASWAEVVHLLIERFPGRRAWDVTSNIFAIMNCDKMCVVVRREINAILPTLEPEDLNVGETQVNLEEGESGKIRRYKSNVMEKFFPIWDITTWPGNQRDFFYQGVHRHEEYLPCLLLPKRPQGRQPKTVAIQGAPGIGKTILAKKVMFEWARNKFYAHKRWCAFYFHCQEVNQTTDQSFSELIEQKWPGSQDLVSKIMSKPDQLLLLLDGFEELTSTLIDRLEDLSEDWRQKLPGSVLLSSLLSKTMLPEATLLIMIRFTSWQTCKPLLKCPSLVTLPGFNTMEKIKYFQMYFGHTEEGDQVLSFAMENTILFSMCRVPVVCWMVCSGLKQQMERGNNLTQSCPNATSVFVRYISSLFPTRAENFSRKIHQAQLEGLCHLAADSMWHRKWVLGKEDLEEAKLDQTGVTAFLGMSILRRIAGEEDHYVFTLVTFQEFFAALFYVLCFPQRLKNFHVLSHVNIQRLIASPRGSKSYLSHMGLFLFGFLNEACASAVEQSFQCKVSFGNKRKLLKVIPLLHKCDPPSPGSGVPQLFYCLHEIREEAFVSQALNDYHKVVLRIGNNKEVQVSAFCLKRCQYLHEVELTVTLNFMNVWKLSSSSHPGSEAPESNGLHRWWQDLCSVFATNDKLEVLTMTNSVLGPPFLKALAAALRHPQCKLQKLLLRRVNSTMLNQDLIGVLTGNQHLRYLEIQHVEVESKAVKLLCRVLRSPRCRLQCLRLEDCLATPRIWTDLGNNLQGNGHLKTLILRKNSLENCGAYYLSVAQLERLSQSKMLTHLSLAENALKDEGAKHIWNALPHLRCPLQRLVLRKCDLTFNCCQDMISALCKNKTLKSLDLSFNSLKDDGVILLCEALKNPDCTLQILELENCLFTSICCQAMASMLRKNQHLRHLDLSKNAIGVYGILTLCEAFSSQKKREEVIFCIPAWTRITSFSPTPHPPDFTGKSDCLSQINP

SEQ ID NO: 22031 - protein, 178 aa, Homo sapiens
MSLLRNRLQALPALCLCVLVLACIGACQPEAQEGTLSPPPKLKMSRWSLVRGRMKELLETVVNRTRDGWQWFWSLDTMGTRLLPALFLVLLVLGFEVQGTQQPQQDEMPSPTFLTQVKESLSSYWESAKTAAQNLYEKTYLPAVDEKLRDLYSKSTAAMSTYTGIFTDQVLSVLKGEE

SEQ ID NO: 22032 - protein, 461 aa, Homo sapiens
MGQVLPVFAHCKEAPSTASSTPDSTEGGNDDSDFRELHTAREFSEEDEEETTSQDWGTPRELTFSYIAFDGVVGSGGRRDSTARRPRPQGRSVSEPRDQHPQPSLGDSLESIPSLSQSPEPGRRGDPDTAPPSERPLEDLRLRLDHLGWVARGTGSGEDSSTSSSTPLEDEEPQEPNRLETGEAGEELDLRLRLAQPSSPEVLTPQLSPGSGTPQAGTPSPSRSRDSNSGPEEPLLEEEEKQWGPLEREPVRGQCLDSTDQLEFTVEPRLLGTAMEWLKTSLLLAVYKTVPILELSPPLWTAIGWVQRGPTPPTPVLRVLLKWAKSPRSSGVPSLSLGADMGSKVADLLYWKDTRTSGVVFTGLMVSLLCLLHFSIVSVAAHLALLLLCGTISLRVYRKVLQAVHRGDGANPFQAYLDVDLTLTREQTERLSHQITSRVVSAATQLRHFFLVEDLVDSLKE

SEQ ID NO: 22033 - protein, 259 aa, Homo sapiens
MWPNGSSLGPCFRPTNITLEERRLIASPWFAASFCVVGLASNLLALSVLAGARQGGSHTRSSFLTFLCGLVLTDFLGLLVTGTIVVSQHAALFEWHAVDPGCRLCRFMGVVMIFFGLSPLLLGAAMASERYLGLHRPDSAAKPACHEPRRAAVPHHGEGAAHLLARGHLEPDPGPLGVYPVPPRRAPASPASPQHPAQVAVPPAPAHAALRAAVGSGQSAPPAPFRGALGPSDSPSACSEDSGAGGAGWTVGISSRVLG

SEQ ID NO: 22034 - protein, 602 aa, Homo sapiens
MRITAAILTARSRWRLRNSISAFLFTVTFAWCPPGLSNLTILSCPDHLSQDVFCLHESKFEEERMVAGWLTNYSQDSVTFEDVAVDFTQEEWTLLDQTQRNLYRDVMLENYKNLVAVDWESHINTKWSAPQQNFLQGKTSSVVEMERNHFGEELFDFNQCEKALSEHSCLKTHRRTYFRKKTCECNQCEKAFRKPSIFTLHKKTDIGEELPNCNQCETAFSQHLHLVCKKTSQNLHLVCKKTHTQEKPYKCSDCEKGLPSSSHLRECVRIYGGERPYTHKEYVETFSHSTALFVHMQTQDGEKFYECKACGKPFTESSYLTQHLRTHSRVLPIEHKKFGKAFAFSPDLAKHIRLRTRGKHYVCNECGKEFTCFSKLNIHIRVHTGEKPYECNKCGKAFTDSSGLIKHRRTHTGEKPYECKECGKAFANSSHLTVHMRTHTGEKPYQCKECGKAFINSSSFKSHMQTHPGVKPYDCQQCGKAFIRSSFLIRHLRSHSAERPFECEECGKAFRYSSHLSQHKRIHTGERPYKCQKCGQAFSISSGLTVHMRTHTGERPFECQECGKAFTRSTYLIRHLRSHSVEKPYKECGQTFSNSSCLTECV

SEQ ID NO: 22035 - protein, 894 aa, Homo sapiens
MRPMRIFVNDDRHVMAKHSSVYPTQEELEAVQNMVSHTERALKAVSDWIDEQEKGSSEQAESDNMDVPPEDDSKEGAGEQKTEHMTRTLRGVMRVGLVAKGLLLKGDLDLELVLLCKEKPTTALLDKVADNLAIQLAAVTEDKYEILQSVDDAAIVIKNTKEPPLSLTIHLTSPVVREEMEKVLAGETLSVNDPPDVLDRQKCLAALASLRHAKWFQARANGLKSCVIVIRVLRDLCTRVPTWGPLRGWPLELLCEKSIGTANRPMGAGEALRRVLECLASGIVMPDGSGIYDPCEKEATDAIGHLDRQQREDITQSAQHALRLAAFGQLHKVLGMDPLPSKMPKKPKNENPVDYTVQIPPSTTYAITPMKRPMEEDGEEKSPSKKKKKIQKKEEKAEPPQAMNALMRLNQLKPGLQYKLVSQTGPVHAPIFTMSVEVDGNSFEASGPSKKTAKLHVAVKVLQDMGLPTGAEGRDSSKGEDSAEETEAKPAVVAPAPVVEAVSTPSAAFPSDATAEQGPILTKHGKNPVMELNEKRRGLKYELISETGGSHDKRFVMEVEVDGQKFQGAGSNKKVAKAYAALAALEKLFPDTPLALDANKKKRAPVPVRGGPKFAAKPHNPGFGMGGPMHNEVPPPPNLRGRGRGGSIRGRGRGRGFGGANHGGYMNAGAGYGSYGYGGNSATAGYSQFYSNGGHSGNASGGGGGGGGGSSGYGSYYQGDNYNSPVPPKHAGKKQPHGGQQKPSYGSGYQSHQGQQQSYNQSPYSNYGPPQGKQKGYNHGQGSYSYSNSYNSPGGGGGSDYNYESKFNYSGSGGRSGGNSYGSGGASYNPGSHGGYGGGSGGGSSYQGKQGGYSQSNYNSPGSGQNYSGPPSSYQSSQGGYGRNADHSMNYQYR

SEQ ID NO: 22036 - protein, 96 aa, Homo sapiens
MTSPQLEWTLQTLLEQLNEDELKSFKSLLWAFPLEDVLQKTPWSEVEEADGKKLAEILVNTSSENWIRNATVNILEEMNLTELCKMAKAEMMEDGQ

SEQ ID NO: 22037 - protein, 1199 aa, Homo sapiens
FRLVVKTALKLLLVFVEYSESNAPLLIQAVTAVDTKRGVKPWSNIMEILEEKDGVDTELLVYAMTLVNKTLSGLPDQDTFYDVVDCLEELGIAAVSQRHLNKKGTDLDLVEQLNIYEVALRHEDGDETTEPPPSGCRDRRRASVCSSGGGEHRGLDRRRSRRHSVQSIKSTLSAPTSPCSQSAPSFKPNQVRDLREKSSPSGLLTSSFRQHQESLAAERERRRQEREERLQRIEREERNKFSRDYLDKREEQRQAREERYKYLEQLAAEEHEKELRSRSVSRGRADLSLDLTSPAAPACLAPLSHSPSSSDSQEALTVSASSPGTPHHPQASAGDPEPESEAEPEAEAGAGQVADEAGQDIASAHEGAETEVEQALEQEPEERASLSEKERQNEGVNERDNCSASSVSSSSSTLEREEKEDKLSRDRTTGLWPAGVQDAGVNGQCGDILTNKRFMLDMLYAHNRKSPDDEEKGDGEAGRTQQEAEAVASLATRISTLQANSQTQDESVRRVDVGCLDNRGSVKAFAEKFNSGDLGRGSISPDAEPNDKVPETAPVQPKTESDYIWDQLMANPRELRIQDMDFTDLGEEDDIDVLDVDLGHREAPGPPPPPPPTFLGLPPPPPPPLLDSIPPPPVPGNLLVPPPPVFNAPQGLGWSQVPRGQPTFTKKKKTIRLFWNEVRPFDWPCKNNRRCREFLWSKLEPIKVDTSRLEHLFESKSKELSVSKKTAADGKRQEIIVLDSKRSNAINIGLTVLPPPRTIKIAILNFDEYALNKEGIEKILTMIPTDEEKQKIQEAQLANPEIPLGSAEQFLLTLSSISELSARLHLWAFKMDYETTEKEVAEPLLDLKEGIDQLENNKTLGFILSTLLAIGNFLNGTNAKAFELSYLEKVPEVKDTVHKQSLLHHVCTMVVENFPDSSDLYSEIGAITRSAKVDFDQLQDNLCQMERRCKASWDHLKAIAKHEMKPVLKQRMSEFLKDCAERIIILKIVHRRIINRFHSFLLFMGHPPYAIREVNINKFCRIISEFALEYRTTRERVLQQKQKRANHRERNKTRGKMITDSGKFSGSSPAPPSQPQGLSYAEDAAEHENMKAVLKTSSPSVEDATPALGVRTRSRASRGSTSSWTMGTDDSPNVTDDAADEIMDRIVKSATQVPSQRVVPRERKRSRANRKSLRRTLKSGLTPEEARALGLVGTSELQL

SEQ ID NO: 22038 - protein, 817 aa, Homo sapiens
MAKFRGRDPRDHYDLLQRLGGGTYGEVFKARDKVSGDLVALKMVKMEPDDDVSTLQKEILILKTCRHANIVAYHGSYLWLQKLWICMEFCGAGSLQDIYQVTGSLSELQISYVCREVLQGLAYLHSQKKIHRDIKGANILINDAGEVRLADFGISAQIGATLARRLSFIGTPYWMAPEVAAVALKGGYNELCDIWSLGITAIELAELQPPLFDVHPLRVLFLMTKSGYQPPRLKEKGKWSAAFHNFIKVTLTKSPKKRPSATKMLSHQLVSQPGLNRGLILDLLDKLKNPGKGPSIGDIEDEEPELPPAIPRRIRSTHRSSSLGIPDADCCRRHMEFRKLRGMETRPPANTARLQPPRDLRSSSPRKQLSESSDDDYDDVDIPTPAEDTPPPLPPKPKFRSPSDEGPGSMGDDGQLSPGVLVRCASGPPPNSPRPGPPPSTSSPHLTAHSEPSLWNPPSRELDKPPLLPPKKEKMKRKGCALLVKLFNGCPLRIHSTAAWTHPSTKDQHLLLGAEEGIFILNRNDQEATLEMLFPSRTTWVYSINNVLMSLSGKTPHLYSHSILGLLERKETRAGNPIAHISPHRLLARKNMVSTKIQDTKGCRACCVAEGASSGGPFLCGALETSVVLLQWYQPMNKFLLVRQVLFPLPTPLSVFALLTGPGSELPAVCIGVSPGRPGKSVLFHTVRFGALSCWLGEMSTEHRGPVQVTQVEEDMVMVLMDGSVKLVTPEGSPVRGLRTPEIPMTEAVEAVAMVGGQLQAFWKHGVQVWALGSDQLLQELRDPTLTFRLLGSPRPVVVETRPVDDPTAPSNLYIQE

SEQ ID NO: 22039 - protein, 154 aa, Homo sapiens
MYGKQKIYFADQDQFDMVSDADLQVLDGKIVALTAKVQSLQQSCRYMEAELKELSSALTTPEMQKEIQELKKECAGYRERLKNIKAATNHVTPEEKEQVYRERQKYCKEWRKRKRMATELSDAILEGYPKSKKQFFEEVGIETDEDYNVTLPDP

SEQ ID NO: 22040 - protein, 794 aa, Homo sapiens
MVAGLTLGKGPESPDGDVSVPERKDEVAGGGGEEEEAEERGRHAQYVGPYRLEKTLGKGQTGLVKLGVHCITGQKVAIKIVNREKLSESVLMKVEREIAILKLIEHPHVLKLHDVYENKKYLYLVLEHVSGGELFDYLVKKGRLTPKEARKFFRQIVSALDFCHSYSICHRDLKPENLLLDEKNNIRIADFGMASLQVGDSLLETSCGSPHYACPEVIKGEKYDGRRADMWSCGVILFALLVGALPFDDDNLRQLLEKVKRGVFHMPHFIPPDCQSLLRGMIEVEPEKRLSLEQIQKHPWYLGGKHEPDPCLEPAPGRRVAMRSLPSNGELDPDVLESMASLGCFRDRERLHRELRSEEENQEKMIYYLLLDRKERYPSCEDQDLPPRNDVDPPRKRVDSPMLSRHGKRRPERKSMEVLSITDAGGGGSPVPTRRALEMAQHSQRSRSVSGASTGLSSSPLSSPRSPVFSFSPEPGAGDEARGGGSPTSKTQTLPSRGPRGGGAGEQPPPPSARSTPLPGPPGSPRSSGGTPLHSPLHTPRASPTGTPGTTPPPSPGGGVGGAAWRSRLNSIRNSFLGSPRFHRRKMQVPTAEEMSSLTPESSPELAKRSWFGNFISLDKEEQIFLVLKDKPLSSIKADIVHAFLSIPSLSHSVLSQTSFRAEYKASGGPSVFQKPVRFQVDISSSEGPEPSPRRDGSGGGGIYSVTFTLISGPSRRFKRVVETIQAQLLSTHDQPSVQALADEKNGAQTRPAGAPPRSLQPPPGRPDPELSSSPRRGPPKDKKLLATNGTPLP

SEQ ID NO: 22041 - protein, 934 aa, Homo sapiens
MRRKFMLQWESHTFGKFHYKFFRDVSSDVFYILQLAYDSTSYYSANNLNVFLMGERASGKTIVINLAVLRWIKGEMWQNMISYVVHLTAHEINQMTNSSLAELIAKDWPDGQAPIADILSDPKKLLFILEDLDNIRFELNVNESALCSNSTQKVPIPVLLVSLLKRKMAPGCWFLISSRPTRGNNVKTFLKEVDCCTTLQLSNGKREIYFNSFFKDRQRASAALQLVHEDEILVGLCRVAILCWITCTVLKRQMDKGRDFQLCCQTPTDLHAHFLADALTSEAGLTANQYHLGLLKRLCLLAAGGLFLSTLNFSGEDLRCVGFTEADVSVLQAANILLPSNTHKDRYKFIHLNVQEFCTAIAFLMAVPNYLIPSGSREYKEKREQYSDFNQVFTFIFGLLNANRRKILETSFGYQLPMVDSFKWYSVGYMKHLDRDPEKLTHHMPLFYCLYENREEEFVKTIVDALMEVTVYLQSDKDMMVSLYCLDYCCHLRTLKLSVQRIFQNKEPLIRPTASQMKSLVYWREICSLFYTMESLRELHIFDNDLNGISERILSKALEHSSCKLRTLKLSYVSTASGFEDLLKALARNRSLTYLSINCTSISLNMFSLLHDILHEPTCQISHLSLMKCDLRASECEEIASLLISGGSLRKLTLSSNPLRSDGMNILCDALLHPNCTLISLVLVFCCLTENCCSALGRVLLFSPTLRQLDLCVNRLKNYGVLHVTFPLLFPTCQLEELHLSGCFFSSDICQYIAIVIATNEKLRSLEIGSNKIEDAGMQLLCGGLRHPNCMLVNIGLEECMLTSACCRSLASVLTTNKTLERLNLLQNHLGNDGVAKLLESLISPDCVLKVVGLPLTGLNTQTQQLLMTVKERKPSLIFLSETWSLKEGREIGVTPASQPGSIIPNSNLDYMFFKFPRMSAAMRTSNTASRQPL

SEQ ID NO: 22042 - protein, 289 aa, Homo sapiens
MPGSFVPTVTAITTSQDLQWLVQPTLISSMAQSQGQPLASQPPVVDPYDMPGTSYSTPGMSGYSSGGASGSGGPSTSGTTSGPGPARPARARPRRPREETLTPEEEEKRRVRRERNKLAAAKCRNRRRELTDRLQAETDQLEEEKAELESEIAELQKEKERLEFVLVAHKPGCKIPYEEGPGPGPLAEVRDLPGSAPAKEDGFSWLLPPPPPPPLPFQTSQDAPPNLTASLFTHSEVQVLGDPFPVVNPSYTSSFVLTCPEVSAFAGAQRTSGSDQPSDPLNSPSLLAL

SEQ ID NO: 22043 - protein, 400 aa, Homo sapiens
MEASFVQTTMALGLSSKKASSRNVAVERKNLITVCRFSVKTLLEKYTAEPIDDSSEEFVNFAAILEQILSHRFKGPVSWFSSDGQRGFWDYIRLACSKVPNNCVSSIENMENISTARAKGRAWIRVALMEKRMSEYITTALRDTRTTRRFYDSGAIMLRDEATILTGMLIGLSAIDFSFCLKGEVLDGKTPVVIDYTPYLKFTQSYDYLTDEEERHSAESSTSEDNSPEHPYLPLVTDEDSWYSKWHKMEQKFRIVYAQKGYLEELVRLRESQLKDLEAENRRLQLQLEEAAAQNQREKRELEGVILELQEQLTGLIPSDHAPLAQGSKELTTPLVNQWPSLGTLNGAEGASNSKLYRRHSFMSTEPLSAEASLSSDSQRLGEGTRDEEPWGPIGSSEPN

SEQ ID NO: 22044 - protein, 192 aa, Homo sapiens
MADQIPLYPVRSAAAAAANRKRAAYYSAAGPRPGADRHSSCCGWLINICRRKKELKARTVWLGCPEKCEEKHPRNSIKNQKYNVFTFIPGVLYEQFKFFLNLYFLVISCSQFVPALKIGYLYTYWAPLGFVLAVTMTREAIDEFRRFQRDKEVNSQLYSKLTVRGKVQVKSSDIQVGDLIIVEKNQRIPSDM

SEQ ID NO: 22045 - protein, 542 aa, Homo sapiens
MKLTSCLERALGDVFLLIGKECPFLLRDLLSSEELAQVFSQSVMNVLKVFVGSPCGLNLRNVLWHGFASPEEIPPKYCSMMILLTAGLGQLLKSYLQNTKLTLAHRSFISLTNLEDLIVFPDVTYEVLSVLEEVMMKSAFILKIMLPYWEVALVKFKSHRFADCAILLLTQLETGLRNVFATLNRCPKRLLTAEILAKHLNDGKINQLPLFLGEPAMEFLWDFLNHQEGPRIRDHLSHGEINLHEFSKETTNQLLAFSLVLLLRFVDDCLLSVFKEKSAVELLISLAEGYSSRCHPVFQLKKQVLSCEESIRVWALLPFPEELTRQAVRLEDNSETNACHSLITKMTDELYHHMPENRCVLKDLDRLPTETWPQLLRELCSTPVPTLFCPRIVLEVLVVLRSISEQCRRVSSQVTVASELRHRQWVERTLRSRQRQNYLRMWSSIRLLSPVLSLILLLIALELVNIHAVCGKNAHEYQQYLKFVKSILQYTENLVAYTSYEKNKWNETINLTHTALLKMWTFSEKKQMLIHLAKKSTSKVLL

SEQ ID NO: 22046 - protein, 963 aa, Homo sapiens
MTSPQLEWTLQTLLEQLNEDELKSFKSLLWAFPLEDVLQKTPWSEVEEADGKKLAEILVNTSSENWIRNATVNILEEMNLTELCKMAKAEMMEDGQVQEIDNPELGDAEEDSELAKPGEKEGWRNSMEKQSLVWKNTFWQGDIDNFHDDVTLRNQRFIPFLNPRTPRKLTPYTVVLHGPAGVGKTTLAKKCMLDWTDCNLSPTLRYAFYLSCKELSRMGPCSFAELISKDWPELQDDIPSILAQAQRILFVVDGLDELKVPPGALIQDICGDWEKKKPVPVLLGSLLKRKMLPRAALLVTTRPRALRDLQLLAQQPIYVRVEGFLEEDRRAYFLRHFGDEDQAMRAFELMRSNAALFQLGSAPAVCWIVCTTLKLQMEKGEDPVPTCLTRTGLFLRFLCSRFPQGAQLRGALRTLSLLAAQGLWAQMSVFHREDLERLGVQESDLRLFLDGDILRQDRVSKGCYSFIHLSFQQFLTALFYALEKEEGEDRDGHAWDIGDVQKLLSGEERLKNPDLIQVGHFLFGLANEKRAKELEATFGCRMSPDIKQELLQCKAHLHANKPLSVTDLKEVLGCLYESQEEELAKVVVAPFKEISIHLTNTSEVMHCSFSLKHCQDLQKLSLQVAKGVFLENYMDFELDIEFERCTYLTIPNWARQDLRSLRLWTDFCSLFSSNSNLKFLEVKQSFLSDSSVRILCDHVTRSTCHLQKVEIKNVTPDTAYRDFCLAFIGKKTLTHLTLAGHIEWERTMMLMLCDLLRNHKCNLQYLRLGGHCATPEQWAEFFYVLKANQSLKHLRLSANVLLDEGAMLLYKTMTRPKHFLQMLSLENCRLTEASCKDLAAVLVVSKKLTHLCLAKNPIGDTGVKFLCEGLSYPDCKLQTLVLQQCSITKLGCRYLSEALQEACSLTNLDLSINQIARGLWILCQALENPNCNLKHLRILDLLSSAIRSLKLWTWARIICGRVA

SEQ ID NO: 22047 - protein, 159 aa, Homo sapiens
MIKFQMVTFKDVAVVFTEEELGLLDSVQRKLYRDVMLENFRNLLLVAHQPFKPDLISQLEREEKLLMVETETPRDGCSGRKNQQKMESIQEVTVSYFSPKELSSRQTWQQSAGGLIRCQDFLKVFQGKNSQLQEQGNSLGQVWAGIPVQISEDKNYIFT

SEQ ID NO: 22048 - protein, 541 aa, Homo sapiens
MPGLRRDRLLTLLLLGALLSADLYFHLWPQVQRQLRPRERPRGCPCTGRASSLARDSAAAASDPGTIVHNFSRTEPRTEPAGGSHSGSSSKLQALFAHPLYNVPEEPPLLGAEDSLLASQEALRYYRRKVARWNRRHKMYREQMNLTSLDPPLQLRLEASWVQFHLGINRHGLYSRSSPVVSKLLQDMRHFPTISADYSQDEKALLGACDCTQIVKPSGVHLKLVLRFSDFGKAMFKPMRQQRDEETPVDFFYFIDFQRHNAEIAAFHLDRILDFRRVPPTVGRIVNVTKEILEVTKNEILQSVFFVSPASNVCFFAKCPYMCKTEYAVCGNPHLLEGSLSAFLPSLNLAPRLSVPNPWIRSYTLAGKEEWEVNPLYCDTVKQIYPYNNSQRLLNVIDMAIFDFLIGNMDRHHYEMFTKFGDDGFLIHLDNARGFGRHSHDEISILSPLSQCCMIKKKTLLHLQLLAQADYRLSDVMRESLLEDQLSPVLTEPHLLALDRRLQTILRTVEGCIVAHGQQSVIVDGPVEQLAPDSGQANLTS

SEQ ID NO: 22049 - protein, 850 aa, Homo sapiens
MLERRALLWQREAGPGWGDRARAGTGGAGGGCGGAMAERGPAFCGLYDTSSLLRYCNDDNLSGTSGMEVDDRVSALEQRLQLQEDELAVLKAALADALRRLRACEEQGAALRARGTPKGRAPPRLGTTASVCQLLKGLPTRTPLNGSGPPRRVGGYATSPSSPKKEATSGRSSVRRYLSPERLASVRREDPRSRTTSSSSNCSAKKEGKTKEVIFSVEDGSVKMFLRGRPVPMMIPDELAPTYSLDTRSELPSCRLKLEWVYGYRGRDCRANLYLLPTGEIVYFVASVAVLYSVEEQRQRHYLGHNDDIKCLAIHPDMVTIATGQVAGTTKEGKPLPPHVRIWDSVSLSTLHVLGLGVFDRAVCCVGFSKSNGGNLLCAVDESNDHMLSVWDWAKETKVVDVKCSNEAVLVATFHPTDPTVLITCGKSHIYFWTLEGGSLSKRQGLFEKHEKPKYVLCVTFLEGGDVVTGDSGGNLYVWGKGGNRITQAVLGAHDGGVFGLCALRDGTLVSGGGRDRRVVLWGSDYSKLQEVEVPEDFGPVRTVAEGHGDTLYVGTTRNSILQGSVHTGFSLLVQGHVEELWGLATHPSRAQFVTCGQDKLVHLWSSDSHQPLWSRIIEDPARSAGFHPSGSVLAVGTVTGRWLLLDTETHDLVAIHTDGNEQISVVSFSPDGAYLAVGSHDNLVYVYTVDQGGRKVSRLGKCSGHSSFITHLDWAQDSSCFVTNSGDYEILYWDPATCKQITSADAVRNMEWATATCVLGFGVFGIWSEGADGTDINAVARSHDGKLLASADDFGKVHLFSYPCCQPRALSHKYGGHSSHVTNVAFLWDDSMALTTGGKDTSVLQWRVV

SEQ ID NO: 22050 - protein, 576 aa, Homo sapiens
MAAAARPRGRALGPVLPPTPLLLLVLRVLPACGATARDPGAAAGLSLHPTYFNLAEAARIWATATCGERGPGEGRPQPELYCKLVGGPTAPGSGHTIQGQFCDYCNSEDPRKAHPVTNAIDGSERWWQSPPLSSGTQYNRVNLTLDLGQLFHVAYILIKFANSPRPDLWVLERSVDFGSTYSPWQYFAHSKVDCLKEFGREANMAVTRDDDVLCVTEYSRIVPLENGEVVVSLINGRPGAKNFTFSHTLREFTKATNIRLRFLRTNTLLGHLISKAQRDPTVTRRYYYSIKDISIGGQCVCNGHAEVCNINNPEKLFRCECQHHTCGETCDRCCTGYNQRRWRPAAWEQSHECEACNCHGHASNCYYDPDVERQQASLNTQGIYAGGGVCINCQHNTAGVNCEQCAKGYYRPYGVPVDAPDGCIPCSCDPEHADGCEQGSGRCHCKPNFHGDNCEKCAIGYYNFPFCLRIPIFPVSTPSSEDPVAGDIKGCDCNLEGVLPEICDAHGRCLCRPGVEGPRCDTCRSGFYSFPICQGPSEKVAIYKPESRPSAETEPASTWILDFPASRTGEINFYCL

SEQ ID NO: 22051 - protein, 157 aa, Homo sapiens
MKQTKLEIQKALAEDATVYEYDSIYDEMQKKKEENNPKLLLGKDRKPKYIHNLLKAVEIRKKEQEKRMEKKIQREREMEKGEFDDKEAFVTSAYKKKLQERAEEEEREKRAAALEACLDVTKQKDLSGFYRHLLNQAVGEEEVPKCSFREARSGIKE

SEQ ID NO: 22052 - protein, 547 aa, Homo sapiens
MAAVSLRLGDLVWGKLGRYPPWPGKIVNPPKDLKKPRGKKCFFVKFFGTEDHAWIKVEQLKPYHAHKEEMIKINKGKRFQQAVDAVEEFLRRAKGKDQTSSHNSSDDKNRRNSSEERSRPNSGDEKRKLSLSEGKVKKNMGEGKKRVSSGSSERGSKSPLKRAQEQSPRKRGRPPKDEKDLTIPESSTVKGMMAGPMAAFKWQPTASEPVKDADPHFHHFLLSQTEKPAVCYQAITKKLKICEEETGSTSIQAADSTAVNGSITPTDKKIGFLGLGLMGSGIVSNLLKMGHTVTVWNRTAEKEGARLGRTPAEVVSTCDITFACVSDPKAAKDLVLGPSGVLQGIRPGKCYVDMSTVDADTVTELAQVIVSRGGRFLEAPVSGNQQLSNDGMLVILAAGDRGLYEDCSSCFQAMGKTSFFLGEVGNAAKMMLIVNMVQGSFMATIAEGLTLAQVTGQSQQTLLDILNQGQLASIFLDQKCQNILQGNFKPDFYLKYIQKDLRLAIALGDAVNHPTPMAAAANEVYKRAKALDQSDNDMSAVYRAYIH

SEQ ID NO: 22053 - protein, 470 aa, Homo sapiens
MGWAAFNLSNVTGNSRILCSVYCNGSQITGSSNITVYRLPERVELAPLPPWQPVGQNFTLRCQVEDGSPRTSLTVVLLRWEEELSRQPAVEEPAEVTATVLASRDDHGAPFSCRTELDMQPQGLGLFVNTSAPRQLRTFVLPVTPPRLVAPRFLEVETSWPVDCTLDGLFPASEAQVYLALGDQMLNATVMNHGDTLTATATATARADQEGAREIVCNVTLGGERREARENLTVFSFLGPIVNLSEPTAHEGSTVTVSCMAGARVQVTLDGVPAAAPGQPAQLQLNATESDDGRSFFCSATLEVDGEFLHRNSSVQLRVLYGPKIDRATCPQHLKWKDKTRHVLQCQARGNPYPELRCLKEGSSREVPVGIPFFVNVTHNGTYQCQASSSRGKYTLVVVMDIEAGSSHFVPVFVAVLLTLGVVTIVLALMYVFREHQRSGSYHVREESTYLPLTSMQPTEAMGEEPSRAE

SEQ ID NO: 22054 - protein, 850 aa, Homo sapiens
MAEVEAVQLKEEGNRHFQLQDYKAATNSYSQALKLTKDKALLATLYRNRAACGLKTESYVQAASDASRAIDINSSDIKALYRRCQALEHLGKLDQAFKDVQRCATLEPRNQNFQEMLRRLNTSIQEKLRVQFSTDSRVQKMFEILLDENSEADKREKAANNLIVLGREEAGAEKIFQNNGVALLLQLLDTKKPELVLAAVRTLSGMCSGHQARATVILHAVRIDRICSLMAVENEEMSLAVCNLLQAIIDSLSGEDKREHRGKEEALVLDTKKDLKQITSHLLDMLVSKKVSGQGRDQALNLLNKNVPRKDLAIHDNSRTIYVVDNGLRKILKVVGQVPDLPSCLPLTDNTRMLASILINKLYDDLRCDPERDHFRKICEEYITGKFDPQDMDKNLNAIQTVSGILQGPFDLGNQLLGLKGVMEMMVALCGSERETDQLVAVEALIHASTKLSRATFIITNGVSLLKQIYKTTKNEKIKIRTLVTSDKTILYSVATTLVNCTNSYDVKEVIPELVQLAKFSKQHVPEEHPKDKKDFIDMRVKRLLKAGVISALACMVKADSAILTDQTKELLARVFLALCDNPKDRGTIVAQGGGKALIPLALEGTDVGKVKAAHALAKIAAVSNPDIAFPGERVYEVVRPLVRLLDTQRDGLQNYEALLGLTNLSGRSDKLRQKIFKERALPDIENYMFENHDQLRQAATECMCNMVLHKEVQERFLADGNDRLKLVVLLCGEDDDKVQNAAAGALAMLTAAHKKLCLKMTQVTTQWLEILQRLCLHDQLSVQHRGLVIAYNLLAADAELAKKLVESELLEILTVVGKQEPDEKKAEVVQTARECLIKCMDYGFIKPVS

SEQ ID NO: 22055 - protein, 282 aa, Homo sapiens
MAGRGGAARPNGPAAGNKICQFKLVLLGESAVGKSSLVLRFVKGQFHEYQESTIGAAFLTQTVCLDDTTVKFEIWDTAGQERYHSLAPMYYRGAQAAIVVYDITNTDTFARAKNWVKELQRQASPNIVIALAGNKADLASKRAVEFQANETCKCNGWKNPKPPTAPRMDLQQPAANLSELCRSCEHPLADHVSHLENVSEDEINRLLGMVVDVENLFMSVHKEEDTDTKQVYFYLFKLLRKCILQMTRPVVEGSLGSPPFEKPNIEQGVLNFVQYKFSHLAP

SEQ ID NO: 22056 - protein, 684 aa, Homo sapiens
MIPPQEASARRREIEDKLKQEEETLSFIRDSLEKSDQLTKNMVSILSSFESRLMKLENSIIPVHKQTENLQRLQENVEKTLSCLDHVISYYHVASDTEKIIREGPTGRLEEYLGSMAKIQKAVEYFQDNSPDSPELNKVKLLFERGKEALESEFRSLMTRHSKVVSPVLILDLISGDDDLEAQEDVTLEHLPESVLQDVIRISRWLVEYGRNQDFMNVYYQIRSSQLDRSIKGLKEHFHKSSSSSGVPYSPAIPNKRKDTPTKKPVKRPGTIRKAQNLLKQYSQHGLDGKKGGSNLIPLEGRDDMLDVETDAYIHCVSAFVKLAQSEYQLLADIIPEHHQKKTFDSLIQDALDGLMLEGENIVSAARKAIVRHDFSTVLTVFPILRHLKQTKPEFDQVLQGTAASTKNKLPGLITSMETIGAKALEDFADNIKNDPDKEYNMPKDGTVHELTSNAILFLQQLLDFQETAGAMLASQETSSSATSYSSEFSKRLLSTYICKVLGNLQLNLLSKSKVYEDPALSAIFLHNNYNYILKSLEKSELIQLVAVTQKTAERSYREHIEQQIQTYQRSWLKVTDYIAEKNLPVFQPGVKLRDKERQIIKERFKGFNDGLEELCKIQKAWAIPDTEQRDRIRQAQKTIVKETYGAFLQKFGSVPFTKNPEKYIKYGVEQVGDMIDRLFDTSA

SEQ ID NO: 22057 - protein, 567 aa, Homo sapiens
MKKSYSALKRSFEVEEVETPNSTPPRRVQTPLLRATVASSTQKFQDLGVKNSEPSARHVDSLSQRSPKASLRRVELSGPKAAEPVSRRTELSIDISSKQVENAGAIGPSRFGLKRAEVLGHKTPEPAPRRTEITIVKPQESAHRRMEPPASKVPEVPTAPATDAAPKRVEIQMPKPAEAPTAPSPAQTLENSEPAPVSQLQSRLEPKPQPPVAEATPRSQEATEAAPSCVGDMADTPRDAGLKQAPASRNEKAPVDFGYVGIDSILEQMRRKAMKQGFEFNIMVVGQSGLGKSTLINTLFKSKISRKSVQPTSEERIPKTIEIKSITHDIEEKGVRMKLTVIDTPGFGDHINNENCWQPIMKFINDQYEKYLQEEVNINRKKRIPDTRVHCCLYFIPATGHSLRPLDIEFMKRLSKVVNIVPVIAKADTLTLEERVHFKQRITADLLSNGIDVYPQKEFDEDSEDRLVNEKFREMIPFAVVGSDHEYQVNGKRILGRKTKWGTIEVENTTHCEFAYLRDLLIRTHMQNIKDITSSIHFEAYRVKRLNEGSSAMANGMEEKEPEAPEM

SEQ ID NO: 22058 - protein, 127 aa, Homo sapiens
MADTPRDAGLKQAPASRNEKAPVDFGYVGIDSILEQMRRKAMKQGFEFNIMVVGQSGLGKSTLINTLFKSKISRKSVQPTSEERIPKTIEIKSITHDIEEKGVRMKLTVIDTPGFGDHINNENCWQP

SEQ ID NO: 22059 - protein, 454 aa, Homo sapiens
MAVAAAAAAGPVFWRRLLGLLPGRPGLAALLGRLSDRLGRNRDRQRRRSPWLLLAPLLSPAVPQVTSPPCCLCPEGVHRFQWIRNLVPEFGVSSSHVRVLSSPAEFFELMKVDCLESTLEKSLQAKFPSNLKVSILLDFTRGSRGRKNSRTMLLPLLRRFPEQVRVSLFHTPHLRGLLRLLIPERFNETIGLQHIKVYLFDNSVILSGANLSDSYFTNRQDRYVFLQDCAEIADFFTELVDAVGDVSLQLQGDDTVQVVDGMVHPYKGDRAEYCKAANKRVMDVINSARTRQQMLHAQTFHSNSLLTQEDAAAAGDRRPAPDTWIYPLIQMKPFEIQIDEIVTETLLTEAERGAKVYLTTGYFNLTQAYMDLVLGTRAEYQILLASPEVNGFFGAKGVAGAIPAAYVHIERQFFSEVCSLGQQERVQLQEYWRRGWTFHAKGQFTGTWRPRLRS

SEQ ID NO: 22060 - protein, 545 aa, Homo sapiens
MSKFRGLRYMSLAFKIFFPQTLRALSRKELCLFRKHHWRDVRQFSQWSETDLLHGHPLFLRRKPVLSFQGSHLRSRATYLVFLPGLHVGLCSGPCEMAEQRFCVDYAKRGTAGCKKCKEKIVKGVCRIGKVVPNPFSESGGDMKEWYHIKCMFEKLERARATTKKIEDLTELEGWEELEDNEKEQITQHIADLSSKAAGTPKKKAVVQAKLTTTGQVTSPVKGASFVTSTNPRKFSGFSAKPNNSGEAPSSPTPKRSLSSSKCDPRHKDCLLREFRKLCAMVADNPSYNTKTQIIQDFLRKGSAGDGFHGDVYLTVKLLLPGVIKTVYNLNDKQIVKLFSRIFNCNPDDMARDLEQGDVSETIRVFFEQSKSFPPAAKSLLTIQEVDEFLLRLSKLTKEDEQQQALQDIASRCTANDLKCIIRLIKHDLKMNSGAKHVLDALDPNAYEAFKASRNLQDVVERVLHNAQEVEKEPGQRRALSVQASLMTPVQPMLAEACKSVEYAMKKCPNGMFSEIKYDGERVQVHKNGDHFSYFSRSLKPVLPH

SEQ ID NO: 22061 - protein, 604 aa, Homo sapiens
MNRKDSKRKSHQECTGKIGGRGRPRQVRRHKTCPSPREISKVMASMNLGLLSEGGCSEDELLEKCIQSFDSAGSLCHEDHMLNMVLAMHSWVLPSADLAARLLTSYQKATGDTQELRRLQICHLVRYWLMRHPEVMHQDPQLEEVIGRFWATVAREGNSAQRRLGDSSDLLSPGGPGPPLPMSSPGLGKKRKVSLLFDHLETGELAQHLTYLEFRSFQAITPQDLRSYVLQGSVRGCPALEGSVGLSNSVSRWVQVMVLSRPGPLQRAQVLDKFIHVAQRLHQLQNFNTLMAVTGGLCHSAISRLKDSHAHLSPDSTKELVALQGQHPPCSANEDLLHLLTLSLDLFYTEDEIYELSYAREPRCPKSLPPSPFNAPLVVEWAPGVTPKPDRVTLGRHVEQLVESVFKNYDPEGRGTISQEDFERLSGNFPFACHGLHPPPRQGRGSFSREELTGYLLRASAICSKLGLAFLHTFHEVTFRKPTFCDSCSGFLWGVTKQGYRCRECGLCCHKHCRDQVKVECKKRPGAKGDAGPPGAPVPSTPAPHASCGSEENHSYTLSLEPETGCQLRHAWTQTESPHPSWETDTVPCPVMDPPSTASSKLDS

SEQ ID NO: 22062 - protein, 151 aa, Homo sapiens
MARTKQTARKSTGGKAPRKQLATKAARKSAPSTGGVKKPHRYRPGTVALREIRRYQKSTELLIRKLPFQRLVREIAQDFKTDLRFQSAAIGALQVRQRPGAGGGLGGFRSPSGINSAALVLNRRLAKRTWWVCSKIPTCVPSTLRESPSCP

SEQ ID NO: 22063 - protein, 155 aa, Homo sapiens
MAASFFSDFGLMWYLEELKKEEFRKFKEHLKQMTLQLELKQIPWTEVKKASREELANLLIKHYEEQQAWNITLRIFQKMDRKDLCMKVMRERTGYTKTYQAHAKQKFSRLWSSKSVTEIHLYFEEEVKQEECDHLDRLFAPKEAGKQPRTVIIQG

SEQ ID NO: 22064 - protein, 334 aa, Homo sapiens
MERRRITSAARRSYVSSGEMMVGGLAPGRRLGPGTRLSLARMPPPLPTRVDFSLAGALNAGFKETRASERAEMMELNDRFASYIEKVRFLEQQNKALAAELNQLRAKEPTKLADVYQAELRELRLRLDQLTANSARLEVERDNLAQDLATVRQKLQDETNLRLEAENNLAAYRQEADEATLARLDLERKIESLEEEIRFLRKIHEEEVRELQEQLARQQVHVELDVAKPDLTAALKEIRTQYEAMASSNMHEAEEWYRSKFADLTDAAARNAELLRQAKHEANDYRRQLQSLTCDLESLRGTEYQDLLNVKLALDIEIATYRKLLEGEENRITI

SEQ ID NO: 22065 - protein, 864 aa, Homo sapiens
MKRSRSALSVAGTGDERSRETPESDRANMLGADLRRPRRRLSSGPGLGWAQPEPSDPGVPLPPRPTTLPLLIPPRISITRAENDSFEAENGPTPSPGRSPLDSQASPGLVLHAGAATSQRRESFLYRSDSDYDMSPKTMSRNSSVTSEAHAEDLIVTPFAQVLASLRSVRSNFSLLTNVPVPSNKRSPLGGPTPVCKATLSEETCQQLARETLEELDWCLEQLETMQTYRSVSEMASHKFKRMLNRELTHLSEMSRSGNQVSEYISTTFLDKQNEVEIPSPTMKEREKQQAPRPRPSQPPPPPVPHLQPMSQITGLKKLMHSNSLNNSNIPRFGVKTDQEELLAQELENLNKWGLNIFCVSDYAGGRSLTCIMYMIFQERDLLKKFRIPVDTMVTYMLTLEDHYHADVAYHNSLHAADVLQSTHVLLATPALDAVFTDLEILAALFAAAIHDVDHPGVSNQFLINTNSELALMYNDESVLENHHLAVGFKLLQEDNCDIFQNLSKRQRQSLRKMVIDMVLATDMSKHMTLLADLKTMVETKKVTSSGVLLLDNYSDRIQVLRNMVHCADLSNPTKPLELYRQWTDRIMAEFFQQGDRERERGMEISPMCDKHTASVEKSQVGFIDYIVHPLWETWADLVHPDAQEILDTLEDNRDWYYSAIRQSPSPPPEEESRGPGHPPLPDKFQFELTLEEEEEEEISMAQIPCTAQEALTAQGLSGVEEALDATIAWEASPAQESLEVMAQEASLEAELEAVYLTQQAQSTGSAPVAPDEFSSREEFVVAVSHSSPSALALQSPLLPAWRTLSVSEHAPGLPGLPSTAAEVEAQREHQAAKRACSACAGTFGEDTSALPAPGGGGSGGDPT

SEQ ID NO: 22066 - protein, 104 aa, Homo sapiens
MMMGSARVAELLLLHGAEPNCADPATLTRPVHDAAREGFLDTLVVLHRAGARLDVRDAWGRLPVDLAEELGHRDVARYLRAAAGGTRGSNHARIDAAEGPSGED

SEQ ID NO: 22067 - protein, 100 aa, Homo sapiens
MDPLGAAKPQWPWRRCLAALLFQLLVAVCFFSYLRVSRDDATGSPRAPSGSSRQDTTPTRPTLLILLRTWPFHIPVALSRCSEMVPGTADCHITADRKVY

SEQ ID NO: 22068 - protein, 511 aa, Homo sapiens
TGPSFWLGNETLKVPLALFALNRQRLCERLRKNPAVQAGSIVVLQGGEETQRYCTDTGVLFRQESFFHWAFGVTEPGCYGVIDVDTGKSTLFVPRLPASHATWMGKIHSKEHFKEKYAVDDVQYVDEIASVLTSQKPSVLLTLRGVNTDSGSVCREASFDGISKFEVNNTILHPEIVECRVFKTDMELEVLRYTNKISSEAHREVMKAVKVGMKEYELESLFEHYCYSRGGMRHSSYTCICGSGENSAVLHYGHAGAPNDRTIQNGDMCLFDMGGEYYCFASDITCSFPANGKFTADQKAVYEAVLRSSRAVMGAMKPGARTGRTVFSVGTMSTPPAGRNGVWWPDMHRLADRIHLEELAHMGILSGSVDAMVQAHLGAVFMPHGLGHFLGIDVHDVGGYPEGVERIDEPGLRSLRTARHLQPGMVLTVEPGIYFIDHLLDEALADPARASFLNREVLQRFRGFGGVRIEEDVVVTDSGIELLTCVPRTVEEIEACMAGCDKAFTPFSGPK

SEQ ID NO: 22069 - protein, 1356 aa, Homo sapiens
MLAVGPAMDRDYPQHEPPPAGSLLYSPPPLQSAMLHCPYWNTFSLPPYPAFSSDSRPFMSSASFLGSQPCPDTSYAPVATASSLPPKTCDFAQDSSYFEDFSNISIFSSSVDSLSDIVDTPDFLPADSLNQVSTIWDDNPAPSTHDKLFQLSRPFAGFEDFLPSHSTPLLVSYQEQSVQSQPEEEDEAEEEEAEELGHTETYADYVPSKSKIGKQHPDRVVETSTLSSVPPPDITYTLALPSDSGALSALQLEAITYACQQHEVLLPSGQRAGFLIGDGAGVGKGRTVAGVILENHLRGRKKALWFSVSNDLKYDAERDLRDIEATGIAVHALSKIKYGDTTTSEGVLFATYSALIGESQAGGQHRTRLRQILDWCGEAFEGVIVFDECHKAKNAGSTKMGKAVLDLQNKLPLARVVYASATGASEPRNMIYMSRLGIWGEGTPFRNFEEFLHAIEKRGVGAMEIVAMDMKVSGMYIARQLSFSGVTFRIEEIPLAPAFECVYNRAALLAADWIGLESRKSLWGQFWSAHQRFFKYLCIAAKVRRLVELAREELARDKCVVIGLQSTGEARTREVLGENDGHLNCFVSAAEGVFLSLIQKHFPSTKRKRDRGAGSKRKRRPRGRGAKAPRLACETAGVIRISDDSSTESDPGLDSDFNSSPESLVDDDVVIVDAVGLPSDDRGPLCLLQRDPHGPGVLERVERLKQDLLDKVRRLGRELPVNTLDELIDQLGGPQRVAEMTGRKGRVVSRPDGTVAFESRAEQGLSIDHVNLREKQRFMSGEKLVAIISEASSSGVSLQADRRVQNQRRRVHMTLELPWSADRAIQQFGRTHRSNQVSAPEYVFLISELAGERRFASIVAKRLESLGALTHGDRRATESRDLSKYNFENKYGTRALHCVLTTILSQTENKVPVPQGYPGGVPTFFRDMKQGLLSVGIGGRESRNGCLDVEKDCSITKFLNRILGLEVHKQNALFQYFSDTFDHLIEMDKREGKYDMGILDLAPGIEEIYEESQQVFLAPGHPQDGQVVFYKISVDRGLKWEDAFAKSLALTGPYDGFYLSYKVRGNKPSCLLAEQNRGQFFTVYKPNIGRQSQLEALDSLRRKFHRVTAEEAKEPWESGYALSLTHCSHSAWNRHCRLAQEGKDCLQGLRLRHHYMLCGALLRVWGRIAAVMADVSSSSYLQIVRLKTKDRKKQVGIKIPEGCVRRVLQELRLMDADVKRRQAPALGCPAPPAPRPLALPCGPGEVLDLTYSPPAEAFPPPPHFSFPAPLSLDAGPGVVPLGTPDAQADPAALAHQGCDINFKEVLEDMLRSLHAGPPSEGALGEGAGAGGAAGGGPERQSVIQFSPPFPGAQAPL

SEQ ID NO: 22070 - protein, 1073 aa, Homo sapiens
MAVALGTRRRDRVKLWADTFGGDLYNTVTKYSGSLLLQKKYKDVESSLKIEEVDGLELVRKFSEDMENMLRRKVEAVQNLVEAAEEADLNHEFNESLVFDYYNSVLINERDEKGNFVELGAEFLLESNAHFSNLPVNTSISSVQLPTNVYNKDPDILNGVYMSEALNAVFVENFQRDPTLTWQYFGSATGFFRIYPGIKWTPDENGVITFDCRNRGWYIQAATSPKDIVILVDVSGSMKGLRMTIAKHTITTILDTLGENDFINIIAYNDYVHYIEPCFKGILVQADRDNREHFKLLVEELMVKGVGVVDQALREAFQILKQFQEAKQGSLCNQAIMLISDGAVEDYEPVFEKYNWPDCKVRVFTYLIGREVSFADRMKWIACNNKGYYTQISTLADTQENVMEYLHVLSRPMVINHDHDIIWTEAYMDSKLLSSQAQSLTLLTTVAMPVFSKKNETRSHGILLGVVGSDVALRELMKLAPRYKLGVHGYAFLNTNNGYILSHPDLRPLYREGKKLKPKPNYNSVDLSEVEWEDQAESLRTAMINRETGTLSMDVKVPMDKGKRVLFLTNDYFFTDISDTPFSLGVVLSRGHGEYILLGNTSVEEGLHDLLHPDLALAGDWIYCITDIDPDHRKLSQLEAMIRFLTRKDPDLECDEELVREVLFDAVVTAPMEAYWTALALNMSEESEHVVDMAFLGTRAGLLRSSLFVGSEKVSDRKFLTPEDEASVFTLDRFPLWYRQASEHPAGSFVFNLRWAEGPESAGEPMVVTASTAVAVTVDKRTAIAAAAGVQMKLEFLQRKFWAATRQCSTVDGPCTQSCEDSDLDCFVIDNNGFILISKRSRETGRFLGEVDGAVLTQLLSMGVFSQVTMYDYQAMCKPSSHHHSAAQPLVSPISAFLTATRWLLQELVLFLLEWSVWGSWYDRGAEAKSVFHHSHKHKKQDPLQPCDTEYPVFVYQPAIREANGIVECGPCQKVFVVQQIPNSNLLLLVTDPTCDCSIFPPVLQEATEVKYNASVKCDRMRSQKLRRRPDSCHAFHPEENAQDCGGASDTSASPPLLLLPVCAWGLLPQLLR

SEQ ID NO: 22071 - protein, 140 aa, Homo sapiens
FSDENRTYQASSPDEVALVQWTESVGLTLVSRDLTSMQLKTPSGQVLSFCILQLFPFTSESKRMGVIVRDESTAEITFYMKGADVAMSPIVQYNDWLEEEETGRDTAVGCIKKGARPTPLLQPFLPSLQPPVQRQIQSTG

SEQ ID NO: 22072 - protein, 895 aa, Homo sapiens
MAASTGYVRLWGAARCWVLRRPMLAAAGGRVPTAAGAWLLRGPVITALTPMTIPDVFPHLPLIAITRNPVFPRFIKIIEVKNKKLVELLRRKVRLAQPYVGVFLKRDDSNESDVVESLDEIYHTGTFAQIHEMQDLGDKLRMIVMGHRRVHISRQLEVEPEEPEAENKHKPRRKSKRGKKEAEDELSARHPAELAMEPTPELPAEVLMVEVENVVHEDFQVTEEVKALTAEIVKTIRDIIALNPLYRESVLQMMQAGQRVVDNPIYLSDMGAALTGAESHELQDVLEETNIPKRLYKALSLLKKEFELSKLQQRLGREVEEKIKQTHRKYLLQEQLKIIKKELGLEKDDKDAIEEKFRERLKELVVPKHVMDVVDEELSKLGLLDNHSSEFNVTRNYLDWLTSIPWGKYSNENLDLARAQAVLEEDHYGMEDVKKRILEFIAVSQLRGSTQGKILCFYGPPGVGKTSIARSIARALNREYFRFSVGGMTDVAEIKGHRRTYVGAMPGKIIQCLKKTKTENPLILIDEVDKIGRGYQGDPSSALLELLDPEQNANFLDHYLDVPVDLSKVLFICTANVTDTIPEPLRDRMEMINVSGYVAQEKLAIAERYLVPQARALCGLDESKAKLSSDVLTLLIKQYCRESGVRNLQKQVEKVLRKSAYKIVSGEAESVEVTPENLQDFVGKPVFTVERMYDVTPPGVVMGLAWTAMGGSTLFVETSLRRPQDKDAKGDKDGSLEVTGQLGEVMKESARIAYTFARAFLMQHAPANDYLVTSHIHLHVPEGATPKDGPSAGCTIVTALLSLAMGRPVRQNLAMTGEVSLTGKILPVGGIKEKTIAAKRAGVTCIVLPAENKKDFYDLAAFITEGLEVHFVEHYREIFDIAFPDEQAEALAVER

SEQ ID NO: 22073 - protein, 398 aa, Homo sapiens
MDPVVGCGRGLFGFVFSAGGPRGVLPRPCRVLVLLNPRGGKGKALQLFRSHVQPLLAEAEISFTLMLTERRNHARELVRSEELGRWDALVVMSGDGLMHEVVNGLMERPDWETAIQKPLCSLPAGSGNALAASLNHYAGYEQVTNEDLLTNCTLLLCRRLLSPMNLLSLHTASGLRLFSVLSLAWGFIADVDLESEKYRRLGEMRFTLGTFLRLAALRTYRGRLAYLPVGRVGSKTPASPVVVQQGPVDAHLVPLEEPVPSHWTVVPDEDFVLVLALLHSHLGSEMFAAPMGRCAAGVMHLFYVRAGVSRAMLLRLFLAMEKGRHMEYECPYLVYVPVVAFRLEPKDGKGVFAVDGELMVSEAVQGQVHPNYFWMVSGCVEPPPSWKPQQMPPPEEPL

SEQ ID NO: 22074 - protein, 961 aa, Homo sapiens
MPIVDKLKEALKPGRKDSADDGELGKLLASSAKKVLLQKIEFEPASKSFSYQLEALKSKYVLLNPKTEGASRHKSGDDPPARRQGSEHTYESCGDGVPAPQKVLFPTERLSLRWERVFRVGAGLHNLGNTCFLNATIQCLTYTPPLANYLLSKEHARSCHQGSFCMLCVMQNHIVQAFANSGNAIKPVSFIRDLKKIARHFRFGNQEDAHEFLRYTIDAMQKACLNGCAKLDRQTQATTLVHQIFGGYLRSRVKCSVCKSVSDTYDPYLDVALEIRQAANIVRALELFVKADVLSGENAYMCAKCKKKVPASKRFTIHRTSNVLTLSLKRFANFSGGKITKDVGYPEFLNIRPYMSQNNGDPVMYGLYAVLVHSGYSCHAGHYYCYVKASNGQWYQMNDSLVHSSNVKVVLNQQAYVLFYLRIPGSKKSPEGLISRTGSSSLPGRPSVIPDHSKKNIGNGIISSPLTGKRQDSGTMKKPHTTEEIGVPISRNGSTLGLKSQNGCIPPKLPSGSPSPKLSQTPTHMPTILDDPGKKVKKPAPPQHFSPRTAQGLPGTSNSNSSRSGSQRQGSWDSRDVVLSTSPKLLATATANGHGLKGNDESAGLDRRGSSSSSPEHSASSDSTKAPQTPRSGAAHLCDSQETNCSTAGHSKTPPSGADSKTVKLKSPVLSNTTTEPASTMSPPPAKKLALSAKKASTLWRATGNDLRPPPPSPSSDLTHPMKTSHPVVASTWPVHRARAVSPAPQSSSRLQPPFSPHPTLLSSTPKPPGTSEPRSCSSISTALPQVNEDLVSLPHQLPEASEPPQSPSEKRKKTFVGEPQRLGSETRLPQHIREATAAPHGKRKRKKKKRPEDTAASALQEGQTQRQPGSPMYRREGQAQLPAVRRQEDGTQPQVNGQQVGCVTDGHHASSRKRRRKGAEGLGEEGGLHQDPLRHSCSPMGDGDPEAMEESPRKKKKKKR

SEQ ID NO: 22075 - protein, 267 aa, Homo sapiens
SADPKLSLMPWFHGKISGQEAVQQLQPPEDGLFLVRESARHPGDYVLCVSFGRDVIHYRVLHRDGHLTIDEAVFFCNLMDMVERPPGNGTGCWGSPPWGWAHGCPTILQHYSKDKGAICTKLVRPKRKHGTKSAEEELARAGWLLNLQHLTLGAQIGEGEFGAVLQGEYLGQKVAVKNIKCDVTAQAFLDETAVMTKMQHENLVRLLGVILHQGLYIVMEHVSKGNLVNFLRTRGRALVNTAQLLQFSLHVAEGMEYLESKKLVHRD

SEQ ID NO: 22076 - protein, 950 aa, Homo sapiens
MNEAMATDSPRRPSRCTGGVVVRPQAVTEQSYMESVVTFLQDVVPQAYSGTPLTEEKEKIVWVRFENADLNDTSRNLEFHEIHSTGNEPPLLIMIGYSDGMQVWSIPISGEAQELFSVRHGPIRAARILPAPQFGAQKCDNFAEKRPLLGVCKSIGSSGTSPPYCCVDLYSLRTGEMVKSIQFKTPIYDLHCNKRILVVVLQEKIAAFDSCTFTKKFFVTSCYPCPGPNMNPIALGSRWLAYAENKLIRCHQSRGGACGDNIQSYTATVISAAKTLKSGLTMVGKVVTQLTGTLPSGVTEDDVAIHSNSRRSPLVPGIITVIDTETVGEGQVLVSEDSDSDGIVAHFPAHEKPVCCMAFNTSGMLLVTTDTLGHDFHVFQILTHPWSSSQCAVHHLYTLHRGETEAKVQDICFSHDCRWVVVSTLRGTSHVFPINPYGGQPCVRTHMSPRVVNRMSRFQKSAGLEEIEQELTSKQGGRCSPVPGLSSSPSGSPLHGKLNSQDSYNNFTNNNPGNPRLSPLPSLMVVMPLAQIKQPMTLGTITKRTGPYLFGAGCFSIKAPCKVKPPPQISPSKSMGGEFCVAAIFGTSRSWFANNAGLKREKDQSKQVVVESLYIISCYGTLVEHMMEPRPLSTAPKISDDTPLEMMTSPRASWTLVRTPQWNELQPPFNANHPLLLAADAVQYYQFLLAGLVPPGSPGPITRHGSYDSLASDHSGQEDEEWLSQVEIVTHTGPHRRLWMGPQFQFKTIHPSGQTTVISSSSSVLQSHGPSDTPQPLLDFDTDDLDLNSLRIQPVRSDPVSMPGSSRPVSDRRGVSTVIDAASGTFDRSVTLLEVCGSWPEGFGLRHMSSMEHTEEGLRERLADAMAESPSRDVVGSGTDTALDVAVKTFPPERHVAVKCFELQREGSIETLSNSSGSTSGSIPRNFDGYRSPLPTNESQPLSLFPTGFP

SEQ ID NO: 22077 - protein, 349 aa, Homo sapiens
MRGAASASVREPTPLPGRGAPRTKPRAGRGPTVGTPATLALPARGRPRSRNGLASKGQRGAAPTGPGHRALPSRDTALPQERNKKLEAVGTGIEPKAMSQGLVTFGDVAVDFSQEEWEWLNPIQRNLYRKVMLENYRNLASLGLCVSKPDVISSLEQGKEPWTVKRKMTRAWCPDLKAVWKIKELPLKKDFCEGKLSQAVITERLTSYNLEYSLLGEHWDYDALFETQPGLVTIKNLAVDFRQQLHPAQKNFCKNGIWENNSDLGSAGHCVAKPDLVSLLEQEKEPWMVKRELTGSLFSGECRRAWCGKSTARESGAFTKKAASSLIYSRKLYPGSLGLERKLNSGSSK

SEQ ID NO: 22078 - protein, 320 aa, Homo sapiens
MDNMSITNTPTSNDACLSIVHSLMCHRQGGESETFAKRAIESLVKKLKEKKDELDSLITAITTNGAHPSKCVTIQRTLDGRLQVAGRKGFPHVIYARLWRWPDLHKNELKHVKYCQYAFDLKCDSVCVNPYHYERVVSPGIDLSGLTLQSNAPSSMMVKDEYVHDFEGQPSLSTEGHSIQTIQHPPSNRASTETYSTPALLAPSESNATSTANFPNIPVASTSQPASILGGSHSEGLLQIASGPQPGQQQNGFTGQPATYHHNSTTTWTGSRTAPYTPNLPHHQNGHLQHHPPMPPHPGHYWPVHNELAFQPPISNHPGL

SEQ ID NO: 22079 - protein, 1140 aa, Homo sapiens
MLGRRLGARASYSPYRAGRQGPQQRGRDPGIQLTELPRKDGADAVFPGPSLEPPAGSSGVKATGTLKRPTSLSRHASAAGFPLSGAASWTLGRSHRSPLTAASPGELPTEGAGPDVVEDISHLLADVARFAEGLEKLKECVLRDDLLEARRPRAHECLGEALRVMHQIISKYPLLNTVETLTAAGTLIAKVKAFHYESNNDLEKQEFEKALETIAVAFSSTVSEFLMGEVDSSTLLAVPPGDSSQSMESLYGPGSEGTPPSLEDCDAGCLPAEEVDVLLQRCEGGVDAALLYAKNMAKYMKDLISYLEKRTTLEMEFAKGLQKIAHNCRQSVMQEPHMPLLSIYSLALEQDLEFGHSMVQAVGTLQTQTFMQPLTLRRLEHEKRRKEIKEAWHRAQRKLQEAESNLRKAKQGYVQRCEDHDKARFLVAKAEEEQAGSAPGAGSTATKTLDKRRRLEEEAKNKAEEAMATYRTCVADAKTQKQELEDTKVTALRQIQEVIRQSDQTIKSATISYYQMMHMQTAPLPVHFQMLCESSKLYDPGQQYASHVRQLQRDQEPDVHYDFEPHVSANAWSPVMRARKSSFNVSDVARPEAAGSPPEEGGCTEGTPAKDHRAGRGHQVHKSWPLSISDSDSGLDPGPGAGDFKKFERTSSSGTMSSTEELVDPDGGAGASAFEQADLNGMTPELPVAVPSGPFRHEGLSKAARTHRLRKLRTPAKCRECNSYVYFQGAECEECCLACHKKCLETLAIQCGHKKLQGRLQLFGQDFSHAARSAPDGVPFIVKKCVCEIERRALRTKGIYRVNGVKTRVEKLCQAFENGKELVELSQASPHDISNVLKLYLRQLPEPLISFRLYHELVGLAKDSLKAEAEAKAASRGRQDGSESEAVAVALAGRLRELLRDLPPENRASLQYLLRHLRRIVEVEQDNKMTPGNLGIVFGPTLLRPRPTEATVSLSSLVDYPHQARVIETLIVHYGLVFEEEPEETPGGQDESSNQRAEVVVQVPYLEAGEAVVYPLQEAAADGCRESRVVSNDSDSDLEEASELLSSSEASALGHLSFLEQQQSEASLEVASGSHSGSEEQLEATAREDGDGDEDGPAQQLSGFNTNQSNNVLQAPLPPMRLRGGRMTLGSCRERQPEFV

SEQ ID NO: 22080 - protein, 114 aa, Homo sapiens
MQFGVPLARNQLIQKKLADMLTEITLGLHACLQLGRLKDQDKAAPEMVSLLKRNNCGKALDIARQARDMLGGNGISDEYHVIRHAMNLEAVNTYEGMFLRQVSSEGSPGVRPDS

SEQ ID NO: 22081 - protein, 1335 aa, Homo sapiens
LSEGNVEQELRASLAALRLASPEPLVAFSHHVLDKLVRLVIRPPIISGQIVNLGRGAFEAMAHVVSLVHRSLEAAQDARGHCPQLAAYVHYAFRLPGTEPSLPDGAPPVTVQAATLARGSGRPASLYLARSKSISSSNPDLAVAPGSVDDEVSRILASKGIDRSHSWVNSAYAPGGSKAVLRRAPPYCGADPRQLLHEELALQWVVSSSAVREAILQHAWFFFQLMVKSMALHLLLGQRLDTPRKLRFPGRFLDDITALVGSVGLEVITRVHKDVELAEHLNASLAFFLSDLLSLVDRGFVFSLVRAHYKQVATRLQSSPNPAALLTLRMEFTRILCSHEHYVTLNLPCCPLSPPASPSPSVSSTTSQSSTFSSQAPDPKVTSMFELSGPFRQQHFLAGLLLTELALALEPEAEGAFLLHKKAISAVHSLLCGHDTDPRYAEATVKARVAELYLPLLSIARDTLPRLHDFAEGPGQRSRLASMLDSDTEGEGDIAGTINPSVAMAIAGGPLAPGSRASISQGPPTASRAGCALSAESSRTLLACVLWVLKNTEPALLQRWATDLTLPQLGRLLDLLYLCLAAFEYKGKKAFERINSLTFKKSLDMKARLEEAILGTIGARQEMVRRSRERSPFGNPENVRWRKSVTHWKQTSDRVDKTKDEMEHEALVEGNLATEASLVVLDTLEIIVQTVMLSEARESVLGAVLKVVLYSLGSAQSALFLQHGLATQRALVSKFPELLFEEDTELCADLCLRLLRHCGSRISTIRTHASASLYLLMRQNFEIGHNFARVKMQVTMSLSSLVGTTQNFSEEHLRRSLKTILTYAEEDMGLRDSTFAEQVQDLMFNLHMILTDTVKMKEHQEDPEMLIDLMYRIARGYQGSPDLRLTWLQNMAGKHAELGNHAEAAQCMVHAAALVAEYLALLEDHRHLPVGCVSFQNISSNVLEESAISDDILSPDEEGFCSGKHFTELGLVGLLEQAAGYFTMGGLYEAVNEVYKNLIPILEAHRDYKKLAAVHGKLQEAFTKIMHQSSGWERVFGTYFRVGFYGAHFGDLDEQEFVYKEPSITKLAEISHRLEEFYTERFGDDVVEIIKDSNPVDKSKLDSQKAYIQITYVEPYFDTYELKDRVTYFDRNYGLRTFLFCTPFTPDGRAHGELPEQHKRKTLLSTDHAFPYIKTRIRVCHREETVLTPVEVAIEDMQKKTRELAFATEQDPPDAKMLQMVLQGSVGPTVNQGPLEVAQVFLAEIPEDPKLFRHHNKLRLCFKDFCKKCEDALRKNKALIGPDQKEYHRELERNYCRLREALQPLLTQRLPQLMAPTPPGLRNSLNRASFRKADL

SEQ ID NO: 22082 - protein, 123 aa, Homo sapiens
MEELTIWEQHTATLSKQLFLPLILSQDPRRGFGIAISGGRDRPGGSMVVSDVVPGGPAEGRLQTGDHIVMVNGVSMENATSAFAIQILKTCTKMANITVKRPRRIHLPATKASPSSPGRQDSD

SEQ ID NO: 22083 - protein, 390 aa, Homo sapiens; identical to SEQ ID NO: 5353

SEQ ID NO: 22084 - protein, 40 aa, Homo sapiens
MSAGALGALQLPGVLTRLRADLLSYLRHVQWLRRAGGSSL

SEQ ID NO: 22085 - protein, 279 aa, Homo sapiens
MQPDPRPSGAGACCRFLPLQSQCPEGAGDAVMYASTECKAEVTPSQHGNRTFSYTLEDHTKQAFGIMNELRLSQQLCDVTLQVKYQDAPAAQFMAHKVVLASSSPVFKAMFTNGLREQGMEVVSIEGIHPKVMERLIEFAYTASISMGEKCVLHVMNGAVMYQIDSVVRACSDFLVQQLDPSNAIGIANFAEQIGCVELHQRAREYIYMHFGEVAKQEEFFNLSHCQLVTLISRDDLNVRCESEVFHACINWVKYDCEQRRFYVQALLRAVRCHSLTPN

SEQ ID NO: 22086 - protein, 793 aa, Homo sapiens
MPLPGGLWWLLCCRRGFTLLHRDYGDGELSGDGDEDEDEETFELRTPSPAGGGRGPLEVTLTQPVRSGPVSNRLQSWEETWSLIPEKGLPEDDPDIVVKGWLYREPRGGGARPWLPPRRAWFVLTRDSLDQFSSSGKGARRLGSLVLTSLCSVTGPERRRKETGLWSVTVSGRKHSVRLCSPRQAEAERWGVALREVIASKAPLETPTQLLLRDIQESCGDPEAVALIYLRNPILRHTSGALYAPLLPLPYGVSAPGPGYAPLREEAVRLFLALQALEGARRPGPLMQGVLQTCRDLPALRDELFLQLAKQTSGPAGPPGLPATQDPAALRYWQLLTCMSCTFRPGGAVRGHLLGHLERTEQALPDSELAEYARFIRKALGRTRGRELVPSLAEISALSQRQELLCTVHCPGAGACAVAIDSHTTAGEVARELVGRLGLARSRNAFALYEQRGAQERALAGGTLVADVLTRFENLAAEEAGLEDSPDSGWRLCLRLHGPLHPEGLSPDGHELPFLFEQAHALLLRGRPPPPDDTLRALAALRLQSLQRDFSPRVPLPRLDRLLPPPAPPREDPPRPTPRPPPSAALLAGALWSPGLAKRRAERARRGGAGRTAGSIAREGGGGAGTAAAVLGGWKRLRGMGRAEAMAAYLALAAQCPGFGAARYDVLELSTEPGRGAPQKLCLGLGAKAMSLSRPGETEPIHSVSYGHVAACQLMGPHTLALRVGESQLLLQSPQVEEIMQLVNAYLANPSPERPCSSSSPPCQDLPDTSPPSQRPGLDEPQGQSGCLGQLQD

SEQ ID NO: 22087 - protein, 699 aa, Homo sapiens
MNPIALGSRWLAYAENKLIRCHQSRGGACGDNIQSYTATVISAAKTLKSGLTMVGKVVTQLTGTLPSGVTEDDVAIHSNSRRSPLVPGIITVIDTETVGEGQVLVSEDSDSDGIVAHFPAHEKPVCCMAFNTSGMLLVTTDTLGHDFHVFQILTHPWSSSQCAVHHLYTLHRGETEAKVQDICFSHDCRWVVVSTLRGTSHVFPINPYGGQPCVRTHMSPRVVNRMSRFQKSAGLEEIEQELTSKQGGRCSPVPGLSSSPSGSPLHGKLNSQDSYNNFTNNNPGNPRLSPLPSLMVVMPLAQIKQPMTLGTITKRTGPYLFGAGCFSIKAPCKVKPPPQISPSKSMGGEFCVAAIFGTSRSWFANNAGLKREKDQSKQVVVESLYIISCYGTLVEHMMEPRPLSTAPKISDDTPLEMMTSPRASWTLVRTPQWNELQPPFNANHPLLLAADAVQYYQFLLAGLVPPGSPGPITRHGSYDSLASDHSGQEDEEWLSQVEIVTHTGPHRRLWMGPQFQFKTIHPSGQTTVISSSSSVLQSHGPSDTPQPLLDFDTDDLDLNSLRIQPVRSDPVSMPGSSRPVSDRRGVSTVIDAASGTFDRSVTLLEVCGSWPEGFGLRHMSSMEHTEEGLRERLADAMAESPSRDVVGSGTELQREGSIETLSNSSGSTSGSIPRNFDGYRSPLPTNESQPLSLFPTGFP

SEQ ID NO: 22088 - protein, 170 aa, Homo sapiens
MEDERKNGAYGTPQKYDPTFKGPIYNRNKPYLFYFNIVKCASPLVLLEFQCPTPQICVEKCPDRYLTYLNARSSRDFEYYKQFCVPGFKNNKGVAEVLQDGDCPAVLIPSKPLARRCFPAIHAYKGVLMVGNETTYEDGHGSRKNITDLVEGAKKANGVLEARQLAMRIF

SEQ ID NO: 22089 - protein, 160 aa, Homo sapiens
APSAVPGLSKTSGRRVVSHEVVLGGRLAAKTSFSLSRPSSPRVEDLKGAALYSRLREYLLTQDQLKENGYPFPHPERPGGAIIFTAEEKRPKDSSCRTCCRCGTEYLVSSSGRCIRDEECYYHWGRLRRNRVAGGWETQYMCCSAAAGSVGCQVAKGPNQ

SEQ ID NO: 22090 - protein, 869 aa, Homo sapiens
MGNRGMEELIPLVNKLQDAFSSIGQSCHLDLPQIAVVGGQSAGKSSVLENFVGRDFLPRGSGIVTRRPLILQLIFSKTEHAEFLHCKSKKFTDFDEVRQEIEAETDRVTGTNKGISPVPINLRVYSPHVLNLTLIDLPGITKVPVGDQPPDIEYQIKDMILQFISRESSLILAVTPANMDLANSDALKLAKEVDPQGLRTIGVITKLDLMDEGTDARDVLENKLLPLRRGYIGVVNRSQKDIEGKKDIRAALAAERKFFLSHPAYRHMADRMGTPHLQKTLNQQLTNHIRESLPALRSKLQSQLLSLEKEVEEYKNFRPDDPTRKTKALLQMVQQFGVDFEKRIEGSGDQVDTLELSGGARINRIFHERFPFELVKMEFDEKDLRREISYAIKNIHGVRTGLFTPDLAFEAIVKKQVVKLKEPCLKCVDLVIQELINTVRQCTSKLSSYPRLREETERIVTTYIREREGRTKDQILLLIDIEQSYINTNHEDFIGFANAQQRSTQLNKKRAIPNQGEILVIRRGWLTINNISLMKGGSKEYWFVLTAESLSWYKDEEEKEKKYMLPLDNLKIRDVEKGFMSNKHVFAIFNTEQRNVYKDLRQIELACDSQEDVDSWKASFLRAGVYPEKDQAENEDGAQENTFSMDPQLERQVETIRNLVDSYVAIINKSIRDLMPKTIMHLMINNTKAFIHHELLAYLYSSADQSSLMEESADQAQRRDDMLRMYHALKEALNIIGDISTSTVSTPVPPPVDDTWLQSASSHSPTPQRRPVSSIHPPGRPPAVRGPTPGPPLIPVPVGAAASFSAPPIPSRPGPQSVFANSDLFPAPPQIPSRPVRIPPGIPPGVPRRPPAAPSRPTIIRPAEPSLLD

SEQ ID NO: 22091 - protein, 1104 aa, Homo sapiens
MSEPHRVQFTSLPGSLNPAFLKKSRKEEAGAGEQHQDCEPAAAAVRITLTLFEPDHKRCPEFFYPELVKNIRGKVKGLQPGDKKKDLSDPFNDEEKERHKVEALARKFEEKYGGKKRRKDRIQDLIDMGYGYDESDSFIDNSEAYDELVPASLTTKYGGFYINSGTLQFRQASESEDDFIKEKKKKSPKKRKLKEGGEKIKKKKKDDTYDKEKKSKKSKFSKAGFTALNASKEKKKKKYSGALSVKEMLKKFQKEKEAQKKREEEHKPVAVPSAEAQGLRELEGASDPLLSLFGSTSDNDLLQAATAMDSLTDLDLEHLLSESPEGSPFRDMDDGSDSLGVGLDQEFRQPSSLPEGLPAPLEKRVKELAQAARAAEGESRQKFFTQDINGILLDIEAQTRELSSQVRSGVYAYLASFLPCSKDALLKRARKLHLYEQGGRLKEPLQKLKEAIGRAMPEQMAKYQDECQAHTQAKVAKMLEEEKDKEQRDRICSDEEEDEEKGGRRIMGPRKKFQWNDEIRELLCQVVKIKLESQDLERNNKAQAWEDCVKGFLDAEVKPLWPKGWMQARTLFKESRRGHGHLTSILAKKKVMAPSKIKVKESSTKPDKKVSVPSGQIGGPIALPSDHQTGGLSIGASSRELPSQASGGLANPPPVNLEDSLDEDLIRNPASSVEAVSKELAALNSRAAGNSEFTLPAPSKAPAEKVGGVLCTEEKRNFAKPSPSAPPPASSLQSPLNFLAEQALALGQSSQEKKPESSGYKELSCQAPLNKGLPEVHQSKAKHHSLPRTSHGPQVAVPVPGPQVKVFHAGTQQQKNFTPPSPFANKLQGPKASPTQCHRSLLQLVKTAAKGQGFHPSAPATSGGLSASSSSSHKTPASSSSALSHPAKPHSVSSAGSSYKNNPFASSISKHGVSSGSSSSGGTPVQSSVSGSLVPGIQPPSVGQATSRPVPSSAGKKMPVSQKLTLVAPPGGPNGDSSGGTQGVAKLLTSPSLKPSAVSSVTSSTSLSKGASGTVLLAGSSLMASPYKSSSPKLSGAMSSNSLGIITPVPIPVHVLSFSADSSAKAGVSKDAIVTGPAPGSFHHGLGHSASQLHGKGPAVPRKL

SEQ ID NO: 22092 - protein, 503 aa, Homo sapiens
KILLKYGERESSYVFLHVCIQEFCAALFYLLKSHLDHPHPAVRCVQELLVANFEKARRAHWIFLGCFLTGLLNKKEQEKLDAFFGFQLSQEIKQQIHQCLKSLGERGNPQGQVDSLAIFYCLFEMQDPAFVKQAVNLLQEANFHIIDNVDLVVSAYCLKYCSSLRKLCFSVQNVFKKEDEHSSTSDYSLICWHHICSVLTTSGHLRELQVQDSTLSESTFVTWCNQLRHPSCRLQKLGINNVSFSGQSVLLFEVLFYQPDLKYLSFTLTKLSRDDIRSLCDALNYPAGNVKELALAFCHLSEQCCEYISEMLLRNKSVRYLDLSANVLKDEGLKTLCEALKHPDCCLDSLCLVKCFITAAGCEDLASALISNQNLKILQIGCNEIGDVGVQLLCRALTHTDCRLEILGLEECGLTSTCCKDLASVLTCSKTLQQLNLTLNTLDHTGVVVLCEALRHPECALQVLGLRKTDFDEETQALLTAEEERNPNLTITDDCDTITRVEI

SEQ ID NO: 22093 - protein, 655 aa, Homo sapiens
MAEDWLDCPALGPGWKRREVFRKSGATCGRSDTYYQSPTGDRIRSKVELTRYLGPACDLTLFDFKQGILCYPAPKAHPVAVASKKRKKPSRPAKTRKRQVGPQSGEVRKEAPRDETKADTDTAPASFPAPGCCENCGISFSGDGTQRQRLKTLCKDCRAQRIAFNREQRMFKRVGCGECAACQVTEDCGACSTCLLQLPHDVASGLFCKCERRRCLRIVERSRGCGVCRGCQTQEDCGHCPICLRPPRPGLRRQWKCVQRRCLRGKHARRKGGCDSKMAARRRPGAQPLPPPPPSQSPEPTEPHPRALAPSPPAEFIYYCVDEDELQPYTNRRQNRKCGACAACLRRMDCGRCDFCCDKPKFGGSNQKRQKCRWRQCLQFAMKRLLPSVWSESEDGAGSPPPYRRRKRPSSARRHHLGPTLKPTLATRTAQPDHTQAPTKQEAGGGFVLPPPGTDLVFLREGASSPVQVPGPVAASTEALLQEAQCSGLSWVVALPQVKQEKADTQDEWTPGTAVLTSPVLVPGCPSKAVDPGLPSVKQEPPDPEEDKEENKDDSASKLAPEEEAGGAGTPVITEIFSLGGTRFRDTAVWLPSLQGRHSGREDGCKVWETEDTVEPTSTSWNPRGWPGTHVSLSPPPASMMWVSCRRSWCPSSQS

SEQ ID NO: 22094 - protein, 1097 aa, Homo sapiens
PGGGGGPSAALREQERVYEWFGLVLGSAQRLEFMCGLLDLCNPLELRFLGSCLEDLARKDYHYLRDSEAKANGLSDPGPLADFREPAVRSRLIVYLALLGSENREAAGRLHRLLPQVDSVLKSLRAARGEGSRGGAEDERGEDGDGEQDAEKDGSGPEGGIVEPRVGGGLGSRAQEELLLLFTMASLHPAFSFHQRVTLREHLERLRAALRGGPEDAEVEVEPCKFAGPRAQNNSAHGDYMQNNESSLIEQAPIPQDGLTVAPHRAQREAVHIEKIMLKGVQRKRADKYWEYTFKVNWSDLSVTTVTKTHQELQEFLLKLPKELSSETFDKTILRALNQGSLKREERRHPDLEPILRQLFSSSSQAFLQSQKVHSFFQSISSDSLHSINNLQSSLKTSKILEHLKEDSSEASSQEEDVLQHAIIHKKHTGKSPIVNNIGTSCSPLDGLTMQYSEQNGIVDWRKQSCTTIQHPEHCVTSADQHSAEKRSLSSINKKKGKPQTEKEKIKKTDNRLNSRINGIRLSTPQHAHGGTVKDVNLDIGSGHDTCGETSSESYSSPSSPRHDGRESFESEEEKDRDTDSNSEDSGNPSTTRFTGYGSVNQTVTVKPPVQIASLGNENGNLLEDPLNSPKYQHISFMPTLHCVMHNGAQKSEVVVPAPKPADGKTIGMLVPSPVAISAIRESANSTPVGILGPTACTGESEKHLELLASPLPIPSTFLPHSSTPALHLTVQRLKLPPPQGSSESCTVNIPQQPPGSLSIASPNTAFIPIHNPGSFPGSPVATTDPITKSASQVVGLNQMVPQIEGNTGTVPQPTNVKVVLPAAGLSAAQPPASYPLPGSPLAAGVLPSQNSSVLSTAATSPQPASAGISQAQATVPPAVPTHTPGPAPSPSPALTHSTAQSDSTSYISAVGNTNANGTVVPPQQMGSGPCGSCGRRCSCGTNGNLQLNSYYYPNPMPGPMYRVPSFFTLPSICNGSYLNQAHQSNGNQLPFFLPQTPYANGLVHDPVMGSQANYGMQQMAGFGRFYPVYPAPNVVANTSGSGPKKNGNVSCYNCGVSGHYAQDCKQSSMEANQQGTYRLRYAPPLPPSNDTLDSAD

SEQ ID NO: 22095 - protein, 494 aa, Homo sapiens
MDEFHPFIEALLPHVRAFSYTWFNLQARKRKYFKKHEKRMSKDEERAVKDELLGEKPEIKQKWASRLLAKLRKDIRPEFREDFVLTITGKKPPCCVLSNPDQKGKIRRIDCLRQADKVWRLDLVMVILFKGIPLESTDGERLYKSPQCSNPGLCVQPHHIGVTIKELDLYLAYFVHTPESGQSDSSNQQGDADIKPLPNGHLSFQDCFVTSGVWNVTELVRVSQTPVATASGPNFSLADLESPSYYNINQVTLGRRSITSPPSTSTTKRPKSIDDSEMESPVDDVFYPGTGRSPAAGSSQSSGWPNDVDAGPASLKKSGKLDFCSALSSQGSSPRMAFTHHPLPVLAGVRPGSPRATASALHFPSTSIIQQSSPYFTHPTIRYHHHHGQDSLKEFVQFVCSDGSGQATGQPNGSGQGKVPGSFLLPPPPPVARPVPLPMPDSKSTSTAPDGAALTPPSPSFATTGASSANRFVSIGPRDGNFLNIPQQSQSWFL

SEQ ID NO: 22096 - protein, 222 aa, Homo sapiens
MRLLVLLWGCLLLPGYEALEGPEEISGFEGDTVSLQCTYREELRDHRKYWCRKGGILFSRCSGTIYAEEEGQETMKGRVSIRDSRQELSLIVTLWNLTLQDAGEYWCGVEKRGPDESLLISLFVFPGSSRPPMQLDSTSAEDTSPALSSGSSKPRVSIPMVRILAPVLVLLSLLSAAGLIAFCSHLLLWRKEAQQATETQRNEKFCLSRLNSLMFSLSLPWL

SEQ ID NO: 22097 - protein, 179 aa, Homo sapiens
ATQASLESAPRIMRLVAECSRSRARAGELWLPHGTVATPVFMPVGTQATMKGITTEQLDALGCRICLGNTYHLGLRPGPELIQKANGLHGFMNWPHNLLTVTEEGVRFRSPYDGNETLLSPEKSVQIQNALGSDIIMQLDDVVSSTVTGPRVEEAMYRSIRWLDRCIAAHQRPDKQNLF

SEQ ID NO: 22098 - protein, 1017 aa, Homo sapiens
MAAMAPGGSGSGGGVNPFLSDSDEDDDEVAATEERRAVLRLGAGSGLDPGSAGSLSPQDPVALGSSARPGLPGEASAAAVALGGTGETPARLSIDAIAAQLLRDQYLLTALELHTELLESGRELPRLRDYFSNPGNFERQSGTPPGMGAPGVPGAAGVGGAGGREPSTASGGGQLNRAGSISTLDSLDFARYSDDGNRETDEKVAVLEFELRKAKETIQALRANLTKAAEHEVPLQERKNYKSSPEIQEPIKPLEKRALNFLVNEFLLKNNYKLTSITFSDENDDQDFELWDDVGLNIPKPPDLLQLYRDFGNHQVTGKDLVDVASGVEEDELEALTPIISNLPPTLETPQPAENSMLVQKLEDKISLLNSEKWSLMEQIRRLKSEMDFLKNEHFAIPAVCDSVQPPLDQLPHKDSEDSGQHPDVNSSDKGKNTDIHLSISDEADSTIPKENSPNSFPRREREGMPPSSLSSKKTVHFDKPNRKLSPAFHQALLSFCRMSADSRLGYEVSRIADSEKSVMLMLGRCLPHIVPNVLLAKREELIPLILCTACLHPEPKERDQLLHILFNLIKRPDDEQRQMILTGCVAFARHVGPTRVEAELLPQCWEQINHKYPERRLLVAESCGALAPYLPKEIRSSLVLSMLQQMLMEDKADLVREAVIKSLGIIMGYIDDPDKYHQGFELLLSALGDPSERVVSATHQVFLPAYAAWTTELGNLQSHLILTLLNKIEKLLREGEHGLDEHKLHMYLSALQSLIPSLFALVLQNAPFSSKAKLHGEVPQIEVTRFPRPMSPLQDVSTIIGSREQLAVLLQLYDYQLEQEGTTGWESLLWVVNQLLPQLIEIVGKINVTSTACVHEFSRFFWRLCRTFGKIFTNTKVKPQFQEILRLSEENIGNGVLTKATVPIYATGVLTCYIQEEDRKLLVGFLEDVMTLLSLSHAPLDSLKASFVELGANPAYHELLLTVLWYGVVHTSALVRCTAARMFEVCQHMPLLVSIIMIFFFLRRRREFFLIKRLCI

SEQ ID NO: 22099 - protein, 209 aa, Homo sapiens
MAAFRDIEEVSQGLLSLLGANRAEAQQRRLLGRHEQVVERLLETQDGAEKQLREILTMEKEVAQSLLNAKEQVHQGGVELQQLEAGLQEAGEEDTRLKASLLQLTRELEELKEIEADLERQEKEVDEDTTVTIPSAVYVAQLYHQVIRPPWPPKVLDSRDLPTSASKYLGLQVCAIASGWIVSRWRETQNFLERNGGVILVPPGLFLLS

SEQ ID NO: 22100 - protein, 589 aa, Homo sapiens
MCSEARLARRLRDALREEEPWAVEELLRCGADPNLVLEDGAAAVHLAAGARHPRGLRCLGALLRQGGDPNARSVEALTPLHVAAAWGCRRGLELLLSQGADPALRDQDGLRPLDLALQQGHLECARVLQDLDTRTRTRTRIGAETQEPEPAPGTPGLSGPTDETLDSIALQKQPCRGDNRDIGLEADPGPPSLPVPLETVDKHGSSASPPGHWDYSSDASFVTAVEVSGAEDPASDTPPWAGSLPPTRQGLLHVVHANQRVPRSQGTEAELNARLQALTLTPPNAAGFQSSPSSMPLLDRSPAHSPPRTPTPGASDCHCLWEHQTSIDSDMATLWLTEDEASSTGGREPVGPCRHLPVSTVSDLELLKGLRALGPEFSGHSLELAAALRTGCIPDVQADEDALAQQFEQPDPARRWREGVVKSSFTYLLLDPRETQDLPARAFSLTPAERLQTFIRAIFYVGKGTRARPYVHLWEALGHHGRSRKQPHQACPKVRQILDIWASGCGVVSLHCFQHVVAVEAYTREACIVEALGIQTLTNQKQGHCYGVVAGWPPARRRRLGVHLLHRALLVFLAEGERQLHPQDIQARG

SEQ ID NO: 22101 - protein, 257 aa, Homo sapiens
HASLLGLKEADSPSPAKGCKPSSNPAGLRNIFPSNLVSAAFRSYSTTYEERNITGTRVKVPVGQEVEGMNILGLVVFAIVFGVALRKLGPEGELLIRFFNSFNEATMVLVSWIMWYAPVGIMFLVAGKIVEMEDVGLLFARLGKYILCCLLGHAIHGLLVLPLIYFLFTRKNPYRFLWGIVTPLATAFGTSSSSATLPLMMKCVEENNGVAKHISRFILPIGATVNMDGAALFQCVAAVFIAQLSQQSLDFVKIITI

SEQ ID NO: 22102 - protein, 593 aa, Homo sapiens
MLQLQKSQYLQLGPSRGQYYGGSLPNVNQIGSGTMDLPFQTPFQSSGLDTSRTTRHHGLVDRVYRERGRLGSPHRRPLSVDKHGRQADSCPYGTMYLSPPADTSWRRTNSDSALHQSTMTPTQPESFSSGSQDVHQKRVLLLTVPGMEETTSEADKNLSKQAWDTKKTGSRPKSCEVPGINIFPSADQENTTALIPATHNTGGSLPDLTNIHFPSPLPTPLDPEEPTFPALSSSSSTGNLAANLTHLGIGGAGQGMSTPGSSPQHRPAGVSPLSLSTEARRQQASPTLSPLSPITQAVAMDALSLEQQLPYAFFTQAGSQQPPPQPQPPPPPPPASQQPPPPPPPQAPVRLPPGGPLLPSASLTRGPQPPPLAVTVPSSLPQSPPENPGQPSMGIDIASAPALQQYRTSAGSPANQSPTSPVSNQGFSPGSSPQHTSTLGSVFGDAYYEQQMAARQANALSHQLEQFNMMENAISSSSLYSPGSTLNYSQAAMMGLTGSHGSLPDSQQLGYASHSGIPNIILTVTGESPPSLSKELTSSLAGVGDVSFDSDSQFPLDELKIDPLTLDGLHMLNDPDMVLADPATEDTFRMDRL

SEQ ID NO: 22103 - protein, 133 aa, Homo sapiens
MDQGYGGYGAWSAGPANTQGAYGTGVASWQAPSASSRSSPMTPGPACRSTTPTAPATATTMSSTWGPTAMAALGGSTVNAETQPGSGAPLMASCGAGARAASRTGATLAPSCAATPSCPPLRPLSPCPRPGTS

SEQ ID NO: 22104 - protein, 135 aa, Homo sapiens
MVLAPLPDPGPPSLAVAPEPCPQPLRSPSLDNPTPFPNLGPSENPLKRLLVPGEGCAHVPQGLGRNGPGRGCLLPGEYCGPAHFQQPPTLPHLRPVQGLPAGLGGGHGFPGPWGELSPRSSWCASNPPVPHHLNQ

SEQ ID NO: 22105 - protein, 124 aa, Homo sapiens
MWVPVVFLTLSVTWIGAAPLILSRIVGGWECEKHSQPWQVLVASRGRAVCGGVLVHPQWVLTAAHCIRNKSVILLGRHSLFHPEDTGQVFQVSHSFPHPLYDMSLLKNRFLRPGDDSTLNQRSS

SEQ ID NO: 22106 - protein, 258 aa, Homo sapiens
MPGGPGVLQALPATIFLLFLLSAVYLGPGCQALWMHKVPASLMVSLGEDAHFQCPHNSSNNANVTWWRVLHGNYTWPPEFLGPGEDPNGTLIIQNVNKSHGGIYVCRVQEGNESYQQSCGTYLRVRREWPSPGPYSHCPAGDTRFIFEVGIEPVPSMWVSNRLGQRDGHSPLQSGVSGGSGALQEVGGARRLGRARGARALSHTTSLQSRPPGPSWTWGRAPRTESSQPRGSSSCSARWCLGRCCCSGNDGRTRSSGW

SEQ ID NO: 22107 - protein, 475 aa, Homo sapiens
MGPLSAPPCTQRITWKGLLLTALLLNFWNLPTTAQVTIEAEPTKVSKGKDVLLLVHNLPQNLAGYIWYKGQMKDLYHYITSYVVDGQIIIYGPAYSGRETVYSNASLLIQNVTREDAGSYTLHIVKRGDGTRGETGHFTFTLYLETPKPSISSSNLYPREDMEAVSLTCDPETPDASYLWWMNGQSLPMTHSLQLSKNKRTLFLFGVTKYTAGPYECEIRNPVSASRSDPVTLNLLPKLPKPYITINNLNPRENKDVLAFTCEPKSENYTYIWWLNGQSLPVSPRVKRPIENRILILPSVTRNETGPYQCEIQDRYGGIRSYPVTLNVLYGPDLPRIYPSFTYYHSGENLYLSCFADSNPPAEYSWTINGKFQLSGQKLFIPQITTKHSGLYACSVRNSATGMESSKSMTVKVSDSCFHSSSKYLPSATVQNCFLFKEIYEKTLTRTLEYKFLITSRSYHWTKNFQNFNEQADTS

SEQ ID NO: 22108 - protein, 432 aa, Homo sapiens
MLENFALVASLGCGHGTEDEETPSDQNVSVGVSQSKAGSSTQKTQSCEMCVPVLKDILHLADLPGQKPYLVGECTNHHQHQKHHSAKKSLKRDMDRASYVKCCLFCMSLKPFRKWEVGKDLPAMLRLLRSLVFPGGKKPGTITECGEDIRSQKSHYKSGECGKASRHKHTPVYHPRVYTGKKLYECSKCGKAFRGKYSLVQHQRVHTGERPWECNECGKFFSQTSHLNDHRRIHTGERPYECSECGKLFRQNSSLVDHQKIHTGARPYECSQCGKSFSQKATLVKHQRVHTGERPYKCGECGNSFSQSAILNQHRRIHTGAKPYECGQCGKSFSQKATLIKHQRVHTGERPYKCGDCGKSFSQSSILIQHRRIHTGARPYECGQCGKSFSQKSGLIQHQVVHTGERPYECNKCGNSFSQCSSLIHHQKCHNT

SEQ ID NO: 22109 - protein, 471 aa, Homo sapiens
MLCEGEAQKRKAEESGMPLTQGHLTFRDVAIEFSQEEWKCLDPVQKALYRDVMLENYRNLVSLGICLPDLSIISMMKQRTEPWTVENEMKVAKNPDRWEGIKDINTGRSCAVRSKAGNKPITNQLGLTFQLPLPELEIFQGEGKIYECNQVQKFISHSSSVSPLQRIYSGVKTHIFNKHRNDFVDFPLLSQEQKAHIRRKPYECNEQGKVFRVSSSLPNHQVIHTADKPNRCHECGKTVRDKSGLAEHWRIRTGEKPYKCKECGKLFNRIAYLARHEKVHTGESPYKCNECGKVFSRITYLVRHQKIHTREKPHKCNKCGKVYSSSSYLAQHWRIHTGEKLYKCNKCGKEFSGHSSLTTHLLIHTGEKPYKCKECDKAFRHKFSLTVHQRNHNGEKPYKCHECGKVFTQVSHLARHQKIHTGEKPYKCNECGKVFTQNSHLANHQRIHTGEKPYKCHVCGLSLWSGKESVR

SEQ ID NO: 22110 - protein, 591 aa, Homo sapiens
MCGAILGDILHLADHQGTHHKQKLHRCEAWGNKLYDSSNRPHQNQYLGEKPYRSSVEEALFVKRCKFHVSEESSIFIQSGKDFLPSSGLLLQEATHTGEKSNSKPECESPFQWGDTHYSCGECMKHSSTKHVFVQQQRLPSREECYCWECGKSFSKYDSVSNHQRVHTGKRPYECGECGKSFSHKGSLVQHQRVHTGKRPYECGECGKSFSHKGSLVQHQRVHTGERPYECGECGKSFSQNGTLIKHQRVHTGERPYECEECGKCFTQKGNLIQHQRGHTSERPYECEECGKCFSQKGTLTEHHRVHTRERPYECGECGKSFSRKGHLRNHQRGHTGERPYECGECGKSFSRKGNLIQHQRSHTGERPYECRECRKLFRGKSHLIEHQRVHTGERPYECNECGKSFQDSSGFRVHQRVHTGEKPFECSECGKSFPQSCSLLRHRRVHTGERPYECGECGKSFHQSSSLLRHQKTHTAERPYECRECGKFFSSLLEHRRVHTGERPYECRECGKTFTRRSAHFKHQRLHTRGKPYECSECGKSFAETFSLTEHRRVHTGERPYECSECGKSFHRSSSLLRHQRVHTERSPYK

SEQ ID NO: 22111 - protein, 296 aa, Homo sapiens
MADSCRNLTYVRGSVGPATSTLMFVAGVVGNGLALGILSARRPARPSAFAVLVTGLAATDLLGTSFLSPAVFVAYARNSSLLGLARGGPALCDAFAFAMTFFGLASMLILFAMAVERCLALSHPYLYAQLDGPRCARLALPAIYAFCVLFCALPLLGLGQHQQYCPGSWCFLRMRWAQPGGAAFSLAYAGLVALLVAAIFLCNGSVTLSLCRMYRQQKRHQGSLGPRPRTGEDEVDHLILLALMTVVMAVCSLPLTHVERPRQDRMRWLTPVIPALWEAEAGGSFEVRSSRPVWPT

SEQ ID NO: 22112 - protein, 235 aa, Homo sapiens
MTVLAPAWSPTTYLLLLLLLSSGLSGTQDCSFQHSPISSDFAVKIRELSDYLLQDYPVTVASNLQDEELCGGLWRLVLAQRWMERLKTVAGSKMQGLLERVNTEIHFVTKCAFQPPPSCLRFVQTNISRLLQETSEQLVALKPWITRQNFSRCLELQCQPDSSTLPPPWSPRPLEATAPTAPQPPLLLLLLLPVGLLLLAAAWCLHWQRTRRRTPRPGEQVPPVPSPQDLLLVEH

SEQ ID NO: 22113 - protein, 164 aa, Homo sapiens
ILEDATPTATKHGTGRGLPLKDALEYVIPELNIHCLRLALNTPKVTEQLLKLDEQGLCRKHKVGILYCKAGQSSEEEMYNNEEAGPAFEEFLSLIGEKVCLKGFTKYAAQLDVKIETGFHHVGQAGLELLTSDDPPASASQSAGIIGVNHQAWPVYLIFKSRLK

SEQ ID NO: 22114 - protein, 477 aa, Homo sapiens
MTKAQESLTLEDVAVDFTWEEWQFLSPAQKDLYRDVMLENYSNLVSVGYQAGKPDALTKLEQGEPLWTLEDEIHSPAHPEIEKADDHLQQPLQNQKILKRTGQRYEHGRTLKSYLGLTNQSRRYNRKEPAEFNGDGAFLHDNHEQMPTEIEFPESRKPISTKSQFLKHQQTHNIEKAHECTDCGKAFLKKSQLTEHKRIHTGKKPHVCSLCGKAFYKKYRLTEHERAHKGEKPYGCSECGKAFPRKSELTEHQRIHTGIKPHQCSECGRAFSRKSLLVVHQRTHTGEKPHTCSECGKGFIQKGNLNIHQRTHTGEKPYGCIDCGKAFSQKSCLVAHQRYHTGKTPFVCPECGQPCSQKSGLIRHQKIHSGEKPYKCSDCGKAFLTKTMLIVHHRTHTGERPYGCDECEKAYFYMSCLVKHKRIHSREKRGDSVKVENPSTASHSLSPSEHVQGKSPVNMVTVAMVAGQCEFAHILHS

SEQ ID NO: 22115 - protein, 527 aa, Homo sapiens
MYQPEDDNNSDVTSDDDMTRNRRESSPPHSVHSFSGDRDWDRRGRSRDMEPRDRWSHTRNPRSRMPPRDLSLPVVAKTSFEMDREDDRDSRAYESRSQDAESYQNVVDLAEDRKPHNTIQDNMENYRKLLSLGFLAQDSVPAEKRNTEMLDNLPSAGSQFPDFKHLGTFLVFEELVTFEDVLVDFSPEELSSLSAAQRNLYREVMLENYRNLVSLGHQFSKPDIISRLEEEESYAMETDSRHTVICQGESHDDPLEPHQGNQEKLLTPITMNDPKTLTPERSYGSDEFERSSNLSKQSKDPLGKDPQEGTAPGICTSPQSASQENKHNRCEFCKRTFSTQVALRRHERIHTGKKPYECKQCAEAFYLMPHLNRHQKTHSGRKTSGCNEGRKPSVQCANLCERVRIHSQEDYFECFQCGKAFLQNVHLLQHLKAHEAARVLPPGLSHSKTYLIRYQRKHDYVGERACQCCDCGRVFSRNSYLIQHYRTHTQERPYQCQLCGKCFGRPSYLTQHYQLHSQEKTVECDHC

SEQ ID NO: 22116 - protein, 67 aa, Homo sapiens
MFHFISHLRDRIFASWAISGDQSFSLNSEGAERMATTGTPTADRGDAAATDDPAARFQVQKHSWDGL

SEQ ID NO: 22117 - protein, 968 aa, Homo sapiens
MVAMDLGSPSLPKKSLPVPGALEQVASRLSSKVAAEVPHGSKQELQDLKAQSLTTCEVCGACFETRKGLSSHARSHLRQLGVAESESSGAPIDLLYELVKQKGLPDAHLGLPPGLAKKSSSLKEVVAGAPRPGLLSLAKPLDAPAVNKAIKSPPGFSAKGLGHPPSSPLLKKTPLALAGSPTPKNPEDKSPQLSLSPRPASPKAQWPQSEDEGPLNLTLDSDGGRELDCQLCGAWFETRKGLSSHARAHLRHLGVSDPDAKGSPIDVLHGLIRRDGVQIRLPPRRGALAHPGRPPPTSAALSLLPPPPPAKKAKLKAAGMASPWGKQDLSAAAAAGIFWASDVEPSPLNLSSGPEPARDIRCEFCGEFFENRKGLSSHARSHLRQMGVTEWYVNGSPIDTLREILKRRTQSRPGGPPNPPGPSPKALAKMMGGAGPGSSLEARSPSDLHISPLAKKLPPPPGSPLGHSPTASPPPTARKMFPGLAAPSLPKKLKPEQIRVEIKREMLPGALHGELHPSEGPWGAPREDMTPLNLSSRAEPVRDIRCEFCGEFFENRKGLSSHARSHLRQMGVTEWSVNGSPIDTLREILKKKSKPCLIKKEPPAGDLAPALAEDGPPTVAPGPVQSPLPLSPLAGRPGKPGAGPAQVPRELSLTPITGAKPSATGYLGSVAAKRPLQEDRLLPAEVKAKTYIQTELPFKAKTLHEKTSHSSTEACCELCGLYFENRKALASHARAHLRQFGVTEWCVNGSPIETLSEWIKHRPQKVGAYRSYIQGGRPFTKKFRSAGHGRDSDKRPSLGLAPGGLAVVGRSAGGEPGPEAGRAADGGERPLAASPPGTVKAEEHQRQNINKFERRQARPPDASAARGGEDTNDLQQKLEEVRQPPPRVRPVPSLVPRPPQTSLVKFVGNIYTLKCRFCEVEFQGPLSIQEEWVRHLQRHILEMNFSKADPPPEESQAPQAQTAAAEAP

SEQ ID NO: 22118 - protein, 240 aa, Homo sapiens
MEESVVRPSVFVVDGQTDIPFTRLGRSHRRQSCSVARVGLGLLLLLMGAGLAVQGWFLLQLHWRLGEMVTRLPDGPAGSWEQLIQERRSHEVNPAAHLTGANSSLTGSGGPLLWETQLGLAFLRGLSYHDGALVVTKAGYYYIYSKVQLGGVGCPLGLASTITHGLYKRTPRYPEELELLVSQQSPCGRATSSSRVWWDSSFLGGVVHLEAGEKVVVRVLDERLVRLRDGTRSYFGAFMV

SEQ ID NO: 22119 - protein, 268 aa, Homo sapiens
MSPPPLLQPLLLLLPLLNVEPSGATLIRIPLHRVQPGRRILNLLRGWREPAELPKLGAPSPGDKPIFVPLSNYRDVQYFGEIGLGTPPQNFTVAFDTGSSNLWVPSRRCHFFSVPCSSSSFQANGTKFAIQYGTGRVDGILSEDKLTIGGIKGASVIFGEALWEPSLVFAFAHFDGILGLGFPILSVEGVRPPMDVLVEQGLLDKPVFSFYLNRDPEEPDGGELVLGGSDPAHYIPPLTFVPVTVPAYWQIHMERVKVGPGLTLCAKG

SEQ ID NO: 22120 - protein, 721 aa, Homo sapiens
MLFGLVRQGLKCDGCGLNYHKRCAFSIPNNCSGARKRRLSSTSLASGHSVRLGTSESLPCTAEELSRSTTELLPRRPPSSSSSSSASSYTGRPIELDKMLLSKVKVPHTFLIHSYTRPTVCQACKKLLKGLFRQGLQCKDCKFNCHKRCATRVPNDCLGEALINGDVPMEEATDFSEADKSALMDESEDSGVIPGSHSENALHASEEEEGEGGKAQSSLGYIPLMRVVQSVRHTTRKSSTTLREGWVVHYSNKDTLRKRHYWRLDCKCITLFQNNTTNRYYKEIPLSEILTVESAQNFSLVPPGTNPHCFEIVTANATYFVGEMPGGTPGGPSGQGAEAARGWETAIRQALMPVILQDAPSAPGHAPHRQASLSISVSNSQIQENVDIATVYQIFPDEVLGSGQFGVVYGGKHRKTGRDVAVKVIDKLRFPTKQESQLRNEVAILQSLRHPGIVNLECMFETPEKVFVVMEKLHGDMLEMILSSEKGRLPERLTKFLITQILVALRHLHFKNIVHCDLKPENVLLASADPFPQVKLCDFGFARIIGEKSFRRSVVGTPAYLAPEVLLNQGYNRSLDMWSVGVIMYVSLSGTFPFNEDEDINDQIQNAAFMYPASPWSHISAGAIDLINNLLQVKMRKRYSVDKSLSHPWLQEYQTWLDLRELEGKMGERYITHESDDARWEQFAAEHPLPGSGLPTDRDLGGACPPQDHDMQGLAERISVL

SEQ ID NO: 22121 - protein, 320 aa, Homo sapiens
MIEDSGKRGNTMAERRQLFAEMRAQDLDRIRLSTYRTACKLRFVQKKCNLHLVDIWNVIEALRENALNNLDPNTELNVSRLEAVLSTIFYQLNKRMPTTHQIHVEQSISLLLNFLLAAFDPEGHGKISVFAVKMALATLCGGKIMDKLRYIFSMISDSSGVMVYGRYDQFLREVLKLPTAVFEGPSFGYTEQSARSCFSQQQPPQQRSAPDISFTIDANKQQRQLIAELENKNREILQEIQRLRLEHEQASQPTPEKAQQNPTLLAELRLLRQRKDELEQRMSALQESRRELMVQLEGLMKLLKEEELKQGVSYVPYCRS

SEQ ID NO: 22122 - protein, 753 aa, Homo sapiens
MTMYLWLKLLAFGFAFLDTEVFVTGQSPTPSPTGLTTAKMPSVPLSSDPLPTHTTAFSPASTFERENDFSETTTSLSPDNTSTQVSPDSLDNASAFNTTGVSSVQTPHLPTHADSQTPSAGTDTQTFSGSAANAKLNPTPGSNAISDAYLNASETTTLSPSGSAVISTTTIATTPSKPTCDEKYANITVDYLYNKETKLFTAKLNVNENVECGNNTCTNNEVHNLTECKNASVSISHNSCTAPDKTLILDVPPGVEKFQLHDCTQVEKADTTICLKWKNIETFTCDTQNITYRFQCGNMIFDNKEIKLENLEPEHEYKCDSEILYNNHKFTNASKIIKTDFGSPGEPQIIFCRSEAAHQGVITWNPPQRSFHNFTLCYIKETEKDCLNLDKNLIKYDLQNLKPYTKYVLSLHAYIIAKVQRNGSAAMCHFTTKSAPPSQVWNMTVSMTSDNSMHVKCRPPRDRNGPHERYHLEVEAGNTLVRNESHKNCDFRVKDLQYSTDYTFKAYFHNGDYPGEPFILHHSTSYNSKALIAFLAFLIIVTSIALLVVLYKIYDLHKKRSCNLDEQQELVERDDEKQLMNVEPIHADILLETYKRKIADEGRLFLAEFQSIPRVFSKFPIKEARKPFNQNKNRYVDILPYDYNRVELSEINGDAGSNYINASYIDGFKEPRKYIAAQGPRDETVDDFWRMIWEQKATVIVMVTRCEEGNRNKCAEYWPSMEEGTRAFGDVVVKINQHKRCPDYIIQKLNIVN

SEQ ID NO: 22123 - protein, 613 aa, Homo sapiens
MGEAFYTVKLERLESCDTVGLSFQEVQKNTYDFECQWKDDEGNYKTVLMLQKENLPGRRAQRDRRAAGNRHIENQLGVSFQSHLPELQQFQHEGKIYEYNQVEKSPNNRGKHYKCDECGKVFSQNSRLTSHKRIHTGEKPYQCNKCGKAFTVRSNLTIHQVIHTGEKPYKCNECGKVFSQPSNLAGHQRIHTGEKPYKCNECGKAFRAHSKLTTHQVIHTGEKPYKCKECGKCFTQNSHLASHRRIHTGEKPYKCNECGKAFSVRSSLTTHQTIHTGEKPYKCNECGKVFRHNSYLAKHRRIHTGEKPYKCNECGKAFSMHSNLTKHQIIHTGEKPFKCNECVKVFTQYSHLANHRRIHTGEKPYRCDECGKAFSVRSSLTTHQAIHTGEKPYKCNDCGKVFTQNSHLASHRGIHSGEKPYKCDECGKAFSQTSQLARHWRVHTGEKPYKCNECGKAFSVHSSLTIHQTIHTGQKPYKCNDCGKVFRHNSYLAIHQRIHTGEKPYKCNECGKAFSVHSNLATHQVIHTGEKPYKCNECGKVFTQNSHLANHRRIHTGEKPYRCNECGKAFSVRSTLTTHMAVHTGDKPYKCNQCGKVFTQNSNLAKHRRIHSG

SEQ ID NO: 22124 - protein, 186 aa, Homo sapiens
AVKIRELSDYLLQDYPVTVASNLQDEELCGGLWRLVLAQRWMERLKTVAGSKMQGLLERVNTEIHFVTKCAFQETSEQLVALKPWITRQNFSRCLELQCQPGAPRPQSPGPAACGALTWPRPHPGEDTEAHRGESPARGCIAWTQRKLARGRSLPWAPLIPSPEWRQRQNPAPAPFTQLCTKPLSP

SEQ ID NO: 22125 - protein, 243 aa, Homo sapiens
NPDGSASPTADPGSELQTLGQAARRPPPPRAGHDAPRRTRPSARKPLSCFSRRPMPTREPPKTRGSRGHLHTHPPGPGPPLQGLAPRGLKTSAPRPPCQPQPGPHKAKTKKIVFEDELLSQALLGAKKPIGAIPKGHKPRPHPVPDYELKYPPVSSERERSRYVAVFQDQYGEFLELQHEVGCAQAKLRQLEALLSSLPPPQSQKEAQVAARVWREFEMKRMLPLPGVAFSWIANASSVWTQL

SEQ ID NO: 22126 - protein, 365 aa, Homo sapiens
MVSNNPLCVCLCRNIFPSNLVSAAFRSYSTTYEERNITGTRVKVPVGQEVEGMNILGLVVFAIVFGVALRKLGPEGELLIRFFNSFNEATMVLVSWIMWYAPVGIMFLVAGKIVEMEDVGLLFARLGKYILCCLLGHAIHGLLVLPLIYFLFTRKNPYRFLWGIVTPLATAFGTSSSSATLPLMMKCVEENNGVAKHISRFILPIGATVNMDGAALFQCVAAVFIAQLSQQSLDFVKIITILVTATASSVGAAGIPAGGVLTLAIILEAVNLPVDHISLILAVDWLVDRSCTVLNVEGDALGAGLLQNYVDRTESRSTEPELIQVKSELPLDPLPVPTEEGNPLLKHYRGPAGDATVASEKESVM

SEQ ID NO: 22127 - protein, 681 aa, Homo sapiens
MGGRVFLVFLAFCVWLTLPGAETQDSRGCARWCPQDSSCVNATACRCNPGFSSFSEIITTPMETCDDINECATLSKVSCGKFSDCWNTEGSYDCVCSPGYEPVSGAKTFKNESENTCQDMTFSTWTPPPGVHSQTLSRFFDKVQDLGRDYKPGLANNTIQSILQALDELLEAPGDLETLPRLQQHCVASHLLDGLEDVLRGLSKNLSNGLLNFSYPAGTELSLEVQKQVDRSVTLRQNQAVMQLDWNQAQKSGDPGPSVVGLVSIPGMGKLLAEAPLVLEPEKQMLLHETHQGLLQDGSPILLSDVISAFLSNNDTQNLSSPVTFTFSHRSVIPRQKVLCVFWEHGQNGCGHWATTGCSTIGTRDTSTICRCTHLSSFAVLMAHYDVQEEDPVLTVITYMGLSVSLLCLLLAALTFLLCKAIQNTSTSLHLQLSLCLFLAHLLFLVAIDQTGHKVLCSIIAGTLHYLYLATLTWMLLEALYLFLTARNLTVVNYSSINRFMKKLMFPVGYGVPAVTVAISAASRPHLYGTPSRCWLQPEKGFIWGFLGPVCAIFSVNLVLFLVTLWILKNRLSSLNSEVSTLRNTRMLAFKATAQLFILGCTWCLGILQVGPAARVMAYLFTIINSLQGVFIFLVYCLLSQQVREQYGKWSKGIRKLKTESEMHTLSSSAKADTSKPSTVN

SEQ ID NO: 22128 - protein, 392 aa, Homo sapiens
MDLPFQTPFQSSGLDTSRTTRHHGLVDRVYRERGRLGSPHRRPLSVDKHGRQADSCPYGTMYLSPPADTSWRRTNSDSALHQSTMTPTQPESFSSGSQDVHQKRVLLLTVPGMEETTSEADKNLSKQAWDTKKTGSRPKSCEVPGINIFPSADQENTTALIPATHNTGGSLPDLTNIHFPSPLPTPLDPEEPTFPALSSSSSTGNLAANLTHLGIGGAGQGMSTPGSSPQHRPAGVSPLSLSTEARRQQASPTLSPLSPITQLEQFNMMENAISSSSLYSPGSTLNYSQAAMMGLTGSHGSLPDSQQLGYASHSGIPNIILTVTGESPPSLSKELTSSLAGVGDVSFDSDSQFPLDELKIDPLTLDGLHMLNDPDMVLADPATEDTFRMDRL

SEQ ID NO: 22129 - protein, 256 aa, Homo sapiens
MWLLLTLSFLLASTAAQDGDKLLEGDECAPHSQPWQVALYERGRFNCGASLISPHWVLSAAHCQSRFMRVRLGEHNLRKRDGPEQLRTTSRVIPHPRYEARSHRNDIMLLRLVQPARLNPQVRPAVLPTRCPHPGEACVVSGWGLVSHNEPGTAGSPRSQVSLPDTLHCANISIISDTSCDKSYPGRLTNTMVCAGAEGRGAESCEGDSGGPLVCGGILQGIVSWGDVPCDNTTKPGVYTKVCHYLEWIRETMKRN

SEQ ID NO: 22130 - protein, 632 aa, Homo sapiens [sequence omitted]

SEQ ID NO: 22131 - protein, 788 aa, Homo sapiens
MNGLCCMALDREKELIRQAALQQTKEMDLSVVRLMFTAFLPDSTGSFTRRLEPVVSDAIYDSKAPNASNLKIVRMDRTAGCVTGGEEIYLLCDKVQKDDIQIRFYEEEENGGVWEGFGDFSPTDVHRQFAIVFKTPKYKDINITKPASVFVQLRRKSDLETSEPKPFLYYPEIKDKEEVQRKRQKLMPNFSDSFGGGSGAGAGGGGMFGSGGGGGGTGSTGPGYSFPHYGFPTYGGITFHPGTTKSNAGMKHGTMDTESKKDPEGCDKSDDKNTVNLFGKVIETTEQDQEPSEATVGNGEVTLTYATGTKEESAGVQDNLFLEKAMQLAKRHANALFDYAVTGDVKMLLAVQRHLTAVQDENGDSVLHLAIIHLHSQLVRDLLEVTSGLISDDIINMRNDLYQTPLHLAVITKQEDVVEDLLRAGADLSLLDRLGNSVLHLAAKEGHDKVLSILLKHKKAALLLDHPNGDGLNAIHLAMMSNSLPCLLLLVAAGADVNAQEQKSGRTALHLAVEHDNISLAGCLLLEGDAHVDSTTYDGTTPLHIAAGRGSTRLAALLKAAGADPLVENFEPLYDLDDSWENAGEDEGVVPGTTPLDMATSWQVFDILNGKPYEPEFTSDDLLAQGDMKQLAEDVKLQLYKLLEIPDPDKNWATLAQKLGLGILNNAFRLSPAPSKTLMDNYEVSGGTVRELVEALRQMGYTEAIEVIQAASSPVKTTSQAHSLPLSPASTRQQIDELRDSDSVCDSGVETSFRKLSFTESLTSGASLLTLNKMPHDYGQEGPLEGKI

SEQ ID NO: 22132 - protein, 529 aa, Homo sapiens
CCTGRLVGGHPLQGRGQDLLWCSEGSSCQENYDDPHKTPASPVVHIRGLIDGVVEADLVEALQEFGPISYVVVMPKKRQALVEFEDVLGACNAVNYAADNQIYIAGHPAFVNYSTSQKISRPGDSDDSRSVNSVLLFTILNPIYSITTDVLYTICNPCGPVQRIVIFRKNGVQAMVEFDSVQSAQRAKASLNGADIYSGCCTLKIEYAKPTRLNVFKNDQDTWDYTNPNLSGQGDPGSNPNKRQRQPPLLGDHPAEYGGPHGGYHSHYHDEGYGPPPPHYEGRRMGPPVGGHRRGPSRYGPQYGHPPPPPPPPEYGPHADSPVLMVYGLDQSKMNCDRVFNVFCLYGNVEKVKFMKSKPGAAMVEMADGYAVDRAITHLNNNFMFGQKLNVCVSKQPAIMPGQSYGLEDGSCSYKDFSESRNNRFSTPEQAAKNRIQHPSNVLHFFNAPLEVTEENFFEICDELGVKRPSSVKVFSGKSERSSSGLLEWESKSDALETLGFLNHYQMKNPNGPYPYTLKLCFSTAQHAS

SEQ ID NO: 22133 - protein, 441 aa, Homo sapiens
MAAATLRDPAQGYVTFEDVAVYFSQEEWRLLDDAQRLLYRNVMLENFTLLASLGLASSKTHEITQLESWEEPFMPAWEVVTSAILRGSWQGAKAEAAAEQSASVEVPSSNVQQHQKQHCGEKPLKRQEGRVPVLRSCRVHLSEKSLQSREVGKDLLTSSGVLKHQVTHTGEKSHRSSKSREAFHAGKRHYKCSECGKAFGQKYLLVQHQRLHTGEKPYECSECGKLFSHKSNLFIHQIVHTGERPYGCSDCGKSFSRNADLIQHQRVHTGEKPFTCSECGKAFRHNSTLVQHHRIHTGVRPYECSECGKLFSFNSSLMKHQRVHTGERPYKCSECGKFYSHKSSLINHWRVHTGERPYECSECGKFFSQSSSLMQHRKVHTGEKPFKCNECGRFFSENSSLVKHQRVHTGAKPYECRECGKFFRHSSSLVKHRRIHTGEIQ

SEQ ID NO: 22134 - protein, 73 aa, Homo sapiens
MTDLYHYITSYVVHGQIIYGPAYSGRETVYSNASLLIQNVTQEDAGSYTLHIIKRGDGTGGVTGYFTVTLYCE

SEQ ID NO: 22135 - protein, 133 aa, Homo sapiens
MAPPPPPLAASTPLLHGEFGSYPARGPRFALTLTSQALHIQRLRPKPEARPRGGLVPLAEVSGCCTLRSRSPSDSAAYFCIYTYPRGRRGARRRATRTFRADGAATYEENRAEAQRWATALTCLLRGLPLPGD

SEQ ID NO: 22136 - protein, 813 aa, Homo sapiens
MELWRQCTHWLIQCRVLPPSHRVTWDGAQVCELAQALRDGVLLCQLLNNLLPHAINLREVNLRPQMSQFLCLKNIRTFLSTCCEKFGLKRSELFEAFDLFDVQDFGKVIYTLSALSWTPIAQNRGIMPFPTEEESVGDEDIYSGLSDQIDDTVEEDEDLYDCVENEEAEGDEIYEDLMRSEPVSMPHFLKPLQRFLKPQDIEIIFINIEDLLRVHTHFLKEMKEALGTPGAANLYQVFIKYKERFLVYGRYCSQVESASKHLDRVAAAREDVQMKLEECSQRANNGRFTLRDLLMVPMQRVLKYHLLLQELVKHTQEAMEKENLRLALDAMRDLAQCVNEVKRDNETLRQITNFQLSIENLDQSLAHYGRPKIDGELKITSVERRSKMDRYAFLLDKALLICKRRGDSYDLKDFVNLHSFQVRDDSSGDRDNKKWSHMFLLIEDQGAQGYELFFKTRELKKKWMEQFEMAISNIYPENATANGHDFQMFSFEETTSCKACQMLLRGTFYQGYRCHRCRASAHKECLGRVPPCGRHGQDFPGTMKKDKLHRRAQDKKRNELGLPKMEVFQEYYGLPPPPGAIGPFLRLNPGDIVELTKAEAEQNWWEGRNTSTNEIGWFPCNRVKPYVHGPPQDLSVHLWYAGPMERAGAESILANRSDGTFLVRQRVKDAAEFAISIKYNVEVKHIKIMTAEGLYRITEKKAFRGLTELVEFYQQNSLKDCFKSLDTTLQFPFKEPEKRTISRPAVGSTKYFGTAKARYDFCARDRSELSLKEGDIIKILNKKGQQGWWRGEIYGRVGWFPANYVEEDYSEYC

SEQ ID NO: 22137 - protein, 136 aa, Homo sapiens
MGPLTIRDVTVEFSLEEWHCLDTAQQNLYRDVMLENYRNLVFLGIAVSKPDLITCLEQGKEPCNMKRHEMVAKPPDGGSLFLPRLKCNGAVSAHRKLLLPGSSDSLASAFQVAGITGTRHHAWLIFVFLVDMGFHH

SEQ ID NO: 22138 - protein, 541 aa, Homo sapiens
MGSSEVSIIPGLQKEEKAAVERRRLHVLKALKKLRIEADEAPVVAVLGSGGGLRAHIACLGVLSEMKEQGLLDAVTYLAGVSGSTWAISSLYTNDGDMEALEADLKHRFTRQEWDLAKSLQKTIQAARSENYSLTDFWAYMVISKQTRELPESHLSNMKKPVEEGTLPYPIFAAIDNDLQPSWQEARAPETWFEFTPHHAGFSALGAFVSITHFGSKFKKGRLVRTHPERDLTFLRGLWGSALGNTEVIREYIFDQLRNLTLKGLWRRAVANAKSIGHLIFARLLRLQESSQGEHPPPEDEGGEPEHTWLTEMLENWTRTSLEKQEQPHEDPERKGSLSNLMDFVKKTGICASKWEWGTTHNFLYKHGGIRDKIMSSRKHLHLVDAGLAINTPFPLVLPPTREVHLILSFDFSAGDPFETIRATTDYCRRHKIPFPQVEEAELDLWSKAPASCYILKGETGPVVMHFPLFNIDACGGDIEAWSDTYDTFKLADTYTLDVVVLLLALAKKNVRENKKKILRELMNVAGLYYPKDSARSCCLA

SEQ ID NO: 22139 - protein, 707 aa, Homo sapiens
MVDPVPEEEKAGAEPGDSGGDEAVASVPPDSQGAQEPAASSASASASAAVPRKAEVPCAAAEGGRREQSPLLHLDLFNFDCPEAEGSRYVLTSPRSLEACARCAVKPVELLPRALADLVREAPGRSMRVATGLYEAYEAERRAKLQQCRAERERIMREEKRRLFTPLSPAAAAAAAAAAASAPSAGSSSSCSSASLPASPAPRAARKASPSPSSARTQPPPAGSRTGRKSHSLDSLSRRREGALSSESGASSSSYSGESLRELRWPPRASARNSCPAGSASSTTNAPGRPSALTLVPITGRSFSLGDLSHSPQTAQHVERIVRQVRAERGLRGVPERDRKIAALMLARHQEELLLLEQRAAAHGQWELQRVHAKQRREREEREKQRALEQGRRAWAAQVEERRGRRGREEREAARRRQRQYERSEERRRELAERQGLLRRERAERAAREDRLRKLQQEQNLKQREEGLQEGRERAEQIRRERAQRAARAKQRQEGQLQREKRELSRAERARHEALLQGRTRQQRQEREGLRSSLEASLGRAQENYEHLVEQRTRELRERARREELQGRRAKEAAERKEREHQAHLEALARAGERRLQHATQVAEEAVQQKARRVGQSRLEKERAQRANKEKVERDEDCRRRELLQAIGRKLERSEQLTRERRSALESARSTARASFHVREKVREETNTRSFDRMVREAQLHASLDRK

SEQ ID NO: 22140 - protein, 278 aa, Homo sapiens
RAAPARYLGEVTGPATWSAREKRQLVRLLQARQGQPEPDATELARELRGRSEAEIRVFLQQLKGRVAREAIQKVHPGGLQGPRRREAQPPAPIEVWTDLAEKITGPLEEALAVAFSQVLTIAATEPVTLLHSKPPKPTQARGKPLLLSAPGGQEDPAPEIPSSAPAAPSSAPRTPDPAPEKPSESSAGPSTEEDFAVDFEKIYKYLSSVSRSGRSPELSAAGEKGEGGGRSRGIKGPWQQAGVSPYPSPPSITRVRCGPRPAHVTSRGAATPALHSPG

SEQ ID NO: 22141 - protein, 418 aa, Homo sapiens
MEPSDMPAGYHCPLDSAPWDETRDPQSTELIPRRAISRSPTCARCRNHGVTAHLKGHKRLCLFQACECHKCVLILERRRVMAAQVALRRQQEAQLKKHLMRRGEASPKAPNHFRKGTTQPQVPSGKENIAPQPQTPHGAVLLAPTPPGKNSCGPLLLSHPPEASPLSWTPVPPGPWVPGHWLPPGFSMPPPVVCRLLYQEPAVSLPPFPGFDPGTSLQLPTHGPFTTCPGSHPVLTAPLSGEPQGPPSQPRTHSTLILQPCGTPDPLQLQPQVLGKKWDLGPWEEVEPGEGKSRKLKEAGAEEHLEGGQKRGFPVCLSPFPLQASGASCLARTSGPSEWQLQQEAAEALVGLKDSSQAPRVTPSVPPNPAWISLLHPCGPPAPAGGRGFQPVGPCLRPSPAPSVALHIGRLGSISLLS

SEQ ID NO: 22142 - protein, 129 aa, Homo sapiens
MLENWTRTSLEKQEQPHEDPERKGSLSNLMDFVKKTGICASKWEWGTTHNFLYKHGGIRDKIMSSRKHLHLVDAGLAINTPFPLVLPPTREVHLILSFDFSAGDPFEHPRSATSNELLCMSVSSAVKLG

SEQ ID NO: 22143 - protein, 810 aa, Homo sapiens
MQPRFLWILCFSMEETQGELTSSCGSKTMANVSLAFRDVSIDLSQEEWECLDAVQRDLYKDVMLENYSNLVSLGYTIPKPDVITLLEQEKEPWIVMREGTRNWFTDLEYKYITKNLLSEKNVCKIYLSQLQTGEKSKNTIHEDTIFRNGLQCKHEFERQERHQMGCVSQMLIQKQISHPLHPKIHAREKSYECKECRKAFRQQSYLIQHLRIHTGERPYKCMECGKAFCRVGDLRVHHTIHAGERPYECKECGKAFRLHYHLTEHQRIHSGVKPYECKECGKAFSRVRDLRVHQTIHAGERPYECKECGKAFRLHYQLTEHQRIHTGERPYECKVCGKTFRVQRHISQHQKIHTGVKPYKCNECGKAFSHGSYLVQHQKIHTGEKPYECKECGKSFSFHAELARHRRIHTGEKPYECRECGKAFRLQTELTRHHRTHTGEKPYECKECGKAFICGYQLTLHLRTHTGEIPYECKECGKTFSSRYHLTQHYRIHTGEKPYICNECGKAFRLQGELTRHHRIHTCEKPYECKECGKAFIHSNQFISHQRIHTSESTYICKECGKIFSRRYNLTQHFKIHTGEKPYICNECGKAFRFQTELTQHHRIHTGEKPYKCTECGKAFIRSTHLTQHHRIHTGEKPYECTECGKTFSRHYHLTQHHRGHTGEKPYICNECGNAFICSYRLTLHQRIHTGELPYECKECGKTFSRRYHLTQHFRLHTGEKPYSCKECGNAFRLQAELTRHHIVHTGEKPYKCKECGKAFSVNSELTRHHRIHTGEKPYQCKECGKAFIRSDQLTLHQRNHISEEVLCIM

SEQ ID NO: 22144 - protein, 384 aa, Homo sapiens
MRSPAVPTPARGQLGVAFVLLPPHSEGARVFGALGPIGPSSPGLTLGGLAVSEHRLSNKLLAWSGVLEWQEKRRPYSDSTAKLKRTLPCQAYVNQGENLETDQWPQKLIMQLIPQQLLTTLGPLFRNSQLAQFHFTNRDCDSLKGLCRIMGNGFAGCMLFPHISPCEVRVLMLLYSSKKKIFMGLIPYDQSGFVSAIRQVITTRKQAVGPGGVNSGPVQIVNNKFLAWSGVMEWQEPRPEPNSRSKRWLPSHVYVNQGEILRTEQWPRKLYMQLIPQQLLTTLVPLFRNSRLVQFHFTKDLETLKSLCRIMDNGFAGCVHFSYKASCEIRVLMLLYSSEKKIFIGLIPHDQGNFVNGIRRVIANQQQVLQRNLEQEQQQRGMGG

SEQ ID NO: 22145 - protein, 205 aa, Homo sapiens
MGPLQFRDVAIEFSLEEWHCLDMAQRNLYRDVMLENYRNLVFLGIVVSKPDLITHLEQGKKPSTMQRHEMVANPSGPVLHILFFCCCFLSFFLFLSFFFFFLRWNLALLPRLKCSGAISAHCKLCLLGSSDSPTSASQVAGITGARHIAKVIFVFLVEMVFHHVGQARLKLLTSGYLPTSTSQSARITGLSYCTWPVLHILDIDL

SEQ ID NO: 22146 - protein, 289 aa, Homo sapiens
MAPACQILRWALALGLGLMFEVTHAFRSQDEFLSSLESYEIAFPTRVDHNGALLAFSPPPPRRQRRGTGATAESRLFYKVASPSTHFLLNLTRSSRLLAGHVSVEYWTREGLAWQRAARPHCLYAGHLQGQASSSHVAISTCGGLHGLIVADEEEYLIEPLHGGPKGSRSPEESGPHVVYKRSSLRHPHLDTACGVRDEKPWKGRPWWLRTLKPPPARPLGNETERGQPGLKRSVSRERYVETLVVADKMMVAYHGRRDVEQYVLAIMNIVRLPNFSRTRVWEAPLTSS

SEQ ID NO: 22147 - protein, 1002 aa, Homo sapiens
MAAVTMSVPGRKAPPRPGPVPEAAQPFLFTPRGPSAGGGPGSGTSPQVEWTARRLVWVPSELHGFEAAALRDEGEEEAEVELAESGRRLRLPRDQIQRMNPPKFSKAEDMAELTCLNEASVLHNLRERYYSGLIYTYSGLFCVVINPYKQLPIYTEAIVEMYRGKKRHEVPPHVYAVTEGAYRSMLQDREDQSILCTGESGAGKTENTKKVIQYLAHVASSPKGRKEPGVPASVSTVSYGELERQLLQANPILEAFGNAKTVKNDNSSRFGKFIRINFDVAGYIVGANIETYLLEKSRAIRQAKDECSFHIFYQLLGGAGEQLKADLLLEPCSHYRFLTNGPSSSPGQERELFQETLESLRVLGFSHEEIISMLRMVSAVLQFGNIALKRERNTDQATMPDNTAAQKLCRLLGLGVTDFSRALLTPRIKVGRDYVQKAQTKEQADFALEALAKATYERLFRWLVLRLNRALDRSPRQGASFLGILDIAGFEIFQLNSFEQLCINYTNEKLQQLFNHTMFVLEQEEYQREGIPWTFLDFGLDLQPCIDLIERPANPPGLLALLDEECWFPKATDKSFVEKVAQEQGGHPKFQRPRHLRDQADFSVLHYAGKVDYKANEWLMKNMDPLNDNVAALLHQSTDRLTAEIWKDVEGIVGLEQVSSLGDGPPGGRPRRGMFRTVGQLYKESLSRLMATLSNTNPSFVRCIVPNHEKRAGKLEPRLVLDQLRCNGVLEGIRICRQGFPNRILFQEFRQRYEILTPNAIPKGFMDGKQACEKMIQALELDPNLYRVGQSKIFFRAGVLAQLEEERDLKVTDIIVSFQAAARGYLARRAFQKRQQQQSALRVMQRNCAAYLKLRHWQWWRLFTKVKPLLQVTRQDEVLQARAQELQKVQELQQQSAREVGELQGRVAQLEEERARLAEQLRAEAELCAEAEETRGRLAARKQELELVVSELEARVGEEEECSRQMQTEKKRLQQHIQELEAHLEAEEGARQKLQLEKVTTE

SEQ ID NO: 22148 - protein, 803 aa, Homo sapiens
MDVAIEFCLEEWQCLDIAQQNLYRNVMLENYRNLVFLGIAVSKPDLITCLEQEKEPWEPMRRHEMVAKPPVMCSHFTQDFWPEQHIKDPFQKATLRRYKNCEHKNVHLKKDHKSVDECKVHRGGYNGFNQCLPATQSKIFLFDKCVKAFHKFSNSNRHKISHTEKKLFKCKECGKSFCMLPHLAQHKIIHTRVNFCKCEKCGKAFNCPSIITKHKRINTGEKPYTCEECGKVFNWSSRLTTHKKNYTRYKLYKCEECGKAFNKSSILTTHKIIRTGEKFYKCKECAKAFNQSSNLTEHKKIHPGEKPYKCEECGKAFNWPSTLTKHKRIHTGEKPYTCEECGKAFNQFSNLTTHKRIHTAEKFYKCTECGEAFSRSSNLTKHKKIHTEKKPYKCEECGKAFKWSSKLTEHKLTHTGEKPYKCEECGKAFNWPSTLTKHNRIHTGEKPYKCEVCGKAFNQFSNLTTHKRIHTAEKPYKCEECGKAFSRSSNLTKHKKIHIEKKPYKCEECGKAFKWSSKLTEHKITHTGEKPYKCEECGKAFNHFSILTKHKRIHTGEKPYKCEECGKAFTQSSNLTTHKKIHTGEKFYKCEECGKAFTQSSNLTTHKKIHTGGKPYKCEECGKAFNQFSTLTKHKIIHTEEKPYKCEECGKAFKWSSTLTKHKIIHTGEKPYKCEECGKAFKLSSTLSTHKIIHTGEKPYKCEKCGKAFNRSSNLIEHKKIHTGEQPYKCEECGKAFNYSSHLNTHKRIHTKEQPYKCKECGKAFNQYSNLTTHNKIHTGEKLYKPEDVTVILTTPQTFSNIK

SEQ ID NO: 22149 - protein, 1252 aa, Homo sapiens
MPGAPGSLEMGPLTFRDVTIEFSLEEWQCLDTVQQNLYRDVMLENYRNLVFLGMAVFKPDLITCLKQGKEPWNMKRHEMVTKPPVMRSHFTQDLWPDQSTKDSFQEVILRTYARCGHKNLRLRKDCKSANEGKMHKEGYNKLNQCRTATQRKIFQCNKHMKVFHKYSNRNKVRHTKKKTFKCIKCSKSFFMLSCLIRHKRIHIRQNIYKCEERGKAFKSFSTLTKHKIIHTEDKPYKYKKCGNAFKFSSTFTKHKRIHTGETPFRCEECGKAFNQSSNLTDHKRIHTGEKTYKCEECGKAFKGSSNFNAHKVIHTAEKPYKCEDCGKTFNHFSALRKHKIIHTGKKPYKREECGKAFSQSSTLRKHEIIHTGEKPYKCEECGKAFKWSSKLTVHKVVHTGEKPYKCEECGKAFSQFSTLKKHKIIHTGKKPYKCEECGKAFNSSSTLMKHKIIHTGEKPYKCEECGKAFRQSSHLTRHKAIHTGEKPYKCEECGKAFNHFSDLRRHKIIHTGKKPYKCEECGKAFSQSSTLRNHQIIHTGEKPYKCEECGKAFKWSSKLTVHKVIHTGEKPCKCEECGKAFKHFSALRKHKVIHTREKLYKCEECGKAFNNSSILAKHKIIHTGKKPYKCEECGKAFRQSSHLTRHKAIHTGEKPYKCEECGKAFSHFSALRRHKIIHTGKKPYKCEECGKAFSHFSALRRHKIIHTGEKPYKCEECGKAFKWSSKLTVHKVIHTAEKPCKCEECGKSFKHFSALRKHKVIHTREKLYKCEECVKAFNSFSALMKHKVIHTGEKPYKCEECGKAFKWSSKLTVHKVIHTGEKPCKCEECGKAFKHFSALRKHKVIHTGKKPYKCEECGKAFSQSSSLRKHEIIHSGEKPYKCEECGKAFKWLSKLTVHKVIHTAEKPCKCEECGKAFKHFSALRKHKIIHTGKKPYKCEECGKAFNDSSTLMKHKIIHTGKKPYKCAECGKAFKQSSHLTRHKAIHTGEKPYKCEECGKDFNNSSTLKKHKLIHTREKLYKCEECVKAFNNFSALMKHKIIHTGEKPYKCEECGKAFKWSSKLTEHKVIHTGEKPCKCEECDKAFKHFSALRKHKVIHTGKKPYQCDECGKAFNNSSTLTKHKIIHTGEKPYKCEECGKAFSQSSILTKHKIIHSVEKPYKCEECGKAFNQSSHLTRHKTIHTGEKPYKCEECGKAFIQCSYLIRHKTIHTREKPTNVKKVPKLLSNPHTLLDKTIHTGEKPYKCEECAKAF

SEQ ID NO: 22150 - protein, 140 aa, Homo sapiens
MLPLLQLVPAKLLNSSCSLEKTLQCSCSFHGIPTPSVQWWMGGVPVGVDGMDGSLQVTSTMLGPWANSTISLTEEPEMGMRLLCEGKNQNGTHALSILLMSRKSSLAAQAFVKGLIQGAIYAGIVIALLFLCLLPLIVKH

SEQ ID NO: 22151 - protein, 1059 aa, Homo sapiens
MSGVMVGSHADMAPASTAEGAGEKPGPAAPAPAAQYECGECGKSFRWSSRLLHHQRTHTGERPYKCPDCPKAFKGSSALLYHQRGHTGERPYQCPDCPKAFKRSSLLQIHRSVHTGLRAFICGQCGLAFKWSSHYQYHLRQHTGERPYPCPDCPKAFKNSSSLRRHRHVHTGERPYTCGVCGKSFTQSTNLRQHQRVHTGERPFRCPLCPKTFTHSSNLLLHQRTHGAAPAPGTASAAPPPQSREPGKVFVCDAYLQRHLQPHSPPAPPAPPPPPPPVVPELFLAAAETTVELVYRCDGCEQGFSSEELLLEHQPCPGPDAAPQPQEAPAEAPKADQPPSPLPQPPPPAAAPAPGFACLPCGKSFRTVAGLSRHQHSHGAAGGQAFRCGSCDGSFPQLASLLAHQQCHVEEAAAGRPPPQAEAAEVTCPQEPLAPAAPVPPPPPSAPASAERPYKCAECGKSFKGSSGLRYHLRDHTGERPYQCGECGKAFKRSSLLAIHQRVHTGLRAFTCGQCGLTFKWSSHYQYHLRLHSGERPYACGECGKAFRNTSCLRRHRHVHTGERPHACGVCGKSFAQTSNLRQHQRVHTGERPFRCPLCPKTFTHSSNLLLHQRTHSAERPFTCPICGRGFVMAAYLQRHLRTHAPANTPPSTTAPAAGPQPPAPLAAARAPPATQDVHVLPHLQATLSLEVAGGTAQAPSLGPAAPNSQTFLLVQTAQGLQLIPSSVQPPTPPPPPAPPKLILLPSSSAGAGGGRARQGPRAVGKAGQGAGVVWLPGPGGLGVQGAASAGASGTGQSLIVLQNVGGGEAGPQEMSGVQLQPLRPAPEVTTVQLQPAQEVTTVQLQPAQEVTTVQLQPAQEVTTVQLQPVAGQLSNSSGGAVATEAPNLLVVQSGAAEELLTGPGPGEAGDGEASTGVVQDVLFETLQTDEGLQSVLVLSGADGEQTRLCVQEVETLPPGLTEPPATGPPGQKLLIIRSAPATELLDSSNTGGGTATLQLLAPPPSGPASGPAGLPGAPASQMVQVVPAGAGPGVMTPQGLPSIQIVQTLPAVQLVHTF

SEQ ID NO: 22152 - protein, 863 aa, Homo sapiens
MATTGTPTADRGDAAATDDPAARFQVQKHSWDGLRSIIHGSRKYSGLIVNKAPHDFQFVQKTDESGPHSHRLYYLGMPYGSRENSLLYSEIPKKVRKEALLLLSWKQMLDHFQATPHHGVYSREEELLRERKRLGVFGITSYDFHSESGLFLFQASNSLFHCRDGGKNGFMVSPMKPLEIKTQCSGPRMDPKICPADPAFFSFINNSDLWVANIETGEERRLTFCHQGLSNVLDDPKSAGVATFVIQEEFDRFTGYWWCPTASWEGSEGLKTLRILYEEVDESEVEVIHVPSPALEERKTDSYRYPRTGSKNPKIALKLAEFQTDSQGKIVSTQEKELVQPFSSLFPKVEYIARAGWTRDGKYAWAMFLDRPQQWLQLVLLPPALFIPSTENEEQRLASARAVPRNVQPYVVYEEVTNVWINVHDIFYPFPQSEGEDELCFLRANECKTGFCHLYKVTAVLKSQGYDWSEPFSPGEDEFKCPIKEEIALTSGEWEVLARHGSKIWVNEETKLVYFQGTKDTPLEHHLYVVSYEAAGEIVRLTTPGFSHSCSMSQNFDMFVSHYSSVSTPPCVHVYKLSGPDDDPLHKQPRFWASMMEAASCPPDYVPPEIFHFHTRSDVRLYGMIYKPHALQPGKKHPTVLFVYGGPQVQLVNNSFKGIKYLRLNTLASLGYAVVVIDGRGSCQRGLRFEGALKNQMGQVEIEDQVEGLQFVAEKYGFIDLSRVAIHGWSYGGFLSLMGLIHKPQVFKVAIAGAPVTVWMAYDTGYTERYMDVPENNQHGYEAGSVALHVEKLPNEPNRLLILHGFLDENVHFFHTNFLVSQLIRAGKPYQLQIYPNERHSIRCPESGEHYEVTLLHFLQEYL

SEQ ID NO: 22153 - protein, 329 aa, Homo sapiens
FKNESENTCQDVDECQQNPRLCKSYGTCVNTLGSYTCQCLPGFKLKPEDPKLCTDVDECSSGQHQCDSSTVCFNTVGSYSCRCRPGWKPRHGIPNNQKDTVCEDMTFSTWTPPPGVHSQTLSRFFDKVQDLGRDYKPGLANNTIQSILQALDELLEAPGDLETLPRLQQHCVASHLLDGLEDVLRGLSKNLSNGLLNFSYPAGTELSLEVQKQVDRSVTLRQNQAVMQLDWNQAQKSGDPVSDPETEGALCLLGAWPEWMWSLGHHRLQHNRHQRHQHHLPLHPPEQLCRPHGPLRCAGGGSRADCHHLHGAERLSAVPPPGGPHFSPV

SEQ ID NO: 22154 - protein, 633 aa, Homo sapiens
MAVVATLRLSAQGTVTFEDVAVKFTQEEWNLLSEAQRCLYRDVTLENLALMSSLGCWCGVEDEAAPSKQSIYIQRETQVRTPVTGVSPKKAHPCEMCGPILGDILHVADHQGTHHKQKLHRCEAWGNKLYDSGNFHQHQNEHIGEKPYRGSVEEALFVKRCKLHVSGESSVFSESGKDFLPRSGLLQQEASHTGEKSNSKTECVSPFQCGGAHYSHGDSMKHFSTKHILSQHQRLLPREECYVCCECGKSFSKYVSFSNHQRVHSGKRPYECGECEKSFSQKSSLIQHQQFHTGGKPYGCEECGKYFSLEGYLRRHQKVHAGKGPYECGECGKSFSSNVNLKSHQRIHTGERPYKCGECEKSFSRKPSLSYHQRIHTEVRPYKCGECGKSYISKGHLRIHQRMHTGERPYKCGDCGKSFNEKGHLRSHQRVHTTERPYKCGECGKCFSHKGNLILHQHGHTRKRPYMCWECGKLFKKKSHLLVHQRIHSGEKPYACEACQKFFRHKCHLTAHQRVHTGERPYECSDCGKSFTHSCAFIVHKRVHTGQKPYECSECGKSFAASSYLTSHRRVHTGQKPYECSECGKSFAGISSLTNHRRVHTGEKPYGCSECEKKFRKSSSLRYHQRVHERKAL

SEQ ID NO: 22155 - protein, 484 aa, Homo sapiens
MYIKMATLANGQADNASLSTNGLGSSPGSAGHMNGLSHSPGNPSTIPMKDHDAIKLFIGQIPRNLDEKDLKPLFEEFGKIYELTVLKDRFTGMHKGCAFLTYCERESALKAQSALHEQKTLPGMNRPIQVKPADSESRGGSSCLRQPPSHRKLFVGMLNKQQSEDDVRRLFEAFGNIEECTILRGPDGNSKGCAFVKYSSHAEAQAAINALHGSQTMPGASSSLVVKFADTDKERTMRRMQQMAGQMGMFNPMAIPFGAYGAYAQLMQQQAALMASVAQGGYLNPMAAFAAAQMQQMAALNMNGLAAAPMTPTSGGSTPPGITAPAVPSIPSPIGVNGFTGLPPQANGQPAAEAVFANGIHPYPAQSPTAADPLQQAYAGVQQYAGPAAYPAAYGQISQAFPQPPPMIPQQQREGPEGCNLFIYHLPQEFGDAELMQMFLPFGFVSFDNPASAQTAIQAMNGFQIGMKRLKVQLKRPKDANRPY

SEQ ID NO: 22156 - protein, 451 aa, Homo sapiens
MGEPRAGAALDDGSGWTGSEEGSEEGTGGSEGAGGDGGPDAEGVWSPDIEQSFQEALAIYPPCGRRKIILSDEGKMYGRNELIARYIKLRTGKTRTRKQVSSHIQVLARRKSREIQSKLKALNVDQVSKDKAFQTMATMSSAQLISAPSLQAKLGPTGPQASELFQFWSGGSGPPWNVPDVKPFSQTPFTLSLTPPSTDLPGYEPPQALSPLPPPTPSPPAWQARGLGTARLQLVEFSAFVEPPDAVDSYQRHLFVHISQHCPSPGAPPLESVDVRQIYDKFPEKKGGLRELYDRGPPHAFFLVKFWADLNWGPSGEEAGAGGSISSGGFYGVSSQYESLEHMTLTCSSKVCSFGKQVVEKVETERAQLEDGRFVYRLLRSPMCEYLVNFLHKLRQLPERYMMNSVLENFTILQVVTNRDTQELLLCTAYVFEVSTSERGAQHHIYRLVRD

SEQ ID NO: 22157 - protein, 82 aa, Homo sapiens
MAEVHVIGQIIGASGFSESSLFCKWGIHTETGSRYVAQAGLELLRSNRPPTSASQSARIKNGRHGSSCQACGRAKRKWTPRR

SEQ ID NO: 22158 - protein, 909 aa, Homo sapiens
NQYRRSKDSRGRGLSRGRGRGSRGRGKGMGRGRGRGGSRGGMNKGGMNDDEDFYDEDMGDGGGGSYRSRDHDKPHQQSDKKGKVICKYFVEGRCTWGDHCNFSHDIELPKKRELCKFYITGFCARAENCPYMHGDFPCKLYHTTGNCINGDDCMFSHDPLTEETRELLDKMLADDAEAGAEDEKEVEELKKQGINPLPKPPPGVGLLPTPPRPPGPQAPTSPNGRPMQGGPPPPPPPPPPPPGPPQMPMPVHEPLSPQQLQQQDMYNKKIPSLFEIVVRPTGQLAEKLGVRFPGPGGPPGPMGPGPNMGPPGPMGGPMHPDMHPDMHPDMHPDMHADMHADMPMGPGMNPGPPMGPGGPPMMPYGPGDSPHSGMMPPIPPAQNFYENFYQQQEGMEMEPGLLGDAGDTGNWYSSDEDEGGSSVTSILKTLRQQTSSRPPASVGELSSSGLGDPRLQKGHPTGSRLADPRLSRDPRLTRHVEASGGSGPGDSGPSDPRLARALPTSKPEGSLHSSPVGPSSSKGSGPPPTEEEEGERALREKAVNIPLDPLPGHPLRDPRSQLQQFSHIKKDVTLSKPSFARTVLWNPEDLIPLPIPKQDAVPPVPAALQSMPTLDPRLHRAATAGPPNARQRPGASTDSSTQGANLPDFELLSRILKTVNATGSSAAPGSSDKPSDPRVRKAPTDPRLQKPTDSTASSRAAKPGPAEAPSPTASPSGDASPPATAPYDPRVLAAGGLGQGGGGGQSSVLSGISLYDPRTPNAGGKATEPAADTGAQPKGAEGNGKSSASKAKEPPFVRKSALEQPETGKAGADGGTPTDRYNSYNRPRPKAAAAPAATTATPPPEGAPPQPGVHNLPVPTLFGTVKQTPKTGSGSPFAGNSPAREGEQDAASLKDVFKGFDPTASPFCQ

SEQ ID NO: 22159 - protein, 1849 aa, Homo sapiens
MPRSPTSSEDEMAQSFSDYSVGSESDSSKEETIYDTIRATAEKPGGARTEESQGNTLVIRVVIHDLQQTKCIRFNPDATVWVAKQRILCTLTQSLKDVLNYGLFQPASNGRDGKFLDEERLLREYPQPVGEGVPSLEFRYKKRVYKQASLDEKQLAKLHTKTNLKKCMDHIQHRLVEKITKMLDRGLDPNFHDPETGETPLTLAAQLDDSVEVIKALKNGGAHLDFRAKDGMTALHKAARARNQVALKTLLELGASPDYKDSYGLTPLYHTAIVGGDPYCCELLLHEHATVCCKDENGWHEIHQACRYGHVQHLEHLLFYGADMSAQNASGNTALHICALYNQDSCARVLLFRGGNKELKNYNSQTPFQVAIIAGNFELAEYIKNHKETDIVPFREAPAYSNRRRRPPNTLAAPRVLLRSNSDNNLNASAPDWAVCSTATSHRSLSPQLLQQMPSKPEGAAKTIGSYVPGPRSRSPSLNRLGGAGEDGKRPQPLWHVGSPFALGANKDSLSAFEYPGPKRKLYSAVPGRLFVAVKPYQPQVDGEIPLHRGDRVKVLSIGEGGFWEGSARGHIGWFPAECVEEVQCKPRDSQAETRADRSKKLFRHYTVGSYDSFDTSSDCIIEEKTVVLQKKDNEGFGFVLRGAKADTPIEEFTPTPAFPALQYLESVDEGGVAWQAGLRTGDFLIEVNNENVVKVGHRQVVNMIRQGGNHLVLKVVTVTRNLDPDDTARKKAPPPPKRAPTTALTLRSKSMTSELEELVDKASVRKKKDKPEEIVPASKPSRAAENMAVEPRVATIKQRPSSRCFPAGSDMNSVYERQGIAVMTPTVPGSPKAPFLGIPRGTMRRQKSIDSRIFLSGITEEERQFLAPPMLKFTRSLSMPDTSEDIPPPPQSVPPSPPPPSPTTYNCPKSPTPRVYGTIKPAFNQNSAAKVSPATRSDTVATMMREKGMYFRRELDRYSLDSEDLYSRNAGPQANFRNKRGQMPENPYSEVGKIASKAVYVPAKPARRKGMLVKQSNVEDSPEKTCSIPIPTIIVKEPSTSSSGKSSQGSSMEIDPQAPEPPSQLRPDESLTVSSPFAAAIAGAVRDREKRLEARRNSPAFLSTDLGDEDVGLGPPAPRTRPSMFPEEGDFADEDSAEQLSSPMPSATPREPENHFVGGAEASAPGEAGRPLNSTSKAQGPESSPAVPSASSGTAGPGNYVHPLTGRLLDPSSPLALALSARDRAMKESQQGPKGEAPKADLNKPLYIDTKMRPSLDAGFPTVTRQNTRGPLRRQETENKYETDLGRDRKGDDKKNMLIDIMDTSQQKSAGLLMVHTVDATKLDNALQEEDEKAEVEMKPDSSPSEVPEGVSETEGALQISAAPEPTTVPGRTIVAVGSMEEAVILPFRIPPPPLASVDLDEDFIFTEPLPPPLEFANSFDIPDDRAASVPALSDLVKQKKSDTPQSPSLNSSQPTNSADSKKPASLSNCLPASFLPPPESFDAVADSGIEEVDSRSSSDHHLETTSTISTVSSISTLSSEGGENVDTCTVYADGQAFMVDKPPVPPKPKMKPIIHKSNALYQDALVEEDVDSFVIPPPAPPPPPGSAQPGMAKVLQPRTSKLWGDVTEIKSPILSGPKANVISELNSILQQMNREKLAKPGEGLDSPMGAKSASLAPRSPEIMSTISGTRSTTVTFTVRPGTSQPITLQSRPPDYESRTSGTRRAPSPVVSPTEMNKETLPAPLSAATASPSPALSDVFSLPSQPPSGDLFGLNPAGRSRSPSPSILQQPISNKPFTTKPVHLWTKPDVADWLESLNLGEHKEAFMDNEIDGSHLPNLQKEDLIDLGVTRVGHRMNIERALKQLLDR

SEQ ID NO: 22160 - protein, 273 aa, Homo sapiens
MGLQFPECTKAGTRPRGIEASKELQQAQTTRPESTQIQPQPGFCIKTNSSEGKVFINICHSPSIPPPADVTEEELLQMLEEDQAGFRIPMSLGEPHAELDAKGQGCTAYDVAVNSDFYRRMQNSDFLRELVITIAREGLEDKYNLQLNPEWRMMKNRPFMGSISQQNIRSEQRPRIQELGDLYTPAPGRAESGPEKPHLNLWLEAPDLLLAEVDLPKLDGALGLSLEIGENRLVMGGPQQLYHLDAYIPLQINSHESKAAFHRKRKQLMVAMP

SEQ ID NO: 22161 - protein, 77 aa, Homo sapiens
MALSQGLFTFKDVAIEFSQEEWECLDPAQRALYRDVMLENYRNLLSLDEDNIPPEDGDGQLLVDSPMEEVSLVTEHS

SEQ ID NO: 22162 - protein, 406 aa, Homo sapiens
MISFCPDCGKSIQAAFKFCPYCGNSLPVEEHVGSQTFVNPHVSSFQGSKRGLNSSFETSPKKVKWSSTVTSPRLSLFSDGDSSESEDTLSSSERSKGSGSRPPTPKSSPQKTRKSPQVTRGSPQKTSCSPQKTRQSPQTLKRSRVTTSLEALPTGTVLTDKSGRQWKLKSFQTRDNQGILYEAAPTSTLTCDSGPQKQKFSLKLDAKDGRLFNEQNFFQRAAKPLQVNKWKKLYSTPLLAIPTCMGFGVHQDKYRFLVLPSLGRSLQSALDVSPKHVLSERSVLQVACRLLDALEFLHENEYVHGNVTAENIFVDPEDQSQVTLAGYGFAFRYCPSGKHVAYVEGSRSPHEGDLEFISMDLHKGCGPSRRSDLQSLGYCMLKWLYGFLPWTNCLPNTEDIMKQKQK

SEQ ID NO: 22163 - protein, 183 aa, Homo sapiens
PGPPYPPQLMTPSKLRGRALGASGGLRPGPSGGLRDPVTPTSPTVSVTGAGTDGLLALRACSGPPTAGVAGGPVAVEPEVPPVPLPTASSLPRKLLPWEEGPGPPPPPLPGPLAQPQASALATVKASIISELSSKLQQFGGSSAAGGALPWARGGSGGGGDSHHGGASYVPERTSSLQRQSIE

SEQ ID NO: 22164 - protein, 720 aa, Homo sapiens
MQRHSRHFLLVQVLNDTWVSFPSWSEDSTFVSSKKTPYEEQLHRCEDERFELDVVLETNLATIRVLESVQKKLSRMAPEDQEKFRLDDSLGGTSEVIQRRAIYRIYGDKAPEIIESLKKNPVTAVPVVLKRLKAKEEEWREAQQGFNKIWREQYEKAYLKSLDHQAVNFKQNDTKALRSKSLLNEIESVYDEHQEQHSEGRSAPSSEPHLIFVYEDRQILEDAAALISYYVKRQPAIQKEDQGTIHQLLHQFVPSLFFSQQLDLGASEESADEDRDSPQGQTTDPSERKKPAPGPHSSPPEEKGAFGDAPATEQPPLPPPAPHKPLDDVYSLFFANNNWYFFLRLHQTLCSRLLKIYRQAQKQLLEYRTEKEREKLLCEGRREKGSDPAMELRLKQPSEVELEEYYPAFLDMVRSLLEGSIDPTQYEDTLREMFTIHAYVGFTMDKLVQNIARQLHHLVSDDVCLKVVELYLNEKKRGAAGGNLSSRCVRAARETSYQWKAERCMADENCFKVMFLQRKGQVIMTIELLDTEEAQTEDPVEVQHLARYVEQYVGTEGASSSPTEGFLLKPVFLQRNLKKFRRRWQSEQARALRGEARSSWKRLVGVESACDVDCRFKLSTHKMVFIVNSEDYMYRRGTLCRAKQVQPLVLLRHHQHFEEWHSRWLEDNVTVEAASLVQDWLMGEEDEDMVPCKTLCETVHVHGLPVTRYRVQYSRRPASP

SEQ ID NO: 22165 - protein, 291 aa, Homo sapiens
MSSTLPALLCVETLPKPFIWAEPHFMVPKEKQVTICCQGNYGAVEYQLHFEGSLFAVDRPKPPERINKVQFYIPDMNSRMAGQYSCIYRVGELWSEPSNLLDLVVTEMYDTPTLSVHPGPEVISGEKVTFYCRLDTATSMFLLLKEGRSSHVQRGYGKVQAEFPLGPVTTAHRGTYRCFGSYNNHAWSFPSEPVKLLVTGDIENTSLAPEDPTFPDTWGTYLLTTETGLQKDHALWDHTAQNLLRMGLAFLVLVALVWFLVEDWLSRKRTRERASRASTWEGRRRLNTQTL

SEQ ID NO: 22166 - protein, 581 aa, Homo sapiens
MAEAASGAGGTSLEGERGKRPPPEGEPAAPASGVLDKLFGKRLLQAGRYLVSHKAWMKTVPTENCDVLMTFPDTTDDHTLLWLLNHIRVGIPELIVQVRHHRHTRAYAFFVTATYESLLRGADELGLRKAVKAEFGGGTRGFSCEEDFIYENVESELRFFTSQERQSIIRFWLQNLRAKQGEALHNVRFLEDQPIIPELAARGIIQQVFPVHEQRILNRLMKSWVQAVCENQPLDDICDYFGVKIAMYFAWLGFYTSAMVYPAVFGSVLYTFTEADQTSRDVSCVVFALFNVIWSTLFLEEWKRRGAELAYKWGTLDSPGEAVEEPRPQFRGVRRISPITRAEEFYYPPWKRLLFQLLVSLPLCLACLVCVFLLMLGCFQLQELVLSVKGLPRLARFLPKVMLALLVSVSAEGYKKLAIWLNDMENYRLESAYEKHLIIKVVLFQFVNSYLSLFYIGFYLKDMERLKELLLVLSLSQSLERQLQAVLVPLAALRFRLLLLSLRGLLLAARAKVRAGGEPVGPRRGGQRGCAGGLARRAEGACAEGIWGRGRPASRCRRLGAHAAQCTDRARGGVETRWACP

SEQ ID NO: 22167 - protein, 679 aa, Homo sapiens
MHLFACLCIVLSFLEGVGCLCPSQCTCDYHGRNDGSGSRLVLCNDMDMNELPTNLPVDTVKLRIEKTVIRRISAEAFYYLVELQYLWVTYNSVASIDPSSFYNLKQLHELRLDGNSLAAFPWASLLDMPLLRTLDLHNNKITSVPNEALRYLKNLAYLDLSSNRLTTLPPDFLESWTHLVSTPSGVLDLSPSRIILGLQDNPWFCDCHISKMIELSKVVDPAIVLLDPLMTCSEPERLTGILFQRAELEHCLKPSVMTSATKIMSALGSNVLLRCDATGFPTPQITWTRSDSSPVNYTVIQESPEEGVRWSIMSLTGISSKDAGDYKCKAKNLAGMSEAVVTVTVLGITTTPIPPDTSERTGDHPEWDVQPGSGRSTSVSSASSYLWSSSFSPTSSFSASTLSPPSTASFSLSPFSSSTVSSTTTLSTSISASTTMANKRSFQLHQGGKRNLKVAKNGSKLPPASTSKKEELALLDQTMLTETNAAIENLRVVSETKESVTLTWNMINTTHNSAVTVLYSKYGGKDLLLLNADSSKNQVTIDGLEPGGQYMACVCPKGVPPQKDQCITFSTERVEGDDSQWSLLLVVTSTACVVILPLICFLLYKVCKLQCKSEPFWEDDLAKETYIQFETLFPRSQSVGELWTRSHRDDSEKLLLCSRSSVESQVTFKSEGSRPEYYC

SEQ ID NO: 22168 - protein, 228 aa, Homo sapiens
MSSPTTSSLDTPLPGNGPPQPGAPSSSPTVKEEGPEPWPGGPDPDVPGTDEASSACSTDWVIPDPEEEPERKRKKGPAPKMLGHELCRVCGDKASGFHYNVLSCEGCKGFFRRSVVRGGARRYACRGGGTCQMDAFMRRKCQQCRLRKCKEAGMREQCVLSEEQIRKKKIRKQQQESQSQSQSPVGPQGSSSSASGPGASPGGSEAGSQGSGEGEGVQLTAAQELMIQ

SEQ ID NO: 22169 - protein, 206 aa, Homo sapiens
MARGGWRRLRRLLSAGQLLFQGRALLVTNTLGCGALMAAGDGVRQSWEIRARPGQVFDPRRSASMFAVGCSMGPFLHYWYLSLDRLFPASGLRGFPNVLKKVLVDQLVASPLLGVWYFLGLGCLEGQTVGESCQELREKFWEFYKADWCVWPAAQFVNFLFVPPQFRVTYINGLTLGWDTYLSYLKYRSPVPLTPPGCVALDTRAD

SEQ ID NO: 22170 - protein, 224 aa, Homo sapiens
MRAPGAGAASVVSLALLWLLGLPWTWSAAAALGVYVGSGGWRFLRIVCKTARRDLFGLSVLIRVRLELRRHQRAGHTIPRIFQAVVQRQPERLALVDAGTGECWTFAQLDAYSNAVANLFRQLGFAPGDVVAIFLEGRPEFVGLWLGLAKAGMEAALLNVNLRREPLAFCLGTSGAKALIFGGEMVAGEARRGHQVGGDPGLAPGRAGRCCAPGLGRRPPWTWA

SEQ ID NO: 22171 - protein, 217 aa, Homo sapiens
MTVLAPAWSPTTYLLLLLLLSSGLSGTQDCSFQHSPISSDFAVKIRELSDYLLQDYPVTVASNLQDEELCGGLWRLVLAQRWMERLKTVAGSKMQGLLERVNTEIHFVTKCAFQETSEQLVALKPWITRQNFSRCLELQCQPDSSTLPPPWSPRPLEATAPTAPQPPLLLLLLLPVGLLLLAAAWCLHWQRTRRRTPRPGEQVPPVPSPQDLLLVEH

SEQ ID NO: 22172 - protein, 133 aa, Homo sapiens
MAVSTVFSTSSLMLALSRHSLLSPLLSVTSFRRFYRGDSPTDSQKDMIEIPLPPWQERTDESIETKRARLLYESRKRGMLENCILLSLFAKEHLQHMTEKQLNLYDRLINEPSNDWDIYYWATGSSDSPASAS

SEQ ID NO: 22173 - protein, 623 aa, Homo sapiens
MAHKYVGLQYHGSVTFEDVAIAFSQQEWESLDSSQRGLYRDVMLENYRNLVSMGHSRSKPHVIALLEQWKEPEVTVRKDGRRWCTDLQLEDDTIGCKEMPTSENCPSFALHQKISRQKPRECQEYGKTLCQDSKPVQHERIHSSEKPNRCKECGKNFSNGHQLTIHQRLHVGEKPYKYEKCGKAFISGSAFVKHGRIHTGEKPLKCKQCGKTISGSYQLTVHKSIHTGKKPYECGECGKAFLVYGKLTRHQSTHTGEKPFGCEECGKAFSTFSYLVQHQRIHTSEKPYECKECGKAFSTSSPLAKHQRIHTGEKPYECKECGKSFTVYGQLTRHQSIHTGEKPFECKECGKAFRLSSFLHAHQRIHAEIKPYGCKECGRTFSRASYLVQHGRLHTGEKPYECKECGKAFSTGSYLVQHQRIHTGEKPYECKECGKAFISRHQLTVHQRVHTGEKPYECKECGKAFRVHVHLTQHRKIHTDVKPYECKECGKTFSRASYLVQHSRIHTGKKPYECKECGKAFSSGSYLVQHQRIHTGEKPYECNKCGKAFTVYGQLIGHQSVHTGEKPFECKECGKAFRLNSFLTEHQRVHTGEKPFKCKKCGKTFRYSSALKVHLRKHMSVIP

SEQ ID NO: 22174 - protein, 528 aa, Homo sapiens
MGPLQFRDVAIEFSLEEWHCLDTAQRNLYRNVMLENYSNLVFLGITVSKPDLITCLEQGRKPLTMKRNEMIAKPSVMCSHFAQDLWPEQSMKDSFQKVVLRRYEKCEHDNLQLKKGCISVDECKVHKEGYNELNQCLTTTPRKICQCDKYVKVLHQFPNSNGQKRGHTGKKPFKYIECGKAFKQFSTLTTHKKIHTGGKPYKCEECGKAFNHSCSLTRHKKIHTGEKPYKCEECGKAFKHSSTLTTHKRNHTGEKPYKCDKCGKAFMSSSTLSKHEIIHTEKKPYKCEECGKAFNRSSTLTTHKIIHTGEKPYKCEECDKAFKYSYTLTTHKRIHTEDKPYKCEECGKAFKYSSTLTTHKRIHTGEKPYKCEECGKAFKRSSDLTTHKIIHTGEKPYKCEECGKAFKYSSNLTTHKKIHTGERPYKCEECGKAFNQSSILTTHRRIHTGEKFYKCEECGKAFKCSSNLTTHKKIHTGERPYKCEECGKAFNQSSILTTHERIILERNSTNVKNVAKPSSGPHTLLHIR

SEQ ID NO: 22175 - protein, 306 aa, Homo sapiens
MSSPRAVVQLGKAQPAGEESNQTAQQPSSPAMRRLTVDDFEIGRPLGKGKFGNVYLARLKESHFIVALKVLFKSQIEKEGLEHQLRREIEIQAHLQHPNILRLYNYFHDARRVYLILEYAPRGELYKELQKSEKLDEQRTATIIEELADALTYCHDKKVIHRDIKPENLLLGFRGEVKIADFGWSVHTPSLRRKTMCGTLDYLPPEMIEGRTYDEKVDLWCIGVLCYELLVGYPPFESASHSETYRRILKVDVRFPLSMPLGARDLISRLLRYQPLERLPLAQILKHPWVQAHSRRVLPPCAQMAS

SEQ ID NO: 22176 - protein, 301 aa, Homo sapiens
MTRHGKNCTAGAVYTYHEKKKDTAASGYGTQNIRLSRDAVKDFDCCCLSLQPCHDPVVTPDGYLYEREAILEYILHQKKEIARQMKAYEKQRGTRREEQKELQRAASQDHVRGFLEKESAIVSRPLNPFTAKALSGTSPDDVQPGPSVGPPSKDKDKVLPSFWIPSLTPEAKATKLEKPSRTVTCPMSGKPLRMSDLTPVHFTPLDSSVDRVGLITRSERYVCAVTRDSLSNATPCAVLRPSGAVVTLECVEKLIRKDMVDPVTGDKLTDRDIIVLQRGGTGFAGSGVKLQAEKSRPVMQA

SEQ ID NO: 22177 - protein, 112 aa, Homo sapiens
IYILDRRFRSLDDSCSQLTSFLYSFCQQSRRQRIIQRNRTERLSDLLDWKYLGRVGPPLSYPLLANQQLLARGLWCRVQGLILLVTVAVPLSNEPGRSRWWLMVVIPALWEA

SEQ ID NO: 22178 - protein, 69 aa, Homo sapiens
MATQGHLTFKDVAIEFSQEEWKCLEPVQKALYKDVMLENYRNLVFLGWRIMARSHLTATSVSQVSLLNV

SEQ ID NO: 22179 - protein, 148 aa, Homo sapiens
SNLILSRCLGKQLCDNTCPLFFSSSCRKIDGTRTPRDERRRAQHNEVERRRRDKINNWIVQLSKIIPDCNADNSKTGASKGGILSKACDYIRELRQTNQRMQETFKEAERLQMDNELLRQQIEELKNENALLRAQLQQHNLEMVGEGT

SEQ ID NO: 22180 - protein, 595 aa, Homo sapiens
MNGHLEAEEQQDQALHIQRLRPKPEARPRGGLVPLAEVSGCCTLRSRSPSDSAAYFCIYTYPRGRRGARRRATRTFRADGAATYEENRAEAQRWATALTCLLRGLPLPGDGEITPDLLPRPPRLLLLVNPFGGRGLAWQWCKNHVLPMISEAGLSFNLIQTERQNHARELVQGLSLSEWDGIVTVSGDGLLHEVLNGLLDRPDWEEAVKMPVGILPCGSGNALAGAVNQHGGFEPALGLDLLLNCSLLLCRGGGHPLDLLSVTLASGSRCFSFLSVAWGFVSDVDIQSERFRALGSARFTLGTVLGLATLHTYRGRLSYLPATVEPASPTPAHSLPRAKSELTLTPDPAPPMAHSPLHRSVSDLPLPLPQPALASPGSPEPLPILSLNGGGPELAGDWGGAGDAPLSPDPLLSSPPGSPKAALHSPVSEGAPVIPPSSGLPLPTPDARVGASTCGPPDHLLPPLGTPLPPDWVTLEGDFVLMLAISPSHLGADLVAAPHARFDDGLVHLCWVRSGISRAALLRLFLAMERGSHFSLGCPQLGYAAARAFRLEPLTPRGVLTVDGEQVEYGPLQAQMHPGIGTLLTGPPGCPGREP

SEQ ID NO: 22181 - protein, 162 aa, Homo sapiens
MRLTRCQAALAAAITLNLLVLFYVSWLQHQPRNSRARGPRRASAAGPRVTVLVREFEAFDNAVPELVDSFLQQDPAQPVVVAADTLPYPPLALPRIPNVRLALLQPALDRPAAASRPETYVATEFVALVPDGARAEAPGLLERMVEALRAGSARLVAAPVAT

SEQ ID NO: 22182 - protein, 566 aa, Homo sapiens
MRRVGGRADEDATAAGSLWVLAPPEPTGHLVIPGTSPLEPPCPWLDSHIFQCRFGKMLPLEKAFASPRSSPAPPDLPTPGSAAGVQQEEPETIPERTPADLEFSRLRFREFVYQEAAGPHQTLARLHELCRQWLMPEARSKEQMLELLVLEQFLGILPDKVRPWVVAQYPESCKKAASLVEGLADVLEEPGMLLGSPAGSSSILSDGVYERHMDPLLLPGELASPSQALGAGEIPAPSETPWLSPDPLFLEQRRVREAKTEEDGPANTEQKLKSFPEDPQHLGEWGHLDPAEENLKSYRKLLLWGYQLSQPDAASRLDTEELRLVERDPQGSSLPEGGRRQESAGCACEEAAPAGVLPELPTEAPPGDALADPPSGTTEEEEEQPGKAPDPQDPQDAESDSATGSQRQSVIQQPAPDRGTAKLGTKRPHPEDGDGQSLEGVSSSGDSAGLEAGQGPGADEPGLSRGKPYACGECGEAFAWLSHLMEHHSSHGGRKRYACQGCWKTFHFSLALAEHQKTHEKEKSYALGGARGPQPSTREAQAGARAGGPPESVEGEAPPAPPEAQR

SEQ ID NO: 22183 - protein, 1129 aa, Homo sapiens
MSVEAYGPSSQTLTFLDTEEAELLGADTQGSEFEFTDFTLPSQTQTPPGGPGGPGGGGAGGPGGAGAGAAAGQLDAQVGPEGILQNGAVDDSVAKTSQLLAELNFEEDEEDTYYTKDLPIHACSYCGIHDPACVVYCNTSKKWFCNGRGNTSGSHIVNHLVRAKCKEVTLHKDGPLGETVLECYNCGCRNVFLLGFIPAKADSVVVLLCRQPCASQSSLKDINWDSSQWQPLIQDRCFLSWLVKIPSEQEQLRARQITAQQINKLEELWKENPSATLEDLEKPGVDEEPQHVLLRYEDAYQYQNIFGPLVKLEADYDKKLKESQTQDNITVRWDLGLNKKRIAYFTLPKTDSGNEDLVIIWLRDMRLMQGDEICLRYKGDLAPLWKGIGHVIKVPDNYGDEIAIELRSSVGAPVEVTHNFQVDFVWKSTSFDRMQSALKTFAVDETSVSGYIYHKLLGHEVEDVIIKCQLPKRFTAQGLPDLNHSQVYAVKTVLQRPLSLIQGPPGTGKTVTSATIVYHLARQGNGPVLVCAPSNIAVDQLTEKIHQTGLKVVRLCAKSREAIDSPVSFLALHNQIRNMDSMPELQKLQQLKDETGELSSADEKRYRALKRTAERELLMNADVICCTCVGAGDPRLAKMQFRSILIDESTQATEPECMVPVVLGAKQLILVGDHCQLGPVVMCKKAAKAGLSQSLFERLVVLGIRPIRLQVQYRMHPALSAFPSNIFYEGSLQNGVTAADRVKKGFDFQWPQPDKPMFFYVTQGQEEIASSGTSYLNRTEAANVEKITTKLLKAGAKPDQIGIITPYEGQRSYLVQYMQFSGSLHTKLYQEVEIASVDAFQGREKDFIILSCVRANEHQGIGFLNDPRRLNVALTRARYGVIIVGNPKALSKQPLWNHLLNYYKEQKVLVEGPLNNLRESLMQFSKPRKLVNTINPGARFMTTAMYDAREAIIPGSVYDRSSQGRPSSMYFQTHDQIGMISAGPSHVAAMNIPIPFNLVMPPMPPPGYFGQANGPAAGRGTPKGKTGRGGRQKNRFGLPGPSQTNLPNSQASQDVASQPFSQGALTQGYISMSQPSQMSQPGLSQPELSQDSYLGDEFKSQIDVALSQDSTYQGERAYQHGGVTGLSQY

SEQ ID NO: 22184 - protein, 724 aa, Homo sapiens
MIEDSGKRGNTMAERRQLFAEMRAQDLDRIRLSTYRTACKLRFVQKKCNLHLVDIWNVIEALRENALNNLDPNTELNVSRLEAVLSTIFYQLNKRMPTTHQIHVEQSISLLLNFLLAAFDPEGHGKISVFAVKMALATLCGGKIMDKLRYIFSMISDSSGVMVYGRYDQFLREVLKLPTAVFEGPSFGYTEQSARSCFSQQKKVTLNGFLDTLMSDPPPQCLVWLPLLHRLANVENVFHPVECSYCHSESMMGFRYRCQQCHNYQLCQDCFWRGHAGGSHSNQHQMKEYTSWKSPAKKLTNALSKSLSCASSREPLHPMFPDQPEKPLNLAHIVPPRPVTSMNDTLFSHSVPSSGSPFITRSMLESSNRLDEEHRLIARYAARLAAESSSSQPPQQRSAPDISFTIDANKQQRQLIAELENKNREILQEIQRLRLEHEQASQPTPEKAQQNPTLLAELRLLRQRKDELEQRMSALQESRRELMVQLEGLMKLLKTQGAGSPRSSPSHTISRPIPMPIRSASACSTPTHTPQDSLTGVGGDVQEAFAQSSRRNLRNDLLVAADSITNTMSSLVKELNSEVGSETESNVDSEFARTQFEDLVPSPTSEKAFLAQIHARKPGYIHSGATTSTMRGDMVTEDADPYVQPEDENYENDSVRQLENELQMEEYLKQKLQDEAYQLHVSTETRLEHPCPVSETKWRVLFWGFVFFGGFLSLALQIYFWGLF

SEQ ID NO: 22185 - protein, 563 aa, Homo sapiens
MGPLTIRDVTVEFSLEEWHCLDTAQQNLYRDVMLENYRNLVFLGIAVSKPDLITCLEQGKEPCNMKRHEMVAKPPVMCSHIAEDLCPERDIKYFFQKVILRRYDKCEHENLQLRKGCKSVDECKVCKGGYNGLNQCLITTQSKMYQCDKYVKVFYKFSNSDRHKIRHTEKKTCKCKECGKSFCMLSQLTRHKRIHIRENSHKCEECGKAFNQSSALTRHKMTHTGEKPYKCEECGKAFNRSSHLTQHKVIHTREKPYKCEECGKAFNRSSHITQHKRIHNREKPFKYDECCKAFKWSSALTTLTQHKRIHTGEKPYKCEECGKAFNQSSALTRHKMIHTGEKPFQCEECGKAFNRSSHLTQHKIIHTKEKPYKCEECGKAFNRSSHLTKHKRIHTREKAYKCDEYCKAFNWSSALTTLTQHKIIHTGEKPYKCEECGKAFNRSSYLIRHKIIHTGEKPYKCEECGKAFNQSSHLTQHKIIHTGEKPYKCEECGKAFNRSSHLSQHKIIHTGEKPYKCEECGKPFNRFSYLTVHKRIHAGENPNKYEECGKACNHSSNLTKHNS

SEQ ID NO: 22186 - protein, 807 aa, Homo sapiens
MDDVLPLMPWETLLAQGSPQGSPDLPAGQRKQQPQGDRAQGLASESWKLLEVPIIHITPSSDGESPACTPTPRRRQQQRMPDPQSLSQDSTTPHSGRSTPSSSPSLRKRLQLLPPSRPPPEPEPGTMVEKGSDSSSEKGGVPGTPSTQSLGSRNFIRNSKKMQSWYSMLSPTYKQRNEDFRKLFSKLPEAERLIVDYSCALQREILLQGRLYLSENWICFYSNIFRWETTISIQLKEVTCLKKEKTAKLIPNAIQICTESEKHFFTSFGARDRCFLLIFRLWQNALLEKTLSPRELWHLVHQCYGSELGLTSEDEDYVSPLQLNGLGTPKEVGDVIALSDITSSGAADRSQEPSPVGSRRGHVTPNLSRASSDADHGAEEDKEEQVDSQPDASSSQTVTPVAEPPSTEPTQPDGPTTLGPLDLLPSEELLTDTSNSSSSTGEEADLAALLPDLSGRLLINSVFHVGAERLQQMLFSDSPFLQGFLQQCKFTDVTLSPWSGDSKCHQRRVLTYTIPISNPLGPKSASVVETQTLFRRGPQAGGCVVDSEVLTQGIPYQDYFYTAHRYCILGLARNKARLRVSSEIRYRKQPWSLVKSLIEKNSWSGIEDYFHHLERELAKAEKLSLEEGGKDARGLLSGLRRRKRPLSWRAHGDGPQHPDPDPCARAGIHTSGSLSSRFSEPSVDQGPGAGIPSALVLISIVLIILIALNVLLFYRLWSLERTAHTFESWHSLALAKGKFPQTATEWAEILALQKQFHSVEVHKWRQILRASVELLDEMKFSLEKLHQGITVSDPPFDTQPRPDDSFS

SEQ ID NO: 22187 - protein, 839 aa, Homo sapiens
MKTLRARFKKTESQDWGKSDERLLQAVENNDAPRVAALIARKGLVPTKLDPEGKSAFHLAAMRGAASCLEVMIAHGSNVMSADGAGYNALHLAAKYGHPQCLKQLLQASCVVDVVDSSGWTALHHAAAGGCLSCSEVLCSFKAHLNPQDRSGATPLIIAAQMCHTDLCRLLLQQGAAANDQDLQGRTALMLACEGASPETVEVLLQGGAQPGITDALGQDAAHYGALAGDKLILHLLQEAAQRPSPPSALTEDDSGEASSQNSMSSHGKQGAPKKRKAPPPPASIPMPDDRDAYEEIVRLRQERGRLLQKIRGLEQHKERRQQESPEASSLHILERQVQELQQLLVERQEEKESLGREVESLQSRLSLLENERENTSYDVTTLQDEEGELPDLPGAEVLLSRQLSPSAQEHLASLQEQVAVLTRQNQELMEKVQILENFEKDETQMEVEALAEVIPLALYDSLRAEFDQLRRQHAEALQALRQQETREVPREEGAACGESEVAGATATKNGPTHMELNGSVAPETKVNGAETIDEEAAGDETMEARTMEAEATGAEATGAEATGAKVTETKPTGAEVREMETTEEEANMETKPTGAQATDTETTGVEAMGVEATKTKAEEAEMQAYGVGAGQAEPPVTGTTNMEATGSRATGMESTGVSATGVENPGVEATVPGISAGPILHPGAAEASEKLQVELETRIRGLEEALRQREREAAAELEAALGKCEAAEAEAGRLRERVREAEGSGASGGGGGDTTQLRAALEQAREDLRDRDSRLRELEAASACLDEARASRLLAEEEARGLRAELAQREEARLEQSRELEVLREQLATARATGEQQR

SEQ ID NO: 22188 - protein, 456 aa, Homo sapiens
MPKKRQALVEFEDVLGACNAVNYAADNQIYIAGHPAFVNYSTSQKISRPGDSDDSRSVNSVLLFTILNPIYSITTDVLYTICNPCGPVQRIVIFRKNGVQAMVEFDSVQSAQRAKASLNGADIYSGCCTLKIEYAKPTRLNVFKNDQDTWDYTNPNLSGQGDPGSNPNKRQRQPPLLGDHPAEYGGPHGGYHSHYHDEGYGPPPPHYEGRRMGPPVGGHRRGPSRYGPQYGHPPPPPPPPEYGPHADSPVLMVYGLDQSKMNCDRVFNVFCLYGNVEKVKFMKSKPGAAMVEMADGYAVDRAITHLNNNFMFGQKLNVCVSKQPAIMPGQSYGLEDGSCSYKDFSESRNNRFSTPEQAAKNRIQHPSNVLHFFNAPLEVTEENFFEICDELGVKRPSSVKVFSGKSERSSSGLLEWESKSDALETLGFLNHYQMKNPNGPYPYTLKLCFSTAQHAS

SEQ ID NO: 22189 - protein, 936 aa, Homo sapiens
MALTQGPLTFRDVAIEFSQEEWKSLDPVQKALYWDVMLENYRNLVFLGILPKCMTKELPPIGNSNTGEKCQTVTLERHECYDVENFYLREIQKNLQDLEFQWKDGEINYKEVPMTYKNNLNGKRGQHSQEDVENKCIENQLTLSFQSRLTELQKFQTEGKIYECNQSEKTVNNSSLVSPLQRILPSVQTNISKKYENEFLQLSLPTQLEKTHIREKPYMCKGCGKAFRVSSSLINHQMVHTTEKPYKCNECGKAFHRGSLLTIHQIVHTRGKPYQCGVCGKIFRQNSDLVNHRRSHTGEKPYKCNECGKSFSQSYNLAIHQRIHTGEKPYKCNECGKTFKQGSCLTTHQIIHTGEKPYQCDICGKVFRQNSNLVNHQRIHTGEKPYKCNICGKSFSQSSNLATHQTVHSGNKPYKCDECGKTFKRSSSLTTHQIIHTGEKPYTCDVCDKVFSQRSQLARHQRSHTGEKPYKCNECGKVFSQTSHLVGHRRIHTGEKPYKCDKCGKAFKQGSLLTRHKIIHTREKRYQCGECGKVFSENSCLVRHLRIHTGEQPYKCNVCGKVFNYSGNLSIHKRIHTGEKPFQCNECGTVFRNYSCLARHLRIHTGQKPYKCNVCGKVFNDSGNLSNHKRIHTGEKPFQCNECGKVFSYYSCLARHRKIHTGEKPYKCNDCGKAYTQRSSLTKHLIIHTGEKPYNCNEFGGAFIQSSKLARYHRNPTGEKPHKCSHCGRTFSHITGLTYHQRRHTGEMPYKCIECGQVFNSTSNLARHRRIHTGEKPYKCNECGKVFRHQSTLARHRSIHTGEKPYVCNECGKAFRVRSILVNHQKMHTGDKPYKCNECGKAFIERSKLVYHQRNHTGEKPYKCIECGKAFGRFSCLNKHQMIHSGEKPYKCNECGKSFISRSGLTKHQTKHTAESLKTKFNVEKPLDVLLTSGFK

SEQ ID NO: 22190 - protein, 551 aa, Homo sapiens; identical to SEQ ID NO: 16182

SEQ ID NO: 22191 - protein, 208 aa, Homo sapiens
MPTREPPKTRGSRGHLHTHPPGPGPPLQGLAPRGLKTSAPRPPCQPQPGPHKAKTKKIVFEDELLSQALLGAKKPIGAIPKGHKPRPHPVPDYELKYPPVSSERERSRYVAVFQDQYGEFLELQHEVGCAQAKLRQLEALLSSLPPPQSQKEAQVAARVWREFEMKRMDPGFLDKQARCHYLKGKLRHLKTQIQKFDDQGDSEGSVYF

SEQ ID NO: 22192 - protein, 438 aa, Homo sapiens
MFGKRKKRVEISAPSNFEHRVHTGFDQHEQKFTGLPRQWQSLIEESARRPKPLVDPACITSIQPGAPKGEPHDVAPNGPSAGGLAIPQSSSSSSRPPTRARGAPSPGVLGPHASEPQLAPPACTPAAPAVPGPPGPRSPQREPQRVSHEQFRAALQLVVDPGDPRSYLDNFIKIGEGSTGIVCIATVRSSGKLVAVKKMDLRKQQRRELLFNEVVIMRDYQHENVVEMYNSYLVGDELWVVMEFLEGGALTDIVTHTRMNEEQIAAVCLAVLQALSVLHAQGVIHRDIKSDSILLTHDGRVKLSDFGFCAQVSKEVPRRKSLVGTPYWMAPELISRLPYGPEVDIWSLGIMVIEMVDGEPPYFNEPPLKAMKMIRDNLPPRLKNLHKVSPSLKGFLDRLLVRDPAQRATAAELLKHPFLAKAGPPASIVPLMRQNRTR

SEQ ID NO: 22193 - protein, 676 aa, Homo sapiens
MGHHRPWLHASVLWAGVASLLLPPAMTQQLRGDGLGFRNRNNSTGVAGLSEEASAELRHHLHSPRDHPDENKDVSTENGHHFWSHPDREKEDEDVSKEYGHLLPGHRSQDHKVGDEGVSGEEVFAEHGGQARGHRGHGSEDTEDSAEHRHHLPSHRSHSHQDEDEDEVVSSEHHHHILRHGHRGHDGEDDEGEEEEEEEEEEEEASTEYGHQAHRHRGHGSEEDEDVSDGHHHHGPSHRHQGHEEDDDDDDDDDDDDDDDDVSIEYRHQAHRHQGHGIEEDEDVSDGHHHRDPSHRHRSHEEDDNDDDDVSTEYGHQAHRHQDHRKEEVEAVSGEHHHHVPDHRHQGHRDEEEDEDVSTERWHQGPQHVHHGLVDEEEEEEEITVQFGHYVASHQPRGHKSDEEDFQDEYKTEVPHHHHHRVPREEDEEVSAELGHQAPSHRQSHQDEETGHGQRGSIKEMSHHPPGHTVVKDRSHLRKDDSEEEKEKEEDPGSHEEDDESSEQGEKGTHHGSRDQEDEEDEEEGHGLSLNQEEEEEEDKEEEEEEEDEERREERAEVGAPLSPDHSEEEEEEEEGLEEDEPRFTIIPNPLDRREEAGGASSEEESGEDTGPQDAQEYGNYQPGSLCGYCSFCNHCQFCYLCPLVCETVCAPGSYVDYFSSSLYQALADMLETPEP

SEQ ID NO: 22194 - protein, 630 aa, Homo sapiens
MEVKGQLISSPTFNAPAALFGEAAPQVKSERLRGLLDRQRTLQEALSLKLQELRKVCLQEAELTGQLPPECPLEPGERPQLVRRRPPTARAYPPPHPNQAHHSLCPAEELALEALEREVSVQQQIAAAARRLALAPDLSTEQRRRRRQVQADALRRLHELEEQLRDVRARLGLPVLPLPQPLPLSTGSVITTQGVCLGMRLAQLSQEDVVLHSESSSLSESGASHDNEEPHGCFSLAERPSPPKAWDQLRAVSGGSPERRTPWKPPPSDLYGDLKSRRNSVASPTSPTRSLPRSASSFEGRSVPATPVLTRGAGPQLCKPEGLHSRQWSGSQDSQMGFPRADPASDRASLFVARTRRSNSSEALLVDRAAGGGAGSPPAPLAPSASGPPVCKSSEVLYERPQPTPAFSSRTAGPPDPPRAARPSSAAPASRGAPRLPPVCGDFLLDYSLDRGLPRSGGGTGWGELPPAAEVPGPLSRRDGLLTMLPGPPPVYAADSNSPLLRTKDPHTRATRTKPCGLPPEAAEGPEVHPNPLLWMPPPTRIPSAGERSGHKNLALEGLRDWYIRNSGLAAGPQRRPVLPSVGPPHPPFLHARCYEVGQALYGAPSQAPLPHSRSFTAPPVSGRYGGCFY

SEQ ID NO: 22195 - protein, 96 aa, Homo sapiens
MSGAPTAGAALMLCAATAVLLSAQGGPVQSKSPRFASWDEMNVLAHGLLQLGQGLREHAERTRSQLSALERRLSACGSACQGTEGSTDLPLAPESR

SEQ ID NO: 22196 - protein, 617 aa, Homo sapiens
MLENFALVATLGFWCEAEHEAPSEQSVSVEGVSQVRTAESGLFQKAHPCEMCDPLLKDILHLAEHQGSHLTQKLCTRGLCRRRFSFSANFYQHQKQHNGENCFRGDDGGASFVKSCTVHMLGRSFTCREEGMDLPDSSGLFQHQTTYNRVSPCRRTECMESFPHSSSLRQHQGDYDGQMLFSCGDEGKAFLDTFTLLDSQMTHAEVRPFRCLPCGNVFKEKSALINHRKIHSGEISHVCKECGKAFIHLHHLKMHQKFHTGKRHYTCSECGKAFSRKDTLVQHQRVHTGERSYDCSECGKAYSRSSHLVQHQRIHTGERPYKCNKCGKAFSRKDTLVQHQRFHTGERPYECSECGKFFSQSSHLIEHWRIHTGARPYECIECGKFFSHNSSLIKHRRVHTGARSYVCSKCGKAFGCKDTLVQHQIIHTGARPYECSECGKAFSRKDTLVQHQKIHTGERPYECGECGKFFSHSSNLIVHQRIHTGAKPYECNECGKCFSHNSSLILHQRVHTGARPYVCSECGKAYISSSHLVQHKKVHTGARPYECSECGKFFSRNSGLILHQRVHTGEKPYVCSECGKAYSRSSHLVRHQKAHTGERAHECNSFGGPLAASLKLV

SEQ ID NO: 22197 - protein, 157 aa, Homo sapiens
MGPLSAPPCTQHITWKGLLLTAETPKPSISSSNLNPREVMEAVRLICDPETPDASYLWLLNGQNLPMTHRLQLSKTNRTLYLFGVTKYIAGPYECEIRNPVSASRSDPVTLNLLPKLPMPYITINNLNPREKKDVLAFTCEPKSRNYTYIWWLNGQS

SEQ ID NO: 22198 - protein, 952 aa, Homo sapiens
VTELEEDLGTARRDLIKSEELSSKHQRDLREALAQKEDMEERITTLEKRYLAAQREATSIHDLNDKLENELANKESLHRQCEEKARHLQELLEVAEQKLQQTMRKAETLPEVEAELAQRIAALTKAEERHGNIEEHLRQLEGQLEEKNQELARVRQREKMNEDHNKRLSDTVDRLLSESNERLQLHLKERMAALEEKNTLIQELESSQRQIEEQHHHKGRLSEEIEKLRQEVDQLKGRGGPFVDGVHSRSHMGSAADVRFSLGTTTHAPPGVHRRYSALREESAKDWETSPLPGMLAPAAGPAFDSDPEISDVDEDEPGGLVGSADVVSPSGHSDAQTLAMMLQEQLDAINEEIRMIQEEKESTELRAEEIETRVTSGSMEALNLKQLRKRGSIPTSLTALSLASASPPLSGRSTPKLTSRSAAQDLDRMGVMTLPSDLRKHRRKLLSPVSREENREDKATIKCETSPPSSPRTLRLEKLGHPALSQEEGKSALEDQGSNPSSSNSSQDSLHKGAKRKGIKSSIGRLFGKKEKGRLIQLSRDGATGHVLLTDSEFSMQEPMVPAKLGTQAEKDRRLKKKHQLLEDARRKGMPFAQWDGPTVVSWLELWVGMPAWYVAACRANVKSGAIMSALSDTEIQREIGISNALHRLKLRLAIQEMVSLTSPSAPPTSRTSSGNVWVTHEEMETLETSTKTDSEEGSWAQTLAYGDMNHEWIGNEWLPSLGLPQYRSYFMECLVDARMLDHLTKKDLRVHLKMVDSFHRTSLQYGIMCLKRLNYDRKELEKRREESQHEIKDVLVWTNDQVVHWVQSIGLRDYAGNLHESGVHGALLALDENFDHNTLALILQIPTQNTQARQVMEREFNNLLALGTDRKLDDGDDKVFRRAPSWRKRFRPREHHGRGGMLSASAETLPAGFRVSTLGTLQPPPAPPKKIMPEAHSHYLYGHMLSAFRD

SEQ ID NO: 22199 - protein, 408 aa, Homo sapiens
MGTPKPRILPWLVSQLDLGQLEGVAWVNKSRTRFRIPWKHGLRQDAQQEDFGIFQAWAEATGAYVPGRDKPDLPTWKRNFRSALNRKEGLRLAEDRSKDPHDPHKIYEFVNSGVGDFSQPDTSPDTNGGGSTSDTQEDILDELLGNMVLAPLPDPGPPSLAVAPEPCPQPLRSPSLDNPTPFPNLGPSENPLKRLLVPGEEWEFEVTAFYRGRQVFQQTISCPEGLRLVGSEVGDRTLPGWPVTLPDPGMSLTDRGVMSYVRHVLSCLGGGLALWRAGQWLWAQRLGHCHTYWAVSEELLPNSGHGPDGEVPKDKEGGVFDLGPFIVGCAHVPQGLGRNGPGRGCLLPGEYCGPAHFQQPPTLPHLRPVQGLPAGLGGGHGFPGPWGELSPRSSWCASNPPVPHHLNQ

SEQ ID NO: 22200 - protein, 329 aa, Homo sapiens
MGTPKPRILPWLVSQLDLGQLEGVAWVNKSRTRFRIPWKHGLRQDAQQEDFGIFQAWAEATGAYVPGRDKPDLPTWKRNFRSALNRKEGLRLAEDRSKDPHDPHKIYEFVNSGVGDFSQPDTSPDTNGGGSTSDTQEDILDELLGNMVLAPLPDPGPPSLAVAPEPCPQPLRSPSLDNPTPFPNLGPSENPLKRLLVPGEEWEFEVTAFYRGRQVFQQTISCPEGLRLVGSEVGDRTLPGWPVTLPDPGMSLTDRGVMSYVRHVLSCLGGGLALWRAGQWLWAQRLGHCHTYWAVSEELLPNSGHGPDGEVPKDKEGGVFDLGPFIVGE

SEQ ID NO: 22201 - protein, 129 aa, Homo sapiens
MSLLATLGLELDRALLPASGLGWLVDYGKLPPAPAPLAPYEVLGGALEGGLPVGGEPLAGDGFSDWMTERVDFTALLPLEPPLPPGTLPQPSPTPPDLEAMASLLKKELEQMEDFFLDAPPLPPPSPPP

SEQ ID NO: 22202 - protein, 113 aa, Homo sapiens
MRRLTVDDFEIGRPLGKGKFGNVYLARLKESHFIVALKVLFKSQIEKEGLEHQLRREIEIQAHLQHPNILRLYNYFHDARRVYLILEYAPRGELYKELQKSEKLDEQRTATVR

SEQ ID NO: 22203 - protein, 518 aa, Homo sapiens
PKHLSATKPKKSWAPNLYELDSDLTKEPDVIIGEGPTDSEFFHQRFRNLIYVEFVGPRKTLIKLRNLCLDWLQPETRTKEEIIELLVLEQYLTIIPEKLKPWVRAKKPENCEKLVTLLENYKEMYQPEDDNNSDVTSDDDMTRNRRESSPPHSVHSFSGDRDWDRRGRSRDMEPRDRWSHTRNPRSRMPPRDLSLPVVAKTSFEMDREDDRDSRAYESRSQDAESYQNVVDLAEDRKPHNTIQDNMENYRKLLSLGLKTMPEAKKSTHRRGICEDESSHGVIMEKFIKDVSRSSKSGRARESSDRSQRFPRMSDDNWKDISLNKRESVIQQRVYEGNAFRGGFRFNSTLVSRKRVLERKRRYHFDTDGKGSIHDQKGCPRKKPFECGSEMRKAMSVSSLSSLSSPSFTESQPIDFGAMPYVCDECGRSFSVISEFVEHQIMHTRENLYEYGESFIHSVAVSEVQKSQVGGKRFECKDCGETFNKSAALAEHRKIHARGYLVECKNQECEEAFMPSPTF

SEQ ID NO: 22204 - protein, 3266 aa, Homo sapiens
MPAPVGLLGLVLLWPLMAVTAEKIPDSQVGQVASCMTACTGSAGPHLPVGTRYTYHFSTNTSTSLQDVLVEGSGLGLQGLAVLDVLGLCQMALWLQDFQVTSILGAKVELLKESESLSATLGRNPLRFILHSGRVAHLCPHPTEPRWVLNVKRAVLSLLQGHPGAHSPKTFDEVDILGRCPTTYQHHGDWLHKTKDLARCSLRRGRSSLHSQALPGVAPGLTSRLTCVQSFRAGVLREASCTELDSAGPLPAKASAVQMRTLSSLSLLHEMPQDPAGTDPDDRDDEDMTPSSLLYEWEETPSQAMVATAATLVRRLCLAQTTSLEAMDLFLTLVSQLQGLSGGELMELWQYSSFKCRDNGQPLLDALPSCGTEHCVGLMKELIASAAVEADEVEAWLSSLAFLPQPTDAMVHMLLPLLQTPRASPGAFLGISALVHNLCASLDGPCGQLPGVGSLVRILGDALGENCTIQEPSDDDKLQLVLKAVGNAGLAAMALTPTLSACASLRSSTPEIRLGAIQAFRRVPCSADRSVLSRLYQSLEEDAEIRINAYLALMRCPSEEVFAQVRRTQAGELSTQVGSFVWSHILQLLETHDPLKRALRDTLPEDILSQEFHPEMWKHSSYSDVTFRSVSGSLGANLEGTLLFSPASFLPRSATVNLTIHTMGRAFNLLELGLRLENAEEIAHRLFGRKSFWGQEDGREPEPEEPPGPEPGPAPQPASPECPGDRDRRMRYLQQKVTRRRGARQALRCELSVKLLGQELSFVNCGATGSHVNHWPLNLAELAIKLMKGQEVQMNRRLSLAAQELVFPTVSGLPARLTLNASAAISIRVRGTTDFQQRSDFSVNGYVKPSALLQISAQMGTAGILGQAGLRWVTSVRSAASLDGGIQVQKGRVLKVHLNTPEEAVELLSFSSQLYLITRDGVRSLRHVPGPSEVQSCTGEEVSYTWGWRLCTGVTWPVPGQPYLLSLPVFAAVTLQKRDPGLRQYLLEAAYTLQPQKGSWFPQEATAHVFMGTPGSEVLRDVGVDMSYSLPQNKFRLKLLHPKKKIELDGKMEALGSAHTGHLELVLDDRDVYYIKGWSDLQPAMGGEAERFQAQLEVKLVTGGSPVVFTGNLTRQVGSKLAFSASLSHLLSDQANVTALLERKEENGRRVAALGAELFVPGLVGLRALGLLQQRGQLWTNSLRIQYSLLGQAKQAAHECSTSQKLRADSGSDGAYRLELRHELHCTQILAFSHKVQLWHEEDSGHLHSQLEVSYGKHWDKNSNKRHLRVSQTFKNDSGPALSNHFMEFVLQVPERQVDCRVQLYHLSLRLPYVESSSHLKVQYNGRPLFVAGGQWKDTSRATLWKWEGALNLDSPWLMVSAAHRLYWPHRAVFQAVLELTLGKAWTLKDLVVSVGCRSQGPNREGKIQVYTAATTYLRVSTVTVLAQSLFHSWSELESAWNAAVQGEIHAENSRDRKILNCWLKGPQQELNLTAAYRHLEWPRKTQVSLTAVRIGAQGQPRGLQLEGELEELRQDRTLYRKRGALLLRHPLHLPIPQSLLLQETFTADRRHQRYSLETRVVLNGREETLQTMVLGCQAGHPYVCAGLMHPYDGKVIPRNTEGCLVTWNQHTAKNREVEATLKVHRKVVLHLKGLHHDRSQHGEIRHSLALDLAHSYQLSFPQALSLDGGIIFRQSPQGTFNFGMDARAAVNHNVTSQASVQLNGSDSDFAFFFQLRHPHGPTFPPNFQVQAAAGRYRVRSLNGSLSVQMSGRELVLLEVDASQDTRRSSRGWGVSVLLHQAVLSAPRAVRLQLSAKITPARIWLFSKALLDQNTAQLLLKASEEWRGGRILTFQSQTRHTVAGWAAMPRLLTLTGRLKQKETLQEGTLSVTADSAVLGFLLRDQHEKAGNGTSVRSVTCVLAQNSSQALPGELQLKGRLQAQTRNLRAQASIRAHAASLALGGACSWGPRHGQLAGGPTHNISTLSDAGLPSEAGMLLSLTHVASNCSARLALWNAGAQLDGAIGLEDVTPESSGLQLHASLRHTHTMPSLKHWGLPFSLDGHGHFQVNCSGDASPTQLLGWCRGDIAGQPLEVSVDIHNGSSGFEHSGRILMGPTFLNYSVSCYYHDGHLELSGRSWHNSEALLWAGFPGEACLSAELQIHETQTQARVALHGGDSGVSMDLAALVARPRRGPLQLVASASHTVPALQRLGLPFTNQLVFQGLWEAEEMSSSLQLTCDSQATLVLDVRGQNQAVSKELLFSGRHRLPFLLGLCPSSASASAKLHYSKGEVQSMFALGVEERHFHISTRQVAAKAGLNNFIKLEQTFLQLSALPRELFLQTAYERAHGTRVLRQVVLWDGQEVALTGSLSGPFPKPTRNLSLQVELTHPLPLPLPRHCSLRLSSEHLGGSHRDGLVVGWDGRDQVLVSSSLWLGKSELAARLALAHPFNLPWRQAEASGLAESRGGRQSRQVQLTWNRGQPATLQLTWADGSLAHSTAWDGCLAASPGQLQETWGLNSLQACGAFTQTPAVFVEQLNVSWGQHRMRQNLTYERHWPSQPDKIIMEATLEHVLGASCTRQSFWGEVQTDYARWLRHSLHLGLCDLPRALLVVGEHTLGQGGLLLRSRCHLGLAPDPDHGLHLSLTLQNHSRPRSADFSGALELRGSKAQRVGLLGRVSTSTSQSLVRLEGSVDNREEKVRLSVFRAPSCLQASVAHEEGGREESVVLRACAHGRTAEAEVLFRDGRQPSQPLGRLTLQAANQSLLLAARGCQGGLLGHVESRIAAVGSQVQARLEEKVQGLGASVRRFQQLVQPAGTLDGVAGLLLQLSQAGREAMQASGWAVATLWARSQALTQHLPLYLEWLQVGLEQLREELEWPLATLKDAYLEVTLRPLEEVWRERAEEAMRRLQAWVPGMPGKGGPRPIRAALGAMKGALELAAQQMLSWAEATFSRALKRLCKPLLDLYSLSARNRSVVVMLPLLPAGDEPLDVARVTSYLMEEKLLRPLRELSGANVLAEYYWLRRRLLAGPWEYHALVAGAQHVVTFDGRVWDLSTQCGSILLAQDFAHNTFSLTLSRTGSGLTALFVELNHKTLILYPSLQAYRLYNSSLPGDSCPDLKLHPATTRKDVSRIELASEDGVSVSCDVPTGLCSLTLGLWQHGISAGLLGTNDNEAGNELMLPDGSMARSLEELSLAWQVGGDCRATEKPQQEQACPGQLPACWAFFEGPHSSLRDCFRVVDPTPFLSLCVQVPCGTQELQPACNLAAAYIHLCARGFVPLAPPPQCV

SEQ ID NO: 22205 - protein, 590 aa, Homo sapiens
MGPTSVLRAGLTPSCLPPPSGATNGSVSPLGRAQRVWTEPGGRGLHGATAAGPVAAACPLLAVTATAPGQPSGASTVWVREGGTAPATRMTVPLAPRTSEKCSVLNLTASLSVGNSTSGKRTGEACSLTCLAEGFNFYTERAAAVVDGTPCRPDTVDICVSGECKHVGCDRVLGSDLREDKCRVCGGDGSACETIEGVFSPASPGAGYEDVVWIPKGSVHIFIQDLNLSLSHLALKGDQESLLLEGLPGTPQPHRLPLAGTTFQLRQGPDQVQSLEALGPINASLIVMVLARTELPALRYRFNAPIARDSLPPYSWHYAPWTKCSAQCAGGSQVQAVECRNQLDSSAVAPHYCSAHSKLPKRQRACNTEPCPPDWVVGNWSLCSRSCDAGVRSRSVVCQRRVSAAEEKALDDSACPQPRPPVLEACHGPTCPPEWAALDWSECTPSCGPGLRHRVVLCKSADHRATLPPAHCSPAAKPPATMRCNLRRCPPARWVAGEWGECSAQCGVGQRQRSVRCTSHTGQASHECTEALRPPTTQQCEAKCDSPTPGDGPEECKDVNKVAYCPLVLKFQFCSRAYFRQMCCKTCHGH

SEQ ID NO: 22206 - protein, 410 aa, Homo sapiens
MVRRAAASKLGEFAKVLELDNVKSEIIPMFSNLASDEQDSVRLLAVEACVNIAQLLPQEDLEALVMPTLRQAAEDKSWRVRYMVADKFTELQKAVGPEITKTDLVPAFQNLMKDCEAEVRAAASHKVKEFCENLSADCRENVIMSQILPCIKELVSDANQHVKSALASVIMGLSPILGKDNTIEHLLPLFLAQLKDECPEVRLNIISNLDCVNEVIGIRQLSQSLLPAIVELAEDAKWRVRLAIIEYMPLLAGQLGVEFFDEKLNSLCMAWLVDHVYAIREAATSNLKKLVEKFGKEWAHATIIPKVLAMSGDPNYLHRMTTLFCINVLSEVCGQDITTKHMLPTVLRMAGDPVANVRFNVAKSLQKIGPILDNSTLQSEVKPILEKLTQDQDVDVKYFAQEALTVLSLA

SEQ ID NO: 22207 - protein, 154 aa, Homo sapiens
MVLAPLPDPGPPSLAVAPEPCPQPLRSPSLDNPTPFPNLGPSENPLKRLLVPGEDLITFTEGSGRSPRYALWFCVGESWPQDQPWTKRLVMVKVVPTCLRALVEMARVGGASSLENTVDLHISNSHPLSLTSDQYKAYLQDLVEGMDFQGPGES

SEQ ID NO: 22208 - protein, 172 aa, Homo sapiens
MWVPVVFLTLAVCGGVLVHPQWVLTAAHCIRNKSVILLGRHSLFHPEDTGQVFQVSHSFPHPLYDMSLLKNRFLRPGDDSSHDLMLLRLSEPAELTDAVKVMDLPTQEPALGTTCYASGWGSIEPEEFLTPKKLQCVDLHVISNDVCAQVHPQKVTKFMLCAGRWTGGKSTC

SEQ ID NO: 22209 - protein, 105 aa, Homo sapiens
MTLSPLLLFLPPLLLLLDVPTAAVQASPLQALDFFGNGPPVNYKTGNLYLRGPLKKSNAPLVNVTLYYEALCGGCRAFLIRELFPTWLLVMEILNVTLVPYGNAQ

SEQ ID NO: 22210 - protein, 244 aa, Homo sapiens
MAAPSDGFKPRERSGGEQAQDWDALPPKRPRLGAGNKIGGRRLIVVLEGASLETVKVGKTYELLNCDKHKSILLKNGRDPGEARPDITHQSLLMLMDSPLNRAGLLQVYIHTQKNVLIEVNPQTRIPRTFDRFCGLMVQLLHKLSVRAADGPQKLLKVIKNPVSDHFPVGCMKVGTSFSIPVVSDVRELVPSSDPIVFVVGAFAHGKVSVEYTEKMVSISNYPLSAALTCAKLTTAFEEVWGVI

SEQ ID NO: 22211 - protein, 896 aa, Homo sapiens
MMFSPSFLNLYSHPLQGEKNHGFEVLYHSVKQGPISTKELADFIRERATIEETYSKAMAKLSKLASNGTPMGTFAPLWEVFRVSSDKLALCHLELTRKLQDLIKDVLRYGEEQLKTHKKCKEEVVSTLDAVQVLSGVSQLLPKSRENYLNRCMDQERLRRESTSQKEMDKAETKTKKAAESLRRSVEKYNSARADFEQKMLDSALRFQAMEETHLRHMKALLGSYAHSVEDTHVQIGQVHEEFKQNIENVSVEMLLRKFAESKGTGREKPGPLDFEAYSAAALQEAMKRLRGAKAFRLPGLSRREREPEPPAAVDFLEPDSGTCPEVDEEGFTVRPDVTQNSTAEPSRFSSSDSDFDDEEPRKFYVHIKPAPARAPACSPEAAAAQLRATAGSLILPPGPGGTMKRHSSRDAAGKPQRPRSAPRTSSCAERLQSEEQVSKNLFGPPLESAFDHEDFTGSSSLGFTSSPSPFSSSSPENVEDSGLDSPSHAAPGPSPDSWVPRPGTPQSPPSCRAPPPEARGIRAPPLPDSPQPLASSPGPWGLEALAGGDLMPAPADPTAREGLAAPPRRLRSRKVSCPLTRSNGDLSRSLSPSPLGSSAASTALERPSFLSQTGHGVSRGPSPVVLGSQDALPIATAFTEYVHAYFRGHSPSCLARVTGELTMTFPAGIVRVFSGTPPPPVLSFRLVHTTAIEHFQPNADLLFSDPSQSDPETKDFWLNMAALTEALQRQAEQNPTASYYNVVLLRYQFSRPGPQSVPLQLSAHWQCGATLTQVSVEYGYRPGATAVPTPLTNVQILLPVGEPVTNVRLQPAATWNLEEKRLTWRLPDVSEAGGSGRLSASWEPLSGPSTPSPVAAQFTSEGTTLSGVDLELVGSGYRMSLVKRRFATGMYLVSC

SEQ ID NO: 22212 - protein, 782 aa, Homo sapiens
MLENYWNLVSLGLCHFDMNIISMLEEGKEPWTVKSCVKIARKPRTPECVKGVVTDIPPKCTIKDLLPKEKSSTEAVFHTVVLERHESPDIEDFSFKEPQKNVHDFECQWRDDTGNYKGVLMAQKEGKRDQRDRRDIENKLMNNQLGVSFHSHLPELQLFQGEGKMYECNQVEKSTNNGSSVSPLQQIPSSVQTHRSKKYHELNHFSLLTQRRKANSCGKPYKCNECGKAFTQNSNLTSHRRIHSGEKPYKCSECGKTFTVRSNLTIHQVIHTGEKPYKCHECGKVFRHNSYLATHRRIHTGEKPYKCNECGKAFRGHSNLTTHQLIHTGEKPFKCNECGKLFTQNSHLISHWRIHTGEKPYKCNECGKAFSVRSSLAIHQTIHTGEKPYKCNECGKVFRYNSYLGRHRRVHTGEKPYKCNECGKAFSMHSNLATHQVIHTGTKPFKCNECSKVFTQNSQLANHRRIHTGEKPYKCNECGKAFSVRSSLTTHQAIHSGEKPYKCIECGKSFTQKSHLRSHRGIHSGEKPYKCNECGKVFAQTSQLARHWRVHTGEKPYKCNDCGRAFSDRSSLTFHQAIHTGEKPYKCHECGKVFRHNSYLATHRRIHTGEKPYKCNECGKAFSMHSNLTTHKVIHTGEKPYKCNQCGKVFTQNSHLANHQRTHTGEKPYRCNECGKAFSVRSSLTTHQAIHTGKKPYKCNECGKVFTQNAHLANHRRIHTGEKPYRCTECGKAFRVRSSLTTHMAIHTGEKRYKCNECGKVFRQSSNLASHHRMHTGEKPYK

SEQ ID NO: 22213 - protein, 180 aa, Homo sapiens
MEQPTSSTNGEKRKSPCESNNKKNDEMQEAPNRVLAPKQSLQKTKTIEYLTIIVYYYRKHTKINSNQLEKDQSRENSINPVQEEEDEGLDSAEGSSQEDEDLDSSEGSSQEDEDLDSSEGSSQEDEDLDSSEGSSQEDEDLDSSEGSSQEDEDLDPPEGSSQEDEDLDSSEGSSQEGGED

SEQ ID NO: 22214 - protein, 146 aa, Homo sapiens
MAKFALNQNLPGILKSIMKKRDGTPGAQPSSGPKSLQFVGVLNGEYESSSSEDASDSDGDSENGGAEPPGSSSGSGDDSGGGSDSGTPGPPSGGDIRDPEPEAEAEPQQVAQGRCELSPRLREACVALQRQLSRPRGVASDGGAVR

SEQ ID NO: 22215 - protein, 154 aa, Homo sapiens
MAVKKIAIFGATGQTGLTTLAQAVQAGYEVTVLVRDSSRLPSEGPRPAHVVVGDVLQAADVDKTVAGQDAVIVLLGTRNDLSPTTVMSEGARNIVAAMKAHGVDKVVACTSGGWWDHGGGAELGGTGEAAQGPLKGDAEAIPCYCAFTEHQLCA

SEQ ID NO: 22216 - protein, 316 aa, Homo sapiens
DGLPPKVTGPPPGTPQPRPHEAVILHLVLSPSLSLALYLFLCLSLSFSLSLALSAPPSPPPTRFLWLLLRRLHHGHYRGRGGEPGGLGRSHRHQRQRPQLRYAFKKTWNPKFTLRSHYDGIRSLAFHHSQSALLTASEDGTLKLWNLQKAVTAKKNAALDVEPIHAFRAHRGPVLAVAMGSNSEYCYSGGADACIHSWKIPDLSMDPYDGYDPSVLSHVLEGHGDAVWGLAFSPTSQRLASCSADGTVRIWDPSSSSPACLCTFPTASEHGVPTSVAFTSTEPAHIVASFRSGDTVLYDMEVGSALLTLESRGSSG

SEQ ID NO: 22217 - protein, 294 aa, Homo sapiens
MYIKMATLANGQADNASLSTNGLGSSPGSAGHMNGLSHSPGNPSTIPMKDHDAIKLFIGQIPRNLDEKDLKPLFEEFGKIYELTVLKDRFTGMHKGCAFLTYCERESALKAQSALHEQKTLPGMNRPIQVKPADSESRGEDRKLFVGMLNKQQSEDDVRRLFEAFGNIEECTILRGPDGNSKGCAFVKYSSHAEAQAAINALHGSQTMPGASSSLVVKFADTDKERTMRRMQQMAGQMGMFNPMAIPFGAYGAYAQALMQQQAALMASVAQGGYLNPMAAFAAAQMQQMAALNM

SEQ ID NO: 22218 - protein, 150 aa, Homo sapiens
MSTAREQPIFSTRAHVFQIDPATKRNWIPAGKHALTVSYFYDATRNVYRIISIGGAKAIINSTVTPNMTFTKTSQKFGQWADSRANTVYGLGFASEQHLTQFAEKFQEVKEAARLAREKSQDGGELTSPALGLASHQVPPSPLVSANGPG

SEQ ID NO: 22219 - protein, 137 aa, Homo sapiens
SEPQQEPCPYACVISLGDDSETDTEGDSESCSAREQECEVKLPFNAQRIISLSRNDFQSLLKMHKLTPEQLDCIHDIRRRSKNRIAAQRCRKRKLDCIQNLESEIEKLPTSHAPSWRLAGCPVLYQGMSDQQRGKSE

SEQ ID NO: 22220 - protein, 125 aa, Homo sapiens
MDFRGLPGNYHKEENQEHQLGNNTLSSHLQIDKMTDNKTGEVLISENVVASIQPAEGSFEGDLKVPRMEEKEALVPIQKATDSFHTELHPRVAFWIIKLPRRRSHQDALEGGHWLSEKRHRLQAI

SEQ ID NO: 22221 - protein, 72 aa, Homo sapiens
MAPPPPPLAASTPLLHGEFGSYPARGPRFALTLTSQALHIQRLRPKPEARPRGGLVPLAEVSGCCTLRSRSP

SEQ ID NO: 22222 - protein, 804 aa, Homo sapiens
MDVRRLKVNELREELQRRGLDTRGLKAELAERLQAALEAEEPDDERELDADDEPGRPGHINEEVETEGGSELEGTAQPPPPGLQPHAEPGGYSGPDGHYAMDNITRQNQFYDTQVIKQENESGYERRPLEMEQQQAYRPEMKTEMKQGAPTSFLPPEASQLKPDRQQFQSRKRPYEENRGRGYFEHREDRRGRSPQPPAEEDEDDFDDTLVAIDTYNCDLHFKVARDRSSGYPLTIEGFAYLWSGARASYGVRRGRVCFEMKINEEISVKHLPSTEPDPHVVRIGWSLDSCSTQLGEEPFSYGYGGTGKKSTNSRFENYGDKFAENDVIGCFADFECGNDVELSFTKNGKWMGIAFRIQKEALGGQALYPHVLVKNCAVEFNFGQRAEPYCSVLPGFTFIQHLPLSERIRGTVGPKSKAECEILMMVGLPAAGKTTWAIKHAASNPSKKYNILGTNAIMDKMRVMGLRRQRNYAGRWDVLIQQATQCLNRLIQIAARKKRNYILDQTNVYGSAQRRKMRPFEGFQRKAIVICPTDEDLKDRTIKRTDEEGKDVPDHAVLEMKANFTLPDVGDFLDEVLFIELQREEADKLVRQYNEEGRKAGPPPEKRFDNRGGGGFRGRGGGGGFQRYENRGPPGGNRGGFQNRGGGSGGGGNYRGGFNRSGGGGYSQNRWGNNNRDNNNSNNRGSYNRAPQQQPPPQQPPPPQPPPQQPPPPPSYSPARNPPGASTYNKNSNIPGSSANTSTPTVSSYSPPQTYPQPSYNQYQQYAQQWNQYYQNQGQWPPYYGNYDYGSYSGNTQGGTSTQ

SEQ ID NO: 22223 - protein, 2002 aa, Homo sapiens
MAQVPGEVDNMEGLPAPNNNPAARWESPDRGWEREQPAASTAAASLFECSRIKALADEREAVQKKTFTKWVNSHLARVGCHIGDLYVDLRDGFVLTRLLEVLSGEQLPRPTRGRMRIHSLENVDKALQFLKEQRVHLENVGSHDIVDGNHRLTLGLVWTIILRFQIQVIKIETEDNRETRSAKDALLLWCQMKTAGYPEVNIQNFTTSWRDGLAFNALIHRHRPDLVDFSKLTKSNANYNLQRAFRTAEQHLGLARLLDPEDVNMEAPDEKSIITYVVSFYHYFSKMKALAVEGKRIGKVLDQVLEVGKIIERYEELAAELLAWIHRTVGLISNQKFANSLSGVQQQLQAFTAYCTLEKPVKFQEKGNLEVLLFSIQSKLRACNRRLFVPREGCGIWDIDKAWGELEKAEHEREAALRAELIRQEKLELLAQRFDHKVAMRESWLNENQRLVSQDNFGYELPAVEAAMKKHEAIEADIAAYEERVQGVAELAQALAAEGYYDIRRVAAQRDSVLRQWALLTGLVGARRTRLEQNLALQKVFQEMVYMVDWMEEMQAQLLSRECGQHLVEADDLLQKHGLLEGDIAAQSERVEALNAAALRFSQLQGYQPCDPQVICNRVNHVHGCLAELQEQAARRRAELEASRSLWALLQELEEAESWARDKERLLEAAGGGGAAGAAGAAGTAGGAHDLSSTARLLAQHKILQGELGGRRALLQQALRCGEELVAAGGAVGPGADTVHLVGLAERAASARRRWQRLEEAAARRERRLQEARALHQFGADLDGLLDWLRDAYRLAAAGDFGHDEASSRRLARQHRALTGEVEAHRGPVSGLRRQLATLGGASGAGPLVVALQVRVVEAEQLFAEVTEVAALRRQWLRDALAVYRMFGEVHACELWIGEKEQWLLSMRVPDSLDDVEVVQHRFESLDQEMNSLMGRVLDVNHTVQELVEGGHPSSDEVRSCQDHLNSRWNRIVELVEQRKEEMSAVLLVENHVLEVAEVRAQVREKRRAVESAPRAGGALQWRLSGLEAALQALEPRQAALLEEAALLAERFPAQAARLHQGAEELGAEWGALASAAQACGEAVAAAGRLQRFLHDLDAFLDWLVRAQEAAGGSEGPLPNSLEEADALLARHAALKEEVDQREEDYARIVAASEALLAADGAELGPGLALDEWLPHLELGWHKLLGLWEARREALVQAHIYQLFLRDLRQALVVLRNQEMALSGAELPGTVESVEEALKQHRDFLTTMELSQQKMQVAVQAAEGLLRQGNIYGEQAQEAVTRLLEKNQENQLRAQQWMQKLHDQLELQHFLRDCHELDGWIHEKMLMARDGTREDNHKLHKRWLRHQAFMAELAQNKEWLEKIEREGQQLMQEKPELAASVRKKLGEIRQCWAELESTTQAKARQLFEASKADQLVQSFAELDKKLLHMESQLQDVDPGGDLATVNSQLKKLQSMESQVEEWYREVGELQAQTAALPLEPASKELVGERQNAVGERLVRLLEPLQERRRLLLASKELHQVAHDLDDELAWVQERLPLAMQTERGNGLQAVQQHIKKNQGLRREIQAHGPRLEEVLERAGALASLRSPEAEAVRRGLEQLQSAWAGLREAAERRQQVLDAAFQVEQYYFDVAEVEAWLGEQELLMMSEDKGKDEQSTLQLLKKHLQLEQGVENYEESIAQLSRQCRALLEMGHPDSEQISRRQSQVDRLYVALKELGEERRVALEQQYWLYQLSRQVSELEHWIAEKEVVAGSPELGQDFEHVSVLQEKFSEFASETGMAGRERLAAVNQMVDELIECGHTAAATMAEWKDGLNEAWAELLELMGTRAQLLAASRELHKFFSDARELQGQIEEKRRRLPRLTTPPEPRPSASSMQRTLRAFEHDLQLLVSQVRQLQEGAAQLRTVYAGEHAEAIASREQEVLQGWKELLSACEDARLHVSSTADALRFHSQVRDLLSWMDGIASQIGAADKPRCPSSLLGLPASPWWPTPATPSPLTAPFSME

SEQ ID NO: 22224 - protein, 968 aa, Homo sapiens
MEDFARGAASPGPSRPGLVPVSIIGAEDEDFENELETNSEEQNSQFQSLEQVKRRPAHLMALLQHVALQFEPGPLLCCLHADMLGSLGPKEAKKAFLDFYHSFLEKTAVLRVPVPPNVAFELDRTRADLISEDVQRRFVQEVVQSQQVAVGRQLEDFRSKRLMGMTPWEQELAQLEAWVGRDRASYEARERHVAERLLMHLEEMQHTISTDEEKSAAVVNAIGLYMRHLGVRTKSGDKKSGRNFFRKKVMGNRRSDEPAKTKKGLSSILDAARWNRGEPQVPDFRHLKAEVDAEKPGATDRKGGVGMPSRDRNIGAPGQDTPGVSLHPLSLDSPDREPGADAPLELGDSSPQGPMSLESLAPPESTDEGAETERLSGRLGRSESLRVSDRRRPSRGSLGAKGRGGGRSRSDVDMDPSSATAVLGPARRATPEPGDEGEPGRSGLELEPEEPPGWRELVPPDTLHSLPKSQVKRQEVISELLVTEAAHVRMLRVLHDLFFQPMAECLFFPLEELQNIFPSLDELIEVHSLFLDRLMKRRQESGYLIEEIGDVLLARFDGAEGSWFQKISSRFCSRQSFALEQLKAKQRKDPRFCAFVQEAESRPRCRRLQLKDMIPTEMQRLTKYPLLLQSIGQNTEEPTEREKVELAAECCREILHHVNQAVRDMEDLLRLKDYQRRLDLSHLRQSSDPMLSEFKNLDITKKKLVHEGPLTWRVTKDKAVEVHVLLLDDLLLLLQRQDERLLLKSHSRTLTPTPDGKTMLRPVLRLTSAMTREVATDHKAFYVLFTWDQEAQIYELVAQTVSERKNWCALITETAGSLKVPAPASRPKPRPSPSSTREPLLSSSENGNGGRETSPADARTERILSDLLPFCRPGPEGQLAATALRKVLSLKQLLFPAEEDNGAGPPRDGDGVPGGGPLSPARTQEIQENLLSLEETMKQLEELEEEFCRLRPLLSQLGGNSVPQPGCT

SEQ ID NO: 22225 - protein, 504 aa, Homo sapiens
MFCFVFQELLTFRDVTIEFSLEEWEFLNPAQQSLYRKVMLENYRNLVSLGLTVSKPELISRLEQRQEPWNVKRHETIAKPPAMSSHYTEDLLPEQCMQDSFQKVILRRYGSCGLEDLHLRKDGENVGECKDQKEIYNGLNQCLSTLPSKIFPYNKCVKVFSKSSNLNRENIRHTTEKLFKCMQCGKVFKSHSGLSYHKIIHTEEKLCICEECGKTFKWFSYLTKHKRIHTGEKPYKCEECGKAFNWCSSLTKHKRIHTGEKPYKCEECGKAFHWCSPFVRHKKIHTGEKPYTCEDCGRAFNRHSHLTKHKTIHTGKKPYKCKECGKAFNHCSLLTIHERTHTGEKPYKCEECGKAFNSSSILTEHKVIHSGEKPYKCEKCDKVFKRFSYLTKHKRIHTGEKPYKCEECGKAFNWSSILTEHKRIHTGEKPYNCEECGKAFNRCSHLTRHKKIHTAVKRYKCEECGKAFKRCSHLNEHKRVQRGEKSCKYKKCGEAFNHCSNLTT

SEQ ID NO: 22226 - protein, 774 aa, Homo sapiens
MGGRVFLVFLAFCVWLTLPGAETQDSRGCARWCPQDSSCVNATACRCNPGFSSFSEIITTPMETCDDINECATLSKVSCGKFSDCWNTEGSYDCVCSPGYEPVSGAKTFKNESENTCQDVDECQQNPRLCKSYGTCVNTLGSYTCQCLPGFKLKPEDPKLCTDVDECSSGQHQCDSSTVCFNTVGSYSCRCRPGWKPRHGIPNNQKDTVCEDMTFSTWTPPPGVHSQTLSRFFDKVQDLGRDYKPGLANNTIQSILQALDELLEAPGDLETLPRLQQHCVASHLLDGLEDVLRGLSKNLSNGLLNFSYPAGTELSLEVQKQVDRSVTLRQNQAVMQLDWNQAQKSGDPGPSVVGLVSIPGMGKLLAEAPLVLEPEKQMLLHETHQGLLQDGSPILLSDVISAFLSNNDTQNLSSPVTFTFSHRSVIPRQKVLCVFWEHGQNGCGHWATTGCSTIGTRDTSTICRCTHLSSFAVLMAHYDVQEEDPVLTVITYMGLSVSLLCLLLAALTFLLCKAIQNTSTSLHLQLSLCLFLAHLLFLVAIDQTGHKVLCSIIAGTLHYLYLATLTWMLLEALYLFLTARNLTVVNYSSINRFMKKLMFPVGYGVPAVTVAISAASRPHLYGTPSRCWLQPEKGFIWGFLGPVCAIFSVNLVLFLVTLWILKNRLSSLNSEVSTLRNTRMLAFKATAQLFILGCTWCLGILQVGPAARVMAYLFTIINSLQGVFIFLVYCLLSQQVREQYGKWSKGIRKLKTESEMHTLSSSAKADTSKPSTVN

SEQ ID NO: 22227 - protein, 1009 aa, Homo sapiens
MDGKRRPGPGPGVPPKRARGGLWDDDDAPRPSQFEEDLALMEEMEAEHRLQEQEEEELQSVLEGVADGQVPPSAIDPRWLRPTPPALDPQTEPLIFQQLEIDHYVGPAQPVPGGPPPSRGSVPVLRAFGVTDEGFSVCCHIHGFAPYFYTPAPPGFGPEHMGDLQRELNLAISRDSRGGRELTGPAVLAVELCSRESMFGYHGHGPSPFLRITVALPRLVAPARRLLEQGIRVAGLGTPSFAPYEANVDFEIRFMVDTDIVGCNWLELPAGKYALRLKEKATQCQLEADVLWSDVVSHPPEGPWQRIAPLRVLSFDIECAGRKGIFPEPERDPVIQICSLGLRWGEPEPFLRLALTLRPCAPILGAKVQSYEKEEDLLQAWSTFIRIMDPDVITGYNIQNFDLPYLISRAQTLKVQTFPFLGRVAGLCSNIRDSSFQSKQTGRRDTKVVSMVGRVQMDMLQVLLREYKLRSYTLNAVSFHFLGEQKEDVQHSIITDLQNGNDQTRRRLAVYCLKDAYLPLRLLERLMVLVNAVEMARVTGVPLSYLLSRGQQVKVVSQLLRQAMHEGLLMPVVKSEGGEDYTGATVIEPLKGYYDVPIATLDFSSLYPSIMMAHNLCYTTLLRPGTAQKLGLTEDQFIRTPTGDEFVKTSVRKGLLPQILENLLSARKRAKAELAKETDPLRRQVLDGRQLALKVSANSVYGFTGAQVGKLPCLEISQSVTGFGRQMIEKTKQLVESKYTVENGYSTSAKVVYGDTDSVMCRFGVSSVAEAMALGREAADWVSGHFPSPIRLEFEKVYFPYLLISKKRYAGLLFSSRPDAHDRMDCKGLEAVRRDNCPLVANLVTASLRRLLIDRDPEGAVAHAQDVISDLLCNRIDISQLVITKELTRAASDYAGKQAHVELAERTRCSCWSTACPLTRSTTWSSSWPSPSCASSSPSWARAVPRLCYCGGTTRAARRCSRARWAASWPSPNAATAALAAAQCSATREPCVSSASPGSLSCIRRRYPI

SEQ ID NO: 22228 - protein, 840 aa, Homo sapiens
MAKFALNQNLPDLGGPRLCPVPAAGGARSPSSPYSVETPYGFHLDLDFLKYIEELERGPAARRAPGPPTSRRPRAPRPGLAGARSPGAWTSSESLASDDGGAPGILSQGAPSGLLMQPLSPRAPVRNPRVEHTLRETSRRLELAQTHERAPSPGRGVPRSPRGSGRSSPAPNLAPASPGPAQLQLVREQMAAALRRLRELEDQARTLPELQEQVRALRAEKARLLAGRAQPEPDGEAETRPDKLAQLRRLTERLATSERGGRARASPRADSPDGLAAGRSEGALQVLDGEVGSLDGTPQTREVAAEAVPETREAGAQAVPETREAGVEAAPETVEADAWVTEALLGLPAAAERELELLRASLEHQRGVSELLRGRLRELEEAREAAEEAAAGARAQLREATTQTPWSCAEKAAQTESPAEAPSLTQESSPGSMDGDRAVAPAGILKSIMKKRDGTPGAQPSSGPKSLQFVGVLNGEYESSSSEDASDSDGDSENGGAEPPGSSSGSGDDSGGGSDSGTPGPPSGGDIRDPEPEAEAEPQQVAQGRCELSPRLREACVALQRQLSRPRGVASDGGAVRLVAQEWFRVSSQRRSQAEPVARMLEGVRRLGPELLAHVVNLADGNGNTALHYSVSHGNLAIASLLLDTGACEVNRQNRAGYSALMLAALTSVRQEEEDMAVVQRLFCMGDVNAKASQTGQTALMLAISHGRQDMVATLLACGADVNAQDADGATALMCASEYGRLDTVRLLLTQPGCDPAILDNEGTSALAIALEAEQDEVAALLHAHLSSGQPDTQAGVQRHNLSSLQPPPPRFKKFSCLSLPSSWDYNSCEPSRLAQLTIF

SEQ ID NO: 22229 - protein, 811 aa, Homo sapiens
RMKEKYGVFCSGHNEAVSHYKLLLQQNKKFQNLIKKIGNFSIVRRLGVQECILLVTQRITKYPVLVERIIQNTEAGTEDYEDLTQALNLIKDIISQVDAKVSECEKGQRLREIAGKMDLKSSSKLKNGLTFRKEDMLQRQLHLEGMLCWKTTSGRLKDILAILLTDVLLLLQEKDQKYVFASVDSKPPVISLQKLIVREVANEEKAMFLISASLQGPEMYEIYTSSKEDRNAWMAHIQRAVESCPDEEEGPFSLPEEERKVVEARATRLRDFQERLSMKDQLIAQSLLEKQQIYLEMAEMGGLEDLPQPRGLFRGGDPSETLQGELILKSAMSEIEGIQSLICRQLGSANGQAEDGGSSTGPPRRAETFAGYDCTNSPTKNGSFKKKVSSTDPRPRDWRGPPNSPDLKLSDSDIPGSSEESPQVVEAPGTESDPRLPTVLESELVQRIQTLSQLLLNLQDSYVETQRAAIQEREKQFRLQSTRGNLLLEQERQRNFEKQREERAALEKLQSQLRHEQQRWERERQWQHQELERAGARLQEREGEARQLRERLEQERAELERQRQAYQHDLERLREAQRAVERERERLELLRRLKKQNTAPGALPPDTLAEAQPPSHPPSFNGEGLEGPRVSMLPSGVGPEYAERPEVARRDSAPTENRLAKSDVPIQLLSATNQFQRQAAVQQQIPTKLAASTKGGKDKGGKSRGSQRWESSASFDLKQQLLLNKLMGKDESTSRNRRSLSPILPGRHSPAPPPDPGFPAPSPPPADSPSEGFSLKAGGTALLPGPPAPSPLPATPLSAKEDASKEDVIFF

SEQ ID NO: 22230 - protein, 668 aa, Homo sapiens
MAEPLLRKTFSRLRGREKLPRKKSDAKERGPGVPGTGEPAGEIWYNPIPEEDPRPPAPEPPGPQPGSAESEGLAPQGAAPASPPTKASRTKSPGPARRLSIKMKKLPELRRRLSLRGPRAGRERERAAPAGSVISRYHLDSSVGGPGPAAGPGGTRSPRAGYLSDGDSPERPAGPPSPTSFRPYEVGPAARAPPAALWGRLSLHLYGLGGLRPAPGATPRDLCCLLQVDGEARARTGPLRGGPDFLRLDHTFHLELEAARLLRALVLAWDPGVRRHRPCAQGTVLLPTVFRGCQAQQLAVRLEPQGLLYAKLTLSEQQEAPATAEPRVFGLPLPLLVERERPPGQVPLIIQKCVGQIERRGLRVVGLYRLCGSAAVKKELRDAFERDSAAVCLSEDLYPDINVITGILKDYLRELPTPLITQPLYKVVLEAMARDPPNRVPPTTEGTRGLLSCLPDVERATLTLLLDHLRLVSSFHAYNRMTPQNLAVCFGPVLLPARQAPTRPRARSSGPGLASAVDFKHHIEVLHYLLQSWPDPRLPRQSPDVAPYLRPKRQPPLHLPLADPEVVTRPRGRGGPESPPSNRYAGDWSVCGRDFLPCGRDFLSGPDYDHVTGSDSEDEDEEVGEPRVTGDFEDDFDAPFNPHLNLKDFDALILDLERELSKQINVCL

SEQ ID NO: 22231 - protein, 1180 aa, Homo sapiens
MTLQGRADLSGNQGNAAGRLATVHEPVVTQWAVHPPAPAHPSLLDKMEKAPPQPQHEGLKSKEHLPQQPAEGKTASRRVPRLRAVVESQAFKNILVDEMDMMHARAATLIQANWRGYWLRQKLISQMMAAKAIQEAWRRFNKRHILHSSKSLVKKTRAEEGDIPYHAPQQVRFQHPEENRLLSPPIMVNKETQFPSCDNLVLCRPQSSPLLQPPAAQGTPEPCVQGPHAARVRGLAFLPHQTVTIRFPCPVSLDAKCQPCLLTRTIRSTCLVHIEGDSVKTKRVSARTNKARAPETPLSRRYDQAVTRPSRAQTQGPVKAETPKAPFQICPGPMITKTLLQTYPVVSVTLPQTYPASTMTTTPPKTSPVPKVTIIKTPAQMYPGPTVTKTAPHTCPMPTMTKIQVHPTASRTGTPRQTCPATITAKNRPQVSLLASIMKSLPQVCPGPAMAKTPPQMHPVTTPAKNPLQTCLSATMSKTSSQRSPVGVTKPSPQTRLPAMITKTPAQLRSVATILKTLCLASPTVANVKAPPQVAVAAGTPNTSGSIHENPPKAKATVNVKQAAKVVKASSPSYLAEGKIRCLAQPHPGTGVPRAAAELPLEAEKIKTGTQKQAKTDMAFKTSVAVEMAGAPSWTKVAEEGDKPPHVYVPVDMAVTLPRGQLAAPLTNASSQRHPPCLSQRPLAAPLTKASSQGHLPTELTKTPSLAHLDTCLSKMHSQTHLATGAVKVQSQAPLATCLTKTQSRGQPITDITTCLIPAHQAADLSSNTHSQVLLTGSKVSNHACQRLGGLSAPPWAKPEDRQTQPQPHGHVPGKTTQGGPCPAACEVQGMLVPPMAPTGHSTCNVESWGDNGATRAQPSMPGQAVPCQEDTGPADAGVVGGQSWNRAWEPARGAASWDTWRNKAVVPPRRSGEPMVSMQAAEEIRILAVITIQAGVRGYLARRRIRLWHRGAMVIQATWRGYRVRRNLAHLCRATTTIQSAWRGYSTRRDQARHWQMLHPVTWVELGSRAGVMSDRSWFQDGRARTVSDHRCFQSCQAHACSVCHSLSSRIGSPPSVVMLVGSSPRTCHTCGRTQPTRVVQGMGQGTEGPGAVSWASAYQLAALSPRQPHRQDKAATAIQSAWRGFKIRQQMRQQQMAAKIVQATWRGHHTRSCLKNTEALLGPADPSASSRHMHWPGI

SEQ ID NO: 22232 - protein, 662 aa, Homo sapiens
MEPLVTWVVPLLFLFLLSRQGAACRTSECCFQDPPYPDADSGSASGPRDLRCYRISSDRYECSWQYEGPTAGVSHFLRCCLSSGRCCYFAAGSATRLQFSDQAGVSVLYTVTLWVESWARNQTEKSPEVTLQLYNSVKYEPPLGDIKVSKLAGQLRMEWETPDNQVGAEVQFRHRTPSSPWKLGDCGPQDDDTESCLCPLEMNVAQEFQLRRRQLGSQGSSWSKWSSPVCVPPENPPQPQVRFSVEQLGQDGRRRLTLKEQPTQLELPEGCQGLAPGTEVTYRLQLHMLSCPCKAKATRTLHLGKMPYLSGAAYNVAVISSNQFGPGLNQTWHIPADTHTEPVALNISVGTNGTTMYWPARAQSMTYCIEWQPVGQDGGLATCSLTAPQDPDPAGMATYSWSRESGAMGQEKCYYITIFASAHPEKLTLWSTVLSTYHFGGNASAAGTPHHVSVKNHSLDSVSVDWAPSLLSTCPGVLKEYVVRCRDEDSKQVSEHPVQPTETQVTLSGLRAGVAYTVQVRADTAWLRGVWSQPQRFSIEVQVSDWLIFFASLGSFLSILLVGVLGYLGLNRAARHLCPPLPTPCASSAIEFPGGKETWQWINPVDFQEEASLQEALVVEMSWDKGERTEPLEKTELPEGAPELALDTELSLEDGDRCKAKM

SEQ ID NO: 22233 - protein, 304 aa, Homo sapiens
MSVAGLKKQFYKASQLVSEKVGGAEGTKLDDDFKEMEKKVDVTSKAVTEVLARTIEYLQPNPASRAKLTMLNTVSKIRGQNLCEKDLKEIQHHLKKLEGRRLDFDYKKKRQGKIPDEELRQALEKFEESKEVAETSMHNLLETDIEQVSQLSALVDAQLDYHRQAVQILDELAEKLKRRMREASSRPKREYKPKPREPFDLGEPEQSNGGFPCTTAPKIAASSSFRSSDKPIRTPSRSMPPLDQPSCKALYDFEPENDGELGFHEGDVITLTNQIDENWYEGMLDGQSGFFPLSYVEVLVPLPQ

SEQ ID NO: 22234 - protein, 642 aa, Homo sapiens
MDKLKCPSFFKCREKEKVSASSENFHVGENDENQDRGNWSKKSDYLLSMIGYAVGLGNVWRFPYLTYSNGGGAFLIPYAIMLALAGLPLFFLECSLGQFASLGPVSVWRILPLFQGVGITMVLISIFVTIYYNVIIAYSLYYMFASFQSELPWKNCSSWSDKNCSRSPIVTHCNVSTVNKGIQEIIQMNKSWVDINNFTCINGSEIYQPGQLPSEQYWNKVALQRSSGMNETGVIVWYLALCLLLAWLIVGAALFKGIKSSGKVVYFTALFPYVVLLILLVRGATLEGASKGISYYIGAQSNFTKLKEAEVWKDAATQIFYSLSVAWGGLVALSSYNKFKNNCFSDAIVVCLTNCLTSVFAGFAIFSILGHMAHISGKEVSQVVKSGFDLAFIAYPEALAQLPGGPFWSILFFFMLLTLGLDSQFASIETITTTIQDLFPKVMKKMRVPITLGCCLVLFLLGLVCVTQAGIYWVHLIDHFCAGWGILIAAILELVGIIWIYGGNRFIEDTEMMIGAKRWIFWLWWRACWFVITPILLIAIFIWSLVQFHRPNYGAIPYPDWGVALGWCMIVFCIIWIPIMAIIKIIQAKGNIFQRLISCCRPASNWGPYLEQHRGERYKDMVDPKKEADHEIPTVSGSRKPE

SEQ ID NO: 22235 - protein, 888 aa, Homo sapiens
MATAPSYPAGLPGSPGPGSPPPPGGLELQSPPPLLPQIPAPGSGVSFHIQIGLTREFVLLPAASELAHVKQLACSIVDQKFPECGFYGLYDKILLFKHDPTSANLLQLVRSSGDIQEGDLVEVVLSASATFEDFQIRPHALTVHSYRAPAFCDHCGEMLFGLVRQGLKCDGCGLNYHKRCAFSIPNNCSGARKRRLSSTSLASGHSVRLGTSESLPCTAEELSRSTTELLPRRPPSSSSSSSASSYTGRPIELDKMLLSKVKVPHTFLIHSYTRPTVCQACKKLLKGLFRQGLQCKDCKFNCHKRCATRVPNDCLGEALINGDVPMEEATDFSEADKSALMDESEDSGVIPGSHSENALHASEEEEGEGGKAQSSLGYIPLMRVVQSVRHTTRKSSTTLREGWVVHYSNKDTLRKRHYWRLDCKCITLFQNNTTNRYYKEIPLSEILTVESAQNFSLVPPGTNPHCFEIVTANATYFVGEMPGGTPGGPSGQGAEAARGWETAIRQALMPVILQDAPSAPGHAPHRQASLSISVSNSQIQENVDIATVYQIFPDEVLGSGQFGVVYGGKHRKTGRDVAVKVIDKLRFPTKQESQLRNEVAILQSLRHPGIVNLECMFETPEKVFVVMEKLHGDMLEMILSSEKGRLPERLTKFLITQILVALRHLHFKNIVHCDLKPENVLLASADPFPQVKLCDFGFARIIGEKSFRRSVVGTPAYLAPEVLLNQGYNRSLDMWSVGVIMYVSLSGTFPFNEDEDINDQIQNAAFMYPASPWSHISAGGAWGPPTPWAAIDLINNLLQVKMRKRYSVDKSLSHPWLQEYQTWLDLRELEGKMGERYITHESDDARWEQFAAEHPLPGSGLPTDRDLGGACPPQDHDMQGLAERISVL

SEQ ID NO: 22236 - protein, 523 aa, Homo sapiens
NSTFEACDPQRTGTVAVAQVLAYLEAVTGQGPQDARLQTLANSLDPNGEGPKATVDLDTFLVVMRDWIAACQLHGGLELEEETAFQGALTSRQLPSGCPEAEEPANLESFGGEDPRPELQATADLLSSLEDLELSNRRLVGENAKLQRSMETAEEGSARLGEEILALRKQLHSTQQALQFAKAMDEELEDLKTLARSLEEQNRSLLAQARQAEKEQQHLVAEMETLQEENGKLLAERDGVKKRSQELAMEKDTLKRQLFECEHLICQRDTILSERTRDVESLAQTLEEYRVTTQELRLEISRLEEQLSQTYEGPDELPEGAQLRRVGWTELLPPSLGLEIEAIRQEVATADLSNPLCGVWQWEEVIHETSEETEFPSEAPAGGQRNFQGEPAHPEEGRKEPSMWLTRREEEEDAESQVTADLPVPLGAPRPGDIPENPPERPARRELQQALVPVMKKLVPVRRRAWGQLCLPPQRLRVTRHPLIPAPVLGLLLLLLLSVLLLGPSPPPTWPHLQLCYLQPPPV

SEQ ID NO: 22237 - protein, 672 aa, Homo sapiens
NTEGSFQCVCPMGFQPNTAGSECEDVDECENHLACPGQECVNSPGSFQCRTCPSGHHLHRGRCTDVDECSSGAPPCGPHGHCTNTEGSFRCSCAPGYRAPSGRPGPCADVNECLEGDFCFPHGECLNTDGSFACTCAPGYRPGPRGASCLDVDECSEEDLCQSGICTNTDGSFECICPPGHRAGPDLASCLDVDECRERGPALCGSQRCENSPGSYRCVRDCDPGYHAGPEGTCDDVNECETLQGVCGAALCENVEGSFLCVCPNSPEEFDPMTGRCVPPRTSAGTFPGSQPQAPASPVLPARPPPPPLPRRPSTPRQGPVGSGRRECYFDTAAPDACDNILARNVTWQECCCTVGEGWGSGCRIQQCPGTETAEYQSLCPHGRGYLAPSGDLSLRRDVDECQLFRDQVCKSGVCVNTAPGYSCYCSNGYYYHTQRLECIDNDECADEEPACEGGRCVNTVGSYHCTCEPPLVLDGSQRRCVSNESQSLDDNLGVCWQEVGADLVCSHPRLDRQATYTECCCLYGEAWGMDCALCPAQDSDDFEALCNVLRPPAYSPPRPGGFGLPYEYGPDLGPPYQGLPYGPELYPPPALPYDPYPPPPGPFARREAPYGAPRFDMPDFEDDGGPYGESEAPAPPGPGTRWPYRSRDTRRSFPEPEEPPEGGSYAGSLAE

SEQ ID NO: 22238 - protein, 488 aa, Homo sapiens
MEPLRAPALRRLLPPLLLLLLSLPPRARAKYVRGNLSSKEDWVFLTRFCFLSDYGRLDFRFRYPELPVPNISGLQAKCCQNILLYFDDPSQWPAVYKAGDKDCLAKESVIRPENNQVINLTTQYAWSGCQVVSEEGTRYLSCSSGRSFRSVRERWWYIALSKCGGDGLQLEYEMVLTNGKSFWTRHFSADEFGILETDVTFLLIFILIFFLSCYFGYLLKGRQLLHTTYKMFMAAAGVEVLSLLFFCIYWGQYATDGIGNESVKILAKLLFSSSFLIFLLMLILLGKGFTVTRGRISHAGSVKLSVYMTLYTLTHVVLLIYEAEFFDPGQVLYTYESPAGYGLIGLQVAAYVWFCYAVLVSLRHFPEKQPFYVPFFAAYTLWFFAVPVMALIANFGIPKWAREKIVNGIQLGIHLYAHGVFLILPFLFCIPTAFPTLLDLSTLPLPLPKFCHHRPLFRKKHLGWHRVKLLGSWVGNRRVQHHIFFFFF

SEQ ID NO: 22239 - protein, 377 aa, Homo sapiens
MGTTEATLRMENVDVKEEWQDEDLPRPLPEETGVELLGSPVEDTSSPPNTLNFNGAHRKRKTLVAPEINISLDQSEGSLLSDDFLDTPDDLDINVDDIETPDETDSLEFLGNGNELEWEDDTPVATAKNMPGDSADLFGDGTTEDGSAANGRLWRTVIIGEQEHRIDLHMIRPYMKVVTHGGYYGEGLNAIIVFAACFLPDSSLPDYHYIMENLFLYVISSLELLVAEDYMIVYLNGATPRRRMPGIGWLKKCYQMIDRRLRKNLKSLIIVHPSWFIRTVLAISRPFISVKFINKIQYVHSLEDLEQLIPMEHVQIPDCVLQYEEERLKARRESARPQPEFVLPRSEEKPEVAPVENRSALVSEDQETSLQPLHRSS

SEQ ID NO: 22240 - protein, 426 aa, Homo sapiens
MGPLSAPPCTQHITWKGLLLTASLLNFWNPPTTAQVTIEAQPPKVSEGKDVLLLVHNLPQNLTGYIWYKGQIRDLYHYVTSYIVDGQIIKYGPAYSGRETVYSNASLLIQNVTQEDTGSYTLHIIKRGDGTGGVTGRFTFTLYLETPKPSISSSNFNPREATEAVILTCDPETPDASYLWWMNGQSLPMTHSLQLSETNRTLYLFGVTNYTAGPYECEIRNPVSASRSDPVTLNLLPKLPKPYITINNLNPRENKDVSTFTCEPKSENYTYIWWLNGQSLPVSPRVKRRIENRILILPSVTRNETGPYQCEIRDRYGGIRSDPVTLNVLYGPDLPRIYPSFTYYHSGQNLYLSCFADSNPPAQYSWTINGKFQLSGQKLSIPQITTKHSGLYACSVRNSATGKESSKSVTVRVSGKWIPASLAIGF

SEQ ID NO: 22241 - protein, 1223 aa, Homo sapiens
TGPLLVPFTLNFTITNLQYEENMGHPGSRKFNITESVLQGLLKPLFKSTSVGPLYSGCRLTLLRPEKDGVATRVDAICTHRPDPKIPGLDRQQLYWELSQLTHSITELGPYTLDRDSLYVNGFTQRSSVPTTSTPGTFTVQPETSETPSSLPGPTATGPVLLPFTLNFTITNLQYEEDMRRPGSRKFNTTERVLQGLLMPLFKNTSVSSLYSGCRLTLLRPEKDGAATRVDAVCTHRPDPKSPGLDRERLYWKLSQLTHGITELGPYTLDRHSLYVNGFTHQSSMTTTRTPDTSTMHLATSRTPASLSGPMTASPLLVLFTINFTITNLRYEENMHHPGSRKFNTTERVLQGLLRPVFKNTSVGPLYSGCRLTLLRPKKDGAATKVDAICTYRPDPKSPGLDREQLYWELSQLTHSITELGPYTLDRDSLYVNGFTQRSSVPTTSIPGTPTVDLGTSGTPVSKPGPSAASPLLVLFTLNFTITNLRYEENMQHPGSRKFNTTERVLQGLLRSLFKSTSVGPLYSGCRLTLLRPEKDGTATGVDAICTHHPDPKSPRLDREQLYWELSQLTHNITELGPYALDNDSLFVNGFTHRSSVSTTSTASHLLILFTLNFTITNLRYEENMWPGSRKFNTTERVLQGLLRPLFKNTSVGPLYSGCRLTLLRPEKDGEATGVDAICTHRPDPTGPGLDREQLYLELSQLTHSITELGPYTLDRDSLYVNGFTHRSSVPTTSTGVVSEEPFTLNFTINNLRYMADMGQPGSLKFNITDNVMQHLLSPLFQRSSLGARYTGCRVIALRSVKNGAETRVDLLCTYLQPLSGPGLPIKQVFHELSQQTHGITRLGPYSLDKDSLYLNGYNEPGPDEPPTTPKPATTFLPPLSEATTAMGYHLKTLTLNFTISNLQYSPDMGKGSATFNSTEGVLQHLLRPLFQKSSMGPFYLGCQLISLRPEKDGAATGVDTTCTYHPDPVGPGLDIQQLYWELSQLTHGVTQLGFYVLDRDSLFINGYAPQNLSIRGEYQINFHIVNWNLSNPDPTSSEYITLLRDIQDKVTTLYKGSQLHDTFRFCLVTNLTMDSVLVTVKALFSSNLDPSLVEQVFLDKTLNASFHWLGSTYQLVDIHVTEMESSVYQPTSSSSTQHFYLNFTITNLPYSQDKAQPGTTNYQRNKRNIEDAVRRGCSTNSSETAASRVIFLTVKFQHSGLSPTGTTPGWTPCVTSRHWLGE

SEQ ID NO: 22242 - protein, 597 aa, Homo sapiens
MCSEARLARRLRDALREEEPWAVEELLRCGADPNLVLEDGAAAVHLAAGARHPRGLRCLGALLRQGGDPNARSVEALTPLHVAAAWGCRRGLELLLSQGADPALRDQDGLRPLDLALQQGHLECARVLQDLDTRTRTRTRIGAETQEPEPAPGTPGLSGPTDETLDSIALQKQPCRGDNRDIGLEADPGPPSLPVPLETVDKHGSSASPPGHWDYSSDASFVTAVEVSGAEDPASDTPPWAGSLPPTRQGLLHVVHANQRVPRSQGTEAELNARLQALTLTPPNAAGFQSSPSSMPLLDRSPAHSPPRTPTPGASDCHCLWEHQTSIDSDMATLWLTEDEASSTGGREPVGPCRHLPVSTVSDLELLKGLRALGPEFSGHSLELAAALRTGCIPDVQADEDALAQQFEQPDPARRWREGVVKSSFTYLLLDPRETQDLPARAFSLTPAERLQTFIRAIFYVGKGTRARPYVHLWEALGHHGRSRKQGSRRSPTRSKGTAMEWWQAGHLLVAGAWGCTCCTVPSLSSWLKASDSFIPRTSRPGAECWGVGHPAWGEMFECSSCPMLTAAPISGFRRGVCVCVCVCVCVCVCLCVCVCV

SEQ ID NO: 22243 - protein, 137 aa, Homo sapiens
MRLTRCQAALAAAITLNLLVLFYVSWLQHQPRNSRARGPRRASAAGPRVTVLVREFEAFDNAVPELVDSFLQQDPAQPVVVAADTLPYPPLALPRIPNVRLALLQPALDRPAAASRPETYVATEFVALVPDGARAEA

SEQ ID NO: 22244 - protein, 1040 aa, Homo sapiens
MAARRITQETFDAVLQEKAKRYHMDASGEAVSETLQFKAQDLLRAVPRSRAEMYDDVHSDGRYSLSGSVAHSRDAGREGLRSDVFPGPSFRSSNPSISDDSYFRKECGRDLEFSHSDSRDQVIGHRKLGHFRSQDWKFALRGSWEQDFGHPVSQESSWSQEYSFGPSAVLGDFGSSRLIEKECLEKESRDYDVDHPGEADSVLRGGSQVQARGRALNIVDQEGSLLGKGETQGLLTAKGGVGKLVTLRNVSTKKIPTVNRITPKTQGTNQIQKNTPSPDVTLGTNPGTEDIQFPIQKIPLGLDLKNLRLPRRKMSFDIIDKSDVFSRFGIEIIKWAGFHTIKDDIKFSQLFQTLFELETETCAKMLASFKCSLKPEHRDFCFFTIKFLKHSALKTPRVDNEFLNMLLDKGAVKTKNCFFEIIKPFDKYIMRLQDRLLKSVTPLLMACNAYELSVKMKTLSNPLDLALALETTNSLCRKSLALLGQTFSLASSFRQEKILEAVGLQDIAPSPAAFPNFEDSTLFGREYIDHLKAWLVSSGCPLQVKKAEPEPMREEEKMIPPTKPEIQAKAPSSLSDAVPQRADHRVVGTIDQLVKRVIEGSLSPKERTLLKEDPAYWFLSDENSLEYKYYKLKLAEMQRMSENLRGADQKPTSADCAVRAMLYSRAVRNLKKKLLPWQRRGLLRAQGLRGWKARRATTGTQTLLSSGTRLKHHGRQAPGLSQAKPSLPDRNDAAKDCPPDPVGPSPQDPSLEASGPSPKPAGVDISEAPQTSSPCPSADIDMKTMETAEKLARFVAQVGPEIEQFSIENSTDNPDLWFLHDQNSSAFKFYRKKVFELCPSICFTSSPHNLHTGGGDTTGSQESPVDLMEGEAEFEDEPPPREAELESPEASSGTCFPRKRISSKSLKVGMIPAPKRVCLIQEPKVHEPVRIAYDRPRGRPMSKKKKPKDLDFAQQKLTDKNLGFQMLQKMGWKEGHGLGSLGKGIREPVSVYAAGSLGWEWVGPQSFHLQPAAWLLHSQDGLQLAVDFCFLNRRHLQMRS

SEQ ID NO: 22245 - protein, 885 aa, Homo sapiens
NIMNNKVFYQHPNLMRALGMHETVMEVMVNVLGGGESKEIRFPKMVTSCCRFLCYFCRISRQNQRSMFDHLSYLLENSGIGLGMQGSTPLDVAAASVIDNNELALALQEQDLEKVVSYLAGCGLQSCPMLVAKGYPDIGWNPCGGERYLDFLRFAVFVNGESVEENANVVVRLLIRKPECFGPALRGEGGSGLLAAIEEAIRISEDPARDGPGIRRDRRREHFGEEPPEENRVHLGHAIMSFYAALIDLLGRCAPEMHLIQAGKGEALRIRAILRSLVPLEDLVGIISLPLQIPTLGKDGALVQPKMSASFVPDHKASMVLFLDRVYGIENQDFLLHVLDVGFLPDMRAAASLDTATFSTTEMALALNRYLCLAVLPLITKCAPLFAGTEHRAIMVDSMLHTVYRLSRGRSLTKAQRDVIEDCLMSLCRYIRPSMLQHLLRRLVFDVPILNEFAKMPLKLLTNHYERCWKYYCLPTGWANFGVTSEEELHLTRKLFWGIFDSLAHKKYDPELYRMAMPCLCAIAGALPPDYVDASYSSKAEKKATVDAEGNFDPRPVETLNVIIPEKLDSFINKFAEYTHEKWAFDKIQNNWSYGENIDEELKTHPMLRPYKTFSEKDKEIYRWPIKESLKAMIAWEWTIEKAREGEEEKTEKKKTRKISQSAQTYDPREGYNPQPPDLSAVTLSRELQAMAEQLAENYHNTWGRKKKQELEAKGGGTHPLLVPYDTLTAKEKARDREKAQELLKFLQMNGYAVTRGLKDMELDSSSIEKRFAFGFLQQLLRWMDISQEFIAHLEAVVSSGRVEKSPHEQEIKFFAKILLPLINQYFTNHCLYFLSTPAKVLGSGGHASNKEKEMITRDRRPSCGQLSSHPGPLPGCQDSDEVRP

SEQ ID NO: 22246 - protein, 585 aa, Homo sapiens
MSYTGFVQGSETTLQSTYSDTSAQPTCDYGYGTWNSGTNRGYEGYGYGYGYGQDNTTNYGYDSYESCDSRAVLSERDLYRSGYDYSELDPEMEMAYEGQYDAYRDQFRMRGNDTFGPRAQGWARDARSGRPMASGYGRMWEDPMGARGQCMSGASRLPSLFSQNIIPEYGMFQGMRGGGAFPGGSRFGFGFGNGMKQMRRTWKTWTTADFRTKKKKRKQGGSPDEPDSKATRTDCSDNSDSDNDEGTEGEATEGLEGTEAVEKGSRVDGEDEEGKEDGREEGKEDPEKGALTTQDENGQTKRKLQAGKKSQDKQKKRQRDRMVERIQFVCSLCKYRTFYEDEMASHLDSKFHKEHFKYVGTKLPKQTADFLQEYVTNKTKKTEELRKTVEDLDGLIQQIYRDQDLTQEIAMEHFVKKVEAAHCAACDLFIPMQFGIIQKHLKTMDHNRNRRLMMEQSKKSSLMVARSILNNKLISKKLERYLKGENPFTDSPEEEKEQEEAEGGALDEGAQGEAAGISEGAEGVPAQPPVPPEPAPGAVSPPPPPPPEEEEEGAVPLLGGALQRQIRGIPGLDVEDDEEGGGGAP

SEQ ID NO: 22247 - protein, 121 aa, Homo sapiens
MSLLATLGLELDRALLPASGLGWLVDYGKLPPAPAPLAPYEVLGGALEGGLPVGGEPLAGDGFSDWMTERVDFTALLPLEPPLPPGTLPQPSPTPPDLEAMASLLKKELEQMEDFFLDAPP

SEQ ID NO: 22248 - protein, 781 aa, Homo sapiens
MATQGHLTFKDVAIEFSQEEWKCLEPVQKALYKDVMLENYRNLVFLGISPKCVIKELPPTENSNTGERFQTVALERHQSYDIENLYFREIQKHLHDLEFQWKDGETNDKEVPVPHENNLTGKRDQHSQGDVENNHIENQLTSNFESRLAELQKVQTEGRLYECNETEKTGNNGCLVSPHIREKTYVCNECGKAFKASSSLINHQRIHTTEKPYKCNECGKAFHRASLLTVHKVVHTRGKSYQCDVCGKIFRKNSYFVRHQRSHTGQKPYICNECGKSFSKSSHLAVHQRIHTGEKPYKCNLCGKSFSQRVHLRLHQTVHTGERPFKCNECGKTFKRSSNLTVHQVIHAGKKPYKCDVCGKAFRHRSNLVCHRRIHSGEKQYKCNECGKVFSKRSSLAVHRRIHTVEKPCKCNECGKVFSKRSSLAVHQRIHTGQKTYKCNKCGKVYSKHSHLAVHWRIHTGEKAYKCNECGKVFSIHSRLAAHQRIHTGEKPYKCNECGKVFSQHSRLAVHRRIHTGEKPYKCKECGKVFSDRSAFARHRRIHTGEKPYKCKECGKVFSQCSRLTVHRRIHSGEKPYKCNECGKVYSQYSHLVGHRRVHTGEKPYKCHECGKAFNQGSTLNRHQRIHTGEKPYKCNQCGNSFSQRVHLRLHQTVHTGDRPYKCNECGKTFKRSSNLTAHQIIHAGKKPYKCDECGKVFRHSSHLVSHQRIHTGEKRYKCIECGKAFGRLFSLSKHQRIHSGKKPYKCNECGKSFICRSGLTKHRIRHTGESLTTKLNVTRP

SEQ ID NO: 22249 - protein, 419 aa, Homo sapiens
MLCDEEAQKRKAKESGMALPQGRLTFMDVAIEFSQEEWKSLDPGQRALYRDVMLENYRNLVFLGRSCVLGSNAENKPIKNQLGLTLEAHLSELQLFQAGRKIYRSNQVEKFTNHRSSVSPLQKISSSFTTHIFNKYRNDLIDFPLLPQEEKAYIRGKSYEYECSEDGEVFRVRASLTNHQVIHTAEKPYKCTECGKVFSRNSHLVEHWRIHTGQKPYKCSECDKVFNRNSNLARHQRIHTGEKPHKCNECGKAFRECSGLTTHLVIHTGEKPYKCNECGKNFRHKFSLTNHQRSHTAEKPYKCNECGKVFSLLSYLARHQIIHSTEKPYKCNECGRAFHKRPGLMAHLLIHTGEKPYKCNECDKVFGRKLYLTNHQRIHTGERPYKCNACGKVFNQNPHLSRHRKIHAGENSLRTLQME

SEQ ID NO: 22250 - protein, 141 aa, Homo sapiens
MAVSTVFSTSSLMLALSRHSLLSPLLSVTSFRRFYRGDSPTDSQKDMIEIPLPPWQERTDESIETKRARLLYESRKRGMLENCILLSLFAKEHLQHMTEKQLNLYDRLINEPSNDWDIYYWATGTGYDKQHNVKIGQFRLI

SEQ ID NO: 22251 - protein, 486 aa, Homo sapiens
MSSHGNSLFLRESGQRLGRVGWLQRLQESLQQRALRTRLRLQTMTLEHVLRFLRRNAFILLTVSAVVIGVSLAFALRPYQLTYRQIKYFSFPGELLMRMLQMLVLPLIVSSLVTGMASLDNKATGRMGMRAAVYYMVTTIIAVFIGILMVTIIHPGKGSKEGLHREGRIETIPTADAFMDLIRNMFPPNLVEACFKQFKTQYSTRVVTRTMVRTENGSEPGASMPPPFSVENGTSFLENVTRALGTLQEMLSFEETVPVPGSANGINALGLVVFSVAFGLVIGGMKHKGRVLRDFFDSLNEAIMRLVGIIICSATLPITFRCLEEGLGVDRRITRFVLPVGATVNMDGTALYEALAAIFIAQVNNYELNLGQITTISITATAASVGAAGIPQAGLVTMVIVLTSVGLPTEDITLIIAVDWFLDRLRTMTNVLGDSIGAAVIEHLSQRELELQEAELTLPSLGKPYKSLMAQEKGASRGRGGNESAM

SEQ ID NO: 22252 - protein, 742 aa, Homo sapiens
MMQAQESLTLEDVAVDFTWEEWQFLSPAQKDLYRDVMLENYSNLVAVGYQASKPDALSKLERGEETCTTEDEIYSRICSDSGGASGGAYAEIRKIDDPLQHHLQNQSIQKSVKQCHEQNMFGNIVNQNKGHFLLKQDCDTFDLHEKPLKSNLSFENQKRSSGLKNSAEFNRDGKSLFHANHKQFYTEMKFPAIAKPINKSQFIKQQRTHNIENAHVCSECGKAFLKLSQFIDHQRVHTGEKPHVCSMCGKAFSRKSRLMDHQRTHTELKHYECTECDKTFLKKSQLNIHQKTHMGGKPYTCSQCGKAFIKKCRLIYHQRTHTGEKPHGCSVCGKAFSTKFSLTTHQKTHTGEKPYICSECGKGFIEKRRLTAHHRTHTGEKPFICNKCGKGFTLKNSLITHQQTHTGEKLYTCSECGKGFSMKHCLMVHQRTHTGEKPYKCNECGKGFALKSPLIRHQRTHTGEKPYVCTECRKGFTMKSDLIVHQRTHTAEKPYICNDCGKGFTVKSRLIVHQRTHTGEKPYVCGECGKGFPAKIRLMGHQRTHTGEKPYICNECGKGFTEKSHLNVHRRTHTGEKPYVCSECGKGLTGKSMLIAHQRTHTGEKPYICNECGKGFTMKSTLSIHQQTHTGEKPYKCNECDKTFRKKTCLIQHQRFHTGKTSFACTECGKFSLRKNDLITHQRIHTGEKPYKCSDCGKAFTTKSGLNVHQRKHTGERPYGCSDCGKAFAHLSILVKHRRIHR

SEQ ID NO: 22253 - protein, 362 aa, Homo sapiens
MISFCPDCGKSIQAAFKFCPYCGNSLPVEEHVGSQTFVNPHVSSFQGSGSRPPTPKSSPQKTRKSPQVTRGSPQKTSCSPQKTRQSPQTLKRSRVTTSLEALPTGTVLTDKSGRQWKLKSFQTRDNQGILYEAAPTSTLTCDSGPQKQKFSLKLDAKDGRLFNEQNFFQRAAKPLQVNKWKKLYSTPLLAIPTCMGFGVHQDKYRFLVLPSLGRSLQSALDVSPKHVLSERSVLQVACRLLDALEFLHENEYVHGNVTAENIFVDPEDQSQVTLAGYGFAFRYCPSGKHVAYVEGSRSPHEGDLEFISMDLHKGCGPSRRSDLQSLGYCMLKWLYGFLPWTNCLPNTEDIMKQKQKLPWDSF

SEQ ID NO: 22254 - protein, 349 aa, Homo sapiens
MAPPPPPLAASTPLLHGEFGSYPARGPRFALTLTSQALHIQRLRPKPEARPRGGLVPLAEVSGCCTLRSRSPSDSAAYFCIYTYPRGRRGARRRATRTFRADGAATYEENRAEAQRWATALTCLLRGLPLPGDGEITPDLLPRPPRLLLLVNPFGGRGLAWQWCKNHVLPMISEAGLSFNLIQTERQNHARELVQGLSLSEWDGIVTVSGDGLLHEVLNGLLDRPDWEEAVKMPVGILPCGSGNALAGAVNQHGGPREDSDSSTSSSACPLWTTARSCPRAAASMPGSCPLLPQQLALGFSRFIQDRVNGGGGRIGSLTCRGHTQRTLPAPAREGGGSLFLKNINVFIC

SEQ ID NO: 22255 - protein, 292 aa, Homo sapiens
MGPLSAPPCTQRITWKGVLLTVETPKPSISSSNLNPREAMEAVILTCDPATPAASYQWWMNGQSLPMTHRLQLSKTNRTLFIFGVTKYIAGPYECEIRNPVSASRSDPVTLNLLPKLSKPYITINNLNPRENKDVLTFTCEPKSKNYTYIWWLNGQSLPVSPRVKRPIENRILILPNVTRNETGPYQCEIRDRYGGIRSDPVTLNVLYGPDLPSIYPSFTYYRSGENLYLSCFAESNPRAQYSWTINGKFQLSGQKLSIPQITTKHSGLYACSVRNSATGKESSKSITVKVS

SEQ ID NO: 22256 - protein, 549 aa, Homo sapiens
MAAQLLTDEALESVTFRDVTVDFTQEEWQQLEPAQKDLYRDVMLENYRNLVSLDWETRPEMKELDPKNDISEDKLSVVGEATGGPTRNGARGPGSEGVWEPGSWPERPRGDAGAEWEPLGIPQGNKLLGGSVPACHELKAFANQGCVLVPPRLDDPTEKGACPPVRRGKNFSSTSDLSKPPMPCEEKKTYDCSECGKAFSRSSSLIKHQRIHTGEKPFECDTCGKHFIERSSLTIHQRVHTGEKPYACGDCGKAFSQRMNLTVHQRTHTGEKPYVCDVCGKAFRKTSSLTQHERIHTGEKPYACGDCGKAFSQNMHLIVHQRTHTGEKPYVCPECGRAFSQNMHLTEHQRTHTGEKPYACKECGKAFNKSSSLTLHQRNHTGEKPYVCGECGKAFSQSSYLIQHQRFHIGVKPFECSECGKAFSKNSSLTQHQRIHTGEKPYECYICKKHFTGRSSLIVHQIVHTGEKPYVCGECGKAFSQSAYLIEHQRIHTGEKPYRCGQCGKSFIKNSSLTVHQRIHTGEKPYRCGECGKTFSRNTNLTRHLRIHT

SEQ ID NO: 22257 - protein, 218 aa, Homo sapiens
MWVPVVFLTLSVTWIGAAPLILSRIVGGWECEKHSQPWQVLVASRGRAVCGGVLVHPQWVLTAAHCIRKPGDDSSHDLMLLRLSEPAELTDAVKVMDLPTQEPALGTTCYASGWGSIEPEEFLTPKKLQCVDLHVISNDVCAQVHPQKVTKFMLCAGRWTGGKSTCSGDSGGPLVCNGVLQGITSWGSEPCALPERPSLYTKVVHYRKWIKDTIVANP

SEQ ID NO: 22258 - protein, 88 aa, Homo sapiens
MSLLATLGLELDRALLPASGLGWLVDYGKLPPAPAPLAPYEVLGGALEGGLPVGGEPLAGKGRWKVELGSGGQGKMGEEELIHVFNKY

SEQ ID NO: 22259 - protein, 309 aa, Homo sapiens
MGPLPAPSCTQRITWKGLLLTASLLNFWNPPTTAEVTIEAQPPKVSEGKDVLLLVHNLPQNLPGYFWYKGEMTDLYHYIISYIVDGKIIIYGPAYSGRETVYSNASLLIQNVTRKDAGTYTLHIIKRGDETREEIRHFTFTLYYGPDLPRIYPSFTYYRSGENLDLSCFTESNPPAEYFWTINGKFQQSGQKLFIPQITRNHSGLYACSVHNSATGKEISKSMTVKVSGKWIPASLAVGFYVESIWLSEKSQENIFIPSLCPMGTSKSQILLLNPPNLSLQTLFSLFFCFLMADLVSGLKKVGRGLYQP

SEQ ID NO: 22260 - protein, 255 aa, Homo sapiens
MAPPPPPLAASTPLLHGEFGSYPARGPRFALTLTSQALHIQRLRPKPEARPRGGLVPLAEVSGCCTLRSRSPSDSAAYFCIYTYPRGRRGARRRATRTFRADGAATYEENRAEAQRWATALTCLLRGLPLPGDGEITPDLLPRPPRLLLLVNPFGGRGLAWQWCKNHVLPMISEAGLSFNLIQTERQNHARELVQGLSLSEWDGIVTVSGDGLLHEVLNGLLDRPDWEEAVKMPVGILPCGSGNALAGAVNQHGG

SEQ ID NO: 22261 - protein, 511 aa, Homo sapiens
NSNTGEKFQAVMLEGHESYDTENFYFREIRKNLQEVDFQWKDGEINYKEGPMTHKNNLTGQRVRHSQGDVENKHMENQLILRFQSGLGELQKFQTAEKIYGCNQIERTVNNCFLASPLQRIFPGVQTNISRKYGNDFLQLSLPTQDEKTHIREKPYIGNECGKAFRVSSSLINHQMIHTTEKPYRCNESGKAFHRGSLLTVHQIVHTRGKPYQCDVCGRIFRQNSDLVNHRRSHTGDKPYICNECGKSFSKSSHLAVHQRIHTGEKPYKCNRCGKCFSQSSSLATHQTVHTGDKPYKCNECGKTFKRNSSLTAHHIIHAGKKPYTCDVCGKVFYQNSQLVRHQIIHTGETPYKCNECGKVFRYRSGLARHWSIHTGEKPYKCNECGKAFRVRSILLNHQMMHTGEKPYKCNECGKAFIERSNLVYHQRNHTGEKPYKCMECGKAFGRRSCLTKHQRIHSSEKPYKCNECGKSYISRSGLTKHQIKHAGENLTTKLNVERPLDVVLTSGIPK

SEQ ID NO: 22262 - protein, 165 aa, Homo sapiens
MHNPDGSASPTADPGSELQTLGQAARRPPPPRAGHDAPRRTRPSARKPLSCFSRRPMPTREPPKTRGSRGHLHTHPPGPGPPLQGLAPRGLKTSAPRPPCQPQPGPHKAKTKKIVFEDELLSQALLGAKKPIGAIPKGHKPRPHPVPDYELRRPKLQPGFGGSLR

SEQ ID NO: 22263 - protein, 618 aa, Homo sapiens
MAPPPPPLAASTPLLHGEFGSYPARGPRFALTLTSQALHIQRLRPKPEARPRGGLVPLAEVSGCCTLRSRSPSDSAAYFCIYTYPRGRRGARRRATRTFRADGAATYEENRAEAQRWATALTCLLRGLPLPGDGEITPDLLPRPPRLLLLVNPFGGRGLAWQWCKNHVLPMISEAGLSFNLIQTERQNHARELVQGLSLSEWDGIVTVSGDGLLHEVLNGLLDRPDWEEAVKMPVGILPCGSGNALAGAVNQHGGFEPALGLDLLLNCSLLLCRGGGHPLDLLSVTLASGSRCFSFLSVAWGFVSDVDIQSERFRALGSARFTLGTVLGLATLHTYRGRLSYLPATVEPASPTPAHSLPRAKSELTLTPDPAPPMAHSPLHRSVSDLPLPLPQPALASPGSPEPLPILSLNGGGPELAGDWGGAGDAPLSPDPLLSSPPGSPKAALHSPVSEGAPVIPPSSGLPLPTPDARVGASTCGPPDHLLPPLGTPLPPDWVTLEGDFVLMLAISPSHLGADLVAAPHARFDDGLVHLCWVRSGISRAALLRLFLAMERGSHFSLGCPQLGYAAARAFRLEPLTPRGVLTVDGEQVEYGPLQAQMHPGIGTLLTGPPGCPGREP

SEQ ID NO: 22264 - protein, 1076 aa, Homo sapiens
MGEIEQRPTPGSRLGAPENSGISTLERGQKPPPTPSGKLVSIKIQMLDDTQEAFEVPQRAPGKVLLDAVCNHLNLVEGDYFGLEFPDHKKITVWLDLLKPIVKQIRRPKHVVVKFVVKFFPPDHTQLQEELTRYLFALQVKQDLAQGRLTCNDTSAALLISHIVQSEIGDFDEALDREHLAKNKYIPQQDALEDKIVEFHHNHIGQTPAESDFQLLEIARRLEMYGIRLHPAKDREGTKINLAVANTGILVFQGFTKINAFNWAKVRKLSFKRKRFLIKLRPDANSAYQDTLEFLMASRDFCKSFWKICVEHHAFFRLFEEPKPKPKPVLFSRGSSFRFSGRTQKQVLDYVKEGGHKKVQFERKHSKIHSIRSLASQPTELNSEVLEQSQQSTSLTFGEGAESPGGQSCRRGKEPKVSAGEPGSHPSPAPRRSPAGNKQADGAASAPTEEEEEVVKDRTQQSKPQPPQPSTGSLTGSPHLSELSVNSQGGVAPANVTLSPNLSPDTKQASPLISPLLNDQACPRTDDEDEGRRKRFPTDKAYFIAKEVSTTERTYLKDLEVITSWFQSTVSKEDAMPEALKSLIFPNFEPLHKFHTNFLKEIEQRLALWEGRSNAQIRDYQRIGDVMLKNIQGMKHLAAHLWKHSEALEALENGIKSSRRLENFCRDFELQKVCYLPLNTFLLRPLHRLMHYKQVLERLCKHHPPSHADFRDCRAALAEITEMVAQLHGTMIKMENFQKLHELKKDLIGIDNLVVPGRPGSFSLIRTPHLGQARRIPCAPERRPLLLVKEFIRLGSLSKLSGKGLQQRMFFLFNDVLLYTSRGLTASNQFKVHGQLPLYGMTIEESEDEWGVPHCLTLRGQRQSIIVAASSRSEMEKWVEDIQMAIDLAEKSSSPAPEFLASSPPDNKSPDEATAADQESEDDLSASRTSLERQAPHRGNTMVHVCWHRNTSVSMVDFSIAVENQLSGNLLRKFKNSNGWQKLWVVFTNFCLFFYKSHQDNHPLASLPLLGYSLTIPSESENIQKDYVFKLHFKSHVYYFRAESEYTFERWMEVIRSATSSASRPHVLSHKESLVY

SEQ ID NO: 22265 - protein, 430 aa, Homo sapiens
MSSPTTSSLDTPLPGNGPPQPGAPSSSPTVKEEGPEPWPGGPDPDVPGTDEASSACSTDWVIPDPEEEPERKRKKGPAPKMLGHELCRVCGDKASGFHYNVLSCEGCKGFFRRSVVRGGARRYACRGGGTCQMDAFMRRKCQQCRLRKCKEAGMREQCVLSEEQIRKKKIRKQQQESQSQSQSPVGPQGSSSSASGPGASPGGSEAGSQGSGEGEGVQLTAAQELMIQQLVAAQLQCNKRSFSDQPKVTEIVDFAKQVPGFLQLGREDQIALLKASTIEIMLLETARRYNHETECITFLKDFTYSKDDFHRAGLQVEFINPIFEFSRAMRRLGLDDAEYALLIAINIFSADRPNVQEPGRVEALQQPYVEALLSYTRIKRPQDQLRFPRMLMKLVSLRTLSSVHSEQVFALRLQDKKLPPLLSEIWDVHE

SEQ ID NO: 22266 - protein, 831 aa, Homo sapiens
MGGRVFLVFLAFCVWLTLPGAETQDSRGCARWCPQDSSCVNATACRCNPGFSSFSEIITTPMETCDDINECATLSKVSCGKFSDCWNTEGSYDCVCSPGYEPVSGAKTFKNESENTCQDVDECQQNPRLCKSYGTCVNTLGSYTCQCLPGFKLKPEDPKLCTDVNECTSGQNPCHSSTHCLNNVGSYQCRCRPGWQPIPGSPNGPNNTVCEDVDECSSGQHQCDSSTVCFNTVGSYSCRCRPGWKPRHGIPNNQKDTVCEDMTFSTWTPPPGVHSQTLSRFFDKVQDLGRDYKPGLANNTIQSILQALDELLEAPGDLETLPRLQQHCVASHLLDGLEDVLRGLSKNLSNGLLNFSYPAGTELSLEVQKQVDRSVTLRQNQAVMQLDWNQAQKSGDPGMGKLLAEAPLVLEPEKQMLLHETHQGLLQDGSPILLSDVISAFLSNNDTQNLSSPVTFTFSHRSVIPRQKVLCVFWEHGQNGCGHWATTGCSTIGTRDTSTICRCTHLSSFAVLMAHYDVQEEDPVLTVITYMGLSVSLLCLLLAALTFLLCKAIQNTSTSLHLQLSLCLFLAHLLFLVAIDQTGHKVLCSIIAGTLHYLYLATLTWMLLEALYLFLTARNLTVVNYSSINRFMKKLMFPVGYGVPAVTVAISAASRPHLYGTPSRCWLQPEKGFIWGFLGPVCAIFSVNLVLFLVTLWILKNRLSSLNSEVSTLRNTRMLAFKATAQLFILGCTWCLGILQVGPAARVMAYLFTIINSLQGVFIFLVYCLLSQQVREQYGKWSKGIRKLKTESEMHTLSSSAKADTSKPSTPGTVVQACNASTLGGQSRKIT

SEQ ID NO: 22267 - protein, 460 aa, Homo sapiens
IYFQLHRALKMIVDPVEPHGEMKFQWDLNAWTKSAEAFGKIVAERPGTNSTGPAPMAPPRAPGPLSKQGSGSSQPMEVQEGYGFGSEPHVSGVKRSRSGEGEVSGLMRKVPRVSLERLDLDLTADSQPPVFKVFPGSTTEDYNLIVIERGAAAAATGQPGTAPAGTPGAPPLAGMAIVKEEETEAAIGAPPTATEGPETKPVLMALAEGPGAEGPRLASPSGSTSSGLEVVAPEGTSAPGGGPGTLDDSATICRVCQKPGDLVMCNQCEFCFHLDCHLPALQDVPGEEWSCSLCHVLPDLKEEDGSLSLDGADSTGVVAKLSPANQRKCERVLLALFCHEPCRPLHQLATDSTFSLDQPGGTLDLTLIRARLQEKLSPPYSSPQEFAQDVGRMFKQFNKLTEDKADVQSIIGLQRFFETRMNEAFGDTKFSAVLVEPPPMSLPGAGLSSQELSGGPGDGP

SEQ ID NO: 22268 - protein, 245 aa, Homo sapiens
RTRPSARKPLSCFSRRPMPTREPPKTRGSRGHLHTHPPGPGPPLQGLAPRGLKTSAPRPPCQPQPGPHKAKTKKIVFEDELLSQALLGAKKPIGAIPKGHKPRPHPVPDYELKYPPVSSERERSRYVAVFQDQYGEFLELQHEVGCAQAKLRQLEALLSSLPPPQSQKEAQVAARVWREFEMKRMAGVQWYDLSSLQPQRPGFKRFSCLSWDHRRPPPCLANFCICSRDGVSPCWPGWSRTPDLK

SEQ ID NO: 22269 - protein, 85 aa, Homo sapiens
MSGAPTAGAALMLCAATAVLLSAQGGPVQSKSPRFASWDEMNVLAHGLLQLGQGLREHAERTRSQLSALERRLSACGSACQGTEG

SEQ ID NO: 22270 - protein, 300 aa, Homo sapiens
MGTPKPRILPWLVSQLDLGQLEGVAWVNKSRTRFRIPWKHGLRQDAQQEDFGIFQAWAEATGAYVPGRDKPDLPTWKRNFRSALNRKEGLRLAEDRSKDPHDPHKIYEFVNSGVGDFSQPDTSPDTNGGGSTSDTQEDILDELLGNMVLAPLPDPGPPSLAVAPEPCPQPLRSPSLDNPTPFPNLGPSENPLKRLLVPGEDLITFTEGSGRSPRYALWFCVGESWPQDQPWTKRLVMVKVVPTCLRALVEMARVGGASSLENTVDLHISNSHPLSLTSDQYKAYLQDLVEGMDFQGPGES

SEQ ID NO: 22271 - protein, 2157 aa, Homo sapiens
MSVKEAGSSGRREQAAYHLHIYPQLSTTESQASCRVTATKDSTTSDVIKDAIASLRLDGTKCYVLVEVKESGGEEWVLDANDSPVHRVLLWPRRAQDEHPQEDGYYFLLQERNADGTIKYVHMQLVAQATATRRLVERGLLPRQQADFDDLCNLPELTEGNLLKNLKHRFLQQKIYTYAGSILVAINPFKFLPIYNPKYVKMYENQQLGKLEPHVFALADVAYYTMLRKRVNQCIVISGESGSGKTQSTNFLIHCLTALSQKGYASGVERTILGAGPVLEAFGNAKTAHNNNSSRFGKFIQVSYLESGIVRGAVVEKYLLEKSRLVSQEKDERNYHVFYYLLLGVSEEERQEFQLKQPEDYFYLNQHNLKIEDGEDLKHDFERLKQAMEMVGFLPATKKQIFAVLSAILYLGNVTYKKRATGREEGLEVGPPEVLDTLSQLLKVKREILVEVLTKRKTVTVNDKLILPYSLSEAITARDSMAKSLYSALFDWIVLRINHALLNKKDVEEAVSCLSIGVLDIFGFEDFERNSFEQFCINYANEQLQYYFNQHIFKLEQEEYQGEGITWHNIGYTDNVGCIHLISKKPTGLFYLLDEESNFPHATSQTLLAKFKQQHEDNKYFLGTPVMEPAFIIQHFAGKVKYQIKDFREKNMDYMRPDIVALLRGSDSSYVRELIGMDPVAVFRWAVLRAAIRAMAVLREAGRLRAERAEKAAGMSSPGAQSHPEELPRGASTPSEKLYRDLHNQMIKSIKGLPWQGEDPRSLLQSLSRLQKPRAFILKSKGIKQKQIIPKNLLDSKSLKLIISMTLHDRTTKSLLHLHKKKKPPSISAQFQTSLNKLLEALGKAEPFFIRCIRSNAEKKELCFDDELVLQQLRYTGMLETVRIRRSGYSAKYTFQDFTEQFQVLLPKDAQPCREVISTLLEKMKIDKRNYQIGKTKVFLKETERQALQETLHREVVRKILLLQSWFRMVLERRHFLQMKRAAVTIQACWRSYRVRRALERTQAAVYLQASWRGYWQRKLYRHQKQSIIRLQSLCRGHLQRKSFSQMISEKQKAEEKEREALEAARAGAEEGGQGQAAGGQQVAEQGPEPAEDGGHLASEPEVQPSDRSPLEHSSPEKEAPSPEKTLPPQKTVAAESHEKVPSSREKRESRRQRGLEHVKFQNKHIQSCKEESALREPSRRVTQEQGVSLLEDKKESREDETLLVVETEAENTSQKQPTEQPQAMAVGKVSEETEKTLPSGSPRPGQLERPTSLALDSRVSPPAPGSAPETPEDKSKPCGSPRVQEKPDSPGGSTQIQRYLDAERLASAVELWRGKKLVAAASPSAMLSQSLDLSDRHRATGAALTPTEERRTSFSTSDVSKLLPSLAKAQPAAETTDGERSAKKPAVQKKKPGDASSLPDAGLSPGSQVDSKSTFKRLFLHKTKDKKYSLEGAEELENAVSGHVVLEATTMKKGLEAPSGQQHRHAAGEKRTKEPGGKGKKNRNVKIGKITVSEKWRESVFRQITNANELKYLDEFLLNKINDLRSQKTPIESLFIEATEKFRSNIKTMYSVPNGKIHVGYKDLMENYQIVVSNLATERGQKDTNLVLNLFQSLLDEFTRGYTKNDFEPVKQSKAQKKKRKQERAVQEHNGHVFASYQVSIPQSCEQCLSYIWLMDKALLCSVCKMTCHKKCVHKIQSHCSYTYGRKGEPGVEPGHFGVCVDSLTSDKASVPIVLEKLLEHVEMHGLYTEGLYRKSGAANRTRELRQALQTDPAAVKLENFPIHAITGVLKQWLRELPEPLMTFAQYGDFLRAVELPEKQEQLAAIYAVLEHLPEANHNSLERLIFHLVKVALLEDVNRMSPGALAIIFAPCLLRCPDNSDPLTSMKDVLKITTCVEMLIKEQMRKYKVKMEEISQLEAAESIAFRRLSLLRQNAPWPLKLGFSSPYEGVLNKSPKTRDIQEEELEVLLEEEAAGGDEDREKEILIERIQSIKEEKQDITYRLPELDPRGSDEENLDSETSASTESLLEERAGRGASEGPPAPALPCPGAPTPSPLPTVAAPPRRRPSSFVTVRVKTPRRTPIMPTANIKLPPGLPSHLPRWAPGAREAAAPVRRREPPARRPDQIHSVYITPGADLPVQGALEPLEEDGQPPGAKRRYSDPPTYCLPPASGQTNG

SEQ ID NO: 22272 - protein, 800 aa, Homo sapiens
MQRSIMSFFHPKKEGKAKKPEKEASNSSRETEPPPKAALKEWNGVVSESDSPVKRPGRKAARVLGSEGEEEDEALSPAKGQKPALDCSQVSPPRPATSPENNASLSDTSPMDSSPSGIPKRRTARKQLPKRTIQEVLEEQSEDEDREAKRKKEEEEETPKESLTEAEVATEKEGEDGDQPTTPPKPLKTSKAETPTESVSEPEVATKQELQEEEEQTKPPRRAPKTLSSFFTPRKPAVKKEVKEEEPGAPGKEGAAEGPLDPSGYNPAKNNYHPVEDACWKPGQKVPYLAVARTFEKIEEVSARLRMVETLSNLLRSVVALSPPDLLPVLYLSLNHLGPPQQGLELGVGDGVLLKAVAQATGRQLESVRAEAAEKGDVGLVAENSRSTQRLMLPPPPLTASGVFSKFRDIARLTGSASTAKKIDIIKGLFVACRHSEARFIARSLSGRLRLGLAEQSVLAALSQAVSLTPPGQEFPPAMVDAGKGKTAEARKTWLEEQGMILKQTFCEVPDLDRIIPVLLEHGLERLPEHCKLSPGIPLKPMLAHPTRGISEVLKRFEEAAFTCEYKYDGQRAQIHALEGGEVKIFSRNQEDNTGKYPDIISRIPKIKLPSVTSFILDTEAVAWDREKKQIQPFQVLTTRKRKEVDASEIQVQVCLYAFDLIYLNGESLVREPLSRRRQLLRENFVETEGEFVFATSLDTKDIEQIAEFLEQSVKDSCEGLMVKTLDVDATYEIAKRSHNWLKLKKDYLDGVGDTLDLVVIGAYLGRGKRAGRYGGFLLASYDEDSEELQAICKVLGNWG

SEQ ID NO: 22273 - protein, 609 aa, Homo sapiens
AAEGVPSRGPPGEVIHLNVGGKRFSTSRQTLTWIPDSFFSSLLSGRISTLKDETGAIFIDRDPTVFAPILNFLRTKELDPRGVHGSSLLHEAQFYGLTPLVRRLQLREELDRSSCGNVLFNGYLPPPVFPVKRRNRHSLVGPQQLGGRPAPVRRSNTMPPNLGNAGLLGRMLDEKTPPSPSGQPEEPGMVRLVCGHHNWIAVAYTQFLVCYRLKEASGWQLVFSSPRLDWPIERLALTARVHGGALGEHDKMVAAATGSEILLWALQAEGGGSEIGVFHLGVPVEALFFVGNQLIATSHTGRIGVWNAVTKHWQVQEVQPITSYDAAGSFLLLGCNNGSIYYVDVQKFPLRMKDNDLLVSELYRDPAEDGVTALSVYLTPKTSDSGNWIEIAYGTSSGGVRVIVQHPETVGSGPQLFQTFTVHRSPVTKIMLSEKHLISVCADNNHVRTWSVTRFRGMISTQPGSTPLASFKILALESADGHGGCSAGNDIAGGLTEQELMEQLEHCELAPPAPSAPSWGCLPSPSPRISLTSLHSASSNTSLSGHRGSPSPPQAEARRRGGGSFVERCQELVRSGPDLRRPPTPAPWPSSGLGTPLTPPKMKLNETSF

SEQ ID NO: 22274 - protein, 528 aa, Homo sapiens
MDPAGRARGQGATAGGLLLRAAAAAKGLREDLWGAAALPWRSLSRIPKREGLGEEDTAVAGHELLLPNERSFQNAAKSNNLDLMEKLFEKKVNINVVNNMNRTALHFAVGRNHLSAVDFLLKHKARVDVADKHGLTVIHLAAWSGSLEVMLMLVKAGADQRAKNQDGMSALHFATQSNHVRIVEYLIQDLHLKDLNQPDEKGRKPFLLAAERGHVEMIEKLTFLNLHTSEKDKGGNTALHLAAKHGHSPAVQVLLAQWQDINEMNELNISSLQIATRNGHASLVNFLLSENVDLHQKVEPKESPLHLVVINNHITVVNSLLSAQHDIDILNQKQQTPLHVAADRGNVELVETLLKAGCDLKAVDKQGKTALAVASRSNHSLVVGMLIKAERYYAWREEHHESIRDPSTGFTLTFKQDHSLETRHIRTLLWDLAYHQLKANEWQRLARSWNFTDDQIRAIEEQWSGNESFREHGHRALLIWLHGTLMTQGDPAKQLYEELVHAGFPKLAEKTRHFKSKTDSNSKKCVVS

SEQ ID NO: 22275 - protein, 275 aa, Homo sapiens
MPRPRRCEWLPSPLQALRITHPVTLPCPPPPSEPLATMATSKLPVVPGEEENTILMAKERLEALRTAFESGDLPQAASHLQELLASTESIRLEVGVTGESGAGKSSLINALRGLEAEDPGAALTGVMETTMQPSPYPHPQFPDVTLWDLPGAGSPGCPADKYLKQVDFSRYDFFLLVSPRRCGAVETRLAAEILCQGKKFYFVRTKVDEDLAATRTQRPSGFREAAVLQEIRDHCAERLREAGVADPRIFLVSNLSPARYDFPTLVSTWEHDLPS

SEQ ID NO: 22276 - protein, 333 aa, Homo sapiens
MGPLPAPSCTQRITWKGLLLTASLLNFWNPPTTAEVTIEAQPPKVSEGKDVLLLVHNLPQNLPGYFWYKGEMTDLYHYIISYIVDGKIIIYGPAYSGRETVYSNASLLIQNVTRKDAGTYTLHIIKRGDETREEIRHFTFTLYLETPKPYISSSNLNPREAMEAVRLICDPETLDASYLWWMNGQSLPVTHRLQLSKTNRTLYLFGVTKYIAGPYECEIRNPVSASRSDPVTLNLLHGPDLPRIYPSFTYYRSGENLDLSCFTESNPPAEYFWTINGKFQQSGQKLFIPQITRNHSGLYACSVHNSATGKEISKSMTVKVSGPCHGDLTESQS

SEQ ID NO: 22277 - protein, 512 aa, Homo sapiens
MDQPAGLQVDYVFRGVEHAVRVMVSGQVLELEVEDRMTADQWRGEFDAGFIEDLTHKTGNFKQFNIFCHMLESALTQSSESVTLDLLTYTDLESLRNRKMGGRPGSLAPRSAQLNSKRYLILIYSVEFDRIHYPLPLPYQGKPDPVVLQGIIRSLKEELGRLQGLDGQNTRDTRENEIWHLREQVSRLASEKRELEAQLGRSREEALAGRAARQEAEALRGLVRGLELELRQERGLGHRVAGRRGQDCRRLAKELEEAKASERSLRARLKTLTSELALYKRGRRTPPVQPPPTREDRASSSRERSASRGRGAARSSSRESGRGSRGRGRPARPSPSPTGGRALRFDPTAFVKAKERKQREIQMKQQQRNRLGSGGSGDGPSVSWSRQTQPPAALTGRGDAPNRSRNRSSSVDSFRSRCSSASSCSDLEDFSESLSRGGHRRRGKPPSPTPWSGSNMKSPPVERSHHQKSLANSGGWVPIKEYSSEHQAADMAEIDARLKALQEYMNRLDMRS

SEQ ID NO: 22278 - protein, 374 aa, Homo sapiens
MRSPAVPTPARGQLGVAFVLLPPHSEGARVFGALGPIGPSSPGLTLGGLAVSEHRLSNKLLAWSGVLEWQEKRRPYSDSTAKLKRTLPCQAYVNQGENLETDQWPQKLIMQLIPQQLLTTLGPLFRNSQLAQFHFTNRDCDSLKGLCRIMGNGFAGCMLFPHISPCEVRVLMLLYSSKKKIFMGLIPYDQSGFVSAIRQVITTRKQAVGPGGVNSGPVQIVNNKFLAWSGVMEWQEPRPEPNSRSKRWLPSHVYVNQGEILRTEQWPRKLYMQLIPQQLLTTLVPLFRNSRLVQFHFTKDLETLKSLCRIMDNGFRRKSSLASSPMTRATLSTASGVSLPTSSRSCSGTWSRSNSNEGWGGSGYPGLGPSRSHR

SEQ ID NO: 22279 - protein, 178 aa, Homo sapiens
GPTCSILPKNPLFPQNLSSQPCIKMEGDKSLTFSSYGLQWCLYELDKEEFQTFKELLKKKSSESTTCSIPQFEIENANVECLALLLHEYYGASLAWATSISIFENMNLRTLSEKARDDMKRHSPEDPEATMTDQGPSKEKVPGISQAVQQDSATAAETKEQESFAVLLRLQCSGYPQA

SEQ ID NO: 22280 - protein, 626 aa, Homo sapiens
MGIQAGEPDPPEEPLTSQASVPPHQLRLGSLHPHTPYHIRVACTSSQGPSSWTHWLPVETPEGVPLGPPENISATRNGSQAFVHWQEPRAPLQGTLLGYRLAYQGQDTPEVLMDIGLRQEVTLELQGDGSVSNLTVCVAAYTAAGDGPWSLPVPLEAWRPGQAQPVHQLVKEPSTPAFSWPWWYVLLGAVVAAACVLILALFLVHRRKKETRYGEVFEPTVERGELVVRYRVRKSYSRRTTEATLNSLGISEELKEKLRDVMVDRHKVALGKTLGEGEFGAVMEGQLNQDDSILKVAVKTMKIAICTRSELEDFLSEAVCMKEFDHPNVMRLIGVCFQGSERESFPAPVVILPFMKHGDLHSFLLYSRLGDQPVYLPTQMLVKFMADIASGMEYLSTKRFIHRDLAARNCMLNENMSVCVADFGLSKKIYNGDYYRQGRIAKMPVKWIAIESLADRVYTSKSDVWSFGVTMWEIATRGQTPYPGVENSEIYDYLRQGNRLKQPADCLDGLYALMSRCWELNPQDRPSFTELREDLENTLKALPPAQEPDEILYVNMDEGGGYPEPPGAAGGADPPTQPDPKDSCSCLTAAEVHPAGRYVLCPSTTPSPAQPADRGSPAAPGQEDGA

SEQ ID NO: 22281 - protein, 616 aa, Homo sapiens
MGLLTFRDVAIEFSLEEWQCLDTAQKNLYRNVMLENYRNLAFLGIAVSKPDLIICLEKEKEPWNMKRDEMVDEPPGICPHFAQDIWPEQGVEDSFQKVILRRFEKCGHENLQLRKGCKSVDECKVHKEGYNGLNQCFTTTQGKASQCGKYLKVFYKFINLNRYKIRHTRKKPFKCKNCVKSFCMFSHKTQHKSIYTTEKSYKCKECGKTFNWSSTLTNHKKTHTEEKPYKCEEYGKAFNQSSNYTTHKVTHTGEKPYKCEECGKAFSQSSTLTIHKRIHTGEKPCKCEECGKAFSQPSALTIHKRMHIGEKPYKCEECGKAFVWSSTLTRHKRLHSGEKPYKCEECAKAFSQFGHLTTHRIIHTGEKPYKCEECGKAFIWPSTLTKHKRIHTGEKPYKCEECGKAFHRSSNLTKHKIIHTGEKPYKCEECGKAFIWSSNLTEHKKIHTREKPYKCEECSKAFSRSSALTTHKRMHTGEKPYKCEECGKAFSQSSTLTAHKIIHTGEKPYKCEECGKAFILSSTLSKHKRIHTGEKPYKCEECGKTFNQSSNLSTHKIIHTGEKPYKCEECGKAFNRSSNLSTHKIIHTGEKPYKCDECGKSFIWSSTLFKHKRIHT

SEQ ID NO: 22282 - protein, 453 aa, Homo sapiens
MQPTYKMAEKQKALFTRSGGGTEGEQEMEEEVGETPVPNIMETAFYFEQAGVGLSSDESFRIFLAMKQLVEQQPIHTCRFWGKILGIKRSYLVAEVEFREGEEEAEEEEVEEMTEGGEVMEAHGEEEGEEDEEKAVDIVPKSVWKPPPVIPKEESRSGANKYLYFVCNEPGLPWTRLPHVTPAQIVNARKIKKFFTGYLDTPVVSYPPFPGNEANYLRAQIARISAATQVSPLGFYQFSEEEGDEEEEGGAGRDSYEENPDFEGIPVLELVDSMANWVHHTQHILPQGRCTWVNPLQKTEEEEDLGEEEEKADEGPEEVEQEVGPPLLTPLSEDAEIMHLAPWTTRLSCSLCPQYSVAVVRSNLWPGAYAYASGKKFENIYIGWGHKYSPESFNPALPAPIQQEYPSGPEIMEMSDPTVEEEQALKAAQEQALGATEEEEEGEEEEEGEETDD

SEQ ID NO: 22283 - protein, 160 aa, Homo sapiens
MSSHGNSLFLRESGQRLGRVGWLQRLQESLQQRALRTRLRLQTMTLEHVLRFLRRNAFILLTVSAVVIGVSLAFALRPYQLTYRQIKYFSFPGELLMRMLQMLVLPLIVSSLVTGMASLDNKATGRMGMRAAVYYMVTTIIAVFIGILMVTIIHPGKGSK

SEQ ID NO: 22284 - protein, 983 aa, Homo sapiens
MTEHKMSVEEVCRKYNTDCVQGLTHSKAQEILARDGPNALTPPPTTPEWVKFCRQLFGGFSILLWIGAILCFLAYGIQAGTEDDPSGDNLYLGIVLAAVVIITGCFSYYQEAKSSKIMESFKNMVPQQALVIREGEKMQVNAEEVVVGDLVEIKGGDRVPADLRIISAHGCKVDNSSLTGESEPQTRSPDCTHDNPLETRNITFFSTNCVEGTARGVVVATGDRTVMGRIATLASGLEVGKTPIAIEIEHFIQLITGVAVFLGVSFFILSLILGYTWLEAVIFLIGIIVANVPEGLLATVTVCLTLTAKRMARKNCLVKNLEAVETLGSTSTICSDKTGTLTQNRMTVAHMWFDNQIHEADTTEDQSGTSFDKSSHTWVALSHIAGLCNRAVFKGGQDNIPVLKRDVAGDASESALLKCIELSSGSVKLMRERNKKVAEIPFNSTNKYQLSIHETEDPNDNRYLLVMKGAPERILDRCSTILLQGKEQPLDEEMKEAFQNAYLELGGLGERVLGFCHYYLPEEQFPKGFAFDCDDVNFTTDNLCFVGLMSMIDPPRAAVPDAVGKCRSAGIKVIMVTGDHPITAKAIAKGVGIISEGNETVEDIAARLNIPVSQVNPRDAKACVIHGTDLKDFTSEQIDEILQNHTEIVFARTSPQQKLIIVEGCQRQGAIVAVTGDGVNDSPALKKADIGVAMGIAGSDVSKQAADMILLDDNFASIVTGVEEGRLIFDNLKKSIAYTLTSNIPEITPFLLFIMANIPLPLGTITILCIDLGTDMVPAISLAYEAAESDIMKRQPRNPRTDKLVNERLISMAYGQIGMIQALGGFFSYFVILAENGFLPGNLVGIRLNWDDRTVNDLEDSYGQQWTYEQRKVVEFTCHTAFFVSIVVVQWADLIICKTRRNSVFQQGMKNKILIFGLFEETALAAFLSYCPGMDVALRMYPLKPSWWFCAFPYSFLIFVYDEIRKLILRRNPGGWVEKETYY

SEQ ID NO: 22285 - protein, 171 aa, Homo sapiens
GVIRSVKKDGEWKVLIMDHPSMRILSSCCKMSDILAEGITIVEDINKRREPIPSLEAIYLLSPTEKSVQALIKDFQGTPTFTYKAAHIFFTDTCPEPLFSELGRSRLAKVVKTLKEIHLAFLPYEAQGPRGHSPVGPRRPGQAERLQGRHSQSGRGPRENPLPAADNGPGS

SEQ ID NO: 22286 - protein, 622 aa, Homo sapiens
MGSLTFRDVAIQFSLEEWQCLDTAQQNLYRNVMLENYRNLVFLGIAAPKPDLIIFLEQGKEPWNMKRHELVKEPPVICSHFAQDLWPEQGREDSFQKVILRRYEKCGHENLQLKIGCTNVDECKVHKKGYNKLNQSLTTTQSKVFQCGKYANIFHKCSNSKRHKIRHTGKKLLKCKEYVRSFCMLSHLSQHKRIYTRENSYKSEEHGKAFNWSSALTYKRIHTGEKPCKCEECGKAFSKFSILTKHKVIHTGEKHYKCEECGKAFTRSSSLIEHKRSHAGEKPYKCEECGKAFSKASTLTAHKTIHAGEKPYKCEECGKAFNRSSNLMEHKRIHTGEKPCKCEECGKAFGNFSTLTKHKVIHTGEKPYKCEECGKAFSWPSSLTEHKRIHAGDKPYKCEECGKTFKWSSTLTKHKIIHTGEKPYKCEECGKAFTTFSSLTKHKVIHTGEKHYKCEECGKVFSWSSSLTTHKAIHAGEKLYKCEECGKAFKWSSNLMEHKRIHTGEKPYKCEECGKAFSKVANLTKHKVIHTGEKQYKCEECGKAFIWSSRLSEHKRIHTGEKPYKCEECGKAFSWVSVLNKHKKIHAGKKFYKCEECGKDFNQSSHLTTHKRIHTGGKTLQM

SEQ ID NO: 22287 - protein, 732 aa, Homo sapiens
TCCSRPPPSLSLWTVMKSGPEIVKAGLRSFFESASEDIEKMVENLRLGKVSQARTQVKGVGQNLTYTTVALLPVLTTLFQHIAQHQFGDDVILDDVQVSCYRTLCSIYSLGTTKNTYVEKLRPALGECLARLAAAMPVAFLEPQLNEYNACSVYTTKSPRERAILGLPNSVEEMCPDIPVLERLMADIGGLAESGARYTEMPHVIEITLPMLCSYLPRWWERGPEAPPSALPAGAPPPCTAVTSDHLNSLLGNILRIIVNNLGIDEASWMKRLAVFAQPIVSRARPELLQSHFIPTIGRLRKRAGKVVSEEEQLRLEAKAEAQEGELLVRDEFSVLCRDLYALYPLLIRYVDNNRAQWLTEPNPSAEELFRMVGEIFIYWSKSHNFKREEQNFVVQNEINNMSFLTADNKSKMAKAGDIQSGGSDQERTKKKRRGDRYSVQTSLIVATLKKMLPIGLNMCAPTDQDLITLAKTRYALKDTDEEVREFLHNNLHLQGKVEGSPSLRWQMALYRGVPGREEDADDPEKIVRRVQEVSAVLYYLDQTEHPYKSKKAVWHKLLSKQRRRAVVACFRMTPLYNLPTHRACNMFLESYKAAWILTEDHSFEDRMIDDLSKAGEQEEEEEEVEEKKPDPLHQLVLHFSRTALTEKSKLDEDYLYMAYADIMAKSCHLEEGGENGEAEEEVEVSFEEKQMEKQRLLYQQARLHTRGAAEMVLQMISACKGETGAMVSSTL

SEQ ID NO: 22288 - protein, 409 aa, Homo sapiens
MALRPEDPSSGFRHSNVVAFINEKMARHTKGPEFYLENISLSWEKVEDKLRAILEDSEVPSEVKEACTWGSLALGVRFAHRQAQLQRHRVRWLHGFAKLHKSAAQALASDLKKLREQQETERKEAASRLRMAQTSLVEVQKERDKELVSPHEWEQGAGWPGLATAGGVCTEGAAEEEEEAAVAAAGAAGGKGAEEEQRDVEVVAAPVEAMAPPVEAGAAPMETQFPHVEARAASMETTEKLERILLQLLGDADQEKYTYWGQKEGDLRSVETATSYFSGTTNPWSRASSEPLPVQLPASYSYSYSSPFSSFSDIPTISPPQATVTAPVPPQLPSDWEAFDTSLWSDGGPHRIDHQEHPRDRRYSEPHQQRPPVYRRPGDWDCPWCNAVNFSRRDTCFDCGKGIWLQKPH

SEQ ID NO: 22289 - protein, 865 aa, Homo sapiens
KSKGNNVFVVHKPSAVPSREGSESGPGPSSGSPSEESPPGPGGGLEDALPFPAALLRVPAEAPSDPRSASGEDDPCAPKKVKVDCDSFLCQNPGEPGLQEAQKAGGLPADASPLFRQLFLKSQEPLVSHEQMQVFQMITKSQRIFSHAQVAAVSSQLPAPEGKPAALRPLQGPWPQQPPPLAPAVDSLHAGPGNPEAEGSPARRRKTTPGVPREASPGSTRRDAKGGLKVAAVPTPLAAPSLDPSRNPDISSLAKQLRSSKGTLDLEDIFPSTGQRQTQLGGEEPPGASLPGKQAPAENGAASRITKGEKGPACSRGGGYRLLGNPRAPRFSGFRKEKAKMDMCCAASPSQVAMASFSSAGPPADPSKSKLTIFSRIQGGNIYRLPHPVKEENVAGRGNQQNGSPTDWTKPRSTFVCKNCSQMFYTEKGLSSHMCFHSDQWPSPRGKQEPQGQEKDGEERDSKESSQQRKRKKRPPPSTAGEPGPAGCHQSRLRSPMFLVDCLLKGLFQCSPYTPPPMLSPIREGSGVYFNTLCSTSTQASPDQLISSMLDQVDGSFGICVVKDDTKISIEPHINIGSRFQAEIPELQERSLAGTDEHVASLVWKPWGDMMISSETQDRVTELCNVACSSVMPGGGTNLELALHCLHEAQGNVQVALETLLLRGPHKPRTHLLADYRYTGSDVWTPIEKRLFKKAFYAHKKDFYLIHKMIQTKTVAQCVEYYYIWKKMIKFDCGRAPGLEKRVKREPEEVERTEEKVPCSPRERPSHHPTPKLKTKSYRRESILSSSPNAGSKRTPELLGSAESQGIFPCRECERVFDKIKSRNAHMKRHRLQDHVEPIIRVKWPVKPFQLKEEELGADIGPLQW

SEQ ID NO: 22290 - protein, 122 aa, Homo sapiens
MTNTKGKRRGTRYMFSRPFRKHGVVPLATYMRIYKKGDIVDIKGMGTVQKGMPHKCYHGKTGRVYNVTQHAVGIVVNKQVKGKILAKRINVRIEHIKHSKSRDSFLKRVKENDQKKKEAKEK

SEQ ID NO: 22291 - protein, 413 aa, Homo sapiens
MASCAEPSEPSAPLPAGVPPLEDFEVLDGVEDAEGEEEEEEEEEEEDDLSELPPLEDMGQPPAEEAEQPGALAREFLAAMEPEPAPAPAPEEWLDILGNGLLRKKTLVPGPPGSSRPVKGQVVTVHLQTSLENGTRVQEEPELVFTLGDCDVIQALDLSVPLMDVGETAMVTADSKYCYGPQGSRSPYIPPHAALCLEVTLKTAVDGPDLEMLTGQERVALANRKRECGNAHYQRADFVLAANSYDLAIKAITSSAKVDMTFEEEAQLLQLKVKCLNNLAASQLKLDHYRAALRSCSLVLEHQPDNIKALFRKGKVLAQQGEYSEAIPILRAALKLEPSNKTIHAELSKLVKKHAAQRSTETALYRKMLGNPSRLPAKCPGKGAWSIPWKWLFGATAVALGGVALSVVIAARN

SEQ ID NO: 22292 - protein, 422 aa, Homo sapiens
MSSHYTEDLLPEQCMQDSFQKVILRRYGSCGLEDLHLRKDGENVGECKDQKEIYNGLNQCLSTLPSKIFPYNKCVKVFSKSSNLNRENIRHTTEKLFKCMQCGKVFKSHSGLSYHKIIHTEEKLCICEECGKTFKWFSYLTKHKRIHTGEKPYKCEECGKAFNWCSSLTKHKRIHTGEKPYKCEECGKAFHWCSPFVRHKKIHTGEKPYTCEDCGRAFNRHSHLTKHKTIHTGKKPYKCKECGKAFNHCSLLTIHERTHTGEKPYKCEECGKAFNSSSILTEHKVIHSGEKPYKCEKCDKVFKRFSYLTKHKRIHTGEKPYKCEECGKAFNWSSILTEHKRIHTGEKPYNCEECGKAFNRCSHLTRHKKIHTAVKRYKCEECGKAFKRCSHLNEHKRVQRGEKSCKYKKCGEAFNHCSNLTT

SEQ ID NO: 22293 - protein, 163 aa, Homo sapiens
MAVKKIAIFGATGQTGLTTLAQAVQAGYEVTVLVRDSSRLPSEGPRPAHVVVGDVLQAADVDKTVAGQDAVIVLLGTRNDLSPTTVMSEGARNIVAAMKAHGVDKVVACTSGDQPLTGAYTVTLDGRGPSRVISKHDLGHFMLRCLTTDEYDGHSTYPSHQYQ

SEQ ID NO: 22294 - protein, 73 aa, Homo sapiens
KDQVSKDKAFQTMATMSSAQLISAPSLQAKLGPTGPQVVQASELFQFWSGGSGPPWNVPEKKLLPRSPPADFP

SEQ ID NO: 22295 - protein, 233 aa, Homo sapiens
MKKHEMVANPSVTCSHFARDLWPEQSIKDSFQKVTLRRYENYGHDNLQFKKGCESVDECKVHKRGYNGLNQYLTTTQSKIFQCDKYVKVIHKFSNSNRHKIRHTGKKPFKCIECGKAFNQSSTLTTHKKIHTGEKPFKCEECGKAFNWSSHLTTHKRIHTGEKRYKCEDCGKAFSRFSYLTAHKIIHSGEKPYKCEECGKAFKRSSNLTTHKIIHTGEKPYKCEECGKAFKRS

SEQ ID NO: 22296 - protein, 261 aa, Homo sapiens
FLTLSVTWIGAAPLILSRIVGGWECEKHSQPWQVLVASRGRAVCGGVLVHPQWVLTAAHCIRNKSVILLGRHSLFHPEDTGQVFQVSHSFPHPLYDMSLLKNRFLRPGDDSSHDLMLLRLSEPAELTDAVKVMDLPTQEPALGTTCYASGWGSIEPEECTPGPDVLTPKKLQCVDLHVISNDVCAQVHPQKVTKFMLCAGRWTGGKSTCSGDSGGPLVCNGVLQGITSWGSEPCALPERPSLYTKVVHYRKWIKDTIVANP

SEQ ID NO: 22297 - protein, 275 aa, Homo sapiens
MRRLTVDDFEIGRPLGKGKFGNVYLARLKESHFIVALKVLFKSQIEKEGLEHQLRREIEIQAHLQHPNILRLYNYFHDARRVYLILEYAPRGELYKELQKSEKLDEQRTATIIEELADALTYCHDKKVIHRDIKPENLLLGFRGEVKIADFGWSVHTPSLRRKTMCGTLDYLPPEMIEGRTYDEKVDLWCIGVLCYELLVGYPPFESASHSETYRRILKVDVRFPLSMPLGARDLISRLLRYQPLERLPLAQILKHPWVQAHSRRVLPPCAQMAS

SEQ ID NO: 22298 - protein, 325 aa, Homo sapiens
MSTAREQPIFSTRAHVFQIDPATKRNWIPAGKHALTVSYFYDATRNVYRIISIGGAKAIINSTVTPNMTFTKTSQKFGQWADSRANTVYGLGFASEQHLTQVPPSPLVSANGPGEEKLFRSQSADAPGPTERERLKKMLSEGSVGEVQWEAEFFALQDSNNKLAGALREANAAAAQWRQQLEAQRAEAERLRQRVAELEAQAASEVTPTGEKEGLGQGQSLEQLEALVQTKDQEIQTLKSQTGGPREALEAAEREETQQKVQDLETRNAELEHQLRAMERSLEEARAERERARAEVGRAAQLLDVSLFELSELREGLARLAEAAP

SEQ ID NO: 22299 - protein, 801 aa, Homo sapiens
MQRSIMSFFHPKKEGKAKKPEKEASNSSRETEPPPKAALKEWNGVVSESDSPVKRPGRKAARVLGSEGEEEDEALSPAKGQKPALDCSQVSPPRPATSPENNASLSDTSPMDSSPSGIPKRRTARKQLPKRTIQEVLEEQSEDEDREAKRKKEEEEEETPKESLTEAEVATEKEGEDGDQPTTPPKPLKTSKAETPTESVSEPEVATKQELQEEEEQTKPPRRAPKTLSSFFTPRKPAVKKEVKEEEPGAPGKEGAAEGPLDPSGYNPAKNNYHPVEDACWKPGQKVPYLAVARTFEKIEEVSARLRMVETLSNLLRSVVALSPPDLLPVLYLSLNHLGPPQQGLELGVGDGVLLKAVAQATGRQLESVRAEAAEKGDVGLVAENSRSTQRLMLPPPPLTASGVFSKFRDIARLTGSASTAKKIDIIKGLFVACRHSEARFIARSLSGRLRLGLAEQSVLAALSQAVSLTPPGQEFPPAMVDAGKGKTAEARKTWLEEQGMILKQTFCEVPDLDRIIPVLLEHGLERLPEHCKLSPGIPLKPMLAHPTRGISEVLKRFEEAAFTCEYKYDGQRAQIHALEGGEVKIFSRNQEDNTGKYPDIISRIPKIKLPSVTSFILDTEAVAWDREKKQIQPFQVLTTRKRKEVDASEIQVQVCLYAFDLIYLNGESLVREPLSRRRQLLRENFVETEGEFVFATSLDTKDIEQIAEFLEQSVKDSCEGLMVKTLDVDATYEIAKRSHNWLKLKKDYLDGVGDTLDLVVIGAYLGRGKRAGRYGGFLLASYDEDSEELQAICKVLGNWG

SEQ ID NO: 22300 - protein, 428 aa, Homo sapiens
MGPLSAPPCTQHITWKGLLLTASLLNFWNLPITAQVTIEALPPKVSEGKDVLLLVHNLPQNLAGYIWYKGQLMDLYHYITSYVVDGQINIYGPAYTGRETVYSNASLLIQNVTREDAGSYTLHIIKRGDRTRGVTGYFTFNLYLETPKPSISSSNLNPREAMEAVILTCDPAASDTSYLWWMNGQSLPMTHRLQLSKTNRTLFIFGVTKYIAGPYECEIRNPVSASHSDPVTLNLLLKLPKPYITINNSKPRENKDVLAFTCEPKSENYTYIWWLNGQSLPVSPRVKRPIENRILILPSVTRNETGPYECEIRDRDGGMRSDPVTLNVLYGPDLPSIYPSFTYYRSGENLYLSCFAESNPPAEYFWTINGKFQQSGQKLSIPQITTKHRGLYTCSVRNSATGKESSKSMTVEVSAPSGIGRLPLLNPI

SEQ ID NO: 22301 - protein, 325 aa, Homo sapiens
MDDLKYGVYPLKEASGCPGAERNLLVYSYFEKSRSVAQAGMQWRSLSWLTVISASQVQVILVPQPPELLGLQETLTFRDVAIEFSLEEWECLNPAQQNLYMNVMLENYKNLVFLGVAVSKQDPVTCLEQEKEPWNMKRHEMVDEPPAMCSYFTKDLWPEQDIKDSFQQVILRRYGKCEHENLQLRKGSASVDEYKVHKEGYNELNQCLTTTQSKIFPCDKYVKVFHKFLNANRHKTRHTGKKPFKCKKCGKSFCMLLHLSQHKRIHIRENSYQCEECGKAFKWFSTLTRHKRIHTGEKPFKCEECGKAFKQSSTLTTHKIIHTGE

SEQ ID NO: 22302 - protein, 452 aa, Homo sapiens
MGTPKPRILPWLVSQLDLGQLEGVAWVNKSRTRFRIPWKHGLRQDAQQEDFGIFQAWAEATGAYVPGRDKPDLPTWKRNFRSALNRKEGLRLAEDRSKDPHDPHKIYEFVNSGVGDFSQPDTSPDTNGGGSTSDTQEDILDELLGNMVLAPLPDPGPPSLAVAPEPCPQPLRSPSLDNPTPFPNLGPSENPLKRLLVPGEEWEFEVTAFYRGRQVFQQTISCPEGLRLVGSEVGDRTLPGWPVTLPDPGMSLTDRGVMSYVRHVLSCLGGGLALWRAGQWLWAQRLGHCHTYWAVSEELLPNSGHGPDGEVPKDKEGGVFDLGPFIVGSWAPRSDYLHGRKRTLTTLCPLVLCGGVMAPGPAVDQEARDGQGCAHVPQGLGRNGPGRGCLLPGEYCGPAHFQQPPTLPHLRPVQGLPAGLGGGHGFPGPWGELSPRSSWCASNPPVPHHLNQ

SEQ ID NO: 22303 - protein, 662 aa, Homo sapiens
MNLTEDYMVFEDVAIHFSQEEWGILNDVQRHLHSDVMLENFALLSSVGCWHGAKDEEAPSKQCVSVGVSQVTTLKPALSTQKAQPCETCSSLLKDILHLAEHDGTHPKRTAKLYLHQKEHLREKLTRSDEGRPSFVNDSVHLAKRNLTCMQGGKDFTGDSDLQQQALHSGWKPHRDTHGVEAFQSGQNNYSCTQCGKDFCHQHTLFEHQKIHTEERPYECSECGKLFRYNSDLIKHQRNHTGERPYKCSECGKAFSLKYNVVQHQKIHTGERPYECSECGKAFLRKSHLLQHQRIHTRPRPYVCSECGKAFLTQAHLVGHQKIHTGERPYGCNECGKYFMYSSALIRHQKVHTGERPFYCCECGKFFMDSCTLIIHQRVHTGEKPYECNECGKFFRYRSTLIRHQKVHTGEKPYECSECGKFFMDTSTLIIHQRVHTGEKPYECNKCGKFFRYCFTLNRHQRVHSGERPYECSECGKFFVDSCTLKSHQRVHTGERPFECSICGKSFRCRSTLDTHQRIHTGERPYECSECGKFFRHNSNHIRHRRNHFGERSFECTECGRVFSQNSHLIRHQKVHTRERTYKCSKCGKFFMDSSTLISHERVHTGEKPYECSECGKVFRYNSSLIKHRRIHTGERPYQCSECGRVFNQNSHLIQHQKVHTR

SEQ ID NO: 22304 - protein, 194 aa, Homo sapiens
MQETIRNLDCIRMIWEEQNTEDQYKNPRRNLSHIRVDSGHKPHEYQEYGEKPHTHKQRGKAFSYHHSFQSRGRPHTGKKRYECKECGKTFSSRRNLRRHMVVQGGNRPYKCKLCGKAFFWPSLLRMHERTHTGEKPYECKQCSKAFPFYSSYRRHERMHTGEKPYECKQCSKALPDSSSYIRHERTHTGEKPYT

SEQ ID NO: 22305 - protein, 303 aa, Homo sapiens
MSSTLPALLCVGLCLSQRISAQQQTLPKPFIWAEPHFMVPKEKQVTICCQGNYGAVEYQLHFEGSLFAVDRPKPPERINKVQFYIPDMNSRMAGQYSCIYRVGELWSEPSNLLDLVVTEMYDTPTLSVHPGPEVISGEKVTFYCRLDTATSMFLLLKEGRSSHVQRGYGKVQAEFPLGPVTTAHRGTYRCFGSYNNHAWSFPSEPVKLLVTGDIENTSLAPEDPTFPDTWGTYLLTTETGLQKDHALWDHTAQNLLRMGLAFLVLVALVWFLVEDWLSRKRTRERASRASTWEGRRRLNTQTL

SEQ ID NO: 22306 - protein, 431 aa, Homo sapiens
MSSLGCWCGVEDEAAPSKQSIYIQRETQVRTPVTGVSPKKAHPCEMCGPILGDILHVADHQGTHHKQKLHRCEAWGNKLYDSGNFHQHQNEHIGEKPYRGSVEEALFVKRCKLHVSGESSVFSESGKDFLPRSGLLQQEASHTGEKSNSKTECVSPFQCGGAHYSHGDSMKHFSTKHILSQHQRLLPREECYVCCECGKSFSKYVSFSNHQRVHSGKRPYECGECEKSFSQKSSLIQHQQFHTGGKPYGCEECGKYFSLEGYLRRHQKVHAGKGPYECGECGKSFSSNVNLKSHQRIHTGERPYKCGECEKSFSRKPSLSYHQRIHTEVRPYKCGECGKSYISKGHLRIHQRMHTGERPYKCGDCGKSFNEKGHLRSHQRVHTTERPYKCGECGKCFSHKGNLILHQHGHTRKRPYMCWECGKLFKKKSHL

SEQ ID NO: 22307 - protein, 1460 aa, Homo sapiens
MPAPGALILLAAVSASGCLASPAHPDGFALGRAPLAPPYAVVLISCSGLLAFIFLLLTCLCCKRGDVGFKEFENPEGEDCSGEYTPPAEETSSSQSLPDVYILPLAEVSLPMPAPQPSHSDMTTPLGLSRQHLSYLQEIGSGWFGKVILGEIFSDYTPAQVVVKELRASAGPLEQRKFISEAQPYRSLQHPNVLQCLGLCVETLPFLLIMEFCQLGDLKRYLRAQRPPEGLSPELPPRDLRTLQRMGLEIARGLAHLHSHNYVHSDLALRNCLLTSDLTVRIGDYGLAHSNYKEDYYLTPERLWIPLRWAAPELLGELHGTFMVVDQSRESNIWSLGVTLWELFEFGAQPYRHLSDEEVLAFVVRQQHVKLARPRLKLPYADYWYDILQSCWRPPAQRPSASDLQLQLTYLLSERPPRPPPPPPPPRDGPFPWPWPPAHSAPRPGTLSSPFPLLDGFPGADPDDVLTVTESSRGLNLECLWEKARRGAGRGGGAPAWQPASAPPAPHANPSNPFYEALSTPSVLPVISARSPSVSSEYYIRLEEHGSPPEPLFPNDWDPLDPGVPAPQAPQAPSEVPQLVSETWASPLFPAPRPFPAQSSASGSFLLSGWDPEGRGAGETLAGDPAEVLGERGTAPWVEEEEEEEEGSSPGEDSSSLGGGPSRRGPLPCPLCSREGACSCLPLERGDAVAGWGGHPALGCPHPPEDDSSLRAERGSLADLPMAPPASAPPEFLDPLMGAAAPQYPGRGPPPAPPPPPPPPRAPADPAASPDPPSAVASPGSGLSSPGPKPGDSGYETETPFSPEGAFPGGGAAEEEGVPRPRAPPEPPDPGAPRPPPDPGPLPLPGPREKPTFVVQVSTEQLLMSLREDVTRNLLGEKGATARETGPRKAGRGPGNREKVPGLNRDPTVLGNGKQAPSLSLPVNGVTVLENGDQRAPGIEEKAAENGALGSPEREEKVLENGELTPPRREEKALENGELRSPEAGEKVLVNGGLTPPKSEDKVSENGGLRFPRNTERPPETGPWRAPGPWEKTPESWGPAPTIGEPAPETSLERAPAPSAVVSSRNGGETAPGPLGPAPKNGTLEPGTERRAPETGGAPRAPGAGRLDLGSGGRAPVGTGTAPGGGPGSGVDAKAGWVDNTRPQPPPPPLPPPPEAQPRRLEPAPPRARPEVAPEGEPGAPDSRAGGDTALSGDGDPPKPERKGPEMPRLFLDLGPPQGNSEQIKARLSRLSLALPPLTLTPFPGPGPRRPPWEGADAGAAGGEAGGAGAPGPAEEDGEDEDEDEEEDEEAAAPGAAAGPRGPGRARAAPVPVVVSSADADAARPLRGLLKSPRGADEPEDSELERKRKMVSFHGDVTVYLFDQETPTNELSVQAPPEGDTDPSTPPAPPTPPHPATPGDGFPSNDSGFGGSFEWAEDFPLLPPPGPPLCFSRFSVSPALETPGPPARAPDARPAGPVEN

SEQ ID NO: 22308 - protein, 513 aa, Homo sapiens
MIEDSGKRGNTMAERRQLFAEMRAQDLDRIRLSTYRTACKLRFVQKKCNLHLVDIWNVIEALRENALNNLDPNTELNVSRLEAVLSTIFYQLNKRMPTTHQIHVEQSISLLLNFLLAAFDPEGHGKISVFAVKMALATLCGGKIMDKLRYIFSMISDSSGVMVYGRYDQFLREVLKLPTAVFEGPSFGYTEQSARSCFSQQKKVTLNGFLDTLMSDPPPQCLVWLPLLHRLANVENVFHPVECSYCHSESMMGFRYRCQQCHNYQLCQDCFWRGHAGGSHSNQHQMKEYTSWKSPAKKLTNALSKSLSCASSREPLHPMFPDQPEKPLNLAHIVDTWPPRPVTSMNDTLFSHSVPSSGSPFITRSMLESSNRLDEEHRLIARYAARLAAESSSSQPPQQRSAPDISFTIDANKQQRQLIAELENKNREILQEIQRLRLEHEQASQPTPEKAQQNPTLLAELRLLRQRKDELEQRMSALQESRRELMVQLEGLMKLLKEEELKQGVSYVPYCRS

SEQ ID NO: 22309 - protein, 103 aa, Homo sapiens
MVLEAHDAQGDVPVTVTVHDFPGKKLVLSSEKTVLTPATNHMGNVTFTIPANREFKSEKGRNKFVTVQATFGTQVVEKVVLVSLQSGYLFIQTDKTIYTPGST

SEQ ID NO: 22310 - protein, 184 aa, Homo sapiens
MLPLEKAFASPRSSPAPPDLPTPGSAAGVQQEEPETIPERTPADLEFSRLRFREFVYQEAAGPHQTLARLHELCRQWLMPEARSKEQMLELLVLEQFLGILPDKVRPWVVAQYPESCKKAASLVEGLADVLEEPGMLLGSPAGSSSILSDGVYERHMDPLLLPGELASPSQALGAGEIPAPSET

SEQ ID NO: 22311 - protein, 209 aa, Homo sapiens
MSSPTTSSLDTPLPGNGPPQPGAPSSSPTVKEEGPEPWPGGPDPDVPGTDEASSACSTDWVIPDPEEEPERKRKKGPAPKMLGHELCRVCGDKASGFHYNVLSCEGCKGFFRRSVVRGGARRYACRGGGTCQMDAFMRRKCQQCRLRKCKEAGMREQCVLSEEQIRKKKIRKQQQESQSQSQSPVGPQGSSSSASGPGASPGGSEAGSQ

SEQ ID NO: 22312 - protein, 172 aa, Homo sapiens
MWVPVVFLTLSVTWIAPPLQVLVASRGRAVCGGVLVHPQWVLTAAHCIRNKSVILLGRHSLFHPEDTGQVFQVSHSFPHPLYDMSLLKNRFLRPGDDSSHDLMLLRLSEPAELTDAVKVMDLPTQEPALGTTCYASGWGSIEPEEFLTPKKLQCVDLHVISNDVCAQVHPQK

SEQ ID NO: 22313 - protein, 171 aa, Homo sapiens
MFVYTKQYGLGAQEEDAFVRCVSVLGNLADQLYYPCEHVAWAADARVLHVDSSRWWTLSTTLWALSLLLGVARSLWMLLKLRQRLRSPTAPFTSPLPRGKRRAMEAQMQSEALSLLSNLADLANAVHWLPRGVLWAGRFPPWLVGLMGTISSILSMYQAARAGGQAEATTP

SEQ ID NO: 22314 - protein, 399 aa, Homo sapiens
MPSPLGPPCLPVMDPETTLEEPETARLRFRGFCYQEVAGPREALARLRELCCQWLQPEAHSKEQMLEMLVLEQFLGTLPPEIQAWVRGQRPGSPEEAAALVEGLQHDPGQLLGWITAHVLKQEVLPAAQKTEEPLGSPHPSGTVESPGEGPQDTRIEGSVQLSCSVKEEPNVDGQEVAPSSPPLAAQSPEGNHGHQEPASTSFHPPRIQEEWGLLDRSQKELYWDAMLEKYGTVVSLGLPPHQPEAQAQSELGMLLTGTGVCRSLRSETRLEPAATPRKPYTCEQCGRGFDWKSVFVIHHRTHTSGPGVQSPGLATGESTEKPPQGEVAFPHHPRRSLTGPRSYPCEECGCSFSWKSQLVIHRKSHTGQRRHFCSDCGRAFDWKSQLVIHRKGHRPEVP

SEQ ID NO: 22315 - protein, 287 aa, Homo sapiens
MGTPKPRILPWLVSQLDLGQLEGVAWVNKSRTRFRIPWKHGLRQDAQQEDFGIFQAWAEATGAYVPGRDKPDLPTWKRNFRSALNRKEGLRLAEDRSKDPHDPHKIYEFVNSGVGDFSQPDTSPDTNGGGSTSDTQEDILDELLGNMVLAPLPDPGPPSLAVAPEPCPQPLRSPSLDNPTPFPNLGPSENPLKRLLVPGEEWEFEVTAFYRGRQVFQQTISCPEGLRLVGSEVGDRTLPGWPVTLPDPGMSLTDRGVMSYVRHVLSCLGGGLALWRAGQWLWAQRLG

SEQ ID NO: 22316 - protein, 836 aa, Homo sapiens
MATTGTPTADRGDAAATDDPAARFQVQKHSWDGLRSIIHGSRKYSGLIVNKAPHDFQFVQKTDESGPHSHRLYYLGMPYGSRENSLLYSEIPKKVRKEALLLLSWKQMLDHFQATPHHGVYSREEELLRERKRLGVFGITSYDFHSESGLFLFQASNSLFHCRDGGKNGFMVSPMKPLEIKTQCSGPRMDPKICPADPAFFSFINNSDLWVANIETGEERRLTFCHQGLSNVLDDPKSAGVATFVIQEEFDRFTGYWWCPTASWEGSEGLKTLRILYEEVDESEVEVIHVPSPALEERKTDSYRYPRTGSKNPKIALKLAEFQTDSQGKIVSTQEKELVQPFSSLFPKVEYIARAGWTRDGKYAWAMFLDRPQQWLQLVLLPPALFIPSTENEEQRLASARAVPRNVQPYVVYEEVTNVWINVHDIFYPFPQSEGEDELCFLRANECKTGFCHLYKVTAVLKSQGYDWSEPFSPGEDEFKCPIKEEIALTSGEWEVLARHGSKIWVNEETKLVYFQGTKDTPLEHHLYVVSYEAAGEIVRLTTPGFSHSCSMSQNFDMFVSHYSSVSTPPCVHVYKLSGPDDDPLHKQPRFWASMMEAASCPPDYVPPEIFHFHTRSDVRLYGMIYKPHALQPGKKHPTVLFVYGGPQVQLVNNSFKGIKYLRLNTLASLGYAVVVIDGRGSCQRGLRFEGALKNQMGQVEIEDQVEGLQFVAEKYGFIDLSRVAIHGWSYGGFLSLMGLIHKPQVFKVAIAGAPVTVWMAYDTGYTERYMDVPENNQHGYEAGSVALHVEKLPNEPNRLLILHGFLDENVHFFHTNFLVSQLIRAGKPYQLQEYL

SEQ ID NO: 22317 - protein, 618 aa, Homo sapiens
MASARKASRPMRDVFGDFSDVSLEDSTMEEIRNFQISRNLTKIAPGHSRFLKRNQTLDEKHLLLKENPVLGSGPRLASCRPPTTASRIRANAALMKLAQLETRIMNRKLQRNLSDTESDSMTADAGLPKRADRILSGGALELASQNTDKTSQNQARELPVTENNAQNAKVSRFLKKKQAPVENISPEAPAGKERTLQTPKQKEPARTFDSPDSDEEEMKVLLGSLMDSSREKNTNQGFSSANVSEEEERKLFSVPSQLRAFTVPSVELSSAKPSQTSHLPTSLAADRTLHSTRSRADYPQSHVSSDTASHTPSVSITGAFSNSVSLKMGHVKLVSSPGRSEAETVDEPVSEGADDSLDEFRINILSLDGLAPAVSENSDLEQEEESAQRQKTAGKIFRAEASTGQDAPRQAQARSWASQGKAASAEGDESEVSEHLSASSASAIQQDSTSSMQPPSEAPMVNTVSSAYSEDFENSPSLTASEPTAHSKESLDRTLDALSESSSSVKTDLPQTAESRKKSGRHVTRVLVKDTAVQTPDPAFTYEWTKVASMAAMGPALGGAYVDPTPIANHVISADAIEAAEPDAAVHPGQPAPARLPPALPGRGLLPLPHPGGSQRVH

SEQ ID NO: 22318 - protein, 176 aa, Homo sapiens
MSSPTTSSLDTPLPGNGPPQPGAPSSSPTVKEEGPEPWPGGPDPDVPGTDEASSACSTDWVIPDPEEEPERKRKKGPAPKMLGHELCRVCGDKASGFHYNVLSCEGCKGFFRRSVASFLKNRSGRRRFGNSSRSHSHSRSHLWGRRAAAAQPLGLGLPLVDLRQAARAPGKARVSS

SEQ ID NO: 22319 - protein, 812 aa, Homo sapiens
MGGRVFLVFLAFCVWLTLPGAETQDSRGCARWCPQDSSCVNATACRCNPGFSSFSEIITTPMETCDDINECATLSKVSCGKFSDCWNTEGSYDCVCSPGYEPVSGAKTFKNESENTCQDVDECQQNPRLCKSYGTCVNTLGSYTCQCLPGFKLKPEDPKLCTDVNECTSGQNPCHSSTHCLNNVGSYQCRCRPGWQPIPGSPNGPNNTVCEDVDECSSGQHQCDSSTVCFNTVGSYSCRCRPGWKPRHGIPNNQKDTVCEDMTFSTWTPPPGVHSQTLSRFFDKVQDLGRDYKPGLANNTIQSILQALDELLEAPGDLETLPRLQQHCVASHLLDGLEDVLRGLSKNLSNGLLNFSYPAGTELSLEVQKQVDRSVTLRQNQAVMQLDWNQAQKSGDPGMGKLLAEAPLVLEPEKQMLLHETHQGLLQDGSPILLSDVISAFLSNNDTQNLSSPVTFTFSHRSVIPRQKVLCVFWEHGQNGCGHWATTGCSTIGTRDTSTICRCTHLSSFAVLMAHYDVQEEDPVLTVITYMGLSVSLLCLLLAALTFLLCKAIQNTSTSLHLQLSLCLFLAHLLFLVAIDQTGHKVLCSIIAGTLHYLYLATLTWMLLEALYLFLTARNLTVVNYSSINRFMKKLMFPVGYGVPAVTVAISAASRPHLYGTPSRCWLQPEKGFIWGFLGPVCAIFSVNLVLFLVTLWILKNRLSSLNSEVSTLRNTRMLAFKATAQLFILGCTWCLGILQVGPAARVMAYLFTIINSLQGVFIFLVYCLLSQQVREQYGKWSKGIRKLKTESEMHTLSSSAKADTSKPSTVN

SEQ ID NO: 22320 - protein, 467 aa, Homo sapiens
MTHVLGTTAVAEVSGHLGKSLIKFCSGDLGPEGILPDTHLLDPLLKEASTAPLAQIPSKGMDDRLFYIYTSGTTGLPKAAIVVHSRYYRMAAFGHHAYRMQAADVLYDCLPLYHSAGNIIGVGQCLIYGLTVVLRKKFSASRFWDDCIKYNCTVVQYIGEICRYLLKQPVREAERRHRVRLAVGNGLRPAIWEEFTERFGVRQIGEFYGATECNCSIANMDGKVGSCGFNSRILPHVYPIRLVKVNEDTMELLRDAQGLCIPCQAGEPGLLVGQINQQDPLRRFDGYVSESATSKKIAHSVFSKGDSAYLSGDVLVMDELGYMYFRDRSGDTFRWRGENVSTTEVEGVLSRLLGQTDVAVYGVAVPGVEGKAGMAAVADPHSLLDPNAIYQELQKVLAPYARPIFLRLLPQVDTTGTFKIQKTRLQREGFDPRQTSDRLFFLDLKQGHYLPLNEAVYTRICSGAFAL

SEQ ID NO: 22321 - protein, 149 aa, Homo sapiens
MPRNEGLVILPRLVWSGTPGLSDPSMSASQSAGITGLGACIAMDTTRYSKWGGSSEEVPGGPWGRWVHWSRRPLFLALAVLVTTVLWAVILSILLSKASTERAALLDGHDLLRTNASKQTAALGALKEEVGDCHSCCSGTQAQLQTTRA

SEQ ID NO: 22322 - protein, 1462 aa, Homo sapiens
MYQPEDDNNSDVTSDDDMTRNRRESSPPHSVHSFSDRDWDRRGRSRDMEPRDRWSHTRNPRSRMPPRDLSLPVVAKTSFEMDREDDRDSRAYESRSQDAESYQNVVDLAEDRKPHNTIQDNMENYRKLLSLVQLAEDDGHSHMTQGHSSRSKRSAYPSTSRGLKTMPEAKKSTHRRGICEDESSHGVIMEKFIKDVSRSSKSGRARESSDRSQRFPRMSDDNWKDISLNKRESVIQQRVYEGNAFRGGFRFNSTLVSRKRVLERKRRYHFDTDGKGSIHDQKGCPRKKPFECGSEMRKAMSVSSLSSLSSPSFTESQPIDFGAMPYVCDECGRSFSVISEFVEHQIMHTRENLYEYGESFIHSVAVSEVQKSQVGGKRFECKDCGETFNKSAALAEHRKIHARGYLVECKNQECEEAFMPSPTFSELQKIYGKDKFYECRVCKETFLHSSALIEHQKIHFGDDKDNEREHERERERERGETFRPSPALNEFQKMYGKEKMYECKVCGETFLHSSSLKEHQKIHTRGNPFENKGKVCEETFIPGQSLKRRQKTYNKEKLCDFTDGRDAFMQSSELSEHQKIHSRKNLFEGRGYEKSVIHSGPFTESQKSHTITRPLESDEDEKAFTISSNPYENQKIPTKENVYEAKSYERSVIHSLASVEAQKSHSVAGPSKPKVMAESTIQSFDAINHQRVRAGGNTSEGREYSRSVIHSLVASKPPRSHNGNELVESNEKGESSIYISDLNDKRQKIPARENPCEGGSKNRNYEDSVIQSVFRAKPQKSVPGEGSGEFKKDGEFSVPSSNVREYQKARAKKKYIEHRSNETSVIHSLPFGEQTFRPRGMLYECQECGECFAHSSDLTEHQKIHDREKPSGSRNYEWSVIRSLAPTDPQTSYAQEQYAKEQARNKCKDFRQFFATSEDLNTNQKIYDQEKSHGEESQGENTDGEETHSEETHGQETIEDPVIQGSDMEDPQKDDPDDKIYECEDCGLGFVDLTDLTDHQKVHSRKCLVDSREYTHSVIHTHSISEYQRDYTGEQLYECPKCGESFIHSSFLFEHQRIHEQDQLYSMKGCDDGFIALLPMKPRRNRAAERNPALAGSAIRCLLCGQGFIHSSALNEHMRLHREDDLLEQSQMAEEAIIPGLALTEFQRSQTEERLFECAVCGESFVNPAELADHVTVHKNEPYEYGSSYTHTSFLTEPLKGAIPFYECKDCGKSFIHSTVLTKHKELHLEEEEEDEAAAAAAAAAQEVEANVHVPQVVLRIQGLNVEAAEPEVEAAEPEVEAAEPEVEAAEPNGEAEGPDGEAAEPIGEAGQPNGEAEQPNGDADEPDGAGIEDPEERAEEPEGKAEEPEGDADEPDGVGIEDPEEGEDQEIQVEEPYYDCHECTETFTSSTAFSEHLKTHASMIIFEPANAFGECSGYIERASTSTGGANQADEKYFKCDVCGQLFNDRLSLARHQNTHTG

SEQ ID NO: 22323 - protein, 152 aa, Homo sapiens
MNEQSEKNNSIQERHTDHSFPEKNCQIGQKQLQQIERQLKCLAFRNPGPQVADFNPETRQQKKKARMSKMNEYFSTKYKIMRKYDKSGRLICNDADLCDCLEKNCLGCFYPCPKCNSNKCGPECRCNRRWVYDAIVTESGEVISTLPFNVPD

SEQ ID NO: 22324 - protein, 195 aa, Homo sapiens
MWVPVVFLTLSVTWIGAAPLILSRIVGGWECEKHSQPWQVLVASRGRAVCGGVLVHPQWVLTAAHCIRKPGDDSSHDLMLLRLSEPAELTDAVKVMDLPTQEPALGTTCYASGWGSIEPEEFLTPKKLQCVDLHVISNDVCAQVHPQKVTKFMLCAGRWTGGKSTCSWVILITELTMPALPMVLHGSLVPWRGGV

SEQ ID NO: 22325 - protein, 145 aa, Homo sapiens
MALSQGLFTFKDVAIEFSQEEWECLDPAQRALYRDVMLENYRNLLSLDEDNIPPEDDISVGFTSKGLSPKENNKEELYHLVILERKESHGINNFDLKEVWENMPKFDSLWDYDVKNYKGMPLTCNKNLTHRKDQQHNKSSIHFSL

SEQ ID NO: 22326 - protein, 518 aa, Homo sapiens
MRKVKKLRLDKENTGSWRSFSLNSEGAERMATTGTPTADRGDAAATDDPAARFQVQKHSWDGLRSIIHGSRKYSGLIVNKAPHDFQFVQKTDESGPHSHRLYYLGMPYGSRENSLLYSEIPKKVRKEALLLLSWKQMLDHFQATPHHGVYSREEELLRERKRLGVFGITSYDFHSESGLFLFQASNSLFHCRDGGKNGFMVSPMKPLEIKTQCSGPRMDPKICPADPAFFSFINNSDLWVANIETGEERRLTFCHQGLSNVLDDPKSAGVATFVIQEEFDRFTGYWWCPTASWEGSEGLKTLRILYEEVDESEVEVIHVPSPALEERKTDSYRYPRTGSKNPKIALKLAEFQTDSQGKIVSTQEKELVQPFSSLFPKVEYIARAGWTRDGKYAWAMFLDRPQQWLQLVLLPPALFIPSTENEEQRLASARAVPRNVQPYVVYEEVTNVWINVHDIFYPFPQSEGEDELCFLRANECKTGFCHLYKVTAVLKSQGYDWSEPFSPGEGEQSLTNAVDSSR

SEQ ID NO: 22327 - protein, 182 aa, Homo sapiens
MKPGFSPRGGGFGGRGGFGDRGGRGGRGGFGGGRGRGGGFRGRGRGGGGGGGGGGGGGRGGGFHSGGNRGRGRGGKRGNQSGKNVMVEPHRHEGVFICRGKEDALVTKNLVPGESVYGEKRVSISEGDDKIEYRAWNPFRSKLAAAILGGVDQIHIKPGAKVLYLGAASGTTVSHVSDIVGP

SEQ ID NO: 22328 - protein, 625 aa, Homo sapiens
MASARKASRPMRDVFGDFSDVSLEDSTMEEIRNFQISRNLTKIAPGHSRFLKRNQTLDEKHLLLKENPVLGSGPRLASCRPPTTASRIRANAALMKLAQLETRIMNRKLQRNLSDTESDSMTADAGLPKRADRILSGGALELASQNTDKTSQNQARELPVTENNAQNAKVSRFLKKKQAPVENISPEAPAGKERTLQTPKQKEPARTFDSPDSDEEEMKVLLGSLMDSSREKNTNQGFSSANVSEEEERKLFSVPSQLRAFTVPSVELSSAKPSQTSHLPTSLAADRTLHSTRSRADYPQSHVSSDTASHTPSVSITGAFSNSVSLKMGHVKLVSSPGRSEAETVDEPVSEGADDSLDEFRINILSLDGLAPAVSENSDLEQEEESAQRQKTAGKIFRAEASTGQDAPRQAQARSWASQGKAASAEGDESEVSEHLSASSASAIQQDSTSSMQPPSEAPMVNTVSSAYSEDFENSPSLTASEPTAHSKESLDRTLDALSESSSSVKTDLPQTAESRKKSGRHVTRVLVKDTAVQTPDPAFTYEWTKALTAYSPAVLALHDVLKQQLSLTQQFIQASRHLHASLLRSLDADSFHYHTLEEAKEYIRCHRPAPLTMEDALEEVNKEL

SEQ ID NO: 22329 - protein, 1133 aa, Homo sapiens
MDGKRRPGPGPGVPPKRARGGLWDDDDAPRPSQFEEDLALMEEMEAEHRLQEQEEEELQSVLEGVADGQVPPSAIDPRWLRPTPPALDPQTEPLIFQQLEIDHYVGPAQPVPGGPPPSRGSVPVLRAFGVTDEGFSVCCHIHGFAPYFYTPAPPGFGPEHMGDLQRELNLAISRDSRGGRELTGPAVLAVELCSRESMFGYHGHGPSPFLRITVALPRLVAPARRLLEQGIRVAGLGTPSFAPYEANVDFEIRFMVDTDIVGCNWLELPAGKYALRLKEKATQCQLEADVLWSDVVSHPPEGPWQRIAPLRVLSFDIECAGRKGIFPEPERDPVIQICSLGLRWGEPEPFLRLALTLRPCAPILGAKVQSYEKEEDLLQAWSTFIRIMDPDVITGYNIQNFDLPYLISRAQTLKVQTFPFLGRVAGLCSNIRDSSFQSKQTGRRDTKVVSMVGRVQMDMLQVLLREYKLRSYTLNAVSFHFLGEQKEDVQHSIITDLQNGNDQTRRRLAVYCLKDAYLPLRLLERLMVLVNAVEMARVTGVPLSYLLSRGQQVKVVSQLLRQAMHEGLLMPVVKSEGGEDYTGATVIEPLKGVRPQDRAGAAWELLALTPGRGCSPPRYYDVPIATLDFSSLYPSIMMAHNLCYTTLLRPGTAQKLGLTEDQFIRTPTGDEFVKTSVRKGLLPQILENLLSARKRAKAELAKETDPLRRQVLDGRQLALKVSANSVYGFTGAQVGKLPCLEISQSVTGFGRQMIEKTKQLVESKYTVENGYSTSAKVVYGDTDSVMCRFGVSSVAEAMALGREAADWVSGHFPSPIRLEFEKVYFPYLLISKKRYAGLLFSSRPDAHDRMDCKGLEAVRRDNCPLVANLVTASLRRLLIDRDPEGAVAHAQDVISDLLCNRIDISQLVITKELTRAASDYAGKQAHVELAERMRKRDPGSAPSLGDRVPYVIISAAKGVAAYMKSEDPLFVLEHSLPIDTQYYLEQQLAKPLLRIFEPILGEGRAEAVLLRGDHTRCKTVLTGKVGGLLAFAKRRNCCIGCRTVLSHQGAVCEFCQPRESELYQKEVSHLNALEERFSRLWTQCQRCQGSLHEDVICTSRDCPIFYMRKKVRKDLEDQEQLLRRFGPPGPEAW

SEQ ID NO: 22330 - protein, 204 aa, Homo sapiens
STVLGNGSSLSLPEGQSLRLVCAVDAVDSNPPARLSLSWRGLTLCPSQPSNPGVLELPWVHLRDAAEFTCRAQNPLGSQQVYLNVSLQSKATSGVTQGVVGGAGATALVFLSFCVIFVVVRSCRKKSARPAAGVGDTGIEDANAVRGSASQKTSSSSSSAFEQLFPHPSIPFRAEASKYYLSGTDRNYFRLHGPHSLIAAPQIC

SEQ ID NO: 22331 - protein, 416 aa, Homo sapiens
MSSPTTSSLDTPLPGNGPPQPGAPSSSPTVKEEGPEPWPGGPDPDVPGTDEASSACSTDWVIPDPEEEPERKRKKGPAPKMLGHELCRVCGDKASGFHYNVLSCEGCKGFFRRSVVRGGARRYACRGGGTCQMDAFMRRKCQQCRLRKCKEAGMREQCVLSEEQIRKKKIRKQQQESQSQSQSPVGPQGSSSSASGPGASPGGSEAGSQGSGEGEGVQLTAAQELMIQQLVAAQLQCNKRSFSDQPKVTLGREDQIALLKASTIEIMLLETARRYNHETECITFLKDFTYSKDDFHRAGLQVEFINPIFEFSRAMRRLGLDDAEYALLIAINIFSADRPNVQEPGRVEALQQPYVEALLSYTRIKRPQDQLRFPRMLMKLVSLRTLSSVHSEQVFALRLQDKKLPPLLSEIWDVHE

SEQ ID NO: 22332 - protein, 412 aa, Homo sapiens
MISFCPDCGKSIQAAFKFCPYCGNSLPVEEHVGSQTFVNPHVSSFQGSKRGLNSSFETSPKKVKWSSTVTSPRLSLFSDGDSSESEDTLSSSERSKGSGSRPPTPKSSPQKTRKSPQVTRGSPQKTSCSPQKTRQSPQTLKRSRVTTSLEALPTGTVLTDKSGRQWKLKSFQTRDNQGILYEAAPTSTLTCDSGPQKQKFSLKLDAKDGRLFNEQNFFQRAAKPLQVNKWKKLYSTPLLAIPTCMGFGVHQDKYRFLVLPSLGRSLQSALDVSPKHVLSERSVLQVACRLLDALEFLHENEYVHGNVTAENIFVDPEDQSQVTLAGYGFAFRYCPSGKHVAYVEGSRSPHEGDLEFISMDLHKGCGPSRRSDLQSLGYCMLKWLYGFLPWTNCLPNTEDIMKQKQKLPWDSF

SEQ ID NO: 22333 - protein, 551 aa, Homo sapiens
MRTRPRPRLRRTENFLTAVHHGKKEEKAAVERRRLHVLKALKKLRIEADEAPVVAVLGSGGGLRAHIACLGVLSEMKEQGLLDAVTYLAGVSGSTWAISSLYTNDGDMEALEADLKHRFTRQEWDLAKSLQKTIQAARSENYSLTDFWAYMVISKQTRELPESHLSNMKKPVEEGTLPYPIFAAIDNDLQPSWQEARAPETWFEFTPHHAGFSALGAFVSITHFGSKFKKGRLVRTHPERDLTFLRGLWGSALGNTEVIREYIFDQLRNLTLKGLWRRAVANAKSIGHLIFARLLRLQESSQGEHPPPEDEGGEPEHTWLTEMLENWTRTSLEKQEQPHEDPERKGSLSNLMDFVKKTGICASKWEWGTTHNFLYKHGGIRDKIMSSRKHLHLVDAGLAINTPFPLVLPPTREVHLILSFDFSAGDPFETIRATTDYCRRHKIPFPQVEEAELDLWSKAPASCYILKGETGPVVMHFPLFNIDACGGDIEAWSDTYDTFKLADTYTLDVVVLLLALAKKNVRENKKKILRELMNVAGLYYPKDSARSCCLA

SEQ ID NO: 22334 - protein, 318 aa, Homo sapiens
CRDSTLCPAYATCTNTVDSYYCACKQGFLSSNGQNHFKDPGVRCKDIDECSQSPQPCGPNSSCKNLSGRYKCSCLDGFSSPTGNDWVPGKPGNFSCTDINECLTSSVCPEHSDCVNSMGSYSCSCQVGFISRNSTCEDVDECADPRACPEHATCNNTVGNYSCFCNPGFESSSGHLSFQGLKASCEDIDECTEMCPINSTCTNTPGSYFCTCHPGFAPSNGQLNFTDQGVECRGVLFKCKEDVIPDNKQIQQCQEGTAVKPAYVSFCAQINNIFSVLDKVCENKTTVVSLKNTTESFVPVLKQISTWTKFTKEETSSL

SEQ ID NO: 22335 - protein, 417 aa, Homo sapiens
MGTLSAPPCTQRIKWKGLLLTASLLNFWNLPTTAQVTIEAEPTKVSEGKDVLLLVHNLPQNLTGYIWYKGQMRDLYHYITSYVVDGEIIIYGPAYSGRETAYSNASLLIQNVTREDAGSYTLHIIKGDDGTRGVTGRFTFTLHLETPKPSISSSNLNPRETMEAVSLTCDPETPDASYLWWMNGQSLPMTHSLKLSETNRTLFLLGVTKYTAGPYECEIRNPVSASRSDPVTLNLLPKLPKPYITINNLNPRENKDVLNFTCEPKSENYTYIWWLNGQSLPVSPRVKRPIENRILILPSVTRNETGPYQCEIRDRYGGIRSDPVTLNVLYGPDLPRIYPSFTYYRSGEVLYLSCSADSNPPAQYSWTINEKFQLPGQKLFIRHITTKHSGLYVCSVRNSATGKESSKSMTVEVSEAL

SEQ ID NO: 22336 - protein, 1783 aa, Homo sapiens
MAKTGAEDHREALSQSSLSLLTEAMEVLQQSSPEGTLDGNTVNPIYKYILNDLPREFMSSQAKAVIKTTDDYLQSQFGPNRLVHSAAVSEGSGLQDCSTHQTASDHSHDEISDLDSYKSNSKNNSCSISASKRNRPVSAPVGQLRVAEFSSLKFQSARNWQKLSQRHKLQPRVIKVTAYKNGSRTVFARVTVPTITLLLEECTEKLNLNMAARRVFLADGKEALEPEDIPHEADVYVSTGEPFLNPFKKIKDHLLLIKKVTWTMNGLMLPTDIKRRKTKPVLSIRMKKLTERTSVRILFFKNGMGQDGHEITVGKETMKKVLDTCTIRMNLNLPARYFYDLYGRKIEDISKVPLLEKCLQNSITPLRGLLWVSKGEGFSPSGAKMYIQGVLLALYQRLKSAKKYYKQLNLVMNEQKEKITEKVILSMTAKEHHKEQEEVSRLIDELQTAIKSNIGHLCKLGPQLQAEQEQFSSYVYQHIKSLPANTLVPGGLQLKVFENGKNTGEISVGISKKDLGSDSPIQTDHMMERLLLKIHQRLQGSSINPPGLNYSSMRLFDENGQEIKNPLSLKNEQKIWVSYGRAYRSPLNLALGLTFDRVSAFARGDIMVAYKTFLDPNAVLLPGCGNWEVCEGFPINFNCTSQQIPDQFEKVDLENHFLQNKVDPNIVLHASVSIGKWSFSGSEASSRSQIAPSILWPVASVWLITKTGMILSRAITQGCLAIGHPIRVKAAEGTSLEGYKLILQKRHSGDDSQKWVFGTDGCIYSKAYPQFVLTYLEELNAQVDVTQTEYHIHHGAWTTAHQEHGRNLAEEVLQESASNLGLKQLPEPSDTHLMPEGSLEETGELTVALVRKLEEKHPKASAQRWAIKHEGTSKPGQWKHSRVENPLWNKLTYMWPVLPSGQLNEEFDWPIQGLLVPSSPPMKKPICKTTEPYAPVRLRVLQNGEKNKNRSVTILGPDISPGRKTQCTEILNLPSAARRLYNEKGKEIFALKDLQRDELVYVSCGELWINPDLSIAQQKKQIFLRNLESDIAKIQIFCSTHKIEALVLEVQSDIVSGSKLAVHKPVAIFGEEKQVTEPEEKQMQEDPLTTENASSEILDSHVRAHLRMKACHTLPRYAWQETSHDFDEDDSLPKKTEKGLFENVEPQKKHSCSPKHSKLHKHCHQQFEYRDGQIISHAAPQLVLGVQGPNLRSGMEVVLVEKKSDGSHQRWIHQEDSRTFHLVSNPDLVLAVSMTKTRNEVCGYPVIVQKYKPYNNGAANQKWHYMKNIKALVAFHSTALDKEITSANYAGVCTSSVIKEENIDQPGYCYLSPDGKRKTMLCLACGQSMRTEKGLKQLLPGVPFLCISGTKTQKPFLQGPFKVISVAEVDLSCDKAEKTLSYYQARLLSLRMKTCTQAASHSGMAATHQKAVKIIAYKNGDGYRNGKLIVAGTFPMLLTECTEQLGLARAASKVYTKDGTPIFTLRDLVLWALDESFLQRDSEKQKQDAAPVGKEQIIVEKNPRMKVKNRLFAKSVTSDSLDGIDKSLLTLILRNPIAIWVSCGEPFLPPNALQKAEKLEKQNWLKKDRILADLDTMRHKMRQLKGRRVAACQPATMVPTKSPVQPVVVEGGWTEQTQQEIKLMELIRHTEAHLSEIQEMESKINFPIATKRIAVKPSNLYKQPNTKRVWIYLNGGRPEDGTYAWGKTISELLQDCSSRLKMTHPARALYTPSGEPIQSWDDIERDMVICVSMGHGFKTPKELKQLMEIRANYARIRRQQGPQATDIVVSPSTKLLSLAHLHN

SEQ ID NO: 22337 - protein, 756 aa, Homo sapiens
MDNITRQNQFYDTQVIKQENESGYERRPLEMEQQQAYRPEMKTEMKQGAPTSFLPPEASQLKPDRQQFQSRKRPYEENRGRGYFEHREDRRGRSPQPPAEEDEDDFDDTLVAIDTYNCDLHFKVARDRSSGYPLTIEGFAYLWSGARASYGVRRGRVCFEMKINEEISVKHLPSTEPDPHVVRIGWSLDSCSTQLGEEPFSYGYGGTGKKSTNSRFENYGDKFAENDVIGCFADFECGNDVELSFTKNGKWMGIAFRIQKEALGGQALYPHVLVKNCAVEFNFGQRAEPYCSVLPGFTFIQHLPLSERIRGTVGPKSKAECEILMMVGLPAAGKTTWAIKHAASNPSKKYNILGTNAIMDKMRVMGLRRQRNYAGRWDVLIQQATQCLNRLIQIAARKKRNYILDQTNVYGSAQRRKMRPFEGFQRKAIVICPTDEDLKDRTIKRTDEEGKDVPDHAVLEMKANFTLPDVGDFLDEVLFIELQREEADKLVRQYNEEGRKAGPPPEKRFDNRGGGGFRGRGGGGGFQRYENRGPPGGNRGGFQNRGGGSGGGGNYRGGFNRSGGGGYSQNRWGNNNRDNNNSNNRGSYNRAPQQQPPPQQPPPPQPPPQQPPPPPSYSPARNPPGASTYNKNSNIPGSSANTSTPTVSSYSPPQPSYSQPPYNQGGYSQGYTAPPPPPPPPPAYNYGSYGGYNPAPYTPPPPPTAQTYPQPSYNQYQQYAQQWNQYYQNQGQWPPYYGNYDYGSYSGNTQGGTSTQ

SEQ ID NO: 22338 - protein, 839 aa, Homo sapiens
MAKLSKLASNGTPMGTFAPLWEVFRVSSDKLALCHLELTRKLQDLIKDVLRYGEEQLKTHKKCKEEVVSTLDAVQVLSGVSQLLPKSRENYLNRCMDQERLRRESTSQKEMDKAETKTKKAAESLRRSVEKYNSARADFEQKMLDSALRFQAMEETHLRHMKALLGSYAHSVEDTHVQIGQVHEEFKQNIENVSVEMLLRKFAESKGTGREKPGPLDFEAYSAAALQEAMKRLRGAKAFRLPGLSRREREPEPPAAVDFLEPDSGTCPEVDEEGFTVRPDVTQNSTAEPSRFSSSDSDFDDEEPRKFYVHIKPAPARAPACSPEAAAAQLRATAGSLILPPGPGGTMKRHSSRDAAGKPQRPRSAPRTSSCAERLQSEEQVSKNLFGPPLESAFDHEDFTGSSSLGFTSSPSPFSSSSPENVEDSGLDSPSHAAPGPSPDSWVPRPGTPQSPPSCRAPPPEARGIRAPPLPDSPQPLASSPGPWGLEALAGGDLMPAPADPTAREGLAAPPRRLRSRKVSCPLTRSNGDLSRSLSPSPLGSSAASTALERPSFLSQTGHGVSRGPSPVVLGSQDALPIATAFTEYVHAYFRGHSPSCLARVTGELTMTFPAGIVRVFSGTPPPPVLSFRLVHTTAIEHFQPNADLLFSDPSQSDPETKDFWLNMAALTEALQRQAEQNPTASYYNVVLLRYQFSRPGPQSVPLQLSAHWQCGATLTQVSVEYGYRPGATAVPTPLTNVQILLPVGEPVTNVRLQPAATWNLEEKRLTWRLPDVSEAGGSGRLSASWEPLSGPSTPSPVAAQFTSEGTTLSGVDLELVGSGYRMSLVKRRFATGMYLVSC

SEQ ID NO: 22339 - protein, 415 aa, Homo sapiens
MTGSSVFDYIHPGDHSEVLEQLGLRTPTPGPPTPPSVSSSSSSSSSLADTPEIEASLTKVPPSSLVQERSFFVRMKSTLTKRGLHVKASGYKQVIHVTGRLRAHALGLVALGHTLPPAPLAELPLHGHMIVFRLSLGLTILACESRVSDHMDLGPSELVGRSCYQFVHGQDATRIRQSHVDLLDKGQVMTGYYRWLQRAGGFVWLQSVATVAGSGKSPGEHHVLWVSHVLSQAEGGQTPLDAFQLPASVACEEASSPGPEPTEPEPPTEGKQAAPAENEAPQTQGKRIKVEPGPRETKGSEDSGDEDPSSHPATPRPEFTSVIRAGVLKQDPVRPWGLAPPGDPPPTLLHAGFLPPVVRGLCTPGTIRYGPAELGLVYPHLQRLGPGPALPEAFYPPLGLPYPGPAGTRLPRKGD

SEQ ID NO: 22340 - protein, 103 aa, Homo sapiens
MLPLLQLGKSSLAAQAFVKGLIQGAIYAGIVIALLFLCLLPLIVKHIRKKQAKKAAAIRAKKSSKVRASQELEMSLKPEEPGKPVVATFSESRILEKQDKRAS

SEQ ID NO: 22341 - protein, 682 aa, Homo sapiens
MAAAATAAEGVPSRGPPGEVIHLNVGGKRFSTSRQTLTWIPDSFFSSLLSGRISTLKDETGAIFIDRDPTVFAPILNFLRTKELDPRGVHGSSLLHEAQFYGLTPLVRRLQLREELDRSSCGNVLFNGYLPPPVFPVKRRNRHSLVGPQQLGGRPAPVRRSNTMPPNLGNAGLLGRMLDEKTPPSPSGQPEEPGMVRLVCGHHNWIAVAYTQFLVCYRLKEASGWQLVFSSPRLDWPIERLALTARVHGGALGEHDKMVAAATGSEILLWALQAEGGGSEIGRIGVWNAVTKHWQVQEVQPITSYDAAGSFLLLGCNNGSIYYVDVQKFPLRMKDNDLLVSELYRDPAEDGVTALSVYLTPKTSDSGNWIEIAYGTSSGGVRVIVQHPETVGSGPQLFQTFTVHRSPVTKIMLSEKHLISVCADNNHVRTWSVTRFRGMISTQPGSTPLASFKILALESADGHGGCSAGNDIGPYGERDDQQVFIQKVVPSASQLFVRLSSTGQRVCSVRSVDGSPTTAFTVLECEGSRRLGSRPRRYLLTGQANGSLAMWDLTTAMDGLGQAPAGGLTEQELMEQLEHCELAPPAPSAPSWGCLPSPSPRISLTSLHSASSNTSLSGHRGSPSPPQAEARRRGGGSFVERCQELVRSGPDLRRPPTPAPWPSSGLGTPLTPPKMKLNETSF

SEQ ID NO: 22342 - protein, 273 aa, Homo sapiens
MKPGFSPRGGGFGGRGGFGDRGGRGGRGGFGGGRGRGGGFHSGGNRGRGRGGKRGNQSGKNVMVEPHRHEGVFICRGKEDALVTKNLVPGESVYGEKRVSISEGDDKIEYRAWNPFRSKLAAAILGGVDQIHIKPGAKVLYLGAASGTTVSHVSDIVGPDGLVYAVEFSHRSGRDLINLAKKRTNIIPVIEDARHPHKYRMLIAMVDVIFADVAQPDQTRIVALNAHTFLRNGGHFVISIKANCIDSTASAEAVFASEVKKMQQENMKPQEQL

SEQ ID NO: 22343 - protein, 730 aa, Homo sapiens
MGGRVFLVFLAFCVWLTLPGAETQDSRGCARWCPQDSSCVNATACRCNPGFSSFSEIITTPMETCDDINECATLSKVSCGKFSDCWNTEGSYDCVCSPGYEPVSGAKTFKNESENTCQDVDECSSGQHQCDSSTVCFNTVGSYSCRCRPGWKPRHGIPNNQKDTVCEDMTFSTWTPPPGVHSQTLSRFFDKVQDLGRDYKPGLANNTIQSILQALDELLEAPGDLETLPRLQQHCVASHLLDGLEDVLRGLSKNLSNGLLNFSYPAGTELSLEVQKQVDRSVTLRQNQAVMQLDWNQAQKSGDPGPSVVGLVSIPGMGKLLAEAPLVLEPEKQMLLHETHQGLLQDGSPILLSDVISAFLSNNDTQNLSSPVTFTFSHRSVIPRQKVLCVFWEHGQNGCGHWATTGCSTIGTRDTSTICRCTHLSSFAVLMAHYDVQEEDPVLTVITYMGLSVSLLCLLLAALTFLLCKAIQNTSTSLHLQLSLCLFLAHLLFLVAIDQTGHKVLCSIIAGTLHYLYLATLTWMLLEALYLFLTARNLTVVNYSSINRFMKKLMFPVGYGVPAVTVAISAASRPHLYGTPSRCWLQPEKGFIWGFLGPVCAIFSVNLVLFLVTLWILKNRLSSLNSEVSTLRNTRMLAFKATAQLFILGCTWCLGILQVGPAARVMAYLFTIINSLQGVFIFLVYCLLSQQVREQYGKWSKGIRKLKTESEMHTLSSSAKADTSKPSTVN

SEQ ID NO: 22344 - protein, 119 aa, Homo sapiens
FTTGRRGDLATIHGMNRPFLLLMATPLERAQHLQSSRHRRALDTNYCFSSTEKNCCVRQLYIDFRKDLGWKWIHEPKGYHANFCLGPCPYIWSLDTQYSKLNEQNLIQEVPNIWQREVG

SEQ ID NO: 22345 - protein, 1329 aa, Homo sapiens
TGPLLVPFTLNFTITNLQYEENMGHPGSRKFNITESVLQGLLKPLFKSTSVGPLYSGCRLTLLRPEKDGVATRVDAICTHRPDPKIPGLDRQQLYWELSQLTHSITELGPYTLDRDSLYVNGFTQRSSVPTTSTPGTFTVQPETSETPSSLPGPTATGPVLLPFTLNFTITNLQYEEDMRRPGSRKFNTTERVLQGLLMPLFKNTSVSSLYSGCRLTLLRPEKDGAATRVDAVCTHRPDPKSPGLDRERLYWKLSQLTHGITELGPYTLDRHSLYVNGFTHQSSMTTTRTPDTSTMHLATSRTPASLSGPMTASPLLVLFTINFTITNLRYEENMHHPGSRKFNTTERVLQGLLRPVFKNTSVGPLYSGCRLTLLRPKKDGAATKVDAICTYRPDPKSPGLDREQLYWELSQLTHSITELGPYTLDRDSLYVNGFTQRSSVPTTSIPGTPTVDLGTSGTPVSKPGPSAASPLLVLFTLNFTITNLRYEENMQHPGSRKFNTTERVLQGLLRSLFKSTSVGPLYSGCRLTLLRPEKDGTATGVDAICTHHPDPKSPRLDREQLYWELSQLTHNITELGPYALDNDSLFVNGFTHRSSVSTTSTPGTPTVYLGASKTPASIFGPSAASHLLILFTLNFTITNLRYEENMWPGSRKFNTTERVLQGLLRPLFKNTSVGPLYSGCRLTLLRPEKDGEATGVDAICTHRPDPTGPGLDREQLYLELSQLTHSITELGPYTLDRDSLYVNGFTHRSSVPTTSTGVVSEEPFTLNFTINNLRYMADMGQPGSLKFNITDNVMQHLLSPLFQRSSLGARYTGCRVIALRSVKNGAETRVDLLCTYLQPLSGPGLPIKQVFHELSQQTHGITRLGPYSLDKDSLYLNGYNEPGPDEPPTTMGYHLKTLTLNFTISNLQYSPDMGKGSATFNSTEGVLQHLLRPLFQKSSMGPFYLGCQLISLRPEKDGAATGVDTTCTYHPDPVGPGLDIQQLYWELSQLTHGVTQLGFYVLDRDSLFINGYAPQNLSIRGEYQINFHIVNWNLSNPDPTSSEYITLLRDIQDKVTTLYKGSQLHDTFRFCLVTNLTMDSVLVTVKALFSSNLDPSLVEQVFLDKTLNASFHWLGSTYQLVDIHVTEMESSVYQPTSSSSTQHFYLNFTITNLPYSQDKAQPGTTNYQRNKRNIEDALNQLFRNSSIKSYFSDCQVSTFRSVPNRHHTGVDSLCNFSPLARRVDRVAIYEEFLRMTRNGTQLQNFTLDRSSVLVDGYSPNRNEPLTGNSDLPFWAVILIGLAGLLGVITCLICGVLVTTRRRKKEGEYNVQQQCPGYYQSHLDLEDLQ

SEQ ID NO: 22346 - protein, 85 aa, Homo sapiens
MSTAREQPIFSTRAHVFQIDPATKRNWIPAGKHALTVSYFYDATRNVYRIISIGGAKAIINSTVTPNMTFTKTSQKFGQWADSRA

SEQ ID NO: 22347 - protein, 450 aa, Homo sapiens
MPSPLGPPCLPVMDPETTLEEPETARLRFRGFCYQEVAGPREALARLRELCCQWLQPEAHSKEQMLEMLVLEQFLGTLPPEIQAWVRGQRPGSPEEAAALVEGLQHDPGQLLGWITAHVLKQEVLPAAQKTEEPLGSPHPSGTVESPGEGPQDTRIEGSVQLSCSVKEEPNVDGQEVAPSSPPLAAQSPEGNHGHQEPASTSFHPPRIQEEWGLLDRSQKELYWDAMLEKYGTVVSLGLPPHQPEAQAQSELGMLLTGTGVCRSLRSGNESEGPPGCPEAQPPQGPGPAAWEGLSGAATPAPTVRPGTPPVPTQPTPAETRLEPAATPRKPYTCEQCGRGFDWKSVFVIHHRTHTSGPGVQSPGLATGESTEKPPQGEVAFPHHPRRSLTGPRSYPCEECGCSFSWKSQLVIHRKSHTGQRRHFCSDCGRAFDWKSQLVIHRKGHRPEVP

SEQ ID NO: 22348 - protein, 790 aa, Homo sapiens
MIVLPLYSRLDKRFLCLKNIRTFLSTCCEKFGLKRSELFEAFDLFDVQDFGKVIYTLSALSWTPIAQNRGIMPFPTEEESVGDEDIYSGLSDQIDDTVEEDEDLYDCVENEEAEGDEIYEDLMRSEPVSMPPKMTEYDKRCCCLREIQQTEEKYTDTLGSIQQHFLKPLQRFLKPQDIEIIFINIEDLLRVHTHFLKEMKEALGTPGAANLYQVFIKYKERFLVYGRYCSQVESASKHLDRVAAAREDVQMKLEECSQRANNGRFTLRDLLMVPMQRVLKYHLLLQELVKHTQEAMEKENLRLALDAMRDLAQCVNEVKRDNETLRQITNFQLSIENLDQSLAHYGRPKIDGELKITSVERRSKMDRYAFLLDKALLICKRRGDSYDLKDFVNLHSFQVRDDSSGDRDNKKWSHMFLLIEDQGAQGYELFFKTRELKKKWMEQFEMAISNIYPENATANGHDFQMFSFEETTSCKACQMLLRGTFYQGYRCHRCRASAHKECLGRVPPCGRHGQDFPGTMKKDKLHRRAQDKKRNELGLPKMEVFQEYYGLPPPPGAIGPFLRLNPGDIVELTKAEAEQNWWEGRNTSTNEIGWFPCNRVKPYVHGPPQDLSVHLWYAGPMERAGAESILANRSDGTFLVRQRVKDAAEFAISIKYNVEVKHIKIMTAEGLYRITEKKAFRGLTELVEFYQQNSLKDCFKSLDTTLQFPFKEPEKRTISRPAVGSTKYFGTAKARYDFCARDRSELSLKEGDIIKILNKKGQQGWWRGEIYGRVGWFPANYVEEDYSEYC

SEQ ID NO: 22349 - protein, 157 aa, Homo sapiens
MKPGFSPRGGGFGGRGGFGDRGGRGGRGGFGGGRGRGGGFRGRGRGGGGGFHSGGNRGRGRGGKRGNQSGKNVMVEPHRHEGVFICRGKEDALVTKNLVPGESVYGEKRVSISEGDDKIEYRAWNPFRSKLAAAILGGVDQIHIKPGAKVLYLGAAS

SEQ ID NO: 22350 - protein, 243 aa, Homo sapiens
MSTAREQPIFSTRAHVFQIDPATKRNWIPAGKHALTVSYFYDATRNVYRIISIGGAKAIINSTVTPNMTFTKTSQKFGQWADSRANTVYGLGFASEQHLTQFAEKFQEVKEAARLAREKSQDGGELTSPALGLASHQVPPSPLVSANGPGEEKLFRSQSADAPGPTERERLKKMLSEGSVGEVQWEAEFFALQDSNNKLAGALREANAAAAQWRQQLEAQRAEAERLRQRVAELEAQAASEVT

SEQ ID NO: 22351 - protein, 585 aa, Homo sapiens
MPLPFPSRSQQDAPKPTPAACRCSGLARRVLTIAFALLILGLMTWAYAAGVPLASDRYGLLAFGLYGAFLSAHLVAQSLFAYLEHRRVAAAARGPLDAATARSVALTISAYQEDPAYLRQCLASARALLYPRARLRVLMVVDGNRAEDLYMVDMFREVFADEDPATYVWDGNYHQPWEPAAAGAVGAGAYREVEAEDPGRLAVEALVRTRRCVCVAQRWGGKREVMYTAFKALGDSVDYVQVCDSDTRLDPMALLELVRVLDEDPRVGAVGGDVRILNPLDSWVSFLSSLRYWVAFNVERACQSYFHCVSCISGPLGLYRNNLLQQFLEAWYNQKFLGTHCTFGDDRHLTNRMLSMGYATKYTSRSRCYSETPSSFLRWLSQQTRWSKSYFREWLYNALWWHRHHAWMTYEAVVSGLFPFFVAATVLRLFYAGRPWALLWVLLCVQGVALAKAAFAAWLRGCLRMVLLSLYAPLYMCGLLPAKFLALVTMNQSGWGTSGRRKLAANYVPLLPLALWALLLLGGLVRSVAHEARADWSGPSRAAEAYHLAAGAGAYVGYWVAMLTLYWVGVRRLCRRRTGGYRVQV

SEQ ID NO: 22352 - protein, 137 aa, Homo sapiens
MAVPPGHGPFSGFPGPQEHTQVLPDVRLLPRRLPLAFRDATSAPLRKLSVDLIKTYKHINEVYYAKKKRRAQQAPPQDSSNKKEKKVLNHGYDDDNHDYIVRSGERWLERYEIDSLIGKGSFGQVWDTPHHPDPRPH

SEQ ID NO: 22353 - protein, 145 aa, Homo sapiens
MDFRGLPGNYHKEENQEHQLGNNTLSSHLQIDKMTDNKTGEVLISENVVASIQPAEGSFEGDLKVPRMEEKEALVPIQKATDSFHTELHPRVAFWIIKLPRRRSHQDALEGGHWLSEKRHRLQAIRDGLRKGTHKDVLEEGTESS

SEQ ID NO: 22354 - protein, 487 aa, Homo sapiens
MAAAALRAPTQVTVSPETHMDLTKGCVTFEDIAIYFSQDEWGLLDEAQRLLYLEVMLENFALVASLGCGHGTEDEETPSDQNVSVGVSQSKAGSSTQKTQSCEMCVPVLKDILHLADLPGQKPYLVGECTNHHQHQKHHSAKKSLKRDMDRASYVKCCLFCMSLKPFRKWEVGKDLPAMLRLLRSLVFPGGKKPGTITECGEDIRSQKSHYKSGECGKASRHKHTPVYHPRVYTGKKLYECSKCGKAFRGKYSLVQHQRVHTGERPWECNECGKFFSQTSHLNDHRRIHTGERPYECSECGKLFRQNSSLVDHQKIHTGARPYECSQCGKSFSQKATLVKHQRVHTGERPYKCGECGNSFSQSAILNQHRRIHTGAKPYECGQCGKSFSQKATLIKHQRVHTGERPYKCGDCGKSFSQSSILIQHRRIHTGARPYECGQCGKSFSQKSGLIQHQVVHTGERPYECNKCGNSFSQCSSLIHHQKCHNT

SEQ ID NO: 22355 - protein, 128 aa, Homo sapiens
PVQSKSPRFASWDEMNVLAHGLLQLGQGLREHAERTRSQLSALERRLSACGSACQGTEGSTDLPLAPESRVDPEVLHSLQTQLKAQNSRIQQLFHKVAQQQRHLEKQHLRIQHLQSQTGLNGGLSHID

SEQ ID NO: 22356 - protein, 477 aa, Homo sapiens
MLLPLLWANEERDSGGWADPRFSTASQDLLSRYRLEVPESVTVQEGLCVSVPCSVLYPHYNWTASSPVYGSWFKEGADIPWDIPVATNTPSGKVQEDTHGRFLLLGDPQTNNCSLSIRDARKGDSGKYYFQVERGSRKWNYIYDKLSVHVTALTHMPTFSIPGTLESGHPRNLTCSVPWACEQGTPPTITWMGASVSSLDPTITRSSMLSLIPQPQDHGTSLTCQVTLPGAGVTMTRAVRLNISYPPQNLTMTVFQGDGTASTTLRNGSALSVLEGQSLHLVCAVDSNPPARLSWTWGSLTLSPSQSSNLGVLELPRVHVKDEGEFTCRAQNPLGSQHISLSLSLQNEYTGKMRPISGVTLGAFGGAGATALVFLYFCIIFVVVRSCRKKSARPAVGVGDTGMEDANAVRGSASQGPLIESPADDSPPHHAPPALATPSPEEGEIQYASLSFHKARPQYPQEQEAIGYEYSEINIPK

SEQ ID NO: 22357 - protein, 669 aa, Homo sapiens
PEKDGAATRVDAVCTHRPDPKSPGLDRERLYWKLSQLTHGITELGPYTLDRHSLYVNGFTHQSSMTTTRTPDTSTMHLATSRTPASLSGPMTASPLLVLFTINFTITNLRYEENMHHPGSRKFNTTERVLQGLLRPVFKNTSVGPLYSGCRLTLLRPKKDGAATKVDAICTYRPDPKSPGLDREQLYWELSQLTHSITELGPYTLDRDSLYVNGFTQRSSVPTTSIPGTPTVDLGTSGTPVSKPGPSAASPLLVLFTLNFTITNLRYEENMQHPGSRKFNTTERVLQGLLRSLFKSTSVGPLYSGCRLTLLRPEKDGTATGVDAICTHHPDPKSPRLDREQLYWELSQLTHNITELGPYALDNDSLFVNGFTHRSSVSTTSTPGTPTVYLGASKTPASIFGPSAASHLLILFTLNFTITNLRYEENMWPGSRKFNTTERVLQGLLRPLFKNTSVGPLYSGCRLTLLRPEKDGEATGVDAICTHRPDPTGPGLDREQLYLELSQLTHSITELGPYTLDRDSLYVNGFTHRSSVPTTSTGVVSEEPFTLNFTINNLRYMADMGQPGSLKFNITDNVMQHLLSPLFQRSSLGARYTGCRVIALRSVKNGAETRVDLLCTYLQPLSGPGLPIKQVFHELSQQTHGITRLGPYSLDKDSLYLNGHHTLQRQSTT

SEQ ID NO: 22358 - protein, 227 aa, Homo sapiens
MWVPVVFLTLSVTWIGAAPLILSRIVGGWECEKHSQPWQVLVASRGRAVCGGVLVHPQWVLTAAHCIRNKSVILLGRHSLFHPEDTGQVFQVSHSFPHPLYDMSLLKNRFLRPGDDSSHDLMLLRLSEPAELTDAVKVMDLPTQEPALGTTCYASGWGSIEPEEFLTPKKLQCVDLHVISNDVCAQVHPQKVTKFMLCAGRWTGGKSTCSVSHPYSQDLEGKGEWGP

SEQ ID NO: 22359 - protein, 1134 aa, Homo sapiens
MEKAPPQPQHEGLKSKEHLPQQPAEGKTASRRVPRLRAVVESQAFKNILVDEMDMMHARAATLIQANWRGYWLRQKLISQMMAAKAIQEAWRRFNKRHILHSSKSLVKKTRAEEGDIPYHAPQQVRFQHPEENRLLSPPIMVNKETQFPSCDNLVLCRPQSSPLLQPPAAQGTPEPCVQGPHAARVRGLAFLPHQTVTIRFPCPVSLDAKCQPCLLTRTIRSTCLVHIEGDSVKTKRVSARTNKARAPETPLSRRYDQAVTRPSRAQTQGPVKAETPKAPFQICPGPMITKTLLQTYPVVSVTLPQTYPASTMTTTPPKTSPVPKVTIIKTPAQMYPGPTVTKTAPHTCPMPTMTKIQVHPTASRTGTPRQTCPATITAKNRPQVSLLASIMKSLPQVCPGPAMAKTPPQMHPVTTPAKNPLQTCLSATMSKTSSQRSPVGVTKPSPQTRLPAMITKTPAQLRSVATILKTLCLASPTVANVKAPPQVAVAAGTPNTSGSIHENPPKAKATVNVKQAAKVVKASSPSYLAEGKIRCLAQPHPGTGVPRAAAELPLEAEKIKTGTQKQAKTDMAFKTSVAVEMAGAPSWTKVAEEGDKPPHVYVPVDMAVTLPRGQLAAPLTNASSQRHPPCLSQRPLAAPLTKASSQGHLPTELTKTPSLAHLDTCLSKMHSQTHLATGAVKVQSQAPLATCLTKTQSRGQPITDITTCLIPAHQAADLSSNTHSQVLLTGSKVSNHACQRLGGLSAPPWAKPEDRQTQPQPHGHVPGKTTQGGPCPAACEVQGMLVPPMAPTGHSTCNVESWGDNGATRAQPSMPGQAVPCQEDTGPADAGVVGGQSWNRAWEPARGAASWDTWRNKAVVPPRRSGEPMVSMQAAEEIRILAVITIQAGVRGYLARRRIRLWHRGAMVIQATWRGYRVRRNLAHLCRATTTIQSAWRGYSTRRDQARHWQMLHPVTWVELGSRAGVMSDRSWFQDGRARTVSDHRCFQSCQAHACSVCHSLSSRIGSPPSVVMLVGSSPRTCHTCGRTQPTRVVQGMGQGTEGPGAVSWASAYQLAALSPRQPHRQDKAATAIQSAWRGFKIRQQMRQQQMAAKIVQATWRGHHTRSCLKNTEALLGPADPSASSRHMHWPGI

SEQ ID NO: 22360 - protein, 1096 aa, Homo sapiens
MSPPRAAAAAGQNNMAARRITQETFDAVLQEKAKRYHMDASGEAVSETLQFKAQDLLRAVPRSRAEMYDDVHSDGRYSLSGSVAHSRDAGREGLRSDVFPGPSFRSSNPSISDDSYFRKECGRDLEFSHSDSRDQVIGHRKLGHFRSQDWKFALRGSWEQDFGHPVSQESSWSQEYSFGPSAVLGDFGSSRLIEKECLEKESRDYDVDHPGEADSVLRGGSQVQARGRALNIVDQEGSLLGKGETQGLLTAKGGVGKLVTLRNVSTKKIPTVNRITPKTQGTNQIQKNTPSPDVTLGTNPGTEDIQFPIQKIPLGLDLKNLRLPRRKMSFDIIDKSDVFSRFGIEIIKWAGFHTIKDDIKFSQLFQTLFELETETCAKMLASFKCSLKPEHRDFCFFTIKFLKHSALKTPRVDNEFLNMLLDKGAVKTKNCFFEIIKPFDKYIMRLQDRLLKSVTPLLMACNAYELSVKMKTLSNPLDLALALETTNSLCRKSLALLGQTFSLASSFRQEKILEAVGLQDIAPSPAAFPNFEDSTLFGREYIDHLKAWLVSSGCPLQVKKAEPEPMREEEKMIPPTKPEIQAKAPSSLSDAVPQRADHRVVGTIDQLVKRVIEGSLSPKERTLLKEDPAYWFLSDENSLEYKYYKLKLAEMQRMSENLRGADQKPTSADCAVRAMLYSRAVRNLKKKLLPWQRRGLLRAQGLRGWKARRATTGTQTLLSSGTRLKHHGRQAPGLSQAKPSLPDRNDAAKDCPPDPVGPSPQDPSLEASGPSPKPAGVDISEAPQTSSPCPSADIDMKTMETAEKLARFVAQVGPEIEQFSIENSTDNPDLWFLHDQNSSAFKFYRKKVFELCPSICFTSSPHNLHTGGGDTTGSQESPVDLMEGEAEFEDEPPPREAELESPEVMPEEEDEDDEDGGEEAPAPGGAGKSEGSTPADGLPGEAAEDDLAGAPALSQASSGTCFPRKRISSKSLKVGMIPAPKRVCLIQEPKVHEPVRIAYDRPRGRPMSKKKKPKDLDFAQQKLTDKNLGFQMLQKMGWKEGHGLGSLGKGIREPVSVGTPSEGEGLGADGQEHKEDTFDVFRQRMMQMYRHKRANK

SEQ ID NO: 22361 - protein, 2071 aa, Homo sapiens
MSVKEAGSSGRREQAAYHLHIYPQLSTTESQASCRVTATKDSTTSDVIKDAIASLRLDGTKCYVLVEVKESGGEEWVLDANDSPVHRVLLWPRRAQDEHPQEDGYYFLLQERNADGTIKYVHMQLVAQATATRRLVERGLLPRQQADFDDLCNLPELTEGNLLKNLKHRFLQQKIYTYAGSILVAINPFKFLPIYNPKYVKMYENQQLGKLEPHVFALADVAYYTMLRKRVNQCIVISGESGSGKTQSTNFLIHCLTALSQKGYASGVERTILGAGPVLEAFGNAKTAHNNNSSRFGKFIQVSYLESGIVRGAVVEKYLLEKSRLVSQEKDERNYHVFYYLLLGVSEEERQEFQLKQPEDYFYLNQHNLKIEDGEDLKHDFERLKQAMEMVGFLPATKKQIFAVLSAILYLGNVTYKKRATGREEGLEVGPPEVLDTLSQLLKVKREILVEVLTKRKTVTVNDKLILPYSLSEAITARDSMAKSLYSALFDWIVLRINHALLNKKDVEEAVSCLSIGVLDIFGFEDFERNSFEQFCINYANEQLQYYFNQHIFKLEQEEYQGEGITWHNIGYTDNVGCIHLISKKPTGLFYLLDEESNFPHATSQTLLAKFKQQHEDNKYFLGTPVMEPAFIIQHFAGKVKYQIKDFREKNMDYMRPDIVALLRGSDSSYVRELIGMDPVAVFRWAVLRAAIRAMAVLREAGRLRAERAEKAAGMSSPGAQSHPEELPRGASTPSEKLYRDLHNQMIKSIKGLPWQGEDPRSLLQSLSRLQKPRAFILKSKGIKQKQIIPKNLLDSKSLKLIISMTLHDRTTKSLLHLHKKKKPPSISAQFQTSLNKLLEALGKAEPFFIRCIRSNAEKKELCFDDELVLQQLRYTGMLETVRIRRSGYSAKYTFQDFTEQFQVLLPKDAQPCREVISTLLEKMKIDKRNYQIGKTKVFLKETERQALQETLHREVVRKILLLQSWFRMVLERRHFLQMKRAAVTIQACWRSYRVRRALERTQAAVYLQASWRGYWQRKLYRHQKQSIIRLQSLCRGHLQRKSFSQMISEKQKAEEKEREALEAARAGAEEGGQGQAAGGQQVAEQGPEPAEDGGHLASEPEVQPSDRSPLEHSSPEKEAPSPEKTLPPQKTVAAESHEKVPSSREKRESRRQRGLEHVKFQNKHIQSCKEESALREPSRRVTQEQGVSLLEDKKESREDETLLVVETEAENTSQKQPTEQPQAMAVGKVSEETEKTLPSGSPRPGQLERPTSLALDSRVSPPAPGSAPETPEDKSKPCGSPRVQEKPDSPGGSTQIQRYLDAERLASAVELWRGKKLVAAASPSAMLSQSLDLSDRHRATGAALTPTEERRTSFSTSDVSKLLPSLAKAQPAAETTDGERSAKKPAVQKKKPGDASSLPDAGLSPGSQVDSKSTFKRLFLHKTKDKKYSLEGAEELENAVSGHVVLEATTMKKGLEAPSGQQHRHAAGEKRTKEPGGKGKKNRNVKIGKITVSEKWRESVFRQITNANELKYLDEFLLNKINDLRSQKTPIESLFIEATEKFRSNIKTMYSVPNGKIHVGYKDLMENYQIVVSNLATERGQKDTNLVLNLFQSLLDEFTRGYTKNDFEPVKQSKAQKKKRKQERAVQEHNGHVFASYQVSIPQSCEQCLSYIWLMDKALLCSVCKMTCHKKCVHKIQSHCSYTYGRKGEPGVEPGHFGVCVDSLTSDKASVPIVLEKLLEHVEMHGLYTEGLYRKSGAANRTRELRQALQTDPAAVKLENFPIHAITGVLKQWLRELPEPLMTFAQYGDFLRAVELPEKQEQLAAIYAVLEHLPEANHNSLERLIFHLVKVALLEDVNRMSPGALAIIFAPCLLRCPDNSDPLTSMKDVLKITTCVEMLIKEQMRKYKVKMEEISQLEAAESIAFRRLSLLRQNANKSPKTRDIQEEELEVLLEEEAAGGDEDREKEILIERIQSIKEEKEDITYRLPELDPRGSDEENLDSETSASTESLLEERAGRGASEGPPAPALPCPGAPTPSPLPTVAAPPRRRPSSFVTVRVKTPRRTPIMPTANIKLPPGLPSHLPRWAPGA

SEQ ID NO: 22362 - protein, 535 aa, Homo sapiens
MTEKFLFLYLSLLPMPLLSQAQWNENSLVSFSKIIASGNHLSNCWICHNFITRSSSYQYILVRNFSLNLTFGSGIPEGQHKSVPLQVSLANSAHQVPCLDLTPPFNQSSKTSFYFYNCSSLNQTCCPCPEGHCDRKNTSEEGFPSPTIHPMSFSPAGCHPNLTHWCPAKQMNDYRDKSPQNRCAAWEGKELITWRVLYSLPKAHTVPTWPKSTVPLGGPLSPACNQTIPAGWKSQLHKWFDSHIPRWACTPPGYVFLCGPQKNKLPFDGSPKITYSTPPVANLYTCINNIQHTGECAVGLLGPRGIGVTIYNTTQPRQKRALGLILAGMGAAIGMIAPWGGFTYHDVTLRNLSRQIDNIAKSTRDSISKLKASIDSLANVVMDNRLALDYLLAEQGGVCAVINKSCCVYVNNSGAIEEDIKKIYDEATWLHDFGKGGASARAIWEAVKSALPSLNWFVPLLGPATVILLLFLFGPCFFNLLIKCVSSRIKQFHMKSPQMERYQLSVIGGPSTYKHISPLDASGQRFRETMEEFSL

SEQ ID NO: 22363 - protein, 845 aa, Homo sapiens
MELWRQCTHWLIQCRVLPPSHRVTWDGAQVCELAQALRDGVLLCQLLNNLLPHAINLREVNLRPQMSQFLCLKNIRTFLSTCCEKFGLKRSELFEAFDLFDVQDFGKVIYTLSALSWTPIAQNRGIMPFPTEEESVGDEDIYSGLSDQIDDTVEEDEDLYDCVENEEAEGDEIYEDLMRSEPVSMPPKMTEYDKRCCCLREIQQTEEKYTDTLGSIQQHFLKPLQRFLKPQDIEIIFINIEDLLRVHTHFLKEMKEALGTPGAANLYQVFIKYKERFLVYGRYCSQVESASKHLDRVAAAREDVQMKLEECSQRANNGRFTLRDLLMVPMQRVLKYHLLLQELVKHTQEAMEKENLRLALDAMRDLAQCVNEVKRDNETLRQITNFQLSIENLDQSLAHYGRPKIDGELKITSVERRSKMDRYAFLLDKALLICKRRGDSYDLKDFVNLHSFQVRDDSSGDRDNKKWSHMFLLIEDQGAQGYELFFKTRELKKKWMEQFEMAISNIYPENATANGHDFQMFSFEETTSCKACQMLLRGTFYQGYRCHRCRASAHKECLGRVPPCGRHGQDFPGTMKKDKLHRRAQDKKRNELGLPKMEVFQEYYGLPPPPGAIGPFLRLNPGDIVELTKAEAEQNWWEGRNTSTNEIGWFPCNRVKPYVHGPPQDLSVHLWYAGPMERAGAESILANRSDGTFLVRQRVKDAAEFAISIKYNVEVKHIKIMTAEGLYRITEKKAFRGLTELVEFYQQNSLKDCFKSLDTTLQFPFKEPEKRTISRPAVGSTKYFGTAKARYDFCARDRSELSLKEGDIIKILNKKGQQGWWRGEIYGRVGWFPANYVEEDYSEYC

SEQ ID NO: 22364 - protein, 1253 aa, Homo sapiens
MLSWRLQTGPEKAELQELNARLYDYVCRVRELERENLLLEEELRGRRGREGLWAEGQARCAEEARSLRQQLDELSWATALAEGERDALRRELRELQRLDAEERAARGRLDAELGAQQRELQEALGARAALEALLGRLQAERRGLDAAHERDVRELRARAASLTMHFRARATGPAAPPPRLREVHDSYALLVAESWRETVQLYEDEVRELEEALRRGQESRLQAEEETRLCAQEAEALRREALGLEQLRARLEDALLRMREEYGIQAEERQRVIDCLEDEKATLTLAMADWLRDYQDLLQVKTGLSLEVATYRALLEGESNPEIVIWAEHVENMPSEFRNKSYHYTDSLLQRENERNLFSRQKAPLASFNHSSALYSNLSGHRGSQTGTSIGGDARRGFLGSGYSSSATTQQENSYGKAVSSQTNVRTFSPTYGLLRNTEAQVKTFPDRPKAGDTREVPVYIGEDSTIARESYRDRRDKVAAGASESTRSNERTVILGKKTEVKATREQERNRPETIRTKPEEKMFDSKEKASEERNLRWEELTKLDKEARQRESQQMKEKAKEKDSPKEKSVREREVPISLEVSQDRRAEVSPKGLQTPVKDAGGGTGREAEARELRFRLGTSDATGSLQGDSMTETVAENIVTSILKQFTQSPETEASADSFPDTKVTYVDRKELPGERKTKTEIVVESKLTEDVDVSDEAGLDYLLSKDIKEVGLKGKSAEQMIGDIINLGLKGREGRAKVVNVEIVEEPVSYVSGEKPEEFSVPFKVEEVEDVSPGPWGLVKEEEGYGESDVTFSVNQHRRTKQPQENTTHVEEVTEAGDSEGEQSYFVSTPDEHPGGHDRDDGSVYGQIHIEEESTIRYSWQDEIVQGTRRRTQKDGAVGEKVVKPLDVPAPSLEGDLGSTHWKEQARSGEFHAEPTVIEKEIKIPHEFHTSMKGISSKEPRQQLVEVIGQLEETLPERMREELSALTREGQGGPGSVSVDVKKVQGAGGSSVTLVAEVNVSQTVDADRLDLEELSKDEASEMEKAVESVVRESLSRQRSPAPGSPDEEGGAEAPAAGIRFRRWATRELYIPSGESEVAGGASHSSGQRTPQGPVSATVEVSSPTGFAQSQVLEDVSQAARHIKLGPSEVWRTERMSYEGPTAEVVEMDVSNVEAIRSRTQEAGALGVSDRGSWRDADSRNDQAVGVSFKASAGEGDQAHREQGKEQAMFDKKVQLQRMVDQRSVISDEKKVALLYLDNEEEENDGHWF

SEQ ID NO: 22365 - protein, 167 aa, Homo sapiens
YRGRDRLIRVLGYCCQLVGGVLVEQCPARSEVGTRLLVVSTQLSHCRTILRLFDDLAMFVYTKQYGLGAQEEDAFVRCVSVLGNLADQLYYPCEHVAWAADARVLHVDSSRWWTLSTTLWALSLLLGVARSLWMLLKLRQRLRSPTAPFTSMYQAARAGGQAEATTP

SEQ ID NO: 22366 - protein, 503 aa, Homo sapiens
MGALTFRDVAIEFSLEEWQCLDTEQQNLYRNVMLDNYRNLVFLGIAVSKPDLITCLEQEKEPWNLKTHDMVAKPPVICSHIAQDLWPEQGIKDYFQEVILRQYKKCRHENLLLRKGCKNVDEFKMHKKGYNRHNQCLTTSHSKIFQCDKYVKVFHKFSNSNRHKIRHTSKKPFKCKECGKLFCILSHLAQHKKIHTGEKSYKCEEYGKAFNESSNCTTHKRITEKKPYKCKECGKAFNWFSHFTTHKRIHTGEKPYQCEKCGKFFNQSTNLTTHKRIHTGEKPYKCEECGKAFNQSSNLTEHKKIHTKEQPYKCEKCGKAFKWSSTLTKHKRIHNGEKPYKCEECGKAFNRSSTLNRHKITHTGGKPYKYKECGKAFNQSSTLTIHKIIHTVEKFYKCEECGKAFSRISHLTTHKRIHTGEKPYKCEECGRAFNQSSTLTTHKRIHTGEKPYECEECGKAFNRSSTLTTHKIIHSGEKIYKCKECGKAFRRFSHLTRHKTIHT

SEQ ID NO: 22367 - protein, 864 aa, Homo sapiens
MGSLTFWDVTIEFALEEWQCLDMAQQNLYRNVMLENYRNLVFLGIAVSKLDLITCLKQGKEPWNMKRHEMVTKPPVISSHFTQDFWPDQSIKDSFQEIILRTYARCGHKNLRLRKDCESVNEGKMHEEAYNKLNQCWTTTQGKIFQCNKYVKVFHKYSNSNRYKIRHTKKKTFKCMKCSKSFFMLSHLIQHKRIHTRENIYKCEERGKAFKWFSTLIKHKIIHTEDKPYKYKKCGKAFNISSMFTKCKIIHTGKKPCKCEECGKVFNNSSTLMKHKIIHTGKKPYKCEECGKAFKQSSHLTRHKAIHTGEKPYKCEECGKAFNHFSALRKHQIIHTGKKPYKCEECGKAFSQSSTLRKHEIIHTEEKPYKYEECGKAFSNLSALRKHEIIHTGQKPYKCEECGKAFKWSSKLTVHKVIHTAEKPCKCEECGKAFKRFSALRKHKIIHTGKQPYKCEECSKAFSNFSALRKHEIIHTGEKPYKCEECGKAFKWSSKLTVHKVIHMEEKPCKCEECGKAFKHFSALRKHKIIHTGKKPYKCEECGKAFNNSSTLMKHKIIHTGKKPYKCEECGKAFKQSSHLTRHKAIHTGEKPYKCEECGKAFNHFSALRKHQIIHTGKKPYKCEECGKAFSQSSTLRKHEIIHTGEKPYKCEECGKAFKWSSHLTRHKVIHTEEKPYKCEECGKAFNHFSALRKHKIIHTGKKPYKCEECGKAFSQSSTLRKHEIIHTGEKPYKCEECGKAFKWSSKLTVHKVIHTAEKPCKCEECGKAFKHFSALRKHKIIHTGKKPYKCEECGKAFNNSSTLRKHEIIHTGEKSYKCEECGKAFQWSSKLTLHKVIHMERNPANVKNVAKLLNISQPLENMR

SEQ ID NO: 22368 - protein, 663 aa, Homo sapiens
MAPPPPPLAASTPLLHGEFGSYPARGPRFALTLTSQALHIQRLRPKPEARPRGGLVPLAEVSGCCTLRSRSPSDSAAYFCIYTYPRGRRGARRRATRTFRADGAATYEENRAEAQRWATALTCLLRGLPLPGDGEITPDLLPRPPRLLLLVNPFGGRGLAWQWCKNHVLPMISEAGLSFNLIQTERQNHARELVQGLSLSEWDGIVTVSGDGLLHEVLNGLLDRPDWEEAVKMPVGILPCGSGNALAGAVNQHGGFEPALGLDLLLNCSLLLCRGGGHPLDLLSVTLASGSRCFSFLSVAWGFVSDVDIQSERFRALGSARFTLGTVLGLATLHTYRGRLSYLPATVEPASPTPAHSLPRAKSELTLTPDPAPPMAHSPLHRSVSDLPLPLPQPALASPGSPEPLPILSLNGGGPELAGDWGGAGDAPLSPDPLLSSPPGSPKAALHSPVSEGAPVIPPSSGLPLPTPDARVGASTCGPPDHLLPPLGTPLPPDWVTLEGDFVLMLAISPSHLGADLVAAPHARFDDGLVHLCWVRSGISRAALLRLFLAMERGSHFSLGCPQLGYAAARAFRLEPLTPRGVLTVDGEQVEYGPLQAQMHPGIARGRTQTPALPAAPALYGRQPGAAHGLQPVCQGAALFFHNSWLWGSQDLFRIVLTEAVGG

SEQ ID NO: 22369 - protein, 437 aa, Homo sapiens
MTQFLPPNLLALFAPRDPIPYLPPLEKLPHEKHHNQPYCGIAPYIREFEDPRDAPPPTRAETREERMERKRREKIERRQQEVETELKMWDPHNDPNAQGDAFKTLFVARVNYDTTESKLRREFEVYGPIKRIHMVYSKRSGKPRGYAFIEYEHERDMHSAYKHADGKKIDGRRVLVDVERGRTVKGWRPRRLGGGLGGTRRGGADVNIRHSGRDDTSRYDERPGPSPLPHRDRDRDRERERRERSRERDKERERRRSRSRDRRRRSRSRDKEERRRSRERSKDKDRDRKRRSSRSRERARRERERKEELRGGGGDMAEPSEAGDAPPDDGPPGELGPDGPDGPEEKGRDRDRERRRSHRSERERRRDRDRDRDRDREHKRGERGSERGRDEARGGGGGQDNGLEGLGNDSRDMYMESEGGDGYLAPENGYLMEAAPE

SEQ ID NO: 22370 - protein, 891 aa, Homo sapiens
MSYFGEHFWGEKNHGFEVLYHSVKQGPISTKELADFIRERATIEETYSKAMAKLSKLASNGTPMGTFAPLWEVFRVSSDKLALCHLELTRKLQDLIKDVLRYGEEQLKTHKKCKEEVVSTLDAVQVLSGVSQLLPKSRENYLNRCMDQERLRRESTSQKEMDKAETKTKKAAESLRRSVEKYNSARADFEQKMLDSALRFQAMEETHLRHMKALLGSYAHSVEDTHVQIGQVHEEFKQNIENVSVEMLLRKFAESKGTGREKPGPLDFEAYSAAALQEAMKRLRGAKAFRLPGLSRREREPEPPAAVDFLEPDSGTCPEVDEEGFTVRPDVTQNSTAEPSRFSSSDSDFDDEEPRKFYVHIKPAPARAPACSPEAAAAQLRATAGSLILPPGPGGTMKRHSSRDAAGKPQRPRSAPRTSSCAERLQSEEQVSKNLFGPPLESAFDHEDFTGSSSLGFTSSPSPFSSSSPENVEDSGLDSPSHAAPGPSPDSWVPRPGTPQSPPSCRAPPPEARGIRAPPLPDSPQPLASSPGPWGLEALAGGDLMPAPADPTAREGLAAPPRRLRSRKVSCPLTRSNGDLSRSLSPSPLGSSAASTALERPSFLSQTGHGVSRGPSPVVLGSQDALPIATAFTEYVHAYFRGHSPSCLARVTGELTMTFPAGIVRVFSGTPPPPVLSFRLVHTTAIEHFQPNADLLFSDPSQSDPETKDFWLNMAALTEALQRQAEQNPTASYYNVVLLRYQFSRPGPQSVPLQLSAHWQCGATLTQVSVEYGYRPGATAVPTPLTNVQILLPVGEPVTNVRLQPAATWNLEEKRLTWRLPDVSEAGGSGRLSASWEPLSGPSTPSPVAAQFTSEGTTLSGVDLELVGSGYRMSLVKRRFATAAPPQGCTW

SEQ ID NO: 22371 - protein, 185 aa, Homo sapiens
MLPLEKAFASPRSSPAPPDLPTPGSAAGVQQEEPETIPERTPADLEFSRLRFREFVYQEAAGPHQTLARLHELCRQWLMPEARSKEQMLELLVLEQFLGILPDKVRPWVVAQYPESCKKAASLVEGLADVLEEPGMLLGSPAGSSSILSDGVYERHMDPLLLPGELASPSQALGAGEIPAPSETR

SEQ ID NO: 22372 - protein, 182 aa, Homo sapiens
PAPRHVFGLEKSQLLKEAFDKAGPVPKGREDVKRLLKLHKDRFRGDLRWILFCADLPSLIQEGPQCGLVALWMAGTLLSPPSGVPLERLIRVATERGYTAQGEMFSAPATTRTSTMSRVRGRATRHTGRGRLCHLTRHLRNLLPGPSASHRTGTLNCVSLSSPLLSPSFKAHLGAVTCASPS

SEQ ID NO: 22373 - protein, 128 aa, Homo sapiens
MSGAPTAGAALMLCAATAVLLSAQGGPVQSKSPRFASWDEMNVLAHGLLQLGQGLREHAERTRSQLSALERRLSACGSFTACRHNSRLRTAGSSNSSTRWPSSSGTWRSSTCEFSICKASLASWTTST

SEQ ID NO: 22374 - protein, 104 aa, Homo sapiens
MVNEPPVMCSHFAQEFWPEQNIKDSFEKVTLRRYEKCGNDNFQLKGCKSVDECKLHKGGYNGLNQCLPTMQSKMFQCDKYVKVFNKFSHSDRHKIKHMENKPFK

SEQ ID NO: 22375 - protein, 635 aa, Homo sapiens
MAMSLLQDWCRSLDVDAHRALLVTGIPEGLEQADVEAVLQPTLLPLGTFRLRHMKALMNEKAQAALVEFVEDVNHAAIPREIPGKDGVWRVLWKDRAQDTRVLRQMRRLLLDDGPTQAAEAGTPGEAPTPPASETQAQDSGEVTGQAGSLLGAARNPRRGRRGRRNRTRRNRLTQKGKKRSRGGRPSAPARSEAEDSSDESLGIVIEEIDQGDLSGEEDQSALYATLQAAARELVRQWAPCNSEGEEDGPREFLALVTVTDKSKKEEAEKEPAGAESIRLNTKEDKNGVPDLVALLAVRDTPDEEPVDSDTSESDSQESGDQETEELDNPEFVAIVAYTDPSDPWAREEMLKIASVIESLGWSDEKDKRDPLRQVLSVMSKDTNGTRVKVEEAGREVDAVVLRKAGDDGDLRECISTLAQPDLPPQAKKAGRGLFGGWSEHREDEGGLLELVALLAAQDMAEVMKEEKENAWEGGKYKYPKGKLGEVLALLAARENMGSNEGSEEASDEQSEEESEDTESEASEPEDRASRKPRAKRARTAPRGLTPAGAPPTASGARKTRAGGRGRGRGVTPEKKAGSRGSAQDDAAGSRKKKGSAGAGAHARAGEAKGQAPTGSKAARGKKARRGRRLPPKCR

SEQ ID NO: 22376 - protein, 282 aa, Homo sapiens
MQRLRWLRDWKSSGRGLTAAKEPGARSSPLQAMRILQLILLALATGLVGGETRIIKGFECKPHSQPWQAALFEKTRLLCGATLIAPRWLLTAAHCLKPRYIVHLGQHNLQKEEGCEQTRTATESFPHPGFNNSLPNKDHRNDIMLVKMASPVSITWAVRPLTLSSRCVTAGTSCLISGWGSTSSPQLRLPHTLRCANITIIEHQKCENAYPGNITDTMVCASVQEGGKDSCQGDSGGPLVCNQSLQGIISWGQDPCAITRKPGVYTKVCKYVDWIQETMKNN

SEQ ID NO: 22377 - protein, 683 aa, Homo sapiens
MIEDSGKRGNTMAERRQLFAEMRAQDLDRIRLSTYRTACKLRFVQKKCNLHLVDIWNVIEALRENALNNLDPNTELNVSRLEAVLSTIFYQLNKRMPTTHQIHVEQSISLLLNFLLAAFDPEGHGKISVFAVKMALATLCGGKIMDKLRYIFSMISDSSGVMVYGRYDQFLREVLKLPTAVFEGPSFGYTEQSARSCFSQQKKVTLNGFLDTLMSDPPPQCLVWLPLLHRLANVENVFHPVECSYCHSESMMGFRYRCQQCHNYQLCQDCFWRGHAGGSHSNQHQMKEYTSWKSPAKKLTNALSKSLSCASSREPLHPMFPDQPEKPLNLAHIVPPRPVTSMNDTLFSHSVPSSGSPFITRSMLESSNRLDEEHRLIARYAARLAAESSSSQPPQQRSAPDISFTIDANKQQRQLIAELENKNREILQEIQRLRLEHEQASQPTPEKAQQNPTLLAELRLLRQRKDELEQRMSALQESRRELMVQLEGLMKLLKTQGAGSPRSSPSHTISRPIPMPIRSASACSTPTHTPQDSLTGVGGDVQEAFAQSSRRNLRNDLLVAADSITNTMSSLVKELNSEVGSETESNVDSEFARTQFEDLVPSPTSEKAFLAQIHARKPGYIHSGATTSTMRGDMVTEDADPYVQPEDENYENDSVRQLENELQMEEYLKQKLQDEAYQVSLQG

SEQ ID NO: 22378 - protein, 104 aa, Homo sapiens
MSGAPTAGAALMLCAATAVLLSAQGGPVQSKSPRFASWDEMNVLAHGLLQLGQGLREHAERTRSQLSALERRLSACGSACQGTEGSTDLPLAPESRVDPEVLHS

SEQ ID NO: 22379 - protein, 182 aa, Homo sapiens
PPPADVTEEELLQMLEEDQAGFRIPMSLGEPHAELDAKGQGCTAYDVAVNSDFYRRMQNSDFLRELVITIAREGLEDKYNLQLNPEWRMMKNRPFMGSISQQNIRSEQRPRIQELGDLYTPAPGRAESGPEKPHLNLWLEAPDLLLAEVDLPKLINSHESKAAFHRKRKQLMVAMPLLPVPS

SEQ ID NO: 22380 - protein, 241 aa, Homo sapiens
MTRHGKNCTAGAVYTYHEKKKDTAASGYGTQNIRLSRDAVKDFDCCCLSLQPCHDPVVTPDGYLYEREAILEYILHQKKEIARQMKAYEKQRGTRREEQKELQRAASQDHVRGFLEKESAIVSRPLNPFTAKALSGTSPDDVQPGPSVGPPSKDKDKVLPSFWIPSLTPEAKATKLEKPSRTVTCPMSGKPLRMSDLTPVHFTPLDSSVDRVGLITRSERYVCAVTRDSLSNATPCAVLRP

SEQ ID NO: 22381 - protein, 510 aa, Homo sapiens
MIEDSGKRGNTMAERRQLFAEMRAQDLDRIRLSTYRTACKLRFVQKKCNLHLVDIWNVIEALRENALNNLDPNTELNVSRLEAVLSTIFYQLNKRMPTTHQIHVEQSISLLLNFLLAAFDPEGHGKISVFAVKMALATLCGGKIMDKLRYIFSMISDSSGVMVYGRYDQFLREVLKLPTAVFEGPSFGYTEQSARSCFSQQKKVTLNGFLDTLMSDPPPQCLVWLPLLHRLANVENVFHPVECSYCHSESMMGFRYRCQQCHNYQLCQDCFWRGHAGGSHSNQHQMKEYTSWKSPAKKLTNALSKSLSCASSREPLHPMFPDQPEKPLNLAHIVPPRPVTSMNDTLFSHSVPSSGSPFITRSMLESSNRLDEEHRLIARYAARLAAESSSSQPPQQRSAPDISFTIDANKQQRQLIAELENKNREILQEIQRLRLEHEQASQPTPEKAQQNPTLLAELRLLRQRKDELEQRMSALQESRRELMVQLEGLMKLLKEEELKQGVSYVPYCRS

SEQ ID NO: 22382 - protein, 673 aa, Homo sapiens
MASGSGDSVTRRSVASQFFTQEEGPGIDGMTTSERVVDLLNQAALITNDSKITVLKQVQELIINKDPTLLDNFLDEIIAFQADKSIEVRKFVIGFIEEACKRDIELLLKLIANLNMLLRDENVNVVKKAILTMTQLYKVALQWMVKSRVISELQEACWDMVSAMAGDIILLLDSDNDGIRTHAIKFVEGLIVTLSPRMADSEIPRRQEHDISLDRIPRDHPYIQYNVLWEEGKAALEQLLKFMVHPAISSINLTTALGSLANIARQRPMFMSEVIQAYETLHANLPPTLAKSQVSSVRKNLKLHLLSVLKHPASLEFQAQITTLLVDLGTPQAEIARNMPSSKDTRKRPRDDSDSTLKKMKLEPNLGEDDEDKDLEPGPSGTSKASAQISGQSDTDITAEFLQPLLTPDNVANLVLISMVYLPEAMPASFQAIYTPVESAGTEAQIKHLARLMATQMTAAGLGPGVEQTKQCKEEPKEEKVVKTESVLIKRRLSAQGQAISVVGSLSSMSPLEEEAPQAKRRPEPIIPVTQPRLAGAGGRKKIFRLSDVLKPLTDAQVEAMKLGAVKRILRAEKAVACSGAAQVRIKILASLVTQFNSGLKAEVLSFILEDVRARLDLAFAWLYQEYNAYLAAGSSPRLCWRRHSSQRVPWRWSASTARMRVAPIWACPHFET

SEQ ID NO: 22383 - protein, 1286 aa, Homo sapiens
GPGARGRRRRRRPMSPPPPPPPVRALPLLLLLAGPGAAAPPCLDGSPCANGGRCTQLPSREAACLCPPGWVGERCQLEDPCHSGPCAGRGVCQSSVVAGTARFSCRCPRGFRGPDCSLPDPCLSSPCAHGARCSVGPDGRFLCSCPPGYQGRSCRSDVDECRVGEPCRHGGTCLNTPGSFRCQCPAGYTGPLCENPAVPCAPSPCRNGGTCRQSGDLTYDCACLPGFEGQNCEVNVDDCPGHRCLNGGTCVDGVNTYNCQCPPEWTGQFCTEDVDECQLQPNACHNGGTCFNTLGGHSCVCVNGWTGESCSQNIDDCATAVCFHGATCHDRVASFYCACPMGKTGLLCHLDDACVSNPCHEDAICDTNPVNGRAICTCPPGFTGGACDQDVDECSIGANPCEHLGRCVNTQGSFLCQCGRGYTGPRCETDVNECLSGPCRNQATCLDRIGQFTCICMAGFTGTYCEVDIDECQSSPCVNGGVCKDRVNGFSCTCPSGFSGSTCQLDVDECASTPCRNGAKCVDQPDGYECRCAEGFEGTLCDRNVDDCSPDPCHHGRCVDGIASFSCACAPGYTGTRCESQVDECRSQPCRHGGKCLDLVDKYLCRCPSGTTGVNCEVNIDDCASNPCTFGVCRDGINRYDCVCQPGFTGPLCNVEINECASSPCGEGGSCVDGENGFRCLCPPGSLPPLCLPPSHPCAHEPCSHGICYDAPGGFRCVCEPGWSGPRCSQSLARDACESQPCRAGGTCSSDGMGFHCTCPPGVQGRQCELLSPCTPNPCEHGGRCESAPGQLPVCSCPQGWQDPCLNGGSCQDGVGSFSCSCLPGFAGPRCARDVDECLSNPCGPGTCTDHVASFTCTCPPGYGGFHCEQDLPDCSPSSCFNGGTCVDGVNSFSCLCRPGYTGAHCQHEADPCLSRPCLHGGVCSAAHPGFRCTCLESFTGPQCQTLVDWCSRQPCQNGGRCVQTGAYCLCPPGWSGRLCDIRSLPCREAAAQIGVRLEQLCQAGGQCVDEDSSHYCVCPEGRTGSHCEQEVDPCLAQPCQHGGTCRGYMGGYMCECLPGYNGDNCEDDVDECASQPCQHGGSCIDLVARYLCSCPPGTLGVLCEINEDDCGPGPPLDSGPRCLHNGTCVDLVGGFRCTCPPGYTGLRCEADINECRSGACHAAHTRDCLQDPGGGFRCLCHAGFSGPRCQTVLSPCESQPCQHGGQCRPSPGPGGGLTFTCHCAQPFWGPRCERVARSCRELQCPVGVPCQQTPRGPRCACPPGLSGPSCRSFPGSPPGASNASC

SEQ ID NO: 22384 - protein, 640 aa, Homo sapiens
FLPPEASQLKPDRQQFQSRKRPYEENRGRGYFEHREDRRGRSPQPPAEEDEDDFDDTLVAIDTYNCDLHFKVARDRSSGYPLTIEGFAYLWSGARASYGVRRGRVCFEMKINEEISVKHLPSTEPDPHVVRIGWSLDSCSTQLGEEPFSYGYGGTGKKSTNSRFENYGDKFAENDVIGCFADFECGNDVELSFTKNGKWMGIAFRIQKEALGGQALYPHVLVKNCAVEFNFGQRAEPYCSVLPGFTFIQHLPLSERIRGTVGPKSKAECEILMMVGLPAAGKTTWAIKHAASNPSKKYNILGTNAIMDKMRVMGLRRQRNYAGRWDVLIQQATQCLNRLIQIAARKKRNYILDQTNVYGSAQRRKMRPFEGFQRKAIVICPTDEDLKDRTIKRTDEEGKDVPDHAVLEMKANFTLPDVGDFLDEVLFIELQREEADKLVRQYNEEGRKAGPPPEKRFDNRGGGGFRGRGGGGGFQRYENRGPPGGNRGGFQNRGGGSGGGGNYRGGFNRSGGGGYSQNRWGNNNRDNNNSNNRGSYNRAPQQQPPPQQPPPPQPPPQQPPPPPSYSPARNPPGASTYNKNSNIPGSSANTSTPTVSSYSPPQYAQQWNQYYQNQGQWPPYYGNYDYGSYSGNTQGGTSTQ

SEQ ID NO: 22385 - protein, 841 aa, Homo sapiens
MAARRITQETFDAVLQEKAKRYHMDASGEAVSETLQFKAQDLLRAVPRSRAEMYDDVHSDGRYSLSGSVAHSRDAGREGLRSDVFPGPSFRSSNPSISDDSYFRKECGRDLEFSHSDSRDQVIGHRKLGHFRSQDWKFALRGSWEQDFGHPVSQESSWSQEYSFGPSAVLGDFGSSRLIEKECLEKESRDYDVDHPGEADSVLRGGSQVQARGRALNIVDQEGSLLGKGETQGLLTAKGGVGKLVTLRNVSTKKIPTVNRITPKTQGTNQIQKNTPSPDVTLGTNPGTEDIQFPIQKIPLGLDLKNLRLPRRKMSFDIIDKSDVFSRFGIEIIKWAGFHTIKDDIKFSQLFQTLFELETETCAKMLASFKCSLKPEHRDFCFFTIKFLKHSALKTPRVDNEFLNMLLDKGAVKTKNCFFEIIKPFDKYIMRLQDRLLKSVTPLLMACNAYELSVKMKTLSNPLDLALALETTNSLCRKSLALLGQTFSLASSFRQEKILEAVGLQDIAPSPAAFPNFEDSTLFGREYIDHLKAWLVSSGCPLQVKKAEPEPMREEEKMIPPTKPEIQAKAPSSLSDAVPQRADHRVVGTIDQLVKRVIEGSLSPKERTLLKEDPAYWFLSDENSLEYKYYKLKLAEMQRMSENLRGADQKPTSADCAVRAMLYSRAVRNLKKKLLPWQRRGLLRAQGLRGWKARRATTGTQTLLSSGTRLKHHGRQAPGLSQAKPSLPDRNDAAKDCPPDPVGPSPQDPSLEASGPSPKPAGVDISEAPQTSSPCPSADIDMKTMETAEKLARFVAQVGPEIEQFSIENSTDNPDLWGPAFISGIRKNLPRGTFNLHPKAK

SEQ ID NO: 22386 - protein, 1464 aa, Homo sapiens
MYQPEDDNNSDVTSDDDMTRNRRESSPPHSVHSFSGDRDWDRRGRSRDMEPRDRWSHTRNPRSRMPPRDLSLPVVAKTSFEMDREDDRDSRAYESRSQDAESYQNVVDLAEDRKPHNTIQDNMENYRKLLSLGVQLAEDDGHSHMTQGHSSRSKRSAYPSTSRGLKTMPEAKKSTHRRGICEDESSHGVIMEKFIKDVSRSSKSGRARESSDRSQRFPRMSDDNWKDISLNKRESVIQQRVYEGNAFRGGFRFNSTLVSRKRVLERKRRYHFDTDGKGSIHDQKGCPRKKPFECGSEMRKAMSVSSLSSLSSPSFTESQPIDFGAMPYVCDECGRSFSVISEFVEHQIMHTRENLYEYGESFIHSVAVSEVQKSQVGGKRFECKDCGETFNKSAALAEHRKIHARGYLVECKNQECEEAFMPSPTFSELQKIYGKDKFYECRVCKETFLHSSALIEHQKIHFGDDKDNEREHERERERERGETFRPSPALNEFQKMYGKEKMYECKVCGETFLHSSSLKEHQKIHTRGNPFENKGKVCEETFIPGQSLKRRQKTYNKEKLCDFTDGRDAFMQSSELSEHQKIHSRKNLFEGRGYEKSVIHSGPFTESQKSHTITRPLESDEDEKAFTISSNPYENQKIPTKENVYEAKSYERSVIHSLASVEAQKSHSVAGPSKPKVMAESTIQSFDAINHQRVRAGGNTSEGREYSRSVIHSLVASKPPRSHNGNELVESNEKGESSIYISDLNDKRQKIPARENPCEGGSKNRNYEDSVIQSVFRAKPQKSVPGEGSGEFKKDGEFSVPSSNVREYQKARAKKKYIEHRSNETSVIHSLPFGEQTFRPRGMLYECQECGECFAHSSDLTEHQKIHDREKPSGSRNYEWSVIRSLAPTDPQTSYAQEQYAKEQARNKCKDFRQFFATSEDLNTNQKIYDQEKSHGEESQGENTDGEETHSEETHGQETIEDPVIQGSDMEDPQKDDPDDKIYECEDCGLGFVDLTDLTDHQKVHSRKCLVDSREYTHSVIHTHSISEYQRDYTGEQLYECPKCGESFIHSSFLFEHQRIHEQDQLYSMKGCDDGFIALLPMKPRRNRAAERNPALAGSAIRCLLCGQGFIHSSALNEHMRLHREDDLLEQSQMAEEAIIPGLALTEFQRSQTEERLFECAVCGESFVNPAELADHVTVHKNEPYEYGSSYTHTSFLTEPLKGAIPFYECKDCGKSFIHSTVLTKHKELHLEEEEEDEAAAAAAAAAQEVEANVHVPQVVLRIQGLNVEAAEPEVEAAEPEVEAAEPEVEAAEPNGEAEGPDGEAAEPIGEAGQPNGEAEQPNGDADEPDGAGIEDPEERAEEPEGKAEEPEGDADEPDGVGIEDPEEGEDQEIQVEEPYYDCHECTETFTSSTAFSEHLKTHASMIIFEPANAFGECSGYIERASTSTGGANQADEKYFKCDVCGQLFNDRLSLARHQNTHTG

SEQ ID NO: 22387 - protein, 703 aa, Homo sapiens
MCVFLHLLSYIKDTSFIPGPDCELHPRGMAATGPCSEAPVQGCDAGELQQLGLCGVSDVQRSWSKFCNFPLTGYHVSKPDVIFKLEQGEEPWIVEEFSNQNYPDIDDALEKNKEIQDKHLTQTVFFSNKTLITERENVFGKTLNLGMNSVPSRKMPYKCNPGGNSLKTNSEVIVAKKSKENRKIPDGYSGFGKHEKSHLGMKKYRYNPMRKASNQNENLILHQNIQILKQPFDYNKCGKTFFKRAILITQKGRQTERKPNECNECRKTFSKRSTLIVHQRIHTGEKPYVCSDCRKTFRVKTSLTRHRRIHTGERPYECSECRKTFIDKSALIVHQKIHGGEKSYECNECGKTFFRKSALAEHFRSHTGEKPYECKECGNAFSKKSYLVVHQRTHRGEKPNECKECGKTFFCQSALTAHQRIHTGEKPYECSECEKTFFCQSALNVHRRSHTGEKPYECSQCGKFLCTKSALIAHQITHRGKKSYECNECGKFFCHKSTLTIHQRTHTGEKHGVFNKCGRISIVKSNCSQCKRMNTKENLYECSEHGHAVSKNSHLIVHQRTIWERPYECNECGRTYCRKSALTHHQRTHTGQRPYECNECGKTFCQKFSFVEHQRTHTGEKPYECNECGKSFCHKSAFRVHRRIHTGEKPYECNQCGKTYRRLWTLTEHQKIHTGEKPYECNKCEKTFRHKSNFLLHQKSHKE

SEQ ID NO: 22388 - protein, 109 aa, Homo sapiens
FCPGSQCCVEDGPESIDSIIDMDAVCKRVTTLGLDVSVTISQDAGRKKPFPAKGDCVFCRRRRARSLQAQCGFSLTPALELLPVPFLKLLCPGPPRRRRICRILPGAGL

SEQ ID NO: 22389 - protein, 396 aa, Homo sapiens
GVAAYMKSEDPLFVLEHSLPIDTQYYLEQQLAKPLLRIFEPILGEGRAEAVLLRGDHTRCKTVLTGKVGGLLAFAKRRNCCIGCRTVLSHQGAVCEFCQPRESELYQKEVSHLNALEERFSRLWTQCQRCQGSLHEDVICTRLDGPHFSCLYPDGVFYDLDSCKHSSYPDSEGAPDSLWDWTVAPPVPATPYEAFDPAAAAFSHPQAAQLCYEPPTYSPAGNLELAPSLEAPGPGLPAYPTENFASQTLVPPAYAPYPSPVLSEEEDLPLDSPALEVSDSESDEALVAGPEGKGSEAGTRKKLRLYQFLLGLLTRGDMRECVWWVEPGAGVFQFSSKHKELLARRWGQQKGNRKRMTYQKLARALRNYAKTGEIRKVKRKLTYQFDSALLPAVRRA

SEQ ID NO: 22390 - protein, 551 aa, Homo sapiens; identical to SEQ ID NO: 16182

SEQ ID NO: 22391 - protein, 167 aa, Homo sapiens
MNRPAPVEISYENMRFLITHNPTNATLNKFTEELKKYGVTTLVRVCDATYDKAPVEKEGIHVLDWPFDDGAPPPNQIVDDWLNLLKTKFREEPGCCVAVHCVAGLGRAPVLVALALIECGMKYEDAVQFIRQKRRGAFNSKQLLYLEKYRPKMRLRFRDTNGHCCVQ

SEQ ID NO: 22392 - protein, 111 aa, Homo sapiens
MSSDRQRSDDESPSTSSGSSDADQRDPAAPEPEEQEERKPSATQQKKNTKLSSKTTAKLSTSAKRIQKELAEITLDPPPNCRKISKSCIECKDIQIENEELVLSVSSSLSI

SEQ ID NO: 22393 - protein, 365 aa, Homo sapiens
MNIMDFNVKKLAADAGTFLSRAVQFTEEKLGQAEKTELDAHLENLLSKAECTKIWTEKIMKQTEVLLQPNPNARIEEFVYEKLDRKAPSRINNPELLGQYMIDAGTEFGPGTAYGNALIKCGETQKRIGTADRELIQTSALNFLTPLRNFIEGDYKTIAKERKLLQNKRLDLDAAKTRLKKAKAAETRNSSEQELRITQSEFDRQAEITRLLLEGISSTHAHHLRCLNDFVEAQMTYYAQCYQYMLDLQKQLGSFPSNYLSNNNQTSVTPVPSVLPNAIGSSAMASTSGLVITSPSNLSDLKECSGSRKARVLYDYDAANSTELSLLADEVITVFSVVGMDSDWLMGERGNQKGKVPITYLELLN

SEQ ID NO: 22394 - protein, 1070 aa, Homo sapiens
MARRHERVTRRMWTWAPGLLMMTVVFWGHQGNGQGQGSRLRQEDFPPRIVEHPSDVIVSKGEPTTLNCKAEGRPTPTIEWYKDGERVETDKDDPRSHRMLLPSGSLFFLRIVHGRRSKPDEGSYVCVARNYLGEAVSRNASLEVALLRDDFRQNPTDVVVAAGEPAILECQPPRGHPEPTIYWKKDKVRIDDKEERISIRGGKLMISNTRKSDAGMYTCVGTNMVGERDSDPAELTVFERPTFLRRPINQVVLEEEAVEFRCQVQGDPQPTVRWKKDDADLPRGRYDIKDDYTLRIKKTMSTDEGTYMCIAENRVGKMEASATLTVRARPVAPPQFVVRPRDQIVAQGRTVTFPCETKGNPQPAVFWQKEGSQNLLFPNQPQQPNSRCSVSPTGDLTITNIQRSDAGYYICQALTVAGSILAKAQLEVTDVLTDRPPPIILQGPANQTLAVDGTALLKCKATGDPLPVISWLKEGFTFPGRDPRATIQEQGTLQIKNLRISDTGTYTCVATSSSGETSWSAVLDVTESGATISKNYDLSDLPGPPSKPQVTDVTKNSVTLSWQPGTPGTLPASAYIIEAFSQSVSNSWQTVANHVKTTLYTVRGLRPNTIYLFMVRAINPQGLSDPSPMSDPVRTQDISPPAQGVDHRQVQKELGDVLVRLHNPVVLTPTTVQVTWTVDRQPQFIQGYRVMYRQTSGLQATSSWQNLDAKVPTERSAVLVNLKKGVTYEIKVRPYFNEFQGMDSESKTVRTTEEAPSAPPQSVTVLTVGSYNSTSISVSWDPPPPDHQNGIIQEYKIWCLGNETRFHINKTVDAAIRSVIIGGLFPGIQYRVEVAASTSAGVGVKSEPQPIIIGRRNEVVITENNNSITEQITDVVKQPAFIAGIGGACWVILMGFSIWLYWRRKKRKGLSNYAVTFQRGDGGLMSNGSRPGLLNAGDPSYPWLADSWPATSLPVNNSNSGPNEIGNFGRGDVLPPVPGQGDKTATMLSDGAIYSSIDFTTKTSYNSSSQITQATPYATTQILHSNSIHELAVDLPDPQWKSSIQQKTDLMGFGYSLPDQNKGNNGGKGG

SEQ ID NO: 22395 - protein, 253 aa, Homo sapiens
VTCANLTNGGKSELLKSGSSKSTLKHIWTESSKDLSISRLLSQTFRGKENDTDLDLRYDTPEPYSEQDLWDWLRNSTDLQEPRPRAKRRPIVKTGKFKKMFGWGDFHSNIKTVKLNLLITGKIVDHGNGTFSVYFRHNSTGQGNVSVSLVPPTKIVEFDLAQQTVIDAKDSKSFNCRIEYEKVDKATKNTLCNYDPSKTCYQEQTQSHVSWLCSKPFKVICIYISFYSTDYKLVQKVCPDYNYHSDTPYFPSG

SEQ ID NO: 22396 - protein, 271 aa, Homo sapiens
FKSYKLDDTQASRKKMEELKTGGEHVYFAKFLTSEKLMDLQLSDSNFRRHILLQYLILFQYLKGQVKFKSSNYVLTDEQSLWIEDTTKSVYQLLSENPPDGERFSKMVEHILNTEENWNSWKNEGCPSFVKESVCFVHDRTSDTKPTRIIRKRTAPEDFLGKGPTKKILMGNEELTRLWNLCPDNMEACKSETREHMPTLEEFFEEAIEQADPENMVENEYKAVNNSNYGWRALRLLARRSPHFFQPTNQQFKSLPEYLENMVIKLAKELP

SEQ ID NO: 22397 - protein, 42 aa, Homo sapiens
TELPHHGKHRPEEGPPGPLGRTAMQVRCATRGFVCICVCVHA

SEQ ID NO: 22398 - protein, 599 aa, Homo sapiens
MRRARSREGMAGAVPGAIMDEDYYGSAAEWGDEADGGQQEDDSGEGEDDAEVQQECLHKFSTRDYIMEPSIFNTLKRYFQAGGSPENVIQLLSENYTAVAQTVNLLAEWLIQTGVEPVQVQETVENHLKSLLIKHFDPRKADSIFTEEGETPAWLEQMIAHTTWRDLFYKLAEAHPDCLMLNFTVKLISDAGYQGEITSVSTACQQLEVFSRVLRTSLATILDGGEENLEKNLPEFAKMVCHGEHTYLFAQAMMSVLAQEEQGGSAVRRIAQEVQRFAQEKGHDASQITLALGTAASYPRACQALGAMLSKGALNPADITVLFKMFTSMDPPPVELIRVPAFLDLFMQSLFKPGARINQDHKHKYIHILAYAASVVETWKKNKRVSINKDELKSTSKAVETVHNLCCNENKGASELVAELSTLYQCIRFPVVAMGVLKWVDWTVSEPRYFQLQTDHTPVHLALLDEISTCHQLLHPQVLQLLVKLFETEHSQLDVMEQLELKKTLLDRMVHLLSRGYVLPVVSYIRKCLEKLDTDISLIRYFVTEVLDVIAPPYTSDFVQLFLPILENDSIAGTIKTEGEHDPVTEFIAHCKSNFIMVN

SEQ ID NO: 22399 - protein, 858 aa, Homo sapiens
MLSGKKAAAAAAAAAAAATGTEAGPGTAGGSENGSEVAAQPAGLSGPAEVGPGAVGERTPRKKEPPRASPPGGLAEPPGSAGPQAGPTVVPGSATPMETGIAETPEGRRTSRRKRAKVEYREMDESLANLSEDEYYSEEERNAKAEKEKKLPPPPPQAPPEEENESEPEEPSGVEGAAFQSRLPHDRMTSQEAACFPDIISGPQQTQKVFLFIRNRTLQLWLDNPKIQLTFEATLQQLEAPYNSDTVLVHRVHSYLERHGLINFGIYKRIKPLPTKKTGKVIIIGSGVSGLAAARQLQSFGMDVTLLEARDRVGGRVATFRKGNYVADLGAMVVTGLGGNPMAVVSKQVNMELAKIKQKCPLYEANGQAVPKEKDEMVEQEFNRLLEATSYLSHQLDFNVLNNKPVSLGQALEVVIQLQEKHVKDEQIEHWKKIVKTQEELKELLNKMVNLKEKIKELHQQYKEASEVKPPRDITAEFLVKSKHRDLTALCKEYDELAETQGKLEEKLQELEANPPSPLFFCSDVYLSSRDRQILDWHFANLEFANATPLSTLSLKHWDQDDDFEFTGSHLTVRNGYSCVPVALAEGLDIKLNTAVRQVRYTASGCEVIAVNTRSTSQTFIYKCDAVLCTLPLGVLKQQPPAVQFVPPLPEWKTSAVQRMGFGNLNKVVLCFDRVFWDPSVNLFGHVGSTTASRGELFLFWNLYKAPILLALVAGEAAGIMENISDDVIVGRCLAILKGIFGSSAVPQPKETVVSRWRADPWARGSYSYVAAGSSGNDYDLMAQPITPGPSIPGAPQPIPRLFFAGEHTIRNYPATVHGALLSGLREAGRIADQFLGAMYTLPRQATPGVPAQQSPSM

SEQ ID NO: 22400 - protein, 95 aa, Homo sapiens
MAQQSSVCEIWTNQNAGFPFSAIHQVHNTGDWGEPSITLRPPNEATASTPVQYWQHHPEKLIFQSCDYKAFYLGSMLIKELRGTESTQDACAKMR

SEQ ID NO: 22401 - protein, 512 aa, Homo sapiens
QAVAAVEALEREPGRPWQWLKHCEDPVVIDDGDSPLDQEQEQLPVEPHSDLAKNQDAQPITLAQCLGLPSRPPSQLSGDPVLQDAFLLQEENVRDTQQVTTLQLPPRIFQFNNHRSNGYILEMLGSGGKKAQIISVLSQIYVSRVSPFKDMILCFSEEDWSLLDPAQTGFYGEFIIGEDYGVSMPPNDLAAQPDLSQGEENEPRVPELQDLQGKEVPQVSYLDSPSLQPFQVEERRKREELQVPEFQACPQTVVPQNTYPAGGNPRSLENSLDEEVTIEIVLSSSGDEDSQHGPYCTEELGSPTEKQRSLPASHRSSTEAGGEVQTSKKSYVCPNCGKIFRWRVNFIRHLRSRREQEKPHECSVCGELFSDSEDLDGHLESHEAQKPYRCGACGKSFRLNSHLLSHRRIHLQPDRLQPVEKREQAASEDADKGPKEPLENGKAKLSFQCCECGKAFQRHDHLARHRSHFHLKDKARPFQCRYCVKSFTQNYDLLRHERLHMKRRSKQALNSY

SEQ ID NO: 22402 - protein, 299 aa, Homo sapiens
TEAQSEGEVPARESGRSDAICSFVICNDSSLRGQPIIFNPDFFVEKLRHEKPEIFTELVVSNITRLIDLPGTELAQLMGEVDLKLPGGAGPASGFFRSLMSLKRKEKGVIFGSPLTEEGIAQIYQLIEYLHKNLRVEGLFRVPGNSVRQQILRDALNNGTDIDLESGEFHSNDVATLLKMFLGELPEPLLTHKHFNAHLKIADLMQFDDKGNKTNIPDKDRQIEALQLLFLILPPPNRNLLKLLLDLLYQTAKKQDKNKMSAYNLALMFAPHVLWPKNGLVLLPTLEESNTITTHCSLI

SEQ ID NO: 22403 - protein, 580 aa, Homo sapiens
MFTLPSTLRSNAKTNHQSSDSEGNFETPEAETPIRSPFKESCDPSLGLAGPGAKSQESQEADEQLVAEVVEKCSSKTCSKPSENEVPQQAIDSHSVKNFREEPEHDFSKISIVRPFSIETKDSTDISAVLGTKAAHGCVTAVSGKALPSSPPDALQDEAMTEGSMGVTLEASAEADLKAGNSCPELVPSRRSKLRKPKPVPLRKKAIGGEFSDTNAAVEGTPLPKASYHFSPEELDENTSPLLGDARFQKSPPDLKETPGTLSSDTNDSGVELGEESRSSPLKLEFDFTEDTGNIEARKALPRKLGRKLGSTLTPKIQKDGISKSAGLEQPTDPVARDGPLSQTSSKPDPSQWESPSFNPFGSHSVLQNSPPLSSEGSYHFDPDNFDESMDPFKPTTTLTSSDFCSPTGNHVNEILESPKKAKSRLITSGCKVKKHETQSLALDACSRDEGAVISQISDISNRDGHATDEEKLASTSCGQKSAGAEVKGIEKETCQKMEEDGSTVLGLLESSAEKAPVSVSCGGESPLDGICLSESDKTAVLTLIREEIITKEIEANEWKKKYEETRQEVLEMRKESYEP

SEQ ID NO: 22404 - protein, 174 aa, Homo sapiens
MSSDRQRSDDESPSTSSGSSDADQRDPAAPEPEEQEERKPSATQQKKNTKLSSKTTAKLSTSAKRIQKELAEITLDPPPNCSAGPKGDNIYEWRSTILGPPGSVYEGGVFFLDITFSSDYPFKPPKVTFRTRIYHCNINSQGVICLDILKDNWSPALTISKVLLSICSLLTDCN

SEQ ID NO: 22405 - protein, 272 aa, Homo sapiens
LSFDEEHRHAMNELGRKATRGISSQELGQGLSGGLQAIAELLQVDCEMYGLTNDHYSITLRRYAGMALTNLTFGDVANKATLCSMKGCMRALVAQLKSESEDLQQVIASVLRNLSWRADVNSKKTLREVGSVKALMECALEVKKESTLKSVLSALWNLSAHCTENKADICAVDGALAFLVGTLTYRSQTNTLAIIESGGGILRNVSSLIATNEDHRQILRENNCLQTLLQHLKSHSLTIVSNACGTLWNLSARNPKDQEALWDMGAVSMLKN

SEQ ID NO: 22406 - protein, 3565 aa, Homo sapiens; identical to SEQ ID NO: 18329

SEQ ID NO: 22407 - protein, 385 aa, Homo sapiens
MDVQKWYLRTSKLALALAIIRSKPADKSSREYTEHLAMLLSEEQSKWRSKVEILEAEVMQLRQKLLVSRLCSGSFKSGYVSSQLEAQEPKSSESTLTSMEDSGCDLSNEQRTESSDLSQHFVESCTPTHFPPLPLVKRPCAILQNPLSSHMQFLQYLLELKNLTESGNLKRDLTHFEKDSSTVSDSVFQLLDGLITFYRNPKLPFSRFWTEAVGTLASLISDYNLSSHILKKCSKKLEEFEKTLLHAILGNNHINQFQVQHYVSQSLVTLGNCSLLRKSIISLLLSEVNGFADDLGAINQEQASYDVSRYENIFYLFWVLEQLLQKETEEGNTSSIGHDDQEIKKFLQKHDETIFQLSDAFPLFTFYLWRVGILLSSAQIETLRK

SEQ ID NO: 22408 - protein, 394 aa, Homo sapiens
MNRDIKMPLRKHNLELTMSPHCVPSKLCLDDTETNVNCQRLSSKEDLGPVQSQGMDSYSMLHPQFSKIENCSFTPSSFSVELPSNRHISKLNFTSGIAPTPQKLAYEKKQNDQRSTVNCSDSLLSKLNKSQDVFSPSHKTTRFGTLFERLNSLGNRNLLTKSPAVIMDEDCRSTDEIRQSDYITEKHSIQHIWGKNGKEVSNFLEDVNQSTPNLLSENCDSFVSQNMINVLNIDEQRIKKTFNKCDYDSMGDTCVVTSSDKNHVTDRCIRNIFTVPELTFSNSTLNKTSYPEKCQPNKKYQREYNKNERNDLSTSFENDYYPSSSERKEKFENDYQEKTPQKSIQKYPANSIWCTKCSEFKVIFTLIHYVLMLNLFLKSLRTAFQAFLNNDLQL

SEQ ID NO: 22409 - protein, 334 aa, Homo sapiens
MKSAASSRGGGGGGRGGGGWGSWGGGRGGGGGAGKGGGGDGGGQGGKGGFGARARGFGGGGRGRGRGGGDGKDRGGGGQRRGGVAKSKSRRRKGAMVVSVEPHRHEGVFIYRGAEDALVTLNMVPGQSVYGERRVTVTEGGVKQEYRTWNPFRSKLAAAILGGVDQIHIKPKSKVLYLGAASGTTVSHVSDIIGPDGLVYAVEFSHRAGRDLVNVAKKRTNIIPVLEDARHPLKYRMLIGMVDVIFADVAQPDQSRIVALNAHTFLRNGGHFLISIKANCIDSTASAEAVFASEVRKLQQENLKPQEQLTLEPYERDHAVVVGVYRPLPKSSSK

SEQ ID NO: 22410 - protein, 1640 aa, Homo sapiens
MPNVAETERSNDSGNGEHKSERKSPEENLQGAVKSFCTSASGAPLGPKGDGHYPWSCPVTHTREKIYAICSDYAFLNQATSIYKTPNPSRSPCLPDSTSLSAGNNSSRYIGIPTSTSEIIYNEENSLENLSNSLGKLPLAWEIDKSEFDGVTTNSKHKSGNAKKQVSKRKTSDKKGRYQKECPQHSPLEDIKQRKVLDLRRWYCISRPQYKTSCGISSLISCWNFLYSTMGAGNLPPITQEEALHILGFQPPFEDIRFGPFTGNTTLMRWFRQINDHFHVKGCSYVLYKPHGKNKTAGETASGALSKLTRGLKDESLAYIYHCQNHYFCPIGFEATPVKANKAFSRGPLSPQEVEYWILIGESSRKHPAIHCKKWADIVTDLNTQNPEYLDIRHLERGLQYRKTKKVGGNLHCIIAFQRLNWQRFGLWNFPFGTIRQESQPPTHAQGIAKSESEDNISKKQHGRLGRSFSASFHQDSAWKKMSNISIWLNQALKGVRDRHGNSIENPHLLTLFHRLCKLLFFRIRPIFVFDGDAPLLKKQTLVKRRQRKDLASSDSRKTTEKLLKTFLKRQAIKTAFRSKRDEALPSLTQVRRENDLYVLPPLQEEEKHSSEEEDEKEWQERMNQKQALQEEFFHNPQAIDIESEDFSSLPPEVKHEILTDMKEFTKRRRTLFEAMPEESDDFSQYQLKGLLKKNYLNQHIEHVQKEMNQQHSGHIRRQYEDEGGFLKEVESRRVVSEDTSHYILIKGIQAKTVAEVDSESLPSSSKMHGMSFDVKSSPCEKLKTEKEPDATPPSPRTLLAMQAALLGSSSEEELESENRRQARGRNAPAAVDEGSISPRTLSAIKRALDDDEDVKVCAGDDVQTGGPGAEEMRINSSTENSDEGLKVRDGKGIPFTATLASSSVNSAEEHVASTNEGREPTDSVPKEQMSLVHVGTEAFPISDESMIKDRKDRLPLESAVVRHSDAPGLPNGRELTPASPTCTNSVSKNETHAEVLEQQNELCPYESKFDSSLLSSDDETKCKPNSASEVIGPVSLQETSSIVSVPSEAVDNVENVVSFNAKEHENFLETIQEQQTTESAGQDLISIPKAVEPMEIDSEESESDGSFIEVQSVISDEELQAEFPETSKPPSEQGEEELVGTREGEAPAESESLLRDNSERDDVDGEPQEAEKDAEDSLHEWQDINLEELETLESNLLAQQNSLKAQKQQQERIAATVTGQMFLESQELLRLFGIPYIQAPMEAEAQCAILDLTDQTSGTITDDSDIWLFGARHVYRNFFNKNKFVEYYQYVDFHNQLGLDRNKLINLAYLLGSDYTEGIPTVGCVTAMEILNEFPGHGLEPLLKFSEWWHEAQKNPKIRPNPHDTKVKKKLRTLQLTPGFPNPAVAEAYLKPVVDDSKGSFLWGKPDLDKIREFCQRYFGWNRTKTDESLFPVLKQLDAQQTQLRIDSFFRLAQQEKEDAKRIKSQRLNRAVTCMLRKEKEAAASEIEAVSVAMEKEFELLDKAKGKTQKRGITNTLEESSSLKRKRLSDSKGKNTCGGFLGETCLSESSDGSSSEDAESSSLMNVQRRTAAKEPKTSASDSQNSVKEAPVKNGGATTSSSSDSDDDGGKEKMVLVTARSVFGKKRRKLRRARGRKRKT

SEQ ID NO: 22411 - protein, 198 aa, Homo sapiens
INFLRKLVQNGPEVHPGANFIQQRHTQMKRFLKYGNREKMAQELKYGDIVERHLIDGDVVLFNRQPSLHKLSIMAHLARVKPHRTFRFNECVCTPYNADFDGDEMNLHLPQTEEAKAEALVLMGTKANLVTPRNGEPLIAAIQDFLTGAYLLTLKDTFFDRAKACQIIASILVGKDEKIKVRLPPPTILKMLQSRTVS

SEQ ID NO: 22412 - protein, 650 aa, Homo sapiens
MAAATADPGAGNPQPGDSSGGGAGGGLPSPGEQELSRRLQRLYPAVNQQETPLPRSWSPKDKYNYIGLSQGNLRVHYKGHGKNHKDAASVRATHPIPAACGIYYFEVKIVSKGRDGYMGIGLSAQGVNMNRLPGWDKHSYGYHGDDGHSFCSSGTGQPYGPTFTTGDVIGCCVNLINGTCFYTKNGHSLGIAFTDLPANLYPTVGLQTPGEIVDANFGQQPFLFDIEDYMREWRAKVQGTVHCFPISARLGEWQAVLQNMVSSYLVHHGYCATATAFARMTETPIQEEQASIKNRQKIQKLVLEGRVGEAIETTQRFYPGLLEHNPNLLFMLKCRQFVEMVNGTDSEVRSLSSRSPKSQDSYPGSPSLSPRHGPSSSHMHNTGADSPSCSNGVASTKSKQNHSKYPAPSSSSSSSSSSSSSSPSSVNYSESNSTDSTKSQHHSSTSNQETSNPWLQLERRPNQAAPTTPPGPTPTSTPPHSDSEMEMEAEHYPNGVLGSMSTRIVNGAYKHEDLQTDESSMDDRHPRRQLCGGNQAATERIILFGRELQALSEQLGREYGKNLAHTEMLQDAFSLLAYSDPWSCPVGQQLDPIQREPVCAALNSAILESQNLPKQPPLMLALGQASECLRLMARAGLGSCSFARVDDYLH

SEQ ID NO: 22413 - protein, 890 aa, Homo sapiens
MAAAAASASQDELNQLERVFLRLGHAETDEQLQNIISKFLPPVLLKLSSTQEGVRKKVMELLVHLNKRIKSRPKIQLPVETLLVQYQDPAAVSFVTNFTIIYVKMGYPRLPVEKQCELAPTLLTAMEGKPQPQQDSLMHLLIPTLFHMKYPVESSKSASPFNLAEKPKTVQLLLDFMLDVLLMPYGYVLNESQSRQNSSSAQGSSSNSGGGSGIPQPPPGMSFYAAKRVIGDNPWTPEQLEQCKLGIVKFIEAEQVPELEAVLHLVIASSDTRHSVATAADLELKSKQSLIDWNNPAIINKMYKVYLGDIPLKTKEGAVLKPELKRDPVSTRVKLKIVPHLLRSRQAAETFPANIQVVYDGLFGTNTNSKLRTLSLQFVHHICITCPEIKIKPLGPMLLNGLTKLINEYKEDPKLLSMAYSAVGKLSSRMPHLFTKDIALVQQLFEALCKEEPETRLAIQEALSMMVGAYSTLEGAQRTLMEALVASYLIKPEVQVRQVAVKFASTVFPSDHIPSRYLLLLAAGDPREEVHGEAQRVLRCLPGRNRKESTSEQMPSFPEMVYYIQEKASHRMKTPVKYMTGTTVLPFNPAAFGEIVLYLRMCLAHSAGVVPTSQSLADMQDHAPAIGRYIRTLMSSGQMAPSSSNKSGETNPVQIYIGLLQQLLAGVGGLPVMYCLLEAVSVYPEKLATKFVDKTEWIKSLMNNSKEEMRELAALFYSVVVSTVSGNELKSMIEQLIKTTKDNHSPEIQHGSLLALGFTVGRYLAKKKMRMSEQQDLERNADTLPDQEELIQSATETIGSFLDSTSPLLAIAACTALGEIGRNGPLPIPSEGSGFTKLHLVESLLSRIPSSKETNKMKERAIQTLGYFPVGDGDFPHQKLLLQGLMDSVE

SEQ ID NO: 22414 - protein, 343 aa, Homo sapiens
QERNPQQNMNIRQHVRPEEDFPGRTPDRNYSDMLNLMRLEEQLSPRSRVFASCAKEDGCHERDDDTTSVNSDRSEEVFDMTKGNLTLLEKAIALETERAKAMREKMAMEAGRRDNMRSYEDQSPRQLPGEDRKPKSSDSHVKKPYYGKDPSRTEKKESKCPTPGCDGTGHVTGLYPHHRSLSGCPHKDRVPPEILAMHESVLKCPTPGCTGRGHVNSNRNSHRSLSGCPIAAAEKLAKAQEKHQSCDVSKSSQASDRVLRPMCFVKQLEIPQYGYRNNVPTTTPRSNLAKELEKYSKTSFEYNSYDNHTYGKRAIAPKRSGTARTPAPAAAAPAATRPAAAAT

SEQ ID NO: 22415 - protein, 498 aa, Homo sapiens
MYVIESARQRPPKRKYLSSGRKSVFQKLYDLYIEECEKEPEVKKLRRNVNLLEKLVMQETLSCLVVNLYPGNEGYSLMLRGKNGSDSETIRLPYEEGELLEYLDAEELPPILVDLLEKSQVNIFHCGCVIAEIRDYRQSSNMKSPGYQSRHILLRPTMQTLICDVHSITSDNHKWTQEDKLLLESQLILATAEPLCLDPSIAVTCTANRLLYNKQKMNTRPMKRCFKRYSRSSLNRQQDLSHCPPPPQLRLLDFLQKRKERKAGQHYDLKISKAGNCVDMWKRSPCNLAIPSEVDDVKDDYVFECEAGTQYQKTKLTILQSLGDPLYYGKIQPCKADEESDSQMSPSHSSTDDHSNWFIIGSKTDAERVVNQYQELVQNEAKCPVKMSHSSSGSASLSQVSPGKETDQTETVSVQSSVLGKGVKHRPPPIKLPSSSGNSSSGNYFTPQQTSSFLKSPTPPPSSKPSSIPRKSSVDLNQVSMLSPAALSPASSSQRHES

SEQ ID NO: 22416 - protein, 662 aa, Homo sapiens
MPGGGPQGAPAAAGGGGVSHRAGSRDCLPPAACFRRRRLARRPGYMRSSTGPGIGFLSPAVGTLFRFPGGVSGEESHHSESRARQCGLDSRGLLVRSPVSKSAAAPTVTSVRGTSAHFGIQLRGGTRLPDRLSWPCGPGSAGWQQEFAAMDSSETLDASWEAACSDGARRVRAAGSLPSAELSSNSCSPGCGPEVPPTPPGSHSAFTSSFSFIRLSLGSAGERGEAEGCPPSREAESHCQSPQEMGAKAASLDGPHEDPRCLSRPFSLLATRVSADLAQAARNSSRPERDMHSLPDMDPGSSSSLDPSLAGCGGDGSSGSGDAHSWDTLLRKWEPVLRDCLLRNRRQMEVISLRLKLQKLQEDAVENDDYDKAETLQQRLEDLEQEKISLHFQLPSRQPALSSFLGHLAAQVQAALRRGATQQASGDDTHTPLRMEPRLLEPTAQDSLHVSITRRDWLLQEKQQLQKEIEALQARMFVLEAKDQQLRREIEEQEQQLQWQGCDLTPLVGQLSLGQLQEVSKALQDTLASAGQIPFHAEPPETIRSLQERIKSLNLSLKEITTKVCMSEKFCSTLRKKVNDIETQLPALLEAKMHAISGNHFWTAKDLTEEIRSLTSEREGLEGLLSKLLVLSSRNVKKLGSVKEDYNRLRREVEHQETAYGR

SEQ ID NO: 22417 - protein, 657 aa, Homo sapiens
MLSSRWWPSSWGILGLGPRSPPRGSQLCALYAFTYTGADGQQVSLAEGDRFLLLRKTNSDWWLARRLEAPSTSRPIFVPAAYMIEESIPSQSPTTVIPGQLLWTPGPKLFHGSLEELSQALPSRAQASSEQPPPLPRKMCRSVSTDNLSPSLLKPFQEGPSGRSLSQEDLPSEASASTAGPQPLMSEPPVYCNLVDLRRCPRSPPPGPACPLLQRLDAWEQHLDPNSGRCFYINSLTGCKSWKPPRRSRSETNPGSMEGTQTLKRNNDVLQPQAKGFRSDTGTPEPLDPQGSLSLSQRTSQLDPPALQAPRPLPQLLDDPHEVEKSGLLNMTKIAQGGRKLRKNWGPSWVVLTGNSLVFYREPPPTAPSSGWGPAGSRPESSVDLRGAALAHGRHLSSRRNVLHIRTIPGHEFLLQSDHETELRAWHRALRTVIERLDRENPLELRLSGSGPAELSAGEDEEEESELVSKPLLRLSSRRSSIRGPEGTEQNRVRNKLKRLIAKRPPLQSLQERGLLRDQVFGCQLESLCQREGDTVPSFLRLCIAAVDKRGLDVDGIYRVSGNLAVVQKLRFLVDRERAVTSDGRYVFPEQPGQEGRLDLDSTEWDDIHVVTGALKLFLRELPQPLVPPLLLPHFRAALAVPLSDTRINRLNAKAQP

SEQ ID NO: 22418 - protein, 530 aa, Homo sapiens
MGRHVATSCHVAWLLVLISGCWGQVNRLPFFTNHFFDTYLLISEDTPVGSSVTQLLAQDMDNDPLVFGVSGEEASRFFAVEPDTGVVWLRQPLDRETKSEFTVEFSVSDHQGVITRKVNIQVGDVNDNAPTFHNQPYSVRIPENTPVGTPIFIVNATDPDLGAGGSVLYSFQPPSQFFAIDSARGIVTVIRELDYETTQAYQLTVNATDQDKTRPLSTLANLAIIITDVQDMDPIFINLPYSTNIYEHSPPGTTVRIITAIDQDKGRPRGIGYTIVSGNTNSIFALDYISGVLTLNGLLDRENPLYSHGFILTVKGTELNDDRTPSDATVTTTFNILVIDINDNAPEFNSSEYSVAITELAQVGFALPLFIQVVDKDENLGLNSMFEVYLVGNNSHHFIISPTSVQGKADIRIRVAIPLDYETVDRYDFDLFANESVPDHVGYAKVKITLINENDNRPIFSQPLYNISLYENVTVGTSVLTVLVSPRFTAGPLSSPGPTVVRHPEGFCPRDLSNQGRRHPQIPELCLLVY

SEQ ID NO: 22419 - protein, 401 aa, Homo sapiens
EKEKAEREVIVREFQEELVDHLKTFSISESPLEGTSHCHINLNETWTSKKKLFQVEIQPEEKHEEFRKLFELISLLNYTADQIRKKNRELEEEATGYKKCLEMTINMLNAFANEDFSCHGDLNTDQLKMDILFKKLKQKFNDLVAEKEAVSSECVNLAKDNEVLHQELLSMRNVQEKCEKLEKDKKMLEEEVLNLKTHMEKDMVELGKLQEYKSELDERAVQEIEKLEEIHLQKQAEYEKQLEQLNKDNTASLKKKELTLKDVECKFSKMKTAYEEVTTELEEFKEAFAGAVKANNSMSKKLMKSDKKIAVISTKLFTEKQRMKYFLSTLPTRPEPELPCVENLNSIELNRKYIPKTAIRIPTSNPQTSNNCKNFLTEMELDRVEQIITGTKKSMLPKCIN

SEQ ID NO: 22420 - protein, 1958 aa, Homo sapiens
MIEDKGPRVTDYFVVAGLTDTSTLLDQEINRLDTKSTGPKAPITDIAIIIKSAGETVPEGYTCVEATPSALQANLNYGSLKSPELFLCYKRGRDKPPLTDIGVLYEGKERLIPGCEVILATPYGRCANVNNSSTTSQRIFITYRRAPPVRPQNSLAVTDICVIVTSKGETPPHTFCKVDKNLNCGMWGSSVFLCYKKSVPASNAIAYKAGLIFRYPEEDYESFPLSESDVPLFCLPMGATIECWDPETKYPLPVFSTFVLTGSSAKKVYGAAIQFYEPYSRELLSEKQLMHLGLLTPVERKMVSKSINTNKCICLLSHWPFFEAFRKFLMFIYKLSVSGPHPLPIEKHISHFMQNIPFPSPQRPRILVQLSVHDALILSQPVSTPLPLSGANFSTLLMNLGPENCATLLLFVLLESKILLHSLRPAVLTGVAEAVVAMIFPFQWQCPYIPLCPLSLAAVLSAPLPFIVGVDSRYFDLHDPPQDVVCIDLDTNMLYVSDEKKNMNWKQLPKKPCKNLLSTLKKLYPQLSSVHQKTQEGSAIDMTPIEADFSWQKKMTQLEMEIQEAFLRFMASILKGYRTYLRPITEAPSNKATAADSLFDRQGFLKSRDRAYAKFYTLLSKTQIFIRFIEECSFVSDKDTGLAFFDDCIEKLFPDKGTEKTDKVDFDSAEDTRLIELDDSQKSEHTVFIMPPEPPPDDGKDLSPKYSYKYFPRLDLKLFDRPQELKLCFSRHPTGNSITKSPPLMAKRTKQEIKTAHKLAKRCYTNPPQWAKCLFSHCYSLWFICLPAYVRVSHPKVRALQQAYDVLIKMRKTDVDPLDEVCYRVVMQLCGLWGHPVLAVRVLFEMKTARIKPNAITYGYYNKVVLESPWPSSTRSGIFLWTKVRNVVRGLAQFRQPLKKTVQRSQVSSISALQNVTGGSDGDTVSHGSVDSSNDANNGEHTVFVRDLIRLESIDNHSSTGGQSDQGYGSKDELIKDDAEIHVPEEQAARELITKTKMQTEEVCDASAIVAKHSQPSPEPHSPTEPPAWGSSIVKVPSGIFDVNSRKSSTGSISNVLFSTQDPVEDAVFGEATNLKKNGDRGEKRQKHFPERSCSFSSESRAGMLLKKSSLDSNSSEMAIMMGADAKILTAALTCPKTSLLHIARTHSFENVSCHLPDSRTCMSESTWNPEHRSSPVPEMLEESQELLEPVVDDVPKTTATVDTYESLLSDSNSNQSRDLKTVSKDLRNKRSSLYGIAKVVQREDVETGLDPLSLLATECTGGKTPDSEDKLFSPVIARNLADEIESYMNLKSPLGSKSSSMELHREENRESGMTTAFIHALERRSSLPLDHGSPAQENPESEKSSPAVSRSKTFTGRFKQQTPSRTHKERSTSLSALVRSSPHGSLGSVVNSLSGLKLDNILSGPKIDVLKSGMKQAATVASKMWVAVASAYSYSDDEEETNRDYSFPAGLEDHILGENISPNTSISGLVPSELTQSNTSLGSSSSSGDVGKLHYPTGEVPFPRGMKGQDFEKSDHGSSQNTSMSSIYQNCAMEVLMSSCSQCRACGALVYDEEIMAGWTADDSNLNTACPFCKSNFLPLLNIEFKDLRGSASFFLKPSTSGDSLQSGSIPLANESLEHKPVSSLAEPDLINFMDFPKHNQIITEETGSAVEPSDEIKRASGDVQTMKISSVPNSLSKRNVSLTRSHSVGGPLQNIDFTQRPFHGISTVSLPNSLQEVVDPLGKRPNPPPVSVPYLSPLVLRKELESLLENEGDQVIHTSSFINQHPIIFWNLVWYFRRLDLPSNLPGLILTSEHCNEGVQLPLSSLSQDSKLVYIQLLWDNINLHQEPREPLYVSWRNFNSEKKSSLLSEEQQETSTLVETIRQSIQHNNVLKPINLLSQQMKPGMKRQRSLYREILFLSLVSLGRENIDIEAFDNEYGIAYNSLSSEILERLQKIDAPPSASVEWCRKCFGAPLI

SEQ ID NO: 22421 - protein, 291 aa, Homo sapiens
MSWESGAGPGLGSQGMDLVWSAWYGKCVKGKGSLPLSAHGIVVAWLSRAEWDQVTVYLFCDDHKLQRYALNRITVWRSRSGNELPLAVASTADLIRCKLLDVTGGLGTDELRLLYGMALVRFVNLISERKTKFAKVPLKCLAQEVNIPDWIVDLRHELTHKKMPHINDCRRGCYFVLDWLQKTYWCRQLENSLRETWELEEFREGIEEEDQEEDKNIVVDDITEQKPEPQDDGKSTESDVKADGDSKGSEEVDSHCKKALSHKELYERARELLVSYEEEQFTGGCAGCFSG

SEQ ID NO: 22422 - protein, 422 aa, Homo sapiens
MKSNPPRSSLEACKAAGQAPQQKTQAKPTKAARQKVLVTGGGGYLGFSLGSHLAKSGTSVILLDRRRPQWELSPETKFIQADVRDEEALYRAFEGVDCVFHVASYGMSGAEKLQKEQIESINVGGTKLVIDVCVRRRVPRLIYTSTVNVAFGGKPIEQGDEDSVPYFPLDEHVDHYSRTKAIADQLTLMANGMPLPGGGTLRTCVLRPPGIYGPEEQRHLPRVAGHIKKRLFMFRFGDHKARMNWVHVHNLVQAHVLAAEALTTAKGYVASGQAYYINDGESVNLFEWMAPLFEKLGYSQPWIQVPTSWVYLTAAVMERLHLALRPICSLPPLLTRSEVRSVAVTHTFQIAKARAQLGYAPDKFRFADAVELYVQSTTRRPRGSTARTLLRLLLRLLLFLGLLALALHFLGLQPLHAAVERL

SEQ ID NO: 22423 - protein, 142 aa, Homo sapiens
MNRPAPVEISYENMRFLITHNPTNATLNKFTEELKKYGVTTLVRVCDATYDKAPVEKEGIHVLDWPFDDGAPPPNQIVDDWLNLLKTKFREEPGCCVAVHCVAGLGRKRRGAFNSKQLLYLEKYRPKMRLRFRDTNGHCCVQ

SEQ ID NO: 22424 - protein, 275 aa, Homo sapiens
MTSAGVFNAGSDERANSRDEEYPCSSEVSPSTESSCSNFINIKVGLLEQFLLYKFKMKQRILKEDMLKIVNPRYQNQFAEIHRRASEHIEVVFAVDLKEVNPTCHLYDLVSKLKLPNNGRIHVGKVLPKTGLLMTFLVVIFLKGNCANKEDTWKFLDMMQIYDGKKYYIYGEPRKLITQDFVRLTYLEYHQVPCSYPAHYQFLWGPRAYTETSKMKVLEYLAKVNDIAPGAFSSQYEEALQDEEESPSQRCSRNWHYCSGQDCLRAKFSSFSQPY

SEQ ID NO: 22425 - protein, 87 aa, Homo sapiens
MWRPAGVQCLNLGSLQSPPTKIKRFSCLSLPTTWDYRCSSVISTLLCCTAGRSPGRPLLCSSGETSGAFLQGSPAPHPCGGRCSPPR

SEQ ID NO: 22426 - protein, 585 aa, Homo sapiens
MSATSVDQRPKGQGNKVSVQNGSIHQKDAVNDDDFEPYLSSQTNQSNSYPPMSDPYMPSYYAPSIGFPYSLGEAAWSTAGDQPMPYLTTYGQMSNGEHHYIPDGVFSQPGALGNTPPFLGQHGFNFFPGNADFSTWGTSGSQGQSTQSSAYSSSYGYPPSSLGRAITDGQAGFGNDTLSKVPGISSIEQGMTGLKIGGDLTAAVTKTVGTALSSSGMTSIATNSVPPVSSAAPKPTSWAAIARKPAKPQPKLKPKGNVGIGGSAVPPPPIKHNMNIGTWDEKGSVVKAPPTQPVLPPQTIIQQPQPLIQPPPLVQSQLPQQQPQPPQPQQQQGPQPQAQPHQVQPQQQQLQNRWVAPRNRGAGFNQNNGAGSENFGLGVVPVSASPSSVEVHPVLEKLKAINNYNPKDFDWNLKNGRVFIIKSYSEDDIHRSIKYSIWCSTEHGNKRLDAAYRSLNGKGPLYLLFSVNGSGHFCGVAEMKSVVDYNAYAGVWSQDKWKGKFEVKWIFVKDVPNNQLRHIRLENNDNKPVTNSRDTQEVPLEKAKQVLKIIATFKHTTSIFDDFAHYEKRQEEEEAMRRERNRNKQ

SEQ ID NO: 22427 - protein, 208 aa, Homo sapiens
MKQRFSALQLLKLLLLLQPPLPRALREALCPEPCNCVPDGALRCPGPTAGLTRLSLAYLPVKVIPSQAFRGLNEVIKILIQNTKNLRYIEPGAFINLPRLKYLSICNTGIRKFPDVTKVFSSESNFILEICDNLHITTIPGNAFQGMNNESVTLKLYGNGFEEVQSHAFNGTTLTSLELKENVHLEKMHNGAFRGATGPKTLPCRAMA

SEQ ID NO: 22428 - protein, 935 aa, Homo sapiens
MKVTVCFGRTGIVVPCKEGQLRVGELTQQALQRYLKTREKGPGYWVKIHHLEYTDGGILDPDDVLADVVEDKDKLIAVFEEQEPLHKIESPSGNPADRQSPDAFETEVAAQLAAFKPIGGEIEVTPSALKLGTPLLVRRSSDPVPGPPADTQPSASHPGGQSLKLVVPDSTQNLEDREVLNGVQTELLTSPRTKDTLSDMTRTVEISGEGGPLGIHVVPFFSSLSGRILGLFIRGIEDNSRSKREGLFHENECIVKINNVDLVDKTFAQAQDVFRQAMKSPSVLLHVLPPQNREQYEKSVIGSLNIFGNNDGVLKTKVPPPVHGKSGLKTANLTGTDSPETDASASLQQNKSPRVPRLGGKPSSPSLSPLMGFGSNKNAKKIKIDLKKGPEGLGFTVVTRDSSIHGPGPIFVKNILPKGAAIKDGRLQSGDRILEVNGRDVTGRTQEELVAMLRSTKQGETASLVIARQEGHFLPRELKGEPDCCALSLETSEQLTFEIPLNDSGSAGLGVSLKGNKSRETGTDLGIFIKSIIHGGAAFKDGRLRMNDQLIAVNGESLLGKSNHEAMETLRRSMSMEGNIRGMIQLVILRRPERPMEDPAECGAFSKPCFENCQNAVTTSRRNDNSILHPLGTCSPQDKQKGLLLPNDGWAESEVPPSPTPHSALGLGLEDYSHSSGVDSAVYFPDQHINFRSVTPARQPESINLKASKSMDLVPDESKVHSLAGQKSESPSKDFGPTLGLKKSSSLESLQTAVAEVRKNDLPFHRPRPHMVRGRGCNESFRAAIDKSYDGPEEIEADGLSDKSSHSGQGALNCESAPQGNSELEDMENKARKVKKTKEKEKKKEKGKLKVKEKKRKEENEDPERKIKKKGFGAMLRYGPALKAKLVLILSLLKKAHAFPRLQPNAYGSQFCARSLSAEAEELFGESYSDDRTLS

SEQ ID NO: 22429 - protein, 1591 aa, Homo sapiens
MNSQPQTRSPGGFRPIQFFQRPQIQPPRATIPNSSPSIRPGAQTPTAVYQANQHIMMVNHLPMPYPVPQGPQYCIPQYRHSGPPYVGPPQQYPVQPPGPGPFYPGPGPGDFPNAYGTPFYPSQPVYQSAPIIVPTQQQPPPAKREKKTIRIRDPNQGGKDITEEIMSGGGSRNPTPPIGRPTSTPTPPQLPSQVPEHSPVVYGTVESAHLAASTPVTAASDQKQEEKPKPDPVLKSPSPVLRLVLSGEKKEQEGQTSETTAIVSIAELPLPPSPTTVSSVARSTIAAPTSSALSSQPIFTTAIDDRCELSSPREDTIPIPSLTSCTETSDPLPTNENDDDICKKPCSVAPNDIPLVSSTNLINEINGVSEKLSATESIVEIVKQEVLPLTLELEILENPPEEMKLECIPAPITPSTVPSFPPTPPTPPASPPHTPVIVPAAATTVSSPSAAITVQRVLEEDESIRTCLSEDAKEIQNKIEVEADGQTEEILDSQNLNSRRSPVPAQIAITVPKTWKKPKDRTRTTEEMLEAELELKAEEELSIDKVLESEQDKMSQGFHPERDPSDLKKVKAVEENGEEAEPVRNGAESVSEGEGIDANSGSTDSSGDGVTFPFKPESWKPTDTEGKKQYDREFLLDFQFMPACIQKPEGLPPISDVVLDKINQPKLPMRTLDPRILPRGPDFTPAFADFGRQTPGGRGVPLLNVGSRRSQPGQRREPRKIITVSVKEDVHLKKAENAWKPSQKRDSQADDPENIKTQELFRKVRSILNKLTPQMFNQLMKQVSGLTVDTEERLKGVIDLVFEKAIDEPSFSVAYANMCRCLVTLKVPMADKPGNTVNFRKLLLNRCQKEFEKDKADDDVFEKKQKELEAASAPEERTRLHDELEEAKDKARRRSIGNIKFIGELFKLKMLTEAIMHDCVVKLLKNHDEESLECLCRLLTTIGKDLDFEKAKPRMDQYFNQMEKIVKERKTSSRIRFMLQDVIDLRLCNWVSRRADQGPKTIEQIHKEAKIEEQEEQRKVQQLMTKEKRRPGVQRVDEGGWNTVQGAKNSRVLDPSKFLKITKPTIDEKIQLVPKAQLGSWGKGSSGGAKASETDALRSSASSLNRFSALQPPAPSGSTPSTPVEFDSRRTLTSRGSMGREKNDKPLPSATARPNTFMRGGSSKDLLDNQSQEEQRREMLETVKQLTGGVDVERNSTEAERNKTRESAKPEISAMSAHDKAALSEEELERKSKSIIDEFLHINDFKEAMQCVEELNAQGLLHVFVRVGVESTLERSQITRDHMGQLLYQLVQSEKLSKQDFFKGFSETLELADDMAIDIPHIWLYLAELVTPMLKEGGISMRELTIEFSKPLLPVGRAGVLLSEILHLLCKQMSHKKVGALWREADLSWKDFLPEGEDVHNFLLEQKLDFIESDSPCSSEALSKKELSAEELYKRLEKLIIEDKANDEQIFDWVEANLDEIQMSSPTFLRALMTAVCKAAIIADSSTFRVDTAVIKQRVPILLKYLDSDTEKELQALYALQASIVKLDQPANLLRMFFDCLYDEEVISEDAFYKWESSKDPAEQNGKGVALKSVTAFFTWLREAEEESEDN

SEQ ID NO: 22430 - protein, 274 aa, Homo sapiens
MVVEFRHMRNHAYEPLASFLDFITYSYMIDNVILLITGTLHQRSIAELVPKCHPLGSFEQMEAVNIAQTPAELYNAILVDTPLAAFFQDCISEQDLDEMNIEIIRNTLYKAYLESFYKFCTLLGGTTADAMCPILEFEADRRAFIITINSFGTELSKEDRAKLFPHCGRLYPEGLAQLARADDYEQVKNVADYYPEYKLLFEGAGSNPGDKTLEDRFFEHEVKLNKLAFLNQFHFGVFYAFVKLKEQECRNIVWIAECIAQRHRAKIDNYIPIF

SEQ ID NO: 22431 - protein, 123 aa, Homo sapiens
MSSDRQRSDDESPSTSSGSSDADQRDPAAPEPEEQEERKPSATQQKKNTKLSSKTTAKLSTSAKRIQKELAEITLDPPPNCSAGPKGDNIYEWRSTILGPPGSVYEGGVFFLDITFSSDYPFK

SEQ ID NO: 22432 - protein, 151 aa, Homo sapiens
MQGDARRRRNENYFDDIPRSKLERQMAQSSVCEIWTNQNAGFPFSAIHQVHNTGDWGEPSITLRPPNEATASTPVQYWQHHPEKLIFQSCDYKAFYLGSMLIKELRGTESTQDACAKMRGKEKSTEQMKKVPTIILSVSYKGVKFIDATNK

SEQ ID NO: 22433 - protein, 175 aa, Homo sapiens
MSSDRQRSDDESPSTSSGSSDADQRDPAAPEPEEQEERKPSATQQKKNTKLSSKTTAKLSTSAKRIQKELAEITLDPPPNCSAGPKGDNIYEWRSTILGPPGSVYEGGVFFLDITFSSDYPFKPPKVTFRTRIYHCNINSQGVICLDILKDNWSPALTISKVLLSICSLLTDCNP

SEQ ID NO: 22434 - protein, 215 aa, Homo sapiens
QFTDLFQRYFCREVRDGRAPGRDYRDTGRGPPAKAEASPEPGPGPAAPGLPKARSSEELAPPRPPGPCSFQHFRRSLRHIFRRRSAGELPAAHTAAAPGTPGEAAETPARPGLAKKFLPWSLAREPPPEALKEAVLRYSLADEASMDSGARWQRGRLALRRAPGPDGPDRVLELFDPPKWPEPELSRLRFRLKQGLSCAHVPTRCNLAGASGIGH

SEQ ID NO: 22435 - protein, 1034 aa, Homo sapiens
DKTRPLSTLANLAIIITDVQDMDPIFINLPYSTNIYEHSPPGTTVRIITAIDQDKGRPRGIGYTIVSGNTNSIFALDYISGVLTLNGLLDRENPLYSHGFILTVKGTELNDDRTPSDATVTTTFNILVIDINDNAPEFNSSEYSVAITELAQVGFALPLFIQVVDKDEENGGWLQGRPEGVGEGLHVQNLGLNSMFEVYLVGNNSHHFIISPTSVQGKADIRIRVAIPLDYETVDRYDFDLFANESVPDHVGYAKVKITLINENDNRPIFSQPLYNISLYENVTVGTSVLTVLATDNDAGTFGEVSYFFSDDPDRFSLDKDTGLIMLIARLDYELIQRFTLTIIARDGGGEETTGRVRINVLDVNDNVPTFQKDAYVGALRENEPSVTQLVRLRATDEDSPPNNQITYSIVSASAFGSYFDISLYEGYGVISVSRPLDYEQISNGLIYLTVMAMDAGNPPLNSTVPVTIEVFDENDNPPTFSKPAYFVSVVENIMAGATVLFLNATDLDRSREYGQESIIYSLEGSTQFRINARSGEITTTSLLDRETKSEYILIVRAVDGGVGHNQKTGIATVNITLLDINDNHPTWKDAPYYINLVEMTPPDSDVTTVVAVDPDLGENGTLVYSIQPPNKFYSLNSTTGKIRTTHAMLDRENPDPHEAELMRKIVVSVTDCGRPPLKATSSATVFVNLLDLNDNDPTFQNLPFVAEVLEGIPAGVSIYQVVAIDLDEGLNGLVSYRMPVGMPRMDFLINSSSGVVVTTTELDRERIAEYQLRVVASDAGTPTKSSTSTLTIHVLDVNDETPTFFPAVYNVSVSEDVPREFRVVWLNCTDNDVGLNAELSYFITGGNVDGKFSVGYRDAVVRTVVGLDRETTAAYMLILEAIDNGPVGKRHTGTATVFVTVLDVNDNRPIFLQSSYEASVPEDIPEGHSILQHPPWPLKGASSIIFNPFLIDPNVGALKRGHQDGCQDHAWRALFAPPPSWHPGICSTRREAAAPTGHQADAGSTRETQGREPRGFAPALGQHRCQDSVLAPV

SEQ ID NO: 22436 - protein, 1397 aa, Homo sapiens
MEEISAAAVKVVPGPERPSPFSQLVYTSNDSYIVHSGDLRKIHKAASRGQVRKLEKMTKRKKTINLNIQDAQKRTALHWACVNGHEEVVTFLVDRKCQLDVLDGEHRTPLMKALQCHQEACANILIDSGADINLVDVYGNTALHYAVYSEILSVVAKLLSHGAVIEVHNKASLTPLLLSITKRSEQIVEFLLIKNANANAVNKYKCTALMLAVCHGSSEIVGMLLQQNVDVFAADICGVTAEHYAVTCGFHHIHEQIMEYIRKLSKNHQNTNPEGTSAGTPDEAAPLAERTPDTAESLVEKTPDEAAPLVERTPDTAESLVEKTPDEAASLVEGTSDKIQCLEKATSGKFEQSAEETPREITSPAKETSEKFTWPAKGRPRKIAWEKKEDTPREIMSPAKETSEKFTWAAKGRPRKIAWEKKETPVKTGCVARVTSNKTKVLEKGRSKMIACPTKESSTKASANDQRFPSESKQEEDEEYSCDSRSLFESSAKIQVCIPESIYQKVMEINREVEEPPKKPSAFKPAIEMQNSVPNKAFELKNEQTLRADPMFPPESKQKDYEENSWDSESLCETVSQKDVCLPKATHQKEIDKINGKLEESPNKDGLLKATCGMKVSIPTKALELKDMQTFKAEPPGKPSAFEPATEMQKSVPNKALELKNEQTLRADEILPSESKQKDYEENSWDTESLCETVSQKDVCLPKAAHQKEIDKINGKLEGSPVKDGLLKANCGMKVSIPTKALELMDMQTFKAEPPEKPSAFEPAIEMQKSVPNKALELKNEQTLRADEILPSESKQKDYEESSWDSESLCETVSQKDVCLPKATHQKEIDKINGKLEESPDNDGFLKAPCRMKVSIPTKALELMDMQTFKAEPPEKPSAFEPAIEMQKSVPNKALELKNEQTLRADQMFPSESKQKKVEENSWDSESLRETVSQKDVCVPKATHQKEMDKISGKLEDSTSLSKILDTVHSCERARELQKDHCEQRTGKMEQMKKKFCVLKKKLSEAKEIKSQLENQKVKWEQELCSVRLTLNQEEEKRRNADILNEKIREELGRIEEQHRKELEVKQQLEQALRIQDIELKSVESNLNQVSHTHENENYLLHENCMLKKEIAMLKLEIATLKHQYQEKENKYFEDIKILKEKNAELQMTLKLKEESLTKRASQYSGQLKVLIAENTMLTSKLKEKQDKEILEAEIESHHPRLASAVQDHDQIVTSRKSQEPAFHIAGDACLQRKMNVDVSSTIYNNEVLHQPLSEAQRKSKSLKINLNYAGDALRENTLVSEHAQRDQRETQCQMKEAEHMYQNEQDNVNKHTEQQESLDQKLFQLQSKNMWLQQQLVHAHKKADNKSKITIDIHFLERKMQHHLLKEKNEEIFNYNNHLKNRIYQYEKEKAETENS

SEQ ID NO: 22437 - protein, 969 aa, Homo sapiens
MRTAGRDPVPRRSPRWRRAVPLCETSAGRRVTQLRGDDLRRPATMKGKERSPVKAKRSRGGEDSTSRGERSKKLGGSGGSNGSSSGKTDSGGGSRRSLHLDKSSSRGGSREYDTGGGSSSSRLHSYSSPSTKNSSGGGESRSSSRGGGGESRSSGAASSAPGGGDGAEYKTLKISELGSQLSDEAVEDGLFHEFKRFGDVSVKISHLSGSGSGDERVAFVNFRRPEDARAAKHARGRLVLYDRPLKIEAVYVSRRRSRSPLDKDTYPPSASVVGASVGGHRHPPGGGGGQRSLSPGGAALGYRDYRLQQLALGRLPPPPPPPLPRDLERERDYPFYERVRPAYSLEPRVGAGAGAAPFREVDEISPEDDQRANRTLFLGNLDITVTESDLRRAFDRFGVITEVDIKRPSRGQTSTYGFLKFENLDMSHRAKLAMSGKIIIRNPIKIGYGKATPTTRLWVGGLGPWVPLAALAREFDRFGTIRTIDYRKGDSWAYIQYESLDAAHAAWTHMRGFPLGGPDRRLRVDFADTEHRYQQQYLQPLPLTHYELVTDAFGHRAPDPLRGARDRTPPLLYRDRDRDLYPDSDWVPPPPPVRERSTRTAATSVPAYEPLDSLDRRRDGWSLDRDRGDRDLPSSRDQPRKRRLPEESGGRHLDRSPESDRPRKRHCAPSPDRSPELSSSRDRYNSDNDRSSRLLLERPSPIRDRRGSLEKSQGDKRDRKNSASAERDRKHRTTAPTEGKSPLKKEDRSDGSAPSTSTASSKLKSPSQKQDGGTAPVASASPKLCLAWQGMLLLKNSNFPSNMHLLQGDLQVASSLLVEGSTGGKVAQLKITQRLRLDQPKLDEVTRRIKVAGPNGYAILLAVPGSSDSRSSSSSAASDTATSTQRPLRNLVSYLKQKQAAGVISLPVGGNKDKENTGVLHAFPPCEFSQQFLDSPAKALAKSEEDYLVMIIVRAKLVEQRMKIWNSKL

SEQ ID NO: 22438 - protein, 391 aa, Homo sapiens [sequence omitted]

SEQ ID NO: 22439 - protein, 945 aa, Homo sapiens
MLNDGKEKYEKEKIKSISSEHVNEEKAEEHMDLRLKHCLAYVLHTSGTTGIPKIVRVPHKCIVPNIQHFRVLFDITQEDVLFLASPLTFDPSVVEIFLALSSGASLLIVPTSVKLLPSKLASVLFSHHRVTVLQATPTLLRRFGSQLIKSTVLSATTSLRVLALGGEAFPSLTVLRSWRGEGNKTQIFNVYGITEVSSWATIYRIPEKTLNSTLKCELPVQLGFPLLGTVVEVRDTNGFTIQEGSGQVFLGGRNRVCFLDDEVTVPLGTMRATGDFVTVKDGEIFFLGRKDSQIKRHGKRLNIELVQQVAEELQQVESCAVTWYNQEKLILFMVSKDASVKEYIFKELQKYLPSHAVPDELVLIDSLPFTSHGKIDVSELNKIYLNYINLKSENKLSGKEDLWEKLQYLWKSTLNLPEDLLRVPDESLFLNSGGDSLKSIRLLSEIEKLVGTSVPGLLEIILSSSILEIYNHILQTVVPDEDVTFRKSCATKRKLSDINQEEASGTSLHQKAIMTFTCHNEINAFVVLSRGSQILSLNSTRFLTKLGHCSSACPSDSVSQTNIQNLKGLNSPVLIGKSKDPSCVAKVSEEGKPAIGTQKMELHVRWRSDTGKCVDASPLVVIPTFDKSSTTVYIGSHSHRMKAVDFYSGKVKWEQILGDRIESSACVSKCGNFIVVGCYNGLVYVLKSNSGEKYWMFTTEDAVKSSATMDPTTGLIYIGSHDQHAYALDIYRKKCVWKSKCGGTVFSSPCLNLIPHHLYFATLGGLLLAVNPATGNVIWKHSCGKPLFSSPQCCSQYICIGCVDGNLLCFTHFGEQVWQFSTSGPIFSSPCTSPSEQKIFFGSHDCFIYCCNMKGHLQWKFETTSRVYATPFAFHNYNGSNEMLLAAASTDGKVWILESQSGQLQSVYELPGEVFSSPVVLESMLIIGCRDNYVYCLDLLGGNQK

SEQ ID NO: 22440 - protein, 1909 aa, Homo sapiens
MIEDKGPRVTDYFVVAGLTDTSTLLDQEINRLDTKSTGPKAPITDIAIIIKSAGETVPEGYTCVEATPSALQANLNYGSLKSPELFLCYKRGRDKPPLTDIGVLYEGKERLIPGCEVILATPYGRCANVNNSSTTSQRIFITYRRAPPVRPQNSLAVTDICVIVTSKGETPPHTFCKVDKNLNCGMWGSSVFLCYKKSVPASNAIAYKAGLIFRYPEEDYESFPLSESDVPLFCLPMGATIECWDPETKYPLPVFSTFVLTGSSAKKVYGAAIQFYEPYSRELLSEKQLMHLGLLTPVERKMVSKSINTNKCICLLSHWPFFEAFRKFLMFIYKLSVSGPHPLPIEKHISHFMQNIPFPSPQRPRILVQLSVHDALILSQPVSTPLPLSGANFSTLLMNLGPENCATLLLFVLLESKILLHSLRPAVLTGVAEAVVAMIFPFQWQCPYIPLCPLSLAAVLSAPLPFIVGVDSRYFDLHDPPQDVVCIDLDTNMLYVSDEKKNMNWKQLPKKPCKNLLSTLKKLYPQLSSVHQKTQEGSAIDMTPIEADFSWQKKMTQLEMEIQEAFLRFMASILKGYRTYLRPITEAPSNKATAADSLFDRQGFLKSRDRAYAKFYTLLSKTQIFIRFIEECSFVSDKDTGLAFFDDCIEKLFPDKGTEKTDKVDFDSAEDTRLIELDDSQKSEHTVFIMPPEPPPDDGKDLSPKYSYKYFPRLDLKLFDRPQELKLCFSRHPTGNSITKSPPLMAKRTKQEIKTAHKLAKRCYTNPPQWAKCLFSHCYSLWFICLPAYVRVSHPKVRALQQAYDVLIKMRKTDVDPLDEVCYRVVMQLCGLWGHPVLAVRVLFEMKTARIKPNAITYGYYNKVVLESPWPSSTRSGIFLWTKVRNVVRGLAQFRQPLKKTVQRSQVSSISGGQSDQGYGSKDELIKDDAEIHVPEEQAARELITKTKMQTEEVCDASAIVAKHSQPSPEPHSPTEPPAWGSSIVKVPSGIFDVNSRKSSTGSISNVLFSTQDPVEDAVFGEATNLKKNGDRGEKRQKHFPERSCSFSSESRAGMLLKKSSLDSNSSEMAIMMGADAKILTAALTCPKTSLLHIARTHSFENVSCHLPDSRTCMSESTWNPEHRSSPVPEMLEESQELLEPVVDDVPKTTATVDTYESLLSDSNSNQSRDLKTVSKDLRNKRSSLYGIAKVVQREDVETGLDPLSLLATECTGGKTPDSEDKLFSPVIARNLADEIESYMNLKSPLGSKSSSMELHREENRESGMTTAFIHALERRSSLPLDHGSPAQENPESEKSSPAVSRSKTFTGRFKQQTPSRTHKERSTSLSALVRSSPHGSLGSVVNSLSGLKLDNILSGPKIDVLKSGMKQAATVASKMWVAVASAYSYSDDEEETNRDYSFPAGLEDHILGENISPNTSISGLVPSELTQSNTSLGSSSSSGDVGKLHYPTGEVPFPRGMKGQDFEKSDHGSSQNTSMSSIYQNCAMEVLMSSCSQCRACGALVYDEEIMAGWTADDSNLNTACPFCKSNFLPLLNIEFKDLRGSASFFLKPSTSGDSLQSGSIPLANESLEHKPVSSLAEPDLINFMDFPKHNQIITEETGSAVEPSDEIKRASGDVQTMKISSVPNSLSKRNVSLTRSHSVGGPLQNIDFTQRPFHGISTVSLPNSLQEVVDPLGKRPNPPPVSVPYLSPLVLRKELESLLENEGDQVIHTSSFINQHPIIFWNLVWYFRRLDLPSNLPGLILTSEHCNEGVQLPLSSLSQDSKLVYIQLLWDNINLHQEPREPLYVSWRNFNSEKKSSLLSEEQQETSTLVETIRQSIQHNNVLKPINLLSQQMKPGMKRQRSLYREILFLSLVSLGRENIDIEAFDNEYGIAYNSLSSEILERLQKIDAPPSASVEWCRKCFGAPLI

SEQ ID NO: 22441 - protein, 517 aa, Homo sapiens
MATEAQSEGEVPARESGRSDAICSFVICNDSSLRGQPIIFNPDFFVEKLRHEKPEIFTELVVSNITRLIDLPGTELAQLMGEVDLKLPGGAGPASGFFRSLMSLKRKEKGVIFGSPLTEEGIAQIYQLIEYLHKNLRVEGLFRVPGNSVRQQILRDALNNGTDIDLESGEFHSNDVATLLKMFLGELPEPLLTHKHFNAHLKIADLMQFDDKGNKTNIPDKDRQIEALQLLFLILPPPNRNLLKLLLDLLYQTAKKQDKNKMSAYNLALMFAPHVLWPKNVTANDLQENITKLNSGMAFMIKHSQKLFKAPAYIRECARLHYLGSRTQASKDDLDLIASCHTKSFQLAKSQKRNRVDSCPHQEETQHHTEEALRELFQHVHDMPESAKKKQLIRQFNKQSLTQTPGREPSTSQVQKRARSRSFSGLIKRKVLGNQMMSEKKKKNPTPESVAIGELKGTSKENRNLLFSGSPAVTMTPTRLKWSEGKKEGKKGNSMATTSLGSIRMTLRGSSSCGCCS

SEQ ID NO: 22442 - protein, 522 aa, Homo sapiens
MYVIESARQRPPKRKYLSSGRKSVFQKLYDLYIEECEKEPEVKKLRRNVNLLEKLVMQETLSCLVVNLYPGNEGYSLMLRGKNGSDSETIRLPYEEGELLEYLDAEELPPILVDLLEKSQVNIFHCGCVIAEIRDYRQSSNMKSPGYQSRHILLRPTMQTLICDVHSITSDNHKWTQEDKLLLESQLILATAEPLCLDPSIAVTCTANRLLYNKQKMNTRPMKRCFKRYSRSSLNRQQDLSHCPPPPQLRLLDFLQKRKERKAGQHYDLKISKAGNCVDMWKRSPCNLAIPSEVDVEKYAKVEKSIKSDDSQPTVWPAHDVKDDYVFECEAGTQYQKTKLTILQSLGDPLYYGKIQPCKADEESDSQMSPSHSSTDDHSNWFIIGSKTDAERVVNQYQELVQNEAKCPVKMSHSSSGSASLSQVSPGKETDQTETVSVQSSVLGKGVKHRPPPIKLPSSSGNSSSGNYFTPQQTSSFLKSPTPPPSSKPSSIPRKSSVDLNQVSMLSPAALSPASSSQRHES

SEQ ID NO: 22443 - protein, 395 aa, Homo sapiens
MYPESTTGSPARLSLRQTGSPGMIYSTRYGSPKRQLQFYRNLGKSGLRVSCLGLGTWVTFGGQITDEMAEQLMTLAYDNGINLFDTAEVYAAGKAEVVLGNIIKKKGWRRSSLVITTKIFWGGKAETERGLSRKHIIEGLKASLERLQLEYVDVVFANRPDPNTPMEETVRAMTHVINQGMAMYWGTSRWSSMEIMEAYSVARQFNLTPPICEQAEYHMFQREKVEVQLPELFHKIGVGAMTWSPLACGIVSGKYDSGIPPYSRASLKGYQWLKDKILSEEGRRQQAKLKELQAIAERLGCTLPQLAIAWCLRNEGVSSVLLGASNADQLMENIGAIQVRVRGPAGQRAHPSPSPVQCILPGSSCVPGSVLGTQDAPVNHQSCAPGELAFQQEQT

SEQ ID NO: 22444 - protein, 3388 aa, Homo sapiens; identical to SEQ ID NO: 12382

SEQ ID NO: 22445 - protein, 1185 aa, Homo sapiens
MMCEVMPTISEDGRRGSALGPDEAGGELERLMVTMLTERERLLETLREAQDGLATAQLRLRELGHEKDSLQRQLSIALPQEFAALTKELNLCREQLLEREEEIAELKAERNNTRLLLEHLECLVSRHERSLRMTVVKRQAQSPGGVSSEVEVLKALKSLFEHHKALDEKVRERLRMALERVAVLEEELELSNQETLNLREQLSRRRSGLEEPGKDGDGQTLANGLGPGGDSNRRTAELEEALERQRAEVCQLRERLAVLCRQMSQLEEELGTAHRELGKAEEANSKLQRDLKEALAQREDMEERITTLEKRYLSAQREATSLHDANDKLENELASKESLYRQSEEKSRQLAEWLDDAKQKLQQTLQKAETLPEIEAQLAQRVAALNKAEERHGNFEERLRQLEAQLEEKNQELQRARQREKMNDDHNKRLSETVDKLLSESNERLQLHLKERMGALEEKNSLSEEIANMKKLQDELLLNKEQLLAEMERMQMEIDQLRGRPPSSYSRSLPGSALELRYSQAPTLPSGAHLDPYVAGSGRAGKRGRWSGVKEEPSKDWERSAPAGSIPPPFPGELDGSDEEEAEGMFGAELLSPSGQADVQTLAIMLQEQLEAINKEIKLIQEEKETTEQRAEELESRVSSSGLDSLGRYRSSCSLPPSLTTSTLASPSPPSSGHSTPRLAPPSPAREGTDKANHVPKEEAGAPRGEGPAIPGDTPPPTPRSARLERMTQALALQAGSLEDGGPPRGSEGTPDSLHKAPKKKSIKSSIGRLFGKKEKGRMGPPGRDSSSLAGTPSDETLATDPLGLAKLTGPGDKDRRNKRKHELLEEACRQGLPFAAWDGPTVVSWLELWVGMPAWYVAACRANVKSGAIMANLSDTEIQREIGISNPLHRLKLRLAIQEMVSLTSPSAPASSRTSTGNVWMTHEEMESLTATTKPILAYGDMNHEWVGNDWLPSLGLPQYRSYFMESLVDARMLDHLNKKELRGQLKMVDSFHRVSLHYGIMCLKRLNYDRKDLERRREESQTQIRDVMVWSNERVMGWVSGLGLKEFATNLTESGVHGALLALDETFDYSDLALLLQIPTQNAQARQLLEKEFSNLISLGTDRRLDEDSAKSFSRSPSWRKMFREKDLRGVTPDSAEMLPPNFRSAAAGALGSPGLPLRKLQPEGQTSGSSRADGVSVRTYSC

SEQ ID NO: 22446 - protein, 299 aa, Homo sapiens
YLATSGYPWPAWSSLCSCVTCFMRCNVEFVGTRTIYVWLETWRPGLQLQLQRSWLSTMTTVPSVGTPCRLRGNCPVDIFSTRSRIASWLPSFSVEVMHTTNILGITQASNSQLNAMAHQIQEMFPQVPYHLVLQDLQLTRSVEITTDNILEGRIQVPFPTQRSDSIRPALNSPVERPSSDQEEGETSAQTERVPLDLSPRLEETLDFGEVEVEPSEVEDFEARGSRFSKSADERQRMLVQRKDELLQQARKRFLNKSSEDDAASESFLPSEGASSDPVTLRRRMLAAAAERRLQKQQTS

SEQ ID NO: 22447 - protein, 957 aa, Homo sapiens
MRTAGRDPVPRRSPRWRRAVPLCETSAGRRVTQLRGDDLRRPATMKGKERSPVKAKRSRGGEDSTSRGERSKKLGGSGGSNGSSSGKTDSGGGSRRSLHLDKSSSRGGSREYDTGGGSSSSRLHSYSSPSTKNSSGGGESRSSSRGGGGESRSSGAASSAPGGGDGAEYKTLKISELGSQLSDEAVEDGLFHEFKRFGDVSVKISHLSGSGSGDERVAFVNFRRPEDARAAKHARGRLVLYDRPLKIEAVYVSRRRSRSPLDKDTYPPSASVVGASVGGHRHPPGGGGGQRSLSPGGAALGYRDYRLQQLALGRLPPPPPPPLPRDLERERDYPFYERVRPAYSLEPRVGAGAGAAPFREVDEISPEDDQRANRTLFLGNLDITVTESDLRRAFDRFGVITEVDIKRPSRGQTSTYGFLKFENLDMSHRAKLAMSGKIIIRNPIKIGYGKATPTTRLWVGGLGPWVPLAALAREFDRFGTIRTIDYRKGDSWAYIQYESLDAAHAAWTHMRGFPLGGPDRRLRVDFADTEHRYQQQYLQPLPLTHYELVTDAFGHRAPDPLRGARDRTPPLLYRDRDRDLYPDSDWVPPPPPVRERSTRTAATSVPAYEPLDSLDRRRDGWSLDRDRGDRDLPSSRDQPRKRRLPEESGGRHLDRSPESDRPRKRHCAPSPDRSPELSSSRDRYNSDNDRSSRLLLERPSPIRDRRGSLEKSQGDKRDRKNSASAERDRKHRTTAPTEGKSPLKKEDRSDGSAPSTSTASSKLKSPSQKQDGGTAPVASASPKLCLAWQGMLLLKNSNFPSNMHLLQGDLQVASSLLVEGSTGGKVAQLKITQRLRLDQPKLDEVTRRIKVAGPNGYAILLAVPGSSDSRSSSSSAASDTATSTQRPLRNLVSYLKQKQAAGVISLPVGGNKDKENTGVLHAFPPCEFSQQFLDSPAKALAKSEEDYLVMIIVRGAS

SEQ ID NO: 22448 - protein, 87 aa, Homo sapiens
TKAGLYWGYTVRLASCLSAVFAEAPFQDGYDLTIGTSERGSDVASAQLPNFRKPSSSPWPPCSLASSRRVPGTPESSKGPRTSVKQQ

SEQ ID NO: 22449 - protein, 130 aa, Homo sapiens
MSSDRQRSDDESPSTSSGSSDADQRDPAAPEPEEQEERKPSATQQKKNTKLSSKTTAKLSTSAKRIQKELAEITLDPPPNCRGCPCPLLVTTCANSESLERKISKSCIECKDIQIENEELVLSVSSSLSI

SEQ ID NO: 22450 - protein, 390 aa, Homo sapiens
MSSSCSGLSRVLVAVATALVSASSPCPQAWGPPGVQYGQPGRSVKLCCPGVTAGDPVSWFRDGEPKLLQGPDSGLGHELVLAQADSTDEGTYICQTLDGALGGTVTLQLGYPPARPVVSCQAADYENFSCTWSPSQISGLPTRYLTSYRKKTVLGADSQRRSPSTGPWPCPQDPLGAARCVVHGAEFWSQYRINVTEVNPLGASTRLLDVSLQSILRPDPPQGLRVESVPGYPRRLRASWTYPASWPCQPHFLLKFRLQYRPAQHPAWSTVEPAGLEEVITDAVAGLPHAVRVSARDFLDAGTWSTWSPEAWGTPSTGTIPKEIPAWGQLHTQPEVEPQVDSPAPPRPSLQPHPRLLDHRDSVEQVAVLASLGILSFLGLVAGALALGLW

SEQ ID NO: 22451 - protein, 423 aa, Homo sapiens
MATVWDEAEQDGIGEEVLKMSTEEIIQRTRLLDSEIKIMKSEVLRVTHELQAMKDKIKENSEKIKVNKTLPYLVSNVIELLDVDPNDQEEDGANIDLDSQRKGKCAVIKTSTRQTYFLPVIGLVDAEKLKPGDLVGVNKDSYLILETLPTEYDSRVKAMEVDERPTEQYSDIGGLDKQIQELVEAIVLPMNHKEKFENLGIQPPKGVLMYGPPGTGKTLLARACAAQTKATFLKLAGPQLVQMFIGDGAKLVRDAFALAKEKAPSIIFIDELDAIGTKRFDSEKAGDREVQRTMLELLNQLDGFQPNTQVKVIAATNRVDILDPALLRSGRLDRKIEFPMPNEEARARIMQIHSRKMNVSPDVNYEELARCTDDFNGAQCKAVCVEAGMIALRRGATELTHEDYMEGILEVQAKKKANLQYYA

SEQ ID NO: 22452 - protein, 91 aa, Homo sapiens
MQYSHHCEHLLERLNKQREAGFLCDCTIVIGEFQFKAHRNVLASFSEYFGAIYRSTSENNVFLDQSQVKADGFQKLLEFIYTGTLNLDRDI

SEQ ID NO: 22453 - protein, 495 aa, Homo sapiens
IPNHVNLDQYVGQENLTPQQDSSVFIKPEKLFDVKPGTLEISPHHSFGLPLLYLPLKPPNMFPSTSRASITVPSTPIQPIAEERKYPRLSLLHSHLSPENRCKKTQLIPLENLIAFKQSQQKLTHNLFEQGDAGHLQLLKVKIEPPEVRQGKDSKKRQRRRAEKELQEKRCEKLRRKPNVTFRPENSIINNDDSEIIKKPKEQQEHCGSHPLDDFDVPFEMLQDDNTSAGLHFMASVKKKAIGSQDASTNTDPEHEPLTAPQLLVPDVYLNLKLSSEMSEKPWSPSIPHTVTNLVGHTYINVIDIEANDLLQELPVREEPSNDNVIKQQSDHLAVPSSAELHYMAASVTNAVPPHNFKSQESANSSMDLFSKPAEVTPACLDGKSLRAGITEVKEPSVTSPTPSDIQQNKGLPKPEFRFKGQSTKSDSAEDYLLWKRLQGVSAACPAPSSAAHQLEHLSAKLQKIDEQLLAIQNIAENIEQDFPKPEMLDLHCDK

SEQ ID NO: 22454 - protein, 64 aa, Homo sapiens
MQGDARRRRNENYFDDIPRSKLERQMAQSSVCEIWTNQNAGFPFSAIHQVHNTGDWGEPSITLR

SEQ ID NO: 22455 - protein, 1043 aa, Homo sapiens
GTLKPVDEKEEAVAAEVGWMTSVKDWAGVMISAQTLTGRVLVVLVFALSIGALVIYFIDSSNPIESCQNFYKDFTLQIDMAFNVFFLLYFGLRFIAANDKLWFWLEVNSVVDFFTVPPVFVSVYLNRSWLGLRFLRALRLIQFSEILQFLNILKTSNSIKLVNLLSIFISTWLTAAGFIHLVENSGDPWENFQNNQALTYWECVYLLMVTMSTVGYGDVYAKTTLGRLFMVFFILGGLAMFASYVPEIIELIGNRKKYGGSYSAVSGRKHIVVCGHITLESVSNFLKDFLHKDRDDVNVEIVFLHNISPNLELEALFKRHFTQVEFYQGSVLNPHDLARVKIESADACLILANKYCADPDAEDASNIMRVISIKNYHPKIRIITQMLQYHNKAHLLNIPSWNWKEGDDAICLAELKLGFIAQSCLAQGLSTMLANLFSMRSFIKIEEDTWQKYYLEGVSNEMYTEYLSSAFVGLSFPTVCELCFVKLKLLMIAIEYKSANRESRSRKRILINPGNHLKIQEGTLGFFIASDAKEVKRAFFYCKACHDDITDPKRIKKCGCKRLEDEQPSTLSPKKKQRNGGMRNSPNTSPKLMRHDPLLIPGNDQIDNMDSNVKKYDSTGMFHWCAPKEIEKVILTRSEAAMTVLSGHVVVCIFGDVSSALIGLRNLVMPLRASNFHYHELKHIVFVGSIEYLKREWETLHNFPKVSILPGTPLSRADLRAVNINLCDMCVILSANQNNIDDTSLQDKECILASLNIKSMQFDDSIGVLQANSQGFTPPGMDRSSPDNSPVHGMLRQPSITTGVNIPIITELVNDTNVQFLDQDDDDDPDTELYLTQPFACGTAFAVSVLDSLMSATYFNDNILTLIRTLVTGGATPELEALIAEENALRGGYSTPQTLANRDRCRVAQLALLDGPFADLGDGGCYGDLFCKALKTYNMLCFGIYRLRDAHLSTPSQCTKRYVITNPPYEFELVPTDLIFCLMQFDHNAGQSRASLSHSSHSSQSSSKKSSSVHSIPSTANRQNRPKSRESRDKQNRKEMVYR

SEQ ID NO: 22456 - protein, 160 aa, Homo sapiens
MPRVYIGRLSYQARERDVERFFKGYGKILEVDLKNGLLCSEPTHVFGRTRWLTLANGNQKTSESNLVVTYPQLRGASPCPKVGKDQVQTELWPTFADQESTLALIREPLVCGNCQFADVKRVPDWVMVSPEVAPQLCHSVSTATSLILTSHGEVRFLQGK

SEQ ID NO: 22457 - protein, 148 aa, Homo sapiens
MLPGVGVFGTSLTARVIIPLLKDEGFAVKALWGRTQEEAEELAKEMSVPFYTSRIDEVLLHQDVDLVCINLPPPLTRQIAVKTLEPGHQRKKISRQKNTGEKKMPRGSVQLSFCSLQHPHMGHLFTPHDAALGESQGTGFKPLGMQPV

SEQ ID NO: 22458 - protein, 392 aa, Homo sapiens
EWRLSSSADANGNAQPSSLAAKGYRSVHPNLPSDKSQVLSPPRPPLPQKDRFAWQSPTIHNTYKDSLYLSSPKPYVPLGTPRQQNPSQPQPISVLLAAGSAPKGVVCPGSLLPDSTFPSASSQPQQRYAATRTVYHKNVSSNPCHEAVGIKKVSSLYVPCLSNNICLAASENSSRVARDPAEGTPLEAAGTRAPAPGLVSRTAGTGKPPPAPPPDPPKLFFDIRKDAVNRGESPSLGTQASFPDVRPPVLGPRVTSDPENRKSKESYLLQPSYPAKDSSPLLNEVSSSLIGTDSQAFPSVSKPSSAYPSTTIVNPTIVLLQHNREQQKRLSSLSDPVSERRVGEQDSAPTQEKPTSPGKAIEKRAKDDSRRVVKSTQDLSDVSMDEVGIPLR

SEQ ID NO: 22459 - protein, 516 aa, Homo sapiens
MGATEKGGQKSRKLFSLRRPWKATRRLWRPRSARQAAQGASSPDMEPSYGGGLFDMVKGGAGRLFSNLKDNLKDTLKDTSSRVIQSVTSYTKGDLDFTYVTSRIIVMSFPLDNVDIGFRNQVDDIRSFLDSRHLDHYTVYNLSPKSYRTAKFHSRVSECSWPIRQAPSLHNLFAVCRNMYNWLLQNPKNVCVVHCLDGRAASSILVGAMFIFCNLYSTPGPAIRLLYAKRPGIGLSPSHRRYLGYMCDLLADKPYRPHFKPLTIKSITVSPIPFFNKQRNGCRPYCDVLIGETKIYSTCTDFERMKEYRVQDGKIFIPLNITVQGDVVVSMYHLRSTIGSRLQAKVTNTQIFQLQFHTGFIPLDTTVLKFTKPELDACDVPEKYPQLFQVTLDVELQPHDKVIDLTPPWEHYCTKDVNPSILFSSHQEHQDTLALGGQAPIDIPPDNPRHYGQSGFFASLCWQDQKSEKSFCEEDHAALVNQESEQSDDELLTLSSPHGNANGDKPHGVKKPSKKQ

SEQ ID NO: 22460 - protein, 657 aa, Homo sapiens
MQSTANYLWHTDDLLGQGATASVYKARNKKSGELVAVKVFNTTSYLRPREVQVREFEVLRKLNHQNIVKLFAVEETGGSRQKVLVMEYCSSGSLLSVLESPENAFGLPEDEFLVVLRCVVAGMNHLRENGIVHRDIKPGNIMRLVGEEGQSIYKLTDFGAARELDDDEKFVSVYGTEEYLHPDMYERAVLRKPQQKAFGVTVDLWSIGVTLYHAATGSLPFIPFGGPRRNKEIMYRITTEKPAGAIAGAQRRENGPLEWSYTLPITCQLSLGLQSQLVPILANILEVEQAKCWGFDQFFAETSDILQRVVVHVFSLSQAVLHHIYIHAHNTIAIFQEAVHKQTSVAPRHQEYLFEGHLCVLEPSVSAQHIAHTTASSPLTLFSTAIPKGLAFRDPALDVPKFVPKVDLQADYNTAKGVLGAGYQALRLARALLDGQELMFRGLHWVMEVLQATCRRTLEVARTSLLYLSSSLGTERFSSVAGTPEIQELKAAAELRSRLRTLAEVLSRCSQNITETQESLSSLNRELVKSRDQVHEDRSIQQIQCCLDKMNFIYKQFKKSRMRPGLGYNEEQIHKLDKVNFSHLAKRLLQVFQEECVQKYQASLVTHGKRMRVVHETRNHLRLVGCSVAACNTEAQGVQESLSKHARALRGDEAAGI

SEQ ID NO: 22461 - protein, 551 aa, Homo sapiens
MEEAELVKGRLQAITDKRKIQEEISQKRLKIEEDKLKHQHLKKKALREKWLLDGISSGKEQEEMKKQNQQDQHQIQVLEQSILRLEKEIQDLEKAELQISTKEEAILKKLKSIERTTEDIIRSVKVEREERAEESIEDIYANIPDLPKSYIPSRLRKEINEEKEDDEQNRKALYAMEIKVEKDLKTGESTVLSSIPLPSDDFKGTGIKVYDDGQKSVYAVSSNHSAAYNGTDGLAPVEVEELLRQASERNSKSPTEYHEPVYANPFYRPTTPQRETVTPGPNFQERIKIKTNGLGIGVNESIHNMGNGLSEERGNNFNHISPIPPVPHPRSVIQQAEEKLHTPQKRLMTPWEESNVMQDKDAPSPKPRLSPRETIFGKSEHQNSSPTCQEDEEDVRYNIVHSLPPDINDTEPVTMIFMGYQQAEDSEEDKKFLTGYDGIIHAELVVIDDEEEEDEGEAEKPSYHPIAPHSQVYQPAKPTPLPRKRSEASPHENTNHKSPHKNSISLKEQEESLGSPVHHSPFDAQTTGDGTEDPSLTGNKNDKACHCCSVM

SEQ ID NO: 22462 - protein, 142 aa, Homo sapiens
MHNILKKYHQYIVECHGITLLPQFLGMYRLNVDGVEIYVIVTRNVFSHRLSVYRKYDLKGSTVAREASDKEKAKELPTLKDNDFINEGQKIYIDDNNKKVFLEKLKKDVEFLAQLKLMDYSLLVGIHDVERAEQEEVECEEN

SEQ ID NO: 22463 - protein, 857 aa, Homo sapiens
DHYQLQVQELTDLLKSKNEEDDPIMVAVNAKVEEWKLILSSKDDEIIEYQQMLHNLREKLKNAQLDADKSNVMALQQGIQERDSQIKMLTEQVEQYTKEMEKNTCIIEDLKNELQRNKGASTLSQQTHMKIQSTLDILKEKTKEAERTAELAEADAREKDKELVEALKRLKDYESGVYGLEDAVVEIKNCKNQIKIRDREIEILTKEINKLELKISDFLDENEALRERVGLEPKTMIDLTEFRNSKHLKQQQYRAENQILLKEIESLEEERLDLKKKIRQMAQERGKRSATSGLTTEDLNLTENISQGDRISERKLDLLSLKNMSEAQSKNEIIAQEFLIKEAECRNADIELEHHRSQAEQNEFLSRELIEKERDLERSRTVIAKFQNKLKELVEENKQLEEGMKEILQAIKEMQKDPDVKGGETSLIIPSLERLVNAIESKNAEGIFDASLHLKAQVDQLTGRNEELRQELRESRKEAINYSQQLAKANLKIDHLEKETSLLRQSEGSNVVFKGIDLPDGIAPSSASIINSQNEYLIHLLQELENKEKKLKNLEDSLEDYNRKFAVIRHQQSLLYKEYLSEKETWKTESKTIKEEKRKLEDQVQQDAIKVKEYNNLLNALQMDSDEMKKILAENSRKITVLQVNEKSLIRQYTTLVELERQLRKENEKQKNELLSMEAEVCEKIGCLQRFKEMAIFKIAALQKVVDNSVSLSELELANKQYNELTAKYRDILQKDNMLVQRTSNLEHLECENISLKEQVESINKELEITKEKLHTIEQAWEQETKLGNESSMDKAKKSITNSDIVSISKKITMLEMKELNERQRAEHCQKMYEHLRTSLKQMEERNFELETKFAEV

SEQ ID NO: 22464 - protein, 143 aa, Homo sapiens
MEEPQSDPSVEPPLSQETFSDLWKLLPENNVLSPLPSQAMDDLMLSPDDIEQWFTEDPGPDEAPRMPEAAPPVAPAPAAPTPAAPAPAPSWPLSSSVPSQKTYQGSYGFRLGFLHSGTAKSVTCTMFCQLAKTCPVQLWVDST

SEQ ID NO: 22465 - protein, 454 aa, Homo sapiens
MPALSTGSGSDTGLYELLAALPAQLQPHVDSQEDLTFLWDMFGEKSLHSLVKIHEKLHYYEKQSPVPILHGAAALADDLAEELQNKPLNSEIRELLKLLSKPNVKALLSVHDTVAQKNYDPVLPPMPEDIDDEEDSVKIIRLVKNREPLGATIKKDEQTGAIIVARIMRGGAADRSGLIHVGDELREVNGIPVEDKRPEEIIQILAQSQGAITFKIIPGSKEETPSKEGKMFIKALFDYNPNEDKAIPCKEAGLSFKKGDILQIMSQDDATWWQAKHEADANPRAGLIPSKHFQERRLALRRPEILVQPLKVSNRKSSGFRKSFRLSRKDKKTNKSMYECKKSDQYDTADVPTYEEVTPYRRQTNEKYRLVVLVGPVGVGLNELKRKLLISDTQHYGVTVPHTTRARRSQESDGVEYIFISKHLFETDVQNNKYVDIFENFHVTVFYKHMPVPF

SEQ ID NO: 22466 - protein, 111 aa, Homo sapiens
MVAGWLTNYSQDSVTFEDVAVDFTQEEWTLLDQTQRNLYRDVMLENYKNLVAVDWESHINTKWSAPQQNFLQGKTSSVVEMRCGLAVLPRLVSNSCSQVILLPQPPEYIYI

SEQ ID NO: 22467 - protein, 258 aa, Homo sapiens
MADAGIRRVVPSDLYPLVLGFLRDNQLSEVANKFAKATGAKGVKPQAKAAKAPPKKAKSSDSDSDSSSEDEPPKNQKPKITPVTVKAQTKAPPKPARAAPKIANGKAASSSSSSSSSSSSDDSEEEKAAATPKKTVPKKQVVAKAPVKAATTPTRKSSSSEDSSSDEEEEQKKPMKNKPGPYSSVPPPSAPPPKKSLGTQPPKKAVEKQQPVESSEDSSDESDSDSSEDDEAPSKPAGTTKNSSNKPAVTTKSPAVKP

SEQ ID NO: 22468 - protein, 301 aa, Homo sapiens
MEKWYLMTVVVLIGLTVRWTVSLNSYSGAGKPPMFGDYEAQRHWQEITFNLPVKQWYFNSSDNNLQYWGLDYPPLTAYHSLLCAYVAKFINPDWIALHTSRGYESQAHKLFMRTTVLIADLLIYIPAVVLYCCCLKEISTKKKIANALCILLYPGLILIDYGHFQYNSVSLGFALWGVLGISCDCDLLGSLAFCLAINYKQMELYHALPFFCFLLGKCFKKGLKGKGFVLLVKLACIVVASFVLCWLPFFTEREQTLQVLRRLFPVDRGLFEDKVANIWCSFNVFLKIKDILPRHIQLIMS

SEQ ID NO: 22469 - protein, 789 aa, Homo sapiens
MTSPAKFKKDKEIIAEYDTQVKEIRAQLTEQMKCLDQQCELRVQLLQDLQDFFRKKAEIEMDYSRNLEKLAERFLAKTRSTKDQQFKKDQNVLSPVNCWNLLLNQVKRESRDHTTLSDIYLNNIIPRFVQVSEDSGRLFKKSKEVGQQLQDDLMKVLNELYSVMKTYHMYNADSISAQSKLKEAEKQEEKQIGKSVKQEDRQTPRSPDSTANVRIEEKHVRRSSVKKIEKMKEKRQAKYTENKLKAIKARNEYLLALEATNASVFKYYIHDLSDLIDCCDLGYHASLNRALRTFLSAELNLEQSKHEGLDAIENAVENLDATSDKQRLMEMYNNVFCPPMKFEFQPHMGDMASQLCAQQPVQSELVQRCQQLQSRLSTLKIENEEVKKTMEATLQTIQDIVTVEDFDVSDCFQYSNSMESVKSTVSETFMSKPSIAKRRANQQETEQFYFTKMKEYLEGRNLITKLQAKHDLLQKTLGESQRTDCSLARRSSTVRKQDSSQAIPLVVESCIRFISRHGLQHEGIFRVSGSQVEVNDIKNAFERGEDPLAGDQNDHDMDSIAGVLKLYFRGLEHPLFPKDIFHDLMACVTMDNLQERALHIRKVLLVLPKTTLIIMRYLFAFLNHLSQFSEENMMDPYNLAICFGPSLMSVPEGHDQVSCQAHVNELIKTIIIQHENIFPSPRELEGPVYSRGGSMEDYCDSPHGETTSVEDSTQDVTAEHHTSDDECEPIEAIAKFDYVGRTARELSFKKGASLLLYQRASDDWWEGRHNGIDGLIPHQYIVVQDTLIS

SEQ ID NO: 22470 - protein, 70 aa, Homo sapiens
MDEQPRLMHSHAGVGMAGHPGLSQHLQDGAGGTEGEGGRKQDIGDILQQIMTITDQSLDEAQASNYMAEE

SEQ ID NO: 22471 - protein, 450 aa, Homo sapiens
MASAITQCSTSELTCSICTDYLTDPVTICCGHRFCSPCLCLLWEDTLTPNCCPVCREISQQMYFKRIIFAEKQVIPTRESVPCQLSSSAMLICRRHQEIKNLICETDRSLLCFLCSQSPRHATHKHYMTREADEYYRKKLLIQMKSIWKKKQKNQRNLNRETNIIGTWEVFINLRSMMISAEYPKVCQYLREEEQKHVESLAREGRIIFQQLKRSQTRMAKMGILLREMYEKLKEMSCKADVNLPQDLGDVMKRNEFLRLAMPQPVNPQLSAWTITGVSERLNFFRVYITLDRKICSNHKLLFEDLRHLQCSLDDTDMSCNPTSTQYTSSWGAQILSSGKHYWEVDVKDSCNWVIGLCREAWTKRNDMRLDSEGIFLLLCLKVDDHFSLFSTSPLLPHYIPRPQGWLGVFLDYECGIVSFVNVAQSSLICSFLSRIFYFPLRPFICHGSK

SEQ ID NO: 22472 - protein, 593 aa, Homo sapiens
MCLNKTKQLFGVAKRLPFWRKERSPHRPILQAGLPANASTVVGGDVEFVCKVYSDAQPHIQWIKHVEKNGSKYGPDGLPYLKVLKAAGVNTTDKEIEVLYIRNVTFEDAGEYTCLAGNSIGISFHSAWLTVLPAPGREKEITASPDYLEIAIYCIGVFLIACMVVTVILCRMKNTTKKPDFSSQPAVHKLTKRIPLRRQVTVSAESSSSMNSNTPLVRITTRLSSTADTPMLAGVSEYELPEDPKWEFPRDKLTLGKPLGEGCFGQVVMAEAVGIDKDKPKEAVTVAVKMLKDDATEKDLSDLVSEMEMMKMIGKHKNIINLLGACTQDGPLYVIVEYASKGNLREYLRARRPPGMEYSYDINRVPEEQMTFKDLVSCTYQLARGMEYLASQKCIHRDLAARNVLVTENNVMKIADFGLARDINNIDYYKKTTNGRLPVKWMAPEALFDRVYTHQSDVWSFGVLMWEIFTLGGSPYPGIPVEELFKLLKEGHRMDKPANCTNELYMMMRDCWHAVPSQRPTFKQLVEDLDRILTLTTNEEYLDLSQPLEQYSPSYPDTRSSCSSGDDSVFSPDPMPYEPCLPQYPHINGSVKT

SEQ ID NO: 22473 - protein, 352 aa, Homo sapiens
MPSETLWEIAKAEVEKRGINGSEGDGAEIAEKFVFFIGSKNGGKTTIILRCLDRDEPPKPTLALEYTYGRRAKGHNTPKDIAHFWELGGGTSLLDLISIPITGDTLRTFSLVLVLDLSKPNDLWPTMENLLQATKSHVDKVIMKLGKTNAKAVSEMRQKIWNNMPKDHPQDHELIDPFPVPLVIIGSKYDVFQDFESEKRKVICKTLRFVAHYYGASLMFTSKSEALLLKIRGVINQLAFGIDKSKSICVDQNKPLFITAGLDSFGQIGSPPVPENDIGKLHAHSPMELWKKVYEKLFPPKSINTLKDIKDPARDPQYAENEVDEMRIQKDLELEQYKRSSSKSWKQIELDS

SEQ ID NO: 22474 - protein, 1796 aa, Homo sapiens
MELMFAEWEDGERFSFEDSDRFEEDSLCSFISEAESLCQNWRGWRKQSAGPNSPTGGGGGGGSGGTRMRDGLVIPLVELSAKQVAFHIPFEVVEKVYPPVPEQLQLRIAFWSFPENEEDIRLYSCLANGSADEFQRGDQLFRMRAVKDPLQIGFHLSATVVPPQMVPPKGAYNVAVMFDRCRVTSCSCTCGAGAKWCTHVVALCLFRIHNASAVCLRAPVSESLSRLQRDQLQKFAQYLISELPQQILPTAQRLLDELLSSQSTAINTVCGAPDPTAGPSASDQSTWYLDESTLTDNIKKTLHKFCGPSPVVFSDVNSMYLSSTEPPAAAEWACLLRPLRGREPEGVWNLLSIVREMFKRRDSNAAPLLEILTDQCLTYEQITGWWYSVRTSASHSSASGHTGRSNGQSEVAAHACASMCDEMVTLWRLAVLDPALSPQRRRELCTQLRQWQLKVIENVKRGQHKKTLERLFPGFRPAVEACYFNWEEAYPLPGVTYSGTDRKLALCWARALPSRPGASRSGGLEESRDRPRPLPTEPAVRPKEPGTKRKGLGEGVPSSQRGPRRLSAEGGDKALHKMGPGGGKAKALGGAGSGSKGSAGGGSKRRLSSEDSSLEPDLAEMSLDDSSLALGAEASTFGGFPESPPPCPLHASVGPPGLLPGDVCTQDDLPSTDESGNGLPKTKEAAPAVGEEDDDYQAYYLNAQDGAGGEEEKAEGGAGEEHDLFAGLKPLEQESRMEVLFACAEALHAHGYSSEASRLTVELAQDLLANPPDLKVEPPPAKGKKNKVSTSRQTWVATNTLSKAAFLLTVLSERPEHHNLAFRVGMFALELQRPPASTKALEVKLAYQESEVAALLKKIPLGPSEMSTMRCRAEELREGTLCDYRPVLPLMLASFIFDVLCAPGSRPPSRNWNSETPGDEELGFEAAVAALGMKTTVSEAEHPLLCEGTRREKGDLALALMITYKDDQAKLKKILDKLLDRESQTHKPQTLSSFYSSSRPTTASQRSPSKHGGPSAPGALQPLTSGSAGPAQPGSVAGAGPGPTEGFTEKNVPESSPHSPCEGLPSEAALTPRPEGKVPSRLALGSRGGYNGRGWGSPGRPKKKHTGMASIDSSAPETTSDSSPTLSRRPLRGGWAPTSWGRGQDSDSISSSSSDSLGSSSSSGSRRASASGGARAKTVEVGRYKGRRPESHAPHVPNQPSEAAAHFYFELAKTVLIKAGGNSSTSIFTHPSSSGGHQGPHRNLHLCAFEIGLYALGLHNFVSPNWLSRTYSSHVSWITGQAMEIGSAALTILVECWDGHLTPPEVASLADRASRARDSNMVRAAAELALSCLPHAHALNPNEIQRALVQCKEQDNLMLEKACMAVEEAAKGGGVYPEVLFEVAHQWFWLYEQTAGGSSTAREGATSCSASGIRAGGEAGRGMPEGRGGPGTEPVTVAAAAVTAAATVVPVISVGSSLYPGPGLGHGHSPGLHPYTALQPHLPCSPQYLTHPAHPAHPMPHMPRPAVFPVPSSAYPQGVHPAFLGAQYPYSVTPPSLAATAVSFPVPSMAPITVHPYHTEPGLPLPTSVALSSVHPASTFPAIQGASLPALTTQPSPLVSGGFPPPEEETHSQPVNPHSLHHLHAAYRVGMLALEMLGRRAHNDHPNNFSRSPPYTDDVKWLLGLAAKLGVNYVHQFCVGAAKGVLSPFVLQEIVMETLQRLSPAHAHNHLRAPAFHQLVQRCQQAYMQYIHHRLIHLTPADYDDFVNAIRSARSAFCLTPMGMMQFNDILQNLKRSKQTKELWQRVSLEMATFSP

SEQ ID NO: 22475 - protein, 245 aa, Homo sapiens
MQFGTRTTTAEPGFMGTWQNADTNLLFRMSQQAIRCTLVNCTCECFQPGKINLRTCDQCKHGWVAHALDKLSTQHLYHPTQVEIVQSNVVFDISSLMLYGTQAVPVRLKILLDRLFSVLKQEEVLHILHGLGWTLRDYVRGYILQDAAGKVLDRWAIMSREEEIITLQQFLRFGETKSIVELMAIQEKEGQAVAVPSSKTDSDIRTFIESNNRTRSPSLLAHLENSNPSSIHHFENIPNSLAFLL

SEQ ID NO: 22476 - protein, 696 aa, Homo sapiens
MRREPRYQGQVGPDIHTDSERTLSSHQPRPLDSTKMEVKGQLISSPTFNAPAALFGEAAPQVKSERLRGLLDRQRTLQEALSLKLQELRKVCLQEAELTGQLPPECPLEPGERPQLVRRRPPTARAYPPPHPNQAHHSLCPAEELALEALEREVSVQQQIAAAARRLALAPDLSTEQRRRRRQVQADALRRLHELEEQLRDVRARLGLPVLPLPQPLPLSTGSVITTQGVCLGMRLAQLSQEDVVLHSESSSLSESGASHDNEEPHGCFSLAERPSPPKAWDQLRAVSGGSPERRTPWKPPPSDLYGDLKSRRNSVASPTSPTRSLPRSASSFEGRSVPATPVLTRGAGPQLCKPEGLHSRQWSGSQDSQMGFPRADPASDRASLFVARTRRSNSSEALLVDRAAGGGAGSPPAPLAPSASGPPVCKSSEVLYERPQPTPAFSSRTAGPPDPPRAARPSSAAPASRGAPRLPPVCGDFLLDYSLDRGLPRSGGGTGWGELPPAAEVPGPLSRRDGLLTMLPGPPPVYAADSNSPLLRTKDPHTRATRTKPCGLPPEAAEGPEVHPNPLLWMPPPTRIPSAGERSGHKNLALEGLRDWYIRNSGLAAGPQRRPVLPSVGPPHPPFLHARCYEVGQALYGAPSQAPLPHSRSFTAPPVSGRYYADFLYPPELSARLSDLTLEGEQSSSSDTQTPGTLV

SEQ ID NO: 22477 - protein, 84 aa, Homo sapiens
MVAGWLTNYSQDSVTFEDVAVDFTQEEWTLLDQTQRNLYRDVMLENYKNLVAVDWESHINTKWSAPQQNFLQGKTSSVVEMGWV

SEQ ID NO: 22478 - protein, 374 aa, Homo sapiens
MLAPGCELDPDQEVVRTRPEDVPASPSTSTMIVSVLRPPSHASCTACGTVTFHIVERMASVIPASNRSMRSDRNTYVGKRFVHVKNPYLDLMDEDILYHLDLGTKTHNLPAMFGDVKFVCVGGSPNRMKAFALFMHKELGFEEAEEDIKDICAGTDRYCMYKTGPVLAISHGMGIPSISIMLHELIKLLHHARCCDVTIIRIGTSGGIGIAPGTVVITDIAVDSFFKPRFEQVILDNIVTRSTELDKELSEELFNCSKEIPNFPTLVGHTMCTYDFYEGQGRLDGALCSFSREKKLDYLKRAFKAGVRNIEMESTVFAAMCGLCGLKAAVVCVTLLDRLDCDQINLPHDVLVEYQQRPQLLISNFIRRRLGLCD

SEQ ID NO: 22479 - protein, 1101 aa, Homo sapiens
GGEEEKAEGGAGEEHDLFAGLKPLEQESRMEVLFACAEALHAHGYSSEASRLTVELAQDLLANPPDLKVEPPPAKGKKNKVSTSRQTWVATNTLSKAAFLLTVLSERPEHHNLAFRVGMFALELQRPPASTKALEVKLAYQESEVAALLKKIPLGPSEMSTMRCRAEELREGTLCDYRPVLPLMLASFIFDVLCAPVVSPTGSRPPSRNWNSETPGDEELGFEAAVAALGMKTTVSEAEHPLLCEGTRREKGDLALALMITYKDDQAKLKKVTASVFQILDKLLDRESQTHKPQTLSSFYSSSRPTTASQRSPSKHGGPSAPGALQPLTSGSAGPAQPGSVAGAGPGPTEGFTEKNVPESSPHSPCEGLPSEAALTPRPEGKVPSRLALGSRGGYNGRGWGSPGRPKKKHTGMASIDSSAPETTSDSSPTLSRRPLRGGWAPTSWGRGQDSDSISSSSSDSLGSSSSSGSRRASASGGARAKTVEVGRYKGRRPESHAPHVPNQPSEAAAHFYFELAKTVLIKAGGNSSTSIFTHPSSSGGHQGPHRNLHLCAFEIGLYALGLHNFVSPNWLSRTYSSHVSWITGQAMEIGSAALTILVECWDGHLTPPEVASLADRASRARDSNMVRAAAELALSCLPHAHALNPNEIQRALVQCKEQDNLMLEKACMAVEEAAKGGGVYPEVLFEVAHQWFWLYEQTAGGSSTAREGATSCSASGIRAGGEAGRGMPEGRGGPGTEPVTVAAAAVTAAATVVPVISVGSSLYPGPGLGHGHSPGLHPYTALQPHLPCSPQYLTHPAHPAHPMPHMPRPAVFPVPSSAYPQGVHPAFLGAQYPYSVTPPSLAATAVSFPVPSMAPITVHPYHTEPGLPLPTSVALSSVHPASTFPAIQGASLPALTTQPSPLVSGGFPPPEEETHSQPVNPHSLHHLHAAYRVGMLALEMLGRRAHNDHPNNFSRSPPYTDDVKWLLGLAAKLGVNYVHQFCVGAAKGVLSPFVLQEIVMETLQRLSPAHAHNHLRAPAFHQLVQRCQQAYMQYIHHRLIHLTPADYDDFVNAIRSARSAFCLTPMGMMQFNDILQNLKRSKQTKELWQRVSLEMATFSP

SEQ ID NO: 22480 - protein, 280 aa, Homo sapiens
RTPAFAAWFPATCIPSCSASCAITNSQRWPISSPKRQELSAKVPERKLQANGPVAKKAKKKASSSDSEDSSEEEEEVQGPPAKKAAVPAKRVGLPPGKAAAKASESSSSEESSDDDDEEDQKKQPVQKGVKPQAKAAKAPPKKAKSSDSDSDSSSEDEPPKNQKPKITPVTVKAQTKAPPKPARAAPKIANGKAASSSSSSSSSSSSDDSEEEKAAATPKKTVPKKQVVAKAPVKAATTPTRKSSSSEDSSSDEEEEQKKPMKNKPGPYSSVPPPSAPPP

SEQ ID NO: 22481 - protein, 195 aa, Homo sapiens
MFCVASDEIYIAPSGVQKERIQPEDMFVCDINEKDISGPSPSKKLKKSQCTPLFMNAYTMRGAGAVIHTHSKAAVMATLLFPGREFKITHQEMIKGIKKCTSGGYYRYDDMLVVPIIENTPEEKDLKDRMAHAMNEYPDSCAVLVRRHGVYVWGETWEKAKTMCECYDYLFDIAVSMKKVGLDPSQLPVGENGIV

SEQ ID NO: 22482 - protein, 160 aa, Homo sapiens
MRILHVNGFNGEGGEEDPQAARSNSDGEKATKVQDIKNNLKEAIETIVAAMSNLVPPVELANPENQFRVDYILSVMNVPDFDFPPEFYEHAKALWEDEGVRACYERSNEYQLIDCAQYFLDKIDVIKQADYVPSDQDLLRCRVLTSGIFETKFQVDKVNF

SEQ ID NO: 22483 - protein, 233 aa, Homo sapiens
MGDLWLFLLLPLSAFHGVKGCLECDPKFIEDVGSLLGNLIPSEVPGRTQLLERQIKEMIHLSFKVSHSDKRLRVLAVQQVVKLRTWLKNEFYKLGNETWKGVFIYQGKLLDVCQNLESKLKELLKNFSEIVVVEGPILDCWTCLRMTNRCFKGEYCGDEDPRKAENREIALFLILLATAVILGSAVLLFHFCIFHRRKMKAIRRSLKEYVEKKLEELMGKIDEKEEKDFRLRK

SEQ ID NO: 22484 - protein, 1966 aa, Homo sapiens
MENSHPPHHHHQQPPPQPGPSGERRNHHWRSYKLMIDPALKKGHHKLYRYDGQHFSLAMSSNRPVEIVEDPRVVGIWTKNKELELSVPKFKIDEFYVGPVPPKQVTFAKLNDNIRENFLRDMCKKYGEVEEVEILYNPKTKKHLGIAKVVFATVRGAKDAVQHLHSTSVMGNIIHVELDTKGETRMRFYELLVTGRYTPQTLPVGELDAVSPIVNETLQLSDALKRLKDGGLSAGCGSGSSSVTPNSGGTPFSQDTAYSSCRLDTPNSYGQGTPLTPRLGTPFSQDSSYSSRQPTPSYLFSQDPAVTFKARRHESKFTDAYNRRHEHHYVHNSPAVTAVAGATAAFRGSSDLPFGAVGGTGGSSGPPFKAQPQDSATFAHTPPPAQATPAPGFKSAFSPYQTPVAHFPPPPEEPTATAAFGARDSGEFRRAPAPPPLPPAEPLAKEKPGTPPGPPPPDTNSMELGGRPTFGWSPEPCDSPGTPTLESSPAGPEKPHDSLDSRIEMLLKEQRTKLLFLREPDSDTELQMEGSPISSSSSQLSPLAPFGTNSQPGFRGPTPPSSRPSSTGLEDISPTPLPDSDEDEELDLGLGPRPPPEPGPPDPAGLLSQTAEVALDLVGDRTPTSEKMDEGQQSSGEDMEISDDEMPSAPITSADCPKPMVVTPGAAAVAAPSVLAPTLPLPPPPGFPPLPPPPPPPPPQPGFPMPPPLPPPPPPPPPAHPAVTVPPPPLPAPPGVPPPPILPPLPPFPPGLFPVMQVDMSHVLGGQWGGMPMSFQMQTQVLSRLMTGQGACPYPPFMAAAAAAASAGLQFVNLPPYRGPFSLSNSGPGRGQHWPPLPKFDPSVPPPGYMPRQEDPHKATVDGVLLVVLKELKAIMKRDLNRKMVEVVAFRAFDEWWDKKERMAKASLTPVKSGEHKDEDRPKPKDRIASCLLESWGKGEGLGYEGLGLGIGLRGAIRLPSFKVKRKEPPDTTSSGDQKRLRPSTSVDEEDEESERERDRDMADTPCELAKRDPKGVGVRRRPARPLELDSGGEEDEKESLSASSSSSASSSSGSSTTSPSSSASDKEEEQESTEEEEEAEEEEEEEVPRSQLSSSSTSSTSDKDDDDDDSDDRDESENDDEDTALSEASEKDEGDSDEEETVSIVTSKAEATSSSESSESSEFESSSESSPSSSEDEEEVVAREEEEEEEEEEMVAEESMASAGPEDFEQDGEEAALAPGAPAVDSLGMEEEVDIETEAVAPEERPSMLDEPPLPVGVEEPADSREPPEEPGLSQEGAMLLSPEPPAKEVEARPPLSPERAPEHDLEVEPEPPMMLPLPLQPPLPPPRPPRPPSPPPEPETTDASHPSVPPEPLAEDHPPHTPGLCGSLAKSQSTETVPATPGGEPPLSGGSSGLSLSSPQVPGSPFSYPAPSPSLSSGGLPRTPGRDFSFTPTFSEPSGPLLLPVCPLPTGRRDERSGPLASPVLLETGLPLPLPLPLPLPLALPAVLRAQARAPTPLPPLLPAPLASCPPPMKRKPGRPRRSPPSMLSLDGPLVRPPAGAALGRELLLLPGQPQTPVFPSTHDPRTVTLDFRNAGIPAPPPPLPPQPPPPPPPPPVEPTKLPFKELDNQWPSEAIPPGPRGRDEVTEEYMELAKSRGPWRRPPKKRHEDLVPPAGSPELSPPQPLFRPRSEFEEMTILYDIWNGGIDEEDIRFLCVTYERLLQQDNGMDWLNDTLWVYHPSTSLSSAKKKKRDDGIREHVTGCARSEGFYTIDKKDKLRYLNSSRASTDEPPADTQGMSIPAQPHASTRAGSERRSEQRRLLSSFTGSCDSDLLKFNQLKFRKKKLKFCKSHIHDWGLFAMEPIAADEMVIEYVGQNIRQVIADMREKRYEDEGIGSSYMFRVDHDTIIDATKCGNFARFINHSCNPNCYAKVITVESQKKIVIYSKQHINVNEEITYDYKFPIEDVKIPCLCGSENCRGTLN

SEQ ID NO: 22485 - protein, 450 aa, Homo sapiens
VKKTMEATLQTIQDIVTVEDFDVSDCFQYSNSMESVKSTVSETFMSKPSIAKRRANQQETEQFYFTKMKEYLEGRNLITKLQAKHDLLQKTLGESQRTDCSLARRSSTVRKQDSSQAIPLVVESCIRFISRHGLQHEGIFRVSGSQVEVNDIKNAFERGEDPLAGDQNDHDMDSIAGVLKLYFRGLEHPLFPKDIFHDLMACVTMDNLQERALHIRKVLLVLPKTTLIIMRYLFAFLNHLSQFSEENMMDPYNLAICFGPSLMSVPEGHDQVSCQAHVNELIKTIIIQHENIFPSPRELEGPVYSRGGSMEDYCDSPHGETTSVEDSTQDVTAEHHTSDDECEPIEAIAKFDYVGRTARELSFKKGASLLLYQRASDDWWEGRHNGIDGLIPHQYIVVQDTEDGVVERSSPKSEIEVISEPPEEKVTARAGASCPSGGHVADIYLANINK

SEQ ID NO: 22486 - protein, 456 aa, Homo sapiens
MVVLNPMTLGIYLQLFFLSIVSQPTFINSVLPISAALPSLDQKKRGGHKACCLLTPPPPPLFPPPFFRGGRSPLLSPDMKNLMLELETSQSPCMQGSLGSPGPPGPQGPPGLPGKTGPKGEKGELGRPGRKGRPGPPGVPGMPGPIGWPGPEGPRGEKGDLGMMGLPGSRGPMGSKGYPGSRGEKGSRGEKGDLGPKGEKGFPGFPGMLGQKGEMGPKGEPGIAGHRGPTGRPGKRGKQGQKGDSGVMGPPGKPGPSGQPGRPGPPGPPPAGQLIMGPKGERGFPGPPGRCLCGPTMNVNNPSYGESVYGPSSPRVPVIFVVNNQEELERLNTQNAIAFRRDQRSLYFKDSLGWLPIQLTPFYPVDYTADQHGTCGDGLLQPGEECDDGNSDVGDDCIRDCHRAYCGDGHRHEGVEDCDGSDFGYLTCETYLPGSYGDLQCTQYCYIDSTPCRYFT

SEQ ID NO: 22487 - protein, 117 aa, Homo sapiens
MDWTWRILFLVAAATGAHSQVQLVQSGAEVKKPGASVKVSCKASGYIFTDYYMHWVRQAPGQELGWMGRINPNSGGTNYAQKFQGRVTMTRDTSISTAYTELSSLRSEDTATYYCAR

SEQ ID NO: 22488 - protein, 507 aa, Homo sapiens
MAGPQMGGSAEDHPPRKRHAAEKQKKKTVIYTKCFEFESATQRPIDRQRYDENEDLSDVEEIVSVRGFSLEEKLRSQLYQGDFVHAMEGKDFNYEYVQREALRVPLIFREKDGLGIKMPDPDFTVRDVKLLVGSRRLVDVMDVNTQKGTEMSMSQFVRYYETPEAQRDKLYNVISLEFSHTKLEHLVKRPTVVDLVDWVDNMWPQHLKEKQTEATNAIAEMKYPKVKKYCLMSVKGCFTDFHIDFGGTSVWYHVFRGGKVQPKFRYPFYYEMCWYVLERYVYCVTQRSHLTQEYQRESMLIDAPRKPSIDGFSSDSWLEMEEEACDQQPQEEEEKDEEGEGRDRAPKPPTDGSTSPTSTPSEDQEALGKKPKAPALRFLKRTLSNESEESVKSTTLAVDYPKTPTGSPATEVSAKWTHLTEFELKGLKALVEKLESLPENKKCVPEGIEDPQALLEGVKNVLKEHADDDPSLAITGVPVVTWPKKTPKVRRSLPAAGGRFPPPSHLL

SEQ ID NO: 22489 - protein, 166 aa, Homo sapiens
VRNGKVGLDATNCLRITDLKSGCTSLTPGPNCDRFKLHIPYAGETLKWDIIFNAQYPELPPDFIFGEDAEFLPDPSALQNLASWNPSNPECLLLVVKELVQQYHQFQCSRLRESSRLMFEYQTLLEEPQYGENMEIYAGKKNNWVRIFENGKKDDFIHNKIINSYV

SEQ ID NO: 22490 - protein, 1655 aa, Homo sapiens
MELMFAEWEDGERFSFEDSDRFEEDSLCSFISEAESLCQNWRGWRKQSAGPNSPTGGGGGGGSGGTRMRDGLVIPLVELSAKQVAFHIPFEVVEKVYPPVPEQLQLRIAFWSFPENEEDIRLYSCLANGSADEFQRGDQLFRMRAVKDPLQIGFHLSATVVPPQMVPPKGAYNVAVMFDRCRVTSCSCTCGAGAKWCTHVVALCLFRIHNASAVCLRAPVSESLSRLQRDQLQKFAQYLISELPQQILPTAQRLLDELLSSQSTAINTVCGAPDPTAGPSASDQSTWYLDESTLTDNIKKTLHKFCGPSPVVFSDVNSMYLSSTEPPAAAEWACLLRPLRGREPEGVWNLLSIVREMFKRRDSNAAPLLEILTDQCLTYEQITGWWYSVRTSASHSSASGHTGRSNGQSEVAAHACASMCDEMVTLWRLAVLDPALSPQRRRELCTQLRQWQLKVIENVKRGQHKKTLERLFPGFRPAVEACYFNWEEAYPLPGVTYSGTDRKLALCWARALPSRPGASRSGGLEESRDRPRPLPTEPAVRPKEPGTKRKGLGEGVPSSQRGPRRLSAEGGDKALHKMGPGGGKAKALGGAGSGSKGSAGGGSKRRLSSEDSSLEPDLAEMSLDDSSLALGAEASTFGGFPESPPPCPLHGGSRGPSTFLPEPPDTYEEDGGVYFSEGPEPPTASVGPPGLLPGDVCTQDDLPSTDESGNGLPKTKEAAPAVGEEDDDYQAYYLNAQDGAGGEEEKAEGGAGEEHDLFAGLKPLEQESRMEVLFACAEALHAHGYSSEASRLTVELAQDLLANPPDLKVEPPPAKGKKNKVSTSRQTWVATNTLSKAAFLLTVLSERPEHHNLAFRVGMFALELQRPPASTKALEVKLAYQESEVAALLKKIPLGPSEMSTMRCRAEELREGTLCDYRPVLPLMLASFIFDVLCAPGSRPPSRNWNSETPGDEELGFEAAVAALGMKTTVSEAEHPLLCEGTRREKGDLALALMITYKDDQAKLKKILDKLLDRESQTHKPQTLSSFYSSSRPTTASQRSPSKHGGPSAPGALQPLTSGSAGPAQPGSVAGAGPGPTEGFTEKNVPESSPHSPCEGLPSEAALTPRPEGKVPSRLALGSRGGYNGRGWGSPGRPKKKHTGMASIDSSAPETTSDSSPTLSRRPLRGGWAPTSWGRGQDSDSISSSSSDSLGSSSSSGSRRASASGGARAKTVEVGRYKGRRPESHAPHVPNQPSEAAAHFYFELAKTVLIKAGGNSSTSIFTHPSSSGGHQGPHRNLHLCAFEIGLYALGLHNFVSPNWLSRTYSSHVSWITGQAMEIGSAALTILVECWDGHLTPPEVASLADRASRARDSNMVRAAAELALSCLPHAHALNPNEIQRALVQCKEQDNLMLEKACMAVEEAAKVHPYHTEPGLPLPTSVACELWGQGTVSSVHPASTFPAIQGASLPALTTQPSPLVSGGFPPPEEETHSQPVNPHSLHHLHAAYRVGMLALEMLGRRAHNDHPNNFSRSPPYTDDVKWLLGLAAKLGVNYVHQFCVGAAKGVLSPFVLQEIVMETLQRLSPAHAHNHLRAPAFHQLVQRCQQAYMQYIHHRLIHLTPADYDDFVNAIRSARSAFCLTPMGMMQFNDILQNLKRSKQTKELWQRVSLEMATFSP

SEQ ID NO: 22491 - protein, 1283 aa, Homo sapiens
MAELEEVTLDGKPLQALRVTDLKAALEQRGLAKSGQKSALVKRLKGALMLENLQKHSTPHAAFQPNSQIGEEMSQNSFIKQYLEKQQELLRQRLEREAREAAELEEASAESEDEMIHPEGVASLLPPDFQSSLERPELELSRHSPRKSSSISEEKGDSDDEKPRKGERRSSRVRQARAAKLSEGSQPAEEEEDQETPSRNLRVRADRNLKTEEEEEEEEEEEEDDEEEEGDDEGQKSREAPILKEFKEEGEEIPRVKPEEMMDERPKTRSQEQEVLERGGRFTRSQEEARKSHLARQQQEKEMKTTSPLEEEEREIKSSQGLKEKSKSPSPPRLTEDRKKASLVALPEQTASEEETPPPLLTKEASSPPPHPQLHSEEEIEPMEGPAPAVLIQLSPPNTDADTRELLVSQHTVQLVGGLSPLSSPSDTKAESPAEKVPEESVLPLVQKSTLADYSAQKDLEPESDRSAQPLPLKIEELALAKGITEECLKQPSLEQKEGRRASHTLLPSHRLKQSADSSSSRSSSSSSSSSRSRSRSPDSSGSRSHSPLRSKQRDVAQARTHANPRGRPKMGSRSTSESRSRSRSRSRSASSNSRKSLSPGVSRDSSTSYTETKDPSSGQEVATPPVPQLQVCEPKERTSTSSSSVQARRLSQPESAEKHVTQRLQPERGSPKKCEAEEAEPPAATQPQTSETQTSHLPESERIHHTVEEKEEVTMDTSENRPENDVPEPPMPIADQVSNDDRPEGSVEDEEKKESSLPKSFKRKISVVSATKGVPAGNSDTEGGQPGRKRRWGASTATTQKKPSISITTESLKSLIPDIKPLAGQEAVVDLHADDSRISEDETERNGDDGTHDKGLKICRTVTQVVPAEGQENGQREEEEEEKEPEAEPPVPPQVSVEVALPPPAEHEVKKVTLGDTLTRRSISQQKSGVSITIDDPVRTAQVPSPPRGKISNIVHISNLVRPFTLGQLKELLGRTGTLVEEAFWIDKIKSHCFVTYSTVEEAVATRTALHGVKWPQSNPKFLCADYAEQDELDYHRGLLVDRPSETKTEEQGIPRPLHPPPPPPVQPPQHPRAEQREQERAVREQWAEREREMERRERTRSEREWDRDKVREGPRSRSRSRDRRRKERAKSKEKKSEKKEKAQEEPPAKLLDDLFRKTKAAPCIYWLPLTDSQIVQKEAERAERAKEREKRRKEQEEEEQKEREKEAERERNRQLEREKRREHSRERDRERERERERDRGDRDRDRERDRERGRERDRRDTKRHSRSRSRSTPVRDRGGRR

SEQ ID NO: 22492 - protein, 235 aa, Homo sapiens
SPRHATHKHYMTREADEYYRKKLLIQMKSIWKKKQKNQRNLNRETNIIGTWEDLGDVMKRNEFLRLAMPQPVNPQLSAWTITGVSERLNFFRVYITLDRKICSNHKLLFEDLRHLQCSLDDTDMSCNPTSTQYTSSWGAQILSSGKHYWEVDVKDSCNWVIGLCREAWTKRNDMRLDSEGIFLLLCLKVDDHFSLFSTSPLLPHYIPRPQGWLGVFLDYECGIVSFVNVAQSSLI

SEQ ID NO: 22493 - protein, 492 aa, Homo sapiens
MVSIRDFTMPKKFVQMLVFNLTLTEVVLSGNVLIWPTDGSHWLNIKIILEELIQRNHNVTVLASSATLFINSNPDSPVNFEVIPVSYKKSNIDSLIEHMIMLWIDHRPTPLTIWAFYKELGKLLDTFFQINIQLCDGVLKNPKLMARLQKGGFDVLVADPVTICGDLVALKLGIPFMYTLRFSPASTVERHCGKIPAPVSYVPAALSELTDQMTFGERIKNTISYSLQDYIFQSYWGEWNSYYSKILGRPTTLCETMGKAEIWLIRTYWDFEFPRPYLPNFEFVGGLHCKPAKPLPKVLWRYKGKKPATLGNNTQLFDWIPQNDLLGHPKTKAFITHGGTNGIYEAIYHGVPMVGVPMFADQPDNIAHMKAKGAAVEVNLNTMTSVDLLSALRTVINEPSYKENAMRLSRIHHDQPVKPLDRAVFWIEFVMRHKGAKHLRVAAHDLTWFQYHSLDVIGFLLVCVTTAIFLVIQCCLFSCQKFGKIGKKKKRE

SEQ ID NO: 22494 - protein, 722 aa, Homo sapiens
MAVDGTLVYIRVTLLLLWLGVFLSISGYCQAGPSQHFTSPEVVIPLKVISRGRSAKAPGWLSYSLRFGGQKHVVHMRVKKLLVSRHLPVFTYTDDRALLEDQLFIPDDCYYHGYVEAAPESLVVFSACFGGFRGVLKISGLTYEIEPIRHSATFEHLVYKINSNETQFPAMRCGLTEKEVARQQLEFEEAENSALEPKSAGDWWTHAWFLELVVVVNHDFFIYSQSNISKVQEDVFLVVNIVDSMYKQLGTYIILIGIEIWNQGNVFPMTSIEQVLNDFSQWKQISLSQLQHDAAHMFIKNSLISILGLAYVAGICRPPIDCGVDNFQGDTWSLFANTVAHELGHTLGMQHDEEFCFCGERGCIMNTFRVPAEKFTNCSYADFMKTTLNQGSCLHNPPRLGEIFMLKRCGNGVVEREEQCDCGSVQQCEQDACCLLNCTLRPGAACAFGLCCKDCKFMPSGELCRQEVNECDLPEWCNGTSHQCPEDRYVQDGIPCSDSAYCYQKRCNNHDQHCREIFGKDAKSASQNCYKEINSQGNRFGHCGINGTTYLKCHISDVFCGRVQCENVRDIPLLQDHFTLQHTHINGVTCWGIDYHLRMNISDIGEVKDGTVCGPGKICIHKKCVSLSVLSHVCLPETCNMKGICNNKHHCHCGYGWSPPYCQHRGYGGSIDSGPASAKRGVFLPLIVIPSLSVLTFLFTVGLLMYLRQCSGPKETKAHSSG

SEQ ID NO: 22495 - protein, 777 aa, Homo sapiens
MEEPGATPQPYLGLVLEELRRVVAALPESMRPDENPYGFPSELVVCAAVIGFFVVLLFLWRSFRSVRSRLYVGREQKLGATLSGLIEEKCKLLEKFSLIQKEYEGYEVESSLEDASFEKAAAEEARSLEATCEKLNRSNSELEDEILCLEKDLKEEKSKHSQQDELMADISKSIQSLEDESKSLKSQIAEAKIICKTFKMSEERRAIAIKDALNENSQLQTSHKQLFQQEAEVWKGEVSELNKQKITFEDSKVHAEQVLNDKENHIKTLTGHLPMMKDQAAVLEEDTTDDDNLELEVNSQWENGANLDDPLKGALKKLIHAAKLNVSLKSLEGERNHIIIQLSEVDKTKEELTEHIKNLQTQQESLQSENIYFESENQKLQQKLKIMTEFYQEDEMKLYRKLTVEENYRIEEEEKLSKVEEKLSRATEQLETYRKLAKDLEEELERTVHFYQKQVISYEKRGHDNWLAARTAERNLSDLRKENAHNKQKLTETELKFELLEKDPNALDVSNTAFGREHAPNGPAPLGQRSSETRAFLSPQTLLEDPLGLSPVLPEGGGRGPRGPGNPLDHQITNERGEPSCDRLTDPHRAPSDTGSLSSPVEQDCKMMFPPPGQSYPDSALPPQREDRFYSNSERLSGSAEPRSFKMTSLDKMDGSMPSEMESSRNDAKDDLGNLNVPDSSLPAENEATGPGFIPPPLAPVRGPLFPVDTRGPFMRRGPPFPPPPPGTMFGASRGYFPPRDFPGPPHAPFAMRNIYPPRGLPPYFHPRPGFYPNPAF

SEQ ID NO: 22496 - protein, 535 aa, Homo sapiens
MKTYRQREKQGSKVQESTKGPDEAKIKALLERTGYTLDVTTGQRKYGGPPPDSVYSGVQPGIGTEVFVGKIPRDLYEDELVPLFEKAGPIWDLRLMMDPLSGQNRGYAFITFCGKEAAQEAVKLCDSYEIRPGKHLGVCISVANNRLFVGSIPKNKTKENILEEFSKVTGLTEGLVDVILYHQPDDKKKNRGFCFLEYEDHKSAAQARRRLMSGKVKVWGNVVTVEWADPVEEPDPEVMAKVKVLFVRNLATTVTEEILEKSFSEFGKLERVKKLKDYAFVHFEDRGAAVKAMDEMNGKEIEGEEIEIVLAKPPDKKRKERQAARQASRSTAYEDYYYHPPPRMPPPIRGRGRGGGRGGYGYPPDYYGYEDYYDDYYGYDYHDYRGGYEDPYYGYDDGYAVRGRGGGRGGRGAPPPPRGRGAPPPRGRAGYSQRGAPLGPPRGSRGGRGGPAQQQRGRGSRGSRGNRGGNVGGKRKADGYNQPDSKRRQTNNQQNWGSQPIAQQPLQQGGDYSGNYGYNNDNQEFYQDTYGQQWK

SEQ ID NO: 22497 - protein, 430 aa, Homo sapiens
MGERAGSPGTDQERKAGKHHYSYLSDFETPQSSGRSSLVSSSPASVRRKNPKRQTSDGQVHHQAPRKPSPKGLPNRKGVRVGFRSQSLNREPLRKDTDLVTKRILSARLLKINELQNEVSELQVKLAELLKENKSLKRLQYRQEKALNKFEDAENEISQLIFRHNNEITALKERLRKSQEKERATEKRVKDTESELFRTKFSLQKLKEISEARHLPERDDLAKKLVSAELKLDDTERRIKELSKNLELSTNSFQRQLLAERKRAYEAHDENKVLQKEVQRLYHKLKEKERELDIKNIYSNRLPKSSPNKEKELALRKNAACQSDFADLCTKGVQTMEDFKPEEYPLTPETIMCYENKWEEPGHLTLDLQSQKQDRHGEAGILNPIMEREEKFVTDEELHVVKQEVEKLEDGKKKSLFKHVTSQHPLRKKE

SEQ ID NO: 22498 - protein, 119 aa, Homo sapiens
MEFGLSWVFLVAILKGVQCEVQLVESGGGLVQPGGSLRLSCAASGFTFSDHYMSWVRQAQGKGLELVGLIRNKANSYTTEYAASVKGRLTISREDSKNTLYLQMSNLKTEDLAVYYCAR

SEQ ID NO: 22499 - protein, 1543 aa, Homo sapiens
MKASSGDQGSPPCFLRFPRPVRVVSGAEAELKCVVLGEPPPVVVWEKGGQQLAASERLSFPADGAEHGLLLTAALPTDAGVYVCRARNAAGEAYAAAAVTVLEPPASDPELQPAERPLPSPGSGEGAPVFLTGPRSQWVLRGAEVVLTCRAGGLPEPTLYWEKDGMALDEVWDSSHFALQPGRAEDGPGASLALRILAARLPDSGVYVCHARNAHGHAQAGALLQVHQPPESPPADPDEAPAPVVEPLKCAPKTFWVNEGKHAKFRCYVMGKPEPEIEWHWEGRPLLPDRRRLMYRDRDGGFVLKVLYCQAKDRGLYVCAARNSAGQTLSAVQLHVKEPRLRFTRPLQDVEGREHGIAVLECKVPNSRIPTAWFREDQRLLPCRKYEQIEEGTVRRLIIHRLKADDDGIYLCEMRGRVRTVANVTVKGPILKRLPRKLDVLEGENAVLLVETLEAGVEGRWSRDGEELPVICQSSSGHMHALVLPGVTREDAGEVTFSLGNSRTTTLLRVKCVKHSPPGPPILAEMFKGHKNTVLLTWKPPEPAPETPFIYRLERQEVGSEDWIQCFSIEKAGAVEVPGDCVPSEGDYRFRICTVSGHGRSPHVVFHGSAHLVPTARLVAGLEDVQVYDGEDAVFSLDLSTIIQGTWFLNGEELKSNEPEGQVEPGALRYRIEQKGLQHRLILHAVKHQDSGALVGFSCPGVQDSAALTIQESPVHILSPQDRVSLTFTTSERVVLTCELSRVDFPATWYKDGQKVEESELLVVKMDGRKHRLILPEAKVQDSGEFECRTEGVSAFFGVTVQDPPVHIVDPREHVFVHAITSECVMLACEVDREDAPVRWYKDGQEVEESDFVVLENEGPHRRLVLPATQPSDGGEFQCVAGDECAYFTVTITDVSSWIVYPSGKVYVAAVRLERVVLTCELCRPWAEVRWTKDGEEVVESPALLLQKEDTVRRLVLPAVQLEDSGEYLCEIDDESASFTVTVTEPPVRIIYPRDEVTLIAVTLECVVLMCELSREDAPVRWYKDGLEVEESEALVLERDGPRCRLVLPAAQPEDGGEFVCDAGDDSAFFTVTVTAPPERIVHPAARSLDLHFGAPGRVELRCEVAPAGSQVRWYKDGLEVEASDALQLGAEGPTRTLTLPHAQPEDAGEYVCETRHEAITFNVILAEPPVQFLALETTPSPLCVAPGEPVVLSCELSRAGAPVVWSHNGRPVQEGEGLELHAEGPRRVLCIQAAGPAHAGLYTCQSGAAPGAPSLSFTVQVAEPPVRVVAPEAAQTRVRSTPGGDLELVVHLSGPGGPVRWYKDGERLASQGRVQLEQAGARQVLRVQGARSGDAGEYLCDAPQDSRIFLVSVEEPLLVKLVSELTPLTVHEGDDATFRCEVSPPDADVTWLRNGAVVTPGPQVEMAQNGSSRILTLRGCQLGDAGTVTLRAGSTATSARLHVRETELLFLRRLQDVRAEEGQDVCLEVETGRVGAAGAVRWVRGGQPLPHDSRLSMAQDGHIHRLFIHGVILADQGTYGCESHHDRTLARLSVRRECPVLS

SEQ ID NO: 22500 - protein, 177 aa, Homo sapiens
MGELPLDINIQEPRWDQSTFLGRARHFFTVTDPRNLLLSGAQLEASRNIVQNYRAGVVTPGITEDQLWRAKYVYDSAFHPDTGEKVVLIGRMSAQVPMNMTITGCMLTFYRKTPTVVFWQWVNQSFNAIVNYSNRSGDTPITVRQLGTAYVSATTGAVATALGLKSLTKSPSPPHGP

SEQ ID NO: 22501 - protein, 129 aa, Homo sapiens
SHLRNETQQIISLKKEFLNLQDENQQLKKIYHEQEQALQELGNKLSESKLKIEDIKEANKALQGLVWLKDKEATHCKLCEKEFSLSKRKTWQLLHLHVSQTLHLLLLWLCHQLQYQYELVLDLVVRRTK

SEQ ID NO: 22502 - protein, 203 aa, Homo sapiens
DDVKWLLGLAAKLGDRHGDAAAAESRSCPQPPACPGLPPTGAALPAGIHAVHPPPLDSPDSCGLRRLCECDPECPQRLLPDAHGHDAVQRHPTEPQAQQTDQGAVAAGLTRDGHLLPLSLSPLGSYTGTQACGYGGPSHRGSETWLDRSSSLSSLVAQTDSCSWAIAWGQDVSHPRSLGLGETALSGRGRWVASGIYLAFINI

SEQ ID NO: 22503 - protein, 365 aa, Homo sapiens
SKKDVTTKLKAMQEFGTMCTERDTETVKGVLPYWPRIFCKISLDHDRRVREATQQAFEKLILKVKKQLAPYLKSLMGYWLMAQCDTYTPAAFAAKDAFEAAFPPSKQPEAIAFCKDEITSVLQDHLIKETPDTLSDPQTVPEEEREAKFYRVVTCSLLALKRLLCLLPDNELDSLEEKFKSLLSQNKFWKYGKHSVPQIRSAYFELVSALCQRIPQLMKEEASKVSPSVLLSIDDSDPIVCPALWEAVLYTLTTIEDCWLHVNAKKSVFPKLSTVIREGGRGLATVIYPYLLPFISKLPQSITNPKLDFFKNFLTSLVAGLSTERTKTSSLESSAVISAFFECLRFIMQQNLGEEEIEQMLVNDQ

SEQ ID NO: 22504 - protein, 699 aa, Homo sapiens
MADAGIRRVVPSDLYPLVLGFLRDNQLSEVANKFAKATGATQQDANASSLLDIYSFWLKSAKVPERKLQANGPVAKKAKKKASSSDSEDSSEEEEEVQGPPAKKAAVPAKRVGLPPGKAAAKASESSSSEESSDDDDEEDQKKQPVQKGVKPQAKAAKAPPKKAKSSDSDSDSSSEDEPPKNQKPKITPVTVKAQTKAPPKPARAAPKIANGKAASSSSSSSSSSSSDDSEEEKAAATPKKTVPKKQVVAKAPVKAATTPTRKSSSSEDSSSDEEEEQKKPMKNKPGPYSSVPPPSAPPPKKSLGTQPPKKAVEKQQPVESSEDSSDESDSSSEEEKKPPTKAVVSKATTKPPPAKKAAESSSDSSDSDSSEDDEAPSKPAGTTKNSSNKPAVTTKSPAVKPAAAPKQPVGGGQKLLTRKADSSSSEEESSSSEEEKTKKMVATTKPKATAKAALSLPAKQAPQGSRDSSSDSDSSSSEEEEEKTSKSAVKKKPQKVAGGAAPSKPASAKKGKAESSNSSSSDDSSEEEEEKLKGKGSPRPQAPKANGTSALTAQNGKAAKNSEEEEEEKKKAAVVVSKSGSLKKRKQNEAAKEAETPQAKKIKLQTPNTFPKRKKGEKRASSPFRRVREEEIEVDSRVADNSFDAKRGAAGDWGERANQVLKFTKGKSFRHEKTKKKRGSYRGGSISVQVNSIKFDSE

SEQ ID NO: 22505 - protein, 524 aa, Homo sapiens
ILTARSRWRLRNSISAFLFTVTFAWCPPGLSNLTILSCPDWESHINTKWSAPQQNFLQGKTSSVVEMERNHFGEELFDFNQCEKALSEHSCLKTHRRTYFRKKTCECNQCEKAFRKPSIFTLHKKTDIGEELPNCNQCETAFSQHLHLVCKKTSQNLHLVCKKTHTQEKPYKCSDCEKGLPSSSHLRECVRIYGGERPYTHKEYVETFSHSTALFVHMQTQDGEKFYECKACGKPFTESSYLTQHLRTHSRVLPIEHKKFGKAFAFSPDLAKHIRLRTRGKHYVCNECGKEFTCFSKLNIHIRVHTGEKPYECNKCGKAFTDSSGLIKHRRTHTGEKPYECKECGKAFANSSHLTVHMRTHTGEKPYQCKECGKAFINSSSFKSHMQTHPGVKPYDCQQCGKAFIRSSFLIRHLRSHSAERPFECEECGKAFRYSSHLSQHKRIHTGERPYKCQKCGQAFSISSGLTVHMRTHTGERPFECQECGKAFTRSTYLIRHLRSHSVEKPYKECGQTFSNSSCLTECV

SEQ ID NO: 22506 - protein, 1837 aa, Homo sapiens
MELMFAEWEDGERFSFEDSDRFEEDSLCSFISEAESLCQNWRGWRKQSAGPNSPTGGGGGGGSGGTRMRDGLVIPLVELSAKQVAFHIPFEVVEKVYPPVPEQLQLRIAFWSFPENEEDIRLYSCLANGSADEFQRGDQLFRMRAVKDPLQIGFHLSATVVPPQMVPPKGAYNVAVMFDRCRVTSCSCTCGAGAKWCTHVVALCLFRIHNASAVCLRAPVSESLSRLQRDQLQKFAQYLISELPQQILPTAQRLLDELLSSQSTAINTVCGAPDPTAGPSASDQSTWYLDESTLTDNIKKTLHKFCGPSPVVFSDVNSMYLSSTEPPAAAEWACLLRPLRGREPEGVWNLLSIVREMFKRRDSNAAPLLEILTDQCLTYEQITGWWYSVRTSASHSSASGHTGRSNGQSEVAAHACASMCDEMVTLWRLAVLDPALSPQRRRELCTQLRQWQLKVIENVKRGQHKKTLERLFPGFRPAVEACYFNWEEAYPLPGVTYSGTDRKLALCWARALPSRPGASRSGGLEESRDRPRPLPTEPAVRPKEPGTKRKGLGEGVPSSQRGPRRLSAEGGDKALHKMGPGGGKAKALGGAGSGSKGSAGGGSKRRLSSEDSSLEPDLAEMSLDDSSLALGAEASTFGGFPESPPPCPLHGGSRGPSTFLPEPPDTYEEDGGVYFSEGPEPPTASVGPPGLLPGDVCTQDDLPSTDESGNGLPKTKEAAPAVGEEDDDYQAYYLNAQDGAGGEEEKAEGGAGEEHDLFAGLKPLEQESRMEVLFACAEALHAHGYSSEASRLTVELAQDLLANPPDLKVEPPPAKGKKNKVSTSRQTWVATNTLSKAAFLLTVLSERPEHHNLAFRVGMFALELQRPPASTKALEVKLAYQESEVAALLKKIPLGPSEMSTMRCRAEELREGTLCDYRPVLPLMLASFIFDVLCAPGSRPPSRNWNSETPGDEELGFEAAVAALGMKTTVSEAEHPLLCEGTRREKGDLALALMITYKDDQAKLKKILDKLLDRESQTHKPQTLSSFYSSSRPTTASQRSPSKHGGPSAPGALQPLTSGSAGPAQPGSVAGAGPGPTEGFTEKNVPESSPHSPCEGLPSEAALTPRPEGKVPSRLALGSRGGYNGRGWGSPGRPKKKHTGMASIDSSAPETTSDSSPTLSRRPLRGGWAPTSWGRGQDSDSISSSSSDSLGSSSSSGSRRASASGGARAKTVEVGRYKGRRPESHAPHVPNQPSEAAAHFYFELAKTVLIKAGGNSSTSIFTHPSSSGGHQGPHRNLHLCAFEIGLYALGLHNFVSPNWLSRTYSSHVSWITGQAMEIGSAALTILVECWDGHLTPPEVASLADRASRARDSNMVRAAAELALSCLPHAHALNPNEIQRALVQCKEQDNLMLEKACMAVEEAAKGGGVYPEVLFEVAHQWFWLYEQTAGGSSTAREGATSCSASGIRAGGEAGRGMPEGRGGPGTEPVTVAAAAVTAAATVVPVISVGSSLYPGPGLGHGHSPGLHPYTALQPHLPCSPQYLTHPAHPAHPMPHMPRPAVFPVPSSAYPQGVHPAFLGAQYPYSVTPPSLAATAVSFPVPSMAPITVHPYHTEPGLPLPTSVACELWGQGTVSSVHPASTFPAIQGASLPALTTQPSPLVSGGFPPPEEETHSQPVNPHSLHHLHAAYRVGMLALEMLGRRAHNDHPNNFSRSPPYTDDVKWLLGLAAKLGVNYVHQFCVGAAKGVLSPFVLQEIVMETLQRLSPAHAHNHLRAPAFHQLVQRCQQAYMQYIHHRLIHLTPADYDDFVNAIRSARSAFCLTPMGMMQFNDILQNLKRSKQTKELWQRVSLEMATFSP

SEQ ID NO: 22507 - protein, 1231 aa, Homo sapiens
EPPDTYEEDGGVYFSEGPEPPTASVGPPGLLPGDVCTQDDLPSTDESGNGLPKTKEAAPAVGEEDDDYQAYYLNAQDGAGGEEEKAEGGAGEEHDLFAGLKPLEQESRMEVLFACAEALHAHGYSSEASRLTVELAQDLLANPPDLKVEPPPAKGKKNKVSTSRQTWVATNTLSKAAFLLTVLSERPEHHNLAFRVGMFALELQRPPASTKALEVKLAYQESEVAALLKKIPLGPSEMSTMRCRAEELREGTLCDYRPVLPLMLASFIFDVLCAPGSRPPSRNWNSETPGDEELGFEAAVAALGMKTTVSEAEHPLLCEGTRREKGDLALALMITYKDDQAKLKKILDKLLDRESQTHKPQTLSSFYSSSRPTTASQRSPSKHGGPSAPGALQPLTSGSAGPAQPGSVAGAGPGPTEGFTEKNVPESSPHSPCEGLPSEAALTPRPEGKVPSRLALGSRGGYNGRGWGSPGRPKKKHTGMASIDSSAPETTSDSSPTLSRRPLRGGWAPTSWGRGQDSDSISSSSSDSLGSSSSSGSRRASASGGARAKTVEVGRYKGRRPESHAPHVPNQPSEAAAHFYFELAKTVLIKAGGNSSTSIFTHPSSSGGHQGPHRNLHLCAFEIGLYALGLHNFVSPNWLSRTYSSHVSWITGQAMEIGSAALTILVECWDGHLTPPEVASLADRASRARDSNMVRAAAELALSCLPHAHALNPNEIQRALVQCKEQDNLMLEKACMAVEEAAKGGGVYPEVLFEVAHQWFWLYEQTAGGSSTAREGATSCSASGIRAGGEAGRGMPEGRGGPGTEPVTVAAAAVTAAATVVPVISVGSSLYPGPGLGHGHSPGLHPYTALQPHLPCSPQYLTHPAHPAHPMPHMPRPAVFPVPSSAYPQGVHPAFLGAQYPYSVTPPSLAATAVSFPVPSMAPITVHPYHTEPGLPLPTSVALSSVHPASTFPAIQGASLPALTTQPSPLVSGGFPPPEEETHSQPVNPHSLHHLHAAYRVGMLALEMLGRRAHNDHPNNFSRSPPYTDDVKWLLGLAAKLGDRHGDAAAAESRSCPQPPACPGLPPTGAALPAGIHAVHPPPLDSPDSCGLRRLCECDPECPQRLLPDAHGHDAVQRHPTEPQAQQTDQGAVAAGLTRDGHLLPLSLSPLGSYTGTQACGYGGPSHRGSETWLDRSSSLSSLVAQTDSCSWAIAWGQDVSHPRSLGLGETALSGRGRWVASGIYLAFINI

SEQ ID NO: 22508 - protein, 388 aa, Homo sapiens
MFRLNSLSALAELAVGSRWYHGGSQPIQIRRRLMMVAFLGASAVTASTGLLWKRAHAESPPCVDNLKSDIGDKGKNKDEGDVCNHEKKTADLAPHPEEKKKKRSGFRDRKVMEYENRIRAYSTPDKIFRYFATLKVISEPGEAEVFMTPEDFVRSITPNEKQPEHLGLDQYIIKRFDGKARFSKKKILHRVRKKSKGSILQRRKKALQKEERTRHGSTKHNEQEVRRTIMEWLEKAGVQWHHLSSLQPPTPWFKRFFCLSLLSSWDYRHTPPCPANFFIFSRDRVSPCWPGWSRYPDLMIRPPWLRKVLGLQKISQEREKFADEGSIFYTLGECGLISFSDYIFLTTVLSTPQRNFEIAFKMFDLNGDGEVDMEEFEQVQSIIRSQTS

SEQ ID NO: 22509 - protein, 251 aa, Homo sapiens
MSSDHLNNSTLKEAQFKDLFLKKAELEFAQIIIIVVVVTVMVVVIVCLLNHYKVSTRSFINRPNQSRRREDGLPQIMHAPRSRDRFTAPSFIQRDRFSRFQPTYPYVQHEIDLPPTISLSDGEEPPPYQGPCTLQLRDPEQQMELNRESVRAPPNRTIFDSDLIDIAMYSGGPCPPSSNSGISASTCSSNGRMEGPPPTYSEVMGHHPGASFLHHQRSNAHRGSRLQFQQNNAESTIVPIKGKDRKPGNLV

SEQ ID NO: 22510 - protein, 485 aa, Homo sapiens
MYIKMATLANGQADNASLSTNGLGSSPGSAGHMNGLSHSPGNPSTIPMKDHDAIKLFIGQIPRNLDEKDLKPLFEEFGKIYELTVLKDRFTGMHKGCAFLTYCERESALKAQSALHEQKTLPGMNRPIQVKPADSESRGGSSCLRQPPSQDRKLFVGMLNKQQSEDDVRRLFEAFGNIEECTILRGPDGNSKGCAFVKYSSHAEAQAAINALHGSQTMPGASSSLVVKFADTDKERTMRRMQQMAGQMGMFNPMAIPFGAYGAYAQAMQQQAALMASVAQGGYLNPMAAFAAAQMQQMAALNMNGLAAAPMTPTSGGSTPPGITAPAVPSIPSPIGVNGFTGLPPQANGQPAAEAVFANGIHPYPAQSPTAADPLQQAYAGVQQYAGPAAYPAAYGQISQAFPQPPPMIPQQQREGPEGCNLFIYHLPQEFGDAELMQMFLPFGFVSFDNPASAQTAIQAMNGFQIGMKRLKVQLKRPKDANRPY

SEQ ID NO: 22511 - protein, 183 aa, Homo sapiens
PIAAGTGPNFSLSDLESSSYYSMSPGAMRRSLPSTSSTSSTKRLKSVEDEMDSPGEEPFYTGQGRSPGSGSQSSGWHEVEPGMPSPTTLKKSEKSGFSSPSPSQTSSLGTAFTQHHRPVITGPREFKMAPSILGSPFWKVYSASPHATPSTLHFPTSPIIQQPGPYFSHPAIRYHPQETLKEF

SEQ ID NO: 22512 - protein, 1237 aa, Homo sapiens
MAVSDVPSLSVGKEVQWEKLIAKAASIRDICKQRPYQHGADMLAAISQVLNECTKPDQATPAALVLQGLHALCQAEVVCIRSTWNALSPKLSCDTRPLILKTLSELFSLVPSLTVNTTEYENFKVQVLSFLWTHTQNKDPIVANAAYRSLANFSAGEHTILHLPEKIRPEIPIPEELDDDEDVEDVDLSVPGSCYLKLLSLTPPLVLPALEEFFTSLVKQEMVNMPRGIYHSALKGGARSDQGKTVAGIPNFILKMYETNKQPGLKPGLAGGMLFCYDVSMYQSKDGKPLNRLMASRGRSFKQTSLALVHEVHIQLSEWHRAIFLPQAWLAYMNRAYHAILQGRLGELELQLKHGKEEPEEVQYKKSTAWLWVRDMLTDEITKAAAKESPVVKGNALLALSSLAVVVSRHEASLSSDSDGLLEVQPNFLSMKEWVSMVLDTLLVIVDSHYQPRGQLLSWFYYKSYSGENTASAIARSAAATALSLLVPVFIISCKEKVEEILNMLTARLPGKPSADESQAVQIHMGLALGMFLSRLCEEKLSDISGQEMNLLLMKSLDALENCCFDTSLEYNTGCILGVGLVLSLMSHSSQMQSRVHVAALLRKLSAHVDDSGSQSRTFQEVLAYTLSCVCTSAFSAGIIEATEAEDVMNKLRLLVENSQQTSGFALALGNIVHGLSVCGHGKAEDLGSKLLPAWIRIVLTEGTPTMLCLAALHGMVALVGSEGDVMQLKSEAIQTSHFQGRLNEVIRTLTQVISVSGVIGLQSNAVWLLGHLHLSTLSSSQSRASVPTDYSYLPESSFIGAAIGFFITGGKKGPESVPPSLLKVVMKPIATVGESYQYPPVNWAALLSPLMRLNFGEEIQQLCLEIMVTQAQSSQNAAALLGLWVTPPLIHSLSLNTKRYLLISAPLWIKHISDEQILGFVENLMVAVFKAASPLGSPELCPSALHGLSQAMKLPSPAHHLWSLLSEATGKIFDLLPNKIRRKDLELYISIAKCLLEMTDDDANRIAQVTKSNIEKAAFVKLYLVSQGRFPLVNLTDMLSVAVQHREKEVLAWMILHSLYQARIVSHANTGVLKRMEWLLELMGYIRNVAYQSTSFHNTALDKALDFFLLIFATAVVAWADHTAPLLLGLSASWLPWHQENGPAGPVPSFLGRSPMHRVTLQEVLTLLPNSMALLLQKEPWKEQTQKFIDWLFSIMESPKEALSAQSRDLLKATLLSLRVLPEFKKKAVWTRAYGW

SEQ ID NO: 22513 - protein, 535 aa, Homo sapiens
MEEPPQEALAEPLKHESPAAPSSAGHTKGQEEDDQKNQAERKADNHTAHRIADQTALRVPSQAESSIFSQATNGVAEQNGHSTPGQAGRRASNPADVSDLRADDQVNQTPSEQTKGKASSQANNVQHEQSDGQVSGLTEERTAEQTERRLPTQAERRTSGQIDGRLAMPSDQRGSRQTDHRMAGQSERRASEQMDRRMSGEAERRTSEQITHRLSKLSERRPSVQIDSGSSVPSDQSPSVQIDSGSSVPSDQRPSVQIDRRMSGKVRRRSSEKTDYRLAGLADPGTSEQTDLRLYGLVDHKTSVKTHHQVYGQATELAEHQAIDQAHSNADQPPVDNAHYTESDQTDHLADRQANHKDQLSYYETRGQSEDRIFPQLGNSKEDKEADYRVQPCKFEDSQVDLNSKPSVEMETQNATTIPPYNPVDARFTSNFQAKDQALFPRLPSISSKLNYTSSQEKTQAIVTKSDEFSEIDQGKGYHIRNQTYRRFPSIVYEDPYQVSLQYMEKHHILQIFQITENLVYEKPEDPLNFMLCQV

SEQ ID NO: 22514 - protein, 303 aa, Homo sapiens
MGGVKALTIDHLAVNDVMLESLRGEGQGLVCDLCNDREVEKRCQTCKANLCHFCCQAHRRQKKTTYHTMVDLKDLKGYSRIGKPILCPVHPAEELRLFCEFCDRPVCQDCVVGEHREHPCDFTSNVIHKHGDSVWELLKGTQPHVEALEEALAQIHIINSALQKRVEAVAADVRTFSEGYIKAIEEHRDKLLKQLEDIRAQKENSLQLQKAQLEQLLADMRTGVEFTEHLLTSGSDLEILITKRVVVERLRKLNKVQYSTRPGVNDKIRFCPQEKAGQCRGYEIYGTINTKEVDPAKCVLQGE

SEQ ID NO: 22515 - protein, 1834 aa, Homo sapiens
MELMFAEWEDGERFSFEDSDRFEEDSLCSFISEAESLCQNWRGWRKQSAGPNSPTGGGGGGGSGGTRMRDGLVIPLVELSAKQVAFHIPFEVVEKVYPPVPEQLQLRIAFWSFPENEEDIRLYSCLANGSADEFQRGDQLFRMRAVKDPLQIGFHLSATVVPPQMVPPKGAYNVAVMFDRCRVTSCSCTCGAGAKWCTHVVALCLFRIHNASAVCLRAPVSESLSRLQRDQLQKFAQYLISELPQQILPTAQRLLDELLSSQSTAINTVCGAPDPTAGPSASDQSTWYLDESTLTDNIKKTLHKFCGPSPVVFSDVNSMYLSSTEPPAAAEWACLLRPLRGREPEGVWNLLSIVREMFKRRDSNAAPLLEILTDQCLTYEQITGWWYSVRTSASHSSASGHTGRSNGQSEVAAHACASMCDEMVTLWRLAVLDPALSPQRRRELCTQLRQWQLKVIENVKRGQHKKTLERLFPGFRPAVEACYFNWEEAYPLPGVTYSGTDRKLALCWARALPSRPGASRSGGLEESRDRPRPLPTEPAVRPKEPGTKRKGLGEGVPSSQRGPRRLSAEGGDKALHKMGPGGGKAKALGGAGSGSKGSAGGGSKRRLSSEDSSLEPDLAEMSLDDSSLALGAEASTFGGFPESPPPCPLHGGSRGPSTFLPEPPDTYEEDGGVYFSEGPEPPTASVGPPGLLPGDVCTQDDLPSTDESGNGLPKTKEAAPAVGEEDDDYQAYYLNAQDGAGGEEEKAEGGAGEEHDLFAGLKPLEQESRMEVLFACAEALHAHGYSSEASRLTVELAQDLLANPPDLKVEPPPAKGKKNKVSTSRQTWVATNTLSKAAFLLTVLSERPEHHNLAFRVGMFALELQRPPASTKALEVKLAYQESEVAALLKKIPLGPSEMSTMRCRAEELREGTLCDYRPVLPLMLASFIFDVLCAPVVSPTGSRPPSRNWNSETPGDEELGFEAAVAALGMKTTVSEAEHPLLCEGTRREKGDLALALMITYKDDQAKLKKILDKLLDRESQTHKPQTLSSFYSSSRPTTASQRSPSKHGGPSAPGALQPLTSGSAGPAQPGSVAGAGPGPTEGFTEKNVPESSPHSPCEGLPSEAALTPRPEGKVPSRLALGSRGGYNGRGWGSPGRPKKKHTGMASIDSSAPETTSDSSPTLSRRPLRGGWAPTSWGRGQDSDSISSSSSDSLGSSSSSGSRRASASGGARAKTVEVGRYKGRRPESHAPHVPNQPSEAAAHFYFELAKTVLIKAGGNSSTSIFTHPSSSGGHQGPHRNLHLCAFEIGLYALGLHNFVSPNWLSRTYSSHVSWITGQAMEIGSAALTILVECWDGHLTPPEVASLADRASRARDSNMVRAAAELALSCLPHAHALNPNEIQRALVQCKEQDNLMLEKACMAVEEAAKGGGVYPEVLFEVAHQWFWLYEQTAGGSSTAREGATSCSASGIRAGGEAGRGMPEGRGGPGTEPVTVAAAAVTAAATVVPVISVGSSLYPGPGLGHGHSPGLHPYTALQPHLPCSPQYLTHPAHPAHPMPHMPRPAVFPVPSSAYPQGVHPAFLGAQYPYSVTPPSLAATAVSFPVPSMAPITVHPYHTEPGLPLPTSVALSSVHPASTFPAIQGASLPALTTQPSPLVSGGFPPPEEETHSQPVNPHSLHHLHAAYRVGMLALEMLGRRAHNDHPNNFSRSPPYTDDVKWLLGLAAKLGVNYVHQFCVGAAKGVLSPFVLQEIVMETLQRLSPAHAHNHLRAPAFHQLVQRCQQAYMQYIHHRLIHLTPADYDDFVNAIRSARSAFCLTPMGMMQFNDILQNLKRSKQTKELWQRVSLEMATFSP

SEQ ID NO: 22516 - protein, 536 aa, Homo sapiens
MVSIRDFTMPKKFVQMLVFNLTLTEVVLSGNVLIWPTDGSHWLNIKIILEELIQRNHNVTVLASSATLFINSNPDSPVNFEVIPVSYKKSNIDSLIEHMIMLWIDHRPTPLTIWAFYKELGKLLDTFFQINIQLCDGVLKNPKLMARLQKGGFDVLVADPVTICGDLVALKLGIPFMYTLRFSPASTVERHCGKIPAPVSYVPAALSELTDQMTFGERIKNTISYSLQDYIFQSYWGEWNSYYSKILGRPTTLCETMGKAEIWLIRTYWDFEFPRPYLPNFEFVGGLHCKPAKPLPKEMEEFIQSSGKNGVVVFSLGSMVKNLTEEKANLIASALAQIPQKVLWRYKGKKPATLGNNTQLFDWIPQNDLLGHPKTKAFITHGGTNGIYEAIYHGVPMVGVPMFADQPDNIAHMKAKGAAVEVNLNTMTSVDLLSALRTVINEPSYKENAMRLSRIHHDQPVKPLDRAVFWIEFVMRHKGAKHLRVAAHDLTWFQYHSLDVIGFLLVCVTTAIFLVIQCCLFSCQKFGKIGKKKKRE

SEQ ID NO: 22517 - protein, 815 aa, Homo sapiens
MLQLWKVVRPARQLELHRLILLLIAFSLGSMGFLAYYVSTSPKAKEPLPLPLGDCSSGGAAGPGPARPPVPPRPPRPPETARTEPVVLVFVESAYSQLGQEIVAILESSRFRYSTELAPGRGDMPTLTDNTHGRYVLVIYENLLKYVNLDAWSRELLDRYCVEYGVGIIGFFRAHEHSLLSAQLKGFPLFLHSNLGLRDYQVNPSAPLLHLTRPSRLEPGPLPGDDWTIFQSNHSTYEPVLLASLRPAEPAVPGPVLRRARLPTVVQDLGLHDGIQRVLFGHGLSFWLHKLIFVDAVAYLTGKRLCLDLDRYILVDIDDIFVGKEGTRMKVADVEALLTTQNKLRTLVPNFTFNLGFSGKFYHTGTEEEDAGDDMLLKHRKEFWWFPHMWSHMQPHLFHNRSVLADQMRLNKQFALEHGIPTDLGYAVAPHHSGVYPIHTQLYEAWKSVWGIQVTSTEEYPHLRPARYRRGFIHNGIMVLPRQTCGLFTHTIFYNEYPGGSRELDRSIRGGELFLTVLLNPISIFMTHLSNYGNDRLGLYTFESLVRFLQCWTRLRLQTLPPVPLAQKYFELFPQERSPLWQNPCDDKRHKDIWSKEKTCDRLPKFLIVGPQKTGTTAIHFFLSLHPAVTSSFPSPSTFEEIQFFNSPNYHKGIDWYMDFFPVPSNASTDFLFEKSATYFDSEVVPRRGAALLPRAKIITVLTNPADRAYSWYQHQRAHGDPVALNYTFYQVISASSQTPLALRSLQNRCLVPGYYSTHLQRWLTYYPSGQLLIVDGQELRTNPAASMESIQKFLGLMMIRDFGARDLKVVRLAV

SEQ ID NO: 22518 - protein, 700 aa, Homo sapiens
MADAGIRRVVPSDLYPLVLGFLRDNQLSEVANKFAKATGATQQDANASSLLDIYSFWLNRSAKVPERKLQANGPVAKKAKKKASSSDSEDSSEEEEEVQGPPAKKAAVPAKRVGLPPGKAAAKASESSSSEESSDDDDEEDQKKQPVQKGVKPQAKAAKAPPKKAKSSDSDSDSSSEDEPPKNQKPKITPVTVKAQTKAPPKPARAAPKIANGKAASSSSSSSSSSSSDDSEEEKAAATPKKTVPKKQVVAKAPVKAATTPTRKSSSSEDSSSDEEEEQKKPMKNKPGPYSSVPPPSAPPPKKSLGTQPPKKAVEKQQPVESSEDSSDESDSSSEEEKKPPTKAVVSKATTKPPPAKKAAESSSDSSDSDSSEDDEAPSKPAGTTKNSSNKPAVTTKSPAVKPAAAPKQPVGGGQKLLTRKADSSSSEEESSSSEEEKTKKMVATTKPKATAKAALSLPAKQAPQGSRDSSSDSDSSSSEEEEEKTSKSAVKKKPQKVAGGAAPSKPASAKKGKAESSNSSSSDDSSEEEEEKLKGKGSPRPQAPKANGTSALTAQNGKAAKNSEEEEEEKKKAAVVVSKSGSLKKRKQNEAAKEAETPQAKKIKLQTPNTFPKRKKGEKRASSPFRRVREEEIEVDSRVADNSFDAKRGAAGDWGERANQVLKFTKGKSFRHEKTKKKRGSYRGGSISVQVNSIKFDSE

SEQ ID NO: 22519 - protein, 1548 aa, Homo sapiens
MLRARPEALMLLGALLTGSLGPSGNQDALSLPWEVQRYDGWFNNLRHHERGAVGCRLQRRVPANYADGVYQALEEPQLPNPRRLSNAATRGIAGLPSLHNRTVLGVFFGYHVLSDVVSVETPGCPAEFLNIRIPPGDPVFDPDQRGDVVLPFQRSRWDPETGRSPSNPRDLANQVTGWLDGSAIYGSSHSWSDALRSFSGGQLASGPDPAFPRDSQNPLLMWAAPDPATGQNGPRGLYAFGAERGNREPFLQALGLLWFRYHNLWAQRLARQHPDWEDEELFQHARKRVIATYQNIAVYEWLPSFLQKTLPEYTGYRPFLDPSISPEFVVASEQFFSTMVPPGVYMRNASCHFRKVLNKGFQSSQALRVCNNYWIRENPNLNSTQEVNELLLGMASQISELEDNIVVEDLRDYWPGPGKFSRTDYVASSIQRGRDMGLPSYSQALLAFGLDIPRNWSDLNPNVDPQVLEATAALYNQDLSQLELLLGGLLESHGDPGPLFSAIVLDQFVRLRDGDRYWFENTRNGLFSKKEIEDIRNTTLRDVLVAVINIDPSALQPNVFVWHKGAPCPQPKQLTTDGLPQCAPLTVLDFFEGSSPGFAITIIALCCLPLVSLLLSGVVAYFRGREHKKLQKKLKESVKKEAAKDGVPAMEWPGPKERSSPIIIQLLSDRCLQVLNRHLTVLRVVQLQPLQQVNLILSNNRGCRTLLLKIPKEYDLVLLFSSEEERGAFVQQLWDFCVRWALGLHVAEMSEKELFRKAVTKQQRERILEIFFRHLFAQVLDINQADAGTLPLDSSQKVREALTCELSRAEFAESLGLKPQDMFVESMFSLADKDGNGYLSFREFLDILVVFMKGSPEDKSRLMFTMYDLDENGFLSKDEFFTMMRSFIEISNNCLSKAQLAEVVESMFRESGFQDKEELTWEDFHFMLRDHDSELRFTQLCVKGGGGGGNGIRDIFKQNISCRVSFITRTPGERSHPQGLGPPAPEAPELGGPGLKKRFGKKAAVPTPRLYTEALQEKMQRGFLAQKLQQYKRFVENYRRHIVCVAIFSAICVGVFADRAYYYGFASPPSDIAQTTLVGIILSRGTAASVSFMFSYILLTMCRNLITFLRETFLNRYVPFDAAVDFHRWIAMAAVVLAILHSAGHAVNVYIFSVSPLSLLACIFPNVFVNDGSKLPQKFYWWFFQTVPGMTGVLLLLVLAIMYVFASHHFRRRSFRGFWLTHHLYILLYALLIIHGSYALIQLPTFHIYFLVPAIIYGGDKLVSLSRKKVEISVVKAELLPSGVTYLQFQRPQGFEYKSGQWVRIACLALGTTEYHPFTLTSAPHEDTLSLHIRAVGPWTTRLREIYSSPKGNGCAGYPKLYLDGPFGEGHQEWHKFEVSVLVGGGIGVTPFASILKDLVFKSSLGSQMLCKKIYFIWVTRTQRQFEWLADIIQEVEENDHQDLVSVHIYVTQLAEKFDLRTTMLYICERHFQKVLNRSLFTGLRSITHFGRPPFEPFFNSLQEVHPQVRKIGVFSCGPPGMTKNVEKACQLVNRQDRAHFMHHYENF

SEQ ID NO: 22520 - protein, 15 aa, Homo sapiens
AESNSADDETDDPRR

SEQ ID NO: 22521 - protein, 308 aa, Homo sapiens
MAEENKILVTHFVLTGLTDHPGLQAPLFLVFLVIYLITLVGNLGLMALIWKDPHLHTPIYLFLGSLAFADACTSSSVTSKMLINFFIKESYAIHGUVCHPVLLFWFQCNHRMLPAGSDGLUPLCSHMQSLALSSGDVQUPLYSVYRYFIFYWFSAFSDSCGFVIUINFLQVQYYTLFLLUNFTAVQNFLHQSYSUYTSDFHLFSIYTSLHFYDSYRLLLLYSLCHPEKEVUEGUKQSLLYLQCPSALCLFVLRHPLLHVCEFUVWISCRSGQNVFFILHNNNSFTKSFYLQPKEQRGYRCPEKNHEEI

SEQ ID NO: 22522 - protein, 378 aa, Homo sapiens
MAQRYDDLPHYGGMDGVGIPSTMYGDPHAARSMQPVHHLNHGPPLHSHQYPHTAHTNAMAPSMGSSVNDALKRDKDAIYGHPLFPLLALIFEKCELATCTPREPGVAGGDVCSSESFNEDIAVFAKQIRAEKPLFSSNPELDNLMIQAIQVLRFHLLELEKVHELCDNFCHRYISCLKGKMPIDLVIDDREGGSKSDSEDITRSANLTDQPSWNRDHDDTASTRSGGTPGPSSGGHTSHSGDNSSEQGDGLDNSVASPSTGDDDDPDKDKKRHKKRGIFPKVATNIMRAWLFQHLTHPYPSEEQKKQLAQDTGLTILQVNNWFINARRRIVQPMIDQSNRAVSQGTPYNPDGQPMGGFVMDGQQHMGIRAPGKTLFLW

SEQ ID NO: 22523 - protein, 288 aa, Homo sapiens
MSLADLTKTNIDEHFFGVALENNRRSAACKRSPGTGDFSRNSNASNKSVDYSRSQCSCGSLSSQYDYSEDFLCDCSEKAINRNYLKQPVVKEKEKKKYNVSKISQSKGQKEISVEKKHTWNASLFNSQIHMIAQRRDAMAHRILSARLHKIKGLKNELADMHHKLEAILTENQFLKQLQLRHLKAIGKYENSQNNLPQIMAKHQNEVKNLRQLLRKSQEKERTLSRKLRETDSQLLKTKDILQALQKLSEDKNLAEREELTHKLSIITTKMDANDKKIQVCISGAQTV

SEQ ID NO: 22524 - protein, 579 aa, Homo sapiens
MCDQQQIQCRLPLQQCCVKGPSFCSSQSPFAQSQVVVQAPCEMQIVDCPASCPVQVCQVSDQAPCQSQTTQVKCQSKTKQVKGQAQCQSKTTQVKGQAASQSQTSSVQSQAPCQSEVSYVQCEASQPVQTCFVECAPVCYTETCYVECPVQNYVPCPAPQPVQMYRGRPAVCQPQGRFSTQCQYQGSYSSCGPQFQSRATCNNYTPQFQLRPSYSSCFPQYRSRTSFSPCVPQCQTQGSYGSFTEQHRSRSTSRCLPPPRRLQLFPRSCSPPRRFEPCSSSYLPLRPSEGFPNYCTPPRRSEPIYNSRCPRRPISSCSQRRGPKCRIEISSPCCPRQVPPQRCPVEIPPIRRRSQSCGPQPSWGASCPELRPHVEPRPLPSFCPPRRLDQCPESPLQRCPPPAPRPRLRPEPCISLEPRPRPLPRQLSEPCLYPEPLPALRPTPRPVPLPRPGQCEIPEPRPCLQPCEHPEPCPRPEPIPLPAPCPSPEPCRETWRSPSPCWGPNPVPYPGDLGCHESSPHRLDTEAPYCGPSSYNQGQESGAGCGPGDVFPERRGQDGHGDQGNAFAGVKGEAKSAYF

SEQ ID NO: 22525 - protein, 393 aa, Homo sapiens
MDHPSREKDERQRTTKPMAQRSAHCSRPSGSSSSSGVLMVGPNFRVGKKIGCGNFGELRLGKNLYTNEYVAIKLEPIKSRAPQLHLEYRFYKQLGSAGEGLPQVYYFGPCGKYNAMVLELLGPSLEDLFDLCDRTFTLKTVLMIAIQLLSRMEYVHSKNLIYRDVKPENFLIGRQGNKKEHVIHIIDFGLAKEYIDPETKKHIPYREHKSLTGTARYMSINTHLGKEQSRRDDLEALGHMFMYFLRGSLPWQGLKADTLKERYQKIGDTKRNTPIEALCENFPEEMATYLRYVRRLDFFEKPDYEYLRTLFTDLFEKKGYTFDYAYDWVGRPIPTPVGSVHVDSGASAITRESHTHRDRPSQQQPLRNQSLRTVTAEHYDVNNSAIWHRGRGT

SEQ ID NO: 22526 - protein, 315 aa, Homo sapiens
MLNTTSVTEFLLLGVTDIQELQPFLFVVFLTIYFISVAGNGAILMIVISDPRLHSPMYFFLGNLSCLDICYSSVTLPKMLQNFLSAHKAISFLGCISQLHFFHFLGSTEAMLLAVMAFDRFVAICKPLRYTVIMNPQLCTQMAITIWMIGFFHALLHSLMTSRLNFCGSNRIYHFFCDVKPLLKLSLISGCSVLSQGQSPWAPSFSHYSPISTLSPISSSRLILLACSAKHCPLVPPTUWULFFCMHLFSSPIFIMPQGPPWTRTGSLPSCILWSLQYUTHUSTLUGTRKUKGPLIEQUKGGFGLKKSURTLLKH

SEQ ID NO: 22527 - protein, 421 aa, Homo sapiens
MWVPAGEPGSGTGSWSVGDWTTQGMRVAEPGCGQRVARGPWEHLQALFVLFVLAYIHIVFSRSPINCLEHVRDKWPREGILRVEVRHNSSRAPVFLQFCDSGGRGSFPGLAVEPGSNLDMEDEEEEELTMEMFGNSSIKFELDIEPKVFKPPSSTEALNDSQEFPFPETPTKVWPQDEYIVEYSLEYGFLRLSQATRQRLSIPVMVVTLDPTRDQCFGDRFSRLLLDEFLGYDDILMSSVKGLAENEENKGFLRNVVSGEHYRFVSMWMARTSYLAAFAIMVIFTLSVSMLLRYSHHQIFVFIAPLLTVILALVGEDPTRPPPPRAAPRPARFNRRRLSLQGWRPSCRSSSTTPPPPSTSSSSCGSRTSMTPSAATPAPASGIGCGSSISTTSPSMPITTASMGSIAAWPWSPPGSSSSIP

SEQ ID NO: 22528 - protein, 1027 aa, Homo sapiens
MLIEDVDALKSWLAKLLEPICDADPSALANYVVALVKKDKPEKELKAFCADQLDVFLQKETSGFVDKLFESLYTKNYLPLLEPVKPEPKPLVQEKEEIKEEVFQEPAEEERDGRKKKYPSPQKTRSESSERRTREKKREDGKWRDYDRYYERNELYREKYDWRRGRSKSRSKSRGLSRSRSRSRGRSKDRDPNRNVEHRERSKFKSERNDLESSYVPVSAPPPNSSEQYSSGAQSIPSTVTVIAPAHHSENTTESWSNYYNNHSSSNSFGRNLPPKRRCRDYDERGFCVLGDLCQFDHGNDPLVVDEVALPSMIPFPPPPPGLPPPPPPGMLMPPMPGPGPGPGPGPGPGPGPGPGPGHSMRLPVPQGHGQPPPSVVLPIPRPPITQSSLINSRDQPGTSAVPNLASVGTRLPPPLPQNLLYTVSEHTYEPDGYNPEAPSITSSGRSQYRQFFSRTQTQRPNLIGLTSGDMDVNPRAANIVIQTEPPVPVSINSNITRVVLEPDSRKRAMSGLEGPLTKKPWLGKQGNNNQNKPGFLRKNQYTNTKLEVKKIPQELNNITKLNEHFSKFGTIVNIQVAFKGDPEAALIQYLTNEEARKAISSTEAVLNNRFIRVLWHRENNEQPTLQSSAQLLLQQQQTLSHLSQQHHHLPQHLHQQQVLVAQSAPSTVHGGIQKMMSKPQTSGAYVLNKVPVKHRLGHAGGNQSDASHLLNQSGGAGEDCQIFSTPGHPKMIYSSSNLKTPSKLCSGSKSHDVQEVLKKKQEAMKLQQDMRKKRQEVLEKQIECQKMLISKLEKNKNMKPEERANIMKTLKELGEKISQLKDELKTSSAVSTPSKVKTKTEAQKELLDTELDLHKRLSSGEDTTELRKKLSQLQVEAARLGILPVGRGKTMSSQGRGRGRGRGGRGRGSLNHMVVDHRPKALTVGGFIEEEKEDLLQHFSMEFCSCCPGWSAMVRSRLTATSASLVQVILLPQPPKQLRLQEREDDGHELQAAFRHAPGAARTQILQSALWLRGHAPSLSPSPAGT

SEQ ID NO: 22529 - protein, 401 aa, Homo sapiens
MVPFIYLQAHFTLCSGWSSTYRDLRKGVYVPYTQGKWEGELGTDLVSIPHGPNVTVRANIAAITESDKFFINGSNWEGILGLAYAEIARPDDSLEPFFDSLVKQTHVPNLFSLQLCGAGFPLNQSEVLASVGGSMIIGGIDHSLYTGSLWYTPIRREWYYEVIIVRVEINGQDLKMDCKEYNYDKSIVDSGTTNLRLPKKVFEAAVKSIKAASSTEKFPDGFWLGEQLVCWQAGTTPWNIFPVISLYLMGEVTNQSFRITILPQQYLRPVEDVATSQDDCYKFAISQSSTGTVMGAVIMEGFYVVFDRARKRIGFAVSACHVHDEFRTAAVEGPFVTLDMEDCGYNIPQTDESTLMTIAYVMAAICALFMLPLCLMVCQWRCLRCLRQQHDDFADDISLLK

SEQ ID NO: 22530 - protein, 1183 aa, Homo sapiens
MEEFDLVKTLHKTSSSVGSDENSLHSLGLNLNTDRSSPHLSTNGVSSFSGKTRPSVIQGTVEVLTSLMQELQNSGKTDSELWKNCETRWLQLFNLVEKQCQEQIVAQQEQFHNQIQHIQEEIKNLVKLQTSSASLASCEGNSSNKQVSSESQMGFFSLSSERNESVIHYPESTEPEIQQEMSTSQPDCNVDSCSVSSGYGTFCISELNLYKSKDPKEFMEHIDVPKGQYVAPAVPAESLVDGVKNENFYIQTPEECHVSLKEDVSISPGEFEHNFLGENKVSEVYSGKTNSNAITSWAQKLKQNQPKRAHVEDGGSRSKQGNEQSKKTPIEKSDFAAATHPRAFYLSKPDETPNAWMSDSGTGLTYWKLEEKDMHHSLPETLEKTFISLSSTDVSPNQSNTSNEMKLPSLKDIYYKKQRENKQLPERNLTSASNPNHPPEVLTLDPTLHMKPKQQISGIQPHGLPNALDDRISFSPDSVLEPSMSSPSDIDSFSQASNVTSQLPGFPKYPSHTKASPVDSWKNQTFQNESRTSSTFPSVYTITSNDISVNTVDEENTVMVASASVSQSQLPGTANSVPECISLTSLEDPVILSKIRQNLKEKHARHIADLRAYYESEINSLKQKLEAKEISGVEDWKITNQILVDRCGQLDSALHEATSRVRTLENKNNLLEIEVNDLRERFSAASSASKILQERIEEMRTSSKEKDNTIIRLKSRLQDLEEAFENAYKLSDDKEAQLKQENKMFQDLLGEYESLGKEHRRVKDALNTTENKLLDAYTQISDLKRMISKLEAQVKQVEHENMLSLRHNSRIHVRPSRANTLATSDVSRRKWLIPGAEYSIFTGQPLDTQDSNVDNQLEETCSLGHRSPLEKDSSPGSSSTSLLIKKQRETSDTPIMRALKELDEGKIFKNWGTQTEKEDTSNINPRQTETSVNASRSPEKCAQQRQKRLNSASQRSSSLPPSNRKSSTPTKREIMLTPVTVAYSPKRSPKENLSPGFSHLLSKNESSPIRFDILLDDLDTVPVSTLQRTNPRKQLQFLPLDDSEEKTYSEKATDNHVNHSSCPEPVPNGVKKVSVRTAWEKNKSVSYEQCKPVSVTPQGNDFEYTAKIRTLAETERFFDELTKEKDQIEAALSRMPSPGGRITLQTRLNQEALEDRLERINRELGSVRMTLKKFHVLRTSANL

SEQ ID NO: 22531 - protein, 176 aa, Homo sapiens
MIITKAGRRMFPAMRVKISGLDPHQQYYIAMDIVPVDNKRYRYVYHSSKWMVAGNADSPVPPRVYIHPDSPASGETWMRQVISFDKLKLTNNELDDQGHIILHSMHKYQPRVHVIRKDCGDDLSPIKPVPSGEGVKAFSFPETVFTTVTAYQNQQITRLKIDRNPFAKGFRDSGRN

SEQ ID NO: 22532 - protein, 663 aa, Homo sapiens
MCDLRRPAAGGMMDLAYVCEWEKWSKSTHCPSVPLACAWSCRNLIAFTMDLRSDDQDLTRMIHILDTEHPWDLHSIPSEHHEAITCLEWDQSGSRLLSADADGQIKCWSMADHLANSWESSVGSLVEGDPIVALSWLHNGVKLALHVEKSGASSFGEKFSRVKFSPSLTLFGGKPMEGWIAVTVSGLVTVSLLKPSGQVLTSTESLCRLRGRVALADIAFTGGGNIVVATADGSSASPVQFYKVCVSVVSEKCRIDTEILPSLFMRCTTDLNRKDKFPAITHLKFLARDMSEQVLLCASSQTSSIVECWSLRKEGLPVNNIFQQISPVVGDKQPTILKWRILSATNDLDRVSAVALPKLPISLTNTDLKVASDTQFYPGLGLALAFHDGSVHIVHRLSLQTMAVFYSSAAPRPVDEPAMKRPRTAGPAVHLKAMQLSWTSLALVGIDSHGKLSVLRLSPSMGHPLEVGLALRHLLFLLEYCMVTGYDWWDILLHVQPSMVQSLVEKLHEEYTRQTAALQQVLSTRILAMKASLCKLSPCTVTRVCDYHTKLFLIAISSTLKSLLRPHFLNTPDKSPGDRLTEICTKITDVDIDKVMINLKTEEFVLDMNTLQALQQLLQWVGDFVLYLLASLPNQPSPTSEPSPTSEPCPTSEPSPTSEPSSP

SEQ ID NO: 22533 - protein, 423 aa, Homo sapiens
MADGPRCKRRKQANPRRKNVVNYDNVVDTGSETDEEDKLHIAEDDGIANPLDQETSPASVPNHESSPHVSQALLPREEEEDEIREGGVEHPWHNNEILQASVDGPEEMKEDYDTMGPEATIQTAINNGTVKNANCTSDFEEYFAKRKLEERDGHAVSIEEYLQRSDTAIIYPEAPEELSRLGTPEANGQEENDLPPGTPDAFAQLLTCPYCDRGYKRLTSLKEHIKYRHEKNEENFSCPLCSYTFAYRTQLERHMVTHKPGTDQHQMLTQGAGNRKFKCTECGKAFKYKHHLKEHLRIHSGEKPYECPNCKKRFSHSGSYSSHISSKKCIGLISVNGRMRNNIKTGSSPNSVSSSPTNSAITQLRNKLENGKPLSMSEQTGLLKNSRRQWLMPVIPALWEANEGGSGQEFETSLANMVKHHLS

SEQ ID NO: 22534 - protein, 211 aa, Homo sapiens
MAEASSANLGSGCEEKRHEGSSSESVPPGTTISRVKLLDTMVDTFLQKLVAAGSYQRFTDCYKCFYQLQPAMTQQIYDKFIAQLQTSIREEISDIKEEGNLEAVLNALDKIVEEGKVRKEPAWRPSGIPEKDLHSVMAPYFLQQRDTLRRHVQKQEAENQQLADAVLAGRRQVEELQLQVQAQQQAWQVRSPAVQSPAKVQPLCPSRRAAR

SEQ ID NO: 22535 - protein, 311 aa, Homo sapiens
MPRPNFMAVTEFTFEGFSIFEWHHRLILFVIFLVLYVLTLASNAIILIVIRLNHQLHTPMYFFLSVLSISETYYTVAINPQMLSGLLSPQQTISIPGCAAQLFFYLTFGVNKCFLLTAMGYDHYVAICNPLQYSVIMGKKACIQLVSGSWNIGLSTAIIQVSSVFSLPFCDANLISHFFCDIRPIMKLACADTTIKELLLCSSVSVSLFCPWYUSSSPMSULSPPSSRLHQLRAGERPLLLVPHTSQWSLSTMAVLLSSTUNPNPKIPCRTDLSLUHTLLLLLCUTLLYTAUGTKRSRMPCSELWAESLSL

SEQ ID NO: 22536 - protein, 264 aa, Homo sapiens
MNCMKGPLHLEHRAAGTKLSAVSSSSCHHPQPLAMASVLAPGQPRSLDSSKHRLEVHTISDTSSPEAAEKDKSQQGKNEDVGAEDPSKKKRQRRQRTHFTSQQLQELEATFQRNRYPDMSTREEIAVWTNLTEARVRVGASTESGRDGGRMLWRYRPSRPGENVEGSAAWEGAGGAQLCKGRRPRGGLVARLQFPLRGRQDCRPGSGSQSGTGSLPRHPAISRAGLHGQSPAQDIVFLACSCQSRANKIPTRPRAANRLQPVSL

SEQ ID NO: 22537 - protein, 334 aa, Homo sapiens
MPQVGGRPLSHLERSQWGMRRTAWSSLPPCPTASHWVSLAKPAASWVPVSFSGPGTAYQREKMFFPVCTFPSHWSRGSGAVSKDRTPSPTRHQAHILVPLKIQLRRVPDSFSQQMPETSYLTRVGPDIQCWPESWGMDSLQKQDLRRPKIHGAVQASPYQPPTLASLQRLLWVRQAATLNHIDEVWPSLFLGDAYAARDKSKLIQLGITHVVNAAAGKFQVDTGAKFYRGMSLEYYGIEADDNPFFDLSVYFLPVARYIRAALSVPQGRVLVHCAMGVSRSATLVLAFLMICENMTLVEAIQTVQAHRNICPNSGFLRQLQVLDNRLGRETGRF

SEQ ID NO: 22538 - protein, 488 aa, Homo sapiens
MAQAEEETRSRSAIVIKAGGRYLGKKVQFRKPAPGATDAVPSRKRATPINLASAIRKSGASAVSGGSGVSQRPFRDRVLHLLALRPYRKAELLLRLQKDGLTQADKDALDGLLQQVANMSAKDGTCTLQDCMYKDVQKDWPGYSEGDQQLLKRVLVRKLCQPQSTGSLLGDPAASSPPGERGRSASPPQKRLQPPDFIDPLANKKPRISHFTQRAQPAVNGKLGVPNGREALLPTPGPPASTDTLSSSTHLPPRLEPPRAHDPLADVSNDLGHSGRDCEHGEAAAPAPTVRLGLPLLTDCAQPSRPHGSPSRSKPKKKSKKHKDKERAAEDKPRAQLPDCAPATHATPGAPADTPGLNGTCSVSSVPTSTSETPDYLLKYAAISSSEQRQSYKNDFNAEYSEYRDLHARIERITRRFTQLDAQLRQLSQGSEEYETTRGQILQEYRKIKKTNTNYSQEKHRCEYLHSKLAHIKRLIAEYDQRQLQAWP

SEQ ID NO: 22539 - protein, 220 aa, Homo sapiens
MPETSYLTRVGPDIQCWPESWGMDSLQKQDLRRPKIHGAVQASPYQPPTLASLQRLLWVRQAATLNHIDEVWPSLFLGDAYAARDKSKLIQLGITHVVNAAAGKFQVDTGAKFYRGMSLEYYGIEADDNPFFDLSVYFLPVARYIRAALSVPQGRVLVHCAMGVSRSATLVLAFLMICENMTLVEAIQTVQAHRNICPNSGFLRQLQVLDNRLGRETGRF

SEQ ID NO: 22540 - protein, 422 aa, Homo sapiens
MDHPSREKDERQRTTKPMAQRSAHCSRPSGSSSSSGVLMVGPNFRVGKKIGCGNFGELRLGKNLYTNEYVAIKLEPIKSRAPQLHLEYRFYKQLGSAGEGLPQVYYFGPCGKYNAMVLELLGPSLEDLFDLCDRTFTLKTVLMIAIQLLSRMEYVHSKNLIYRDVKPENFLIGRQGNKKEHVIHIIDFGLAKEYIDPETKKHIPYREHKSLTGTARYMSINTHLGKEQSRRDDLEALGHMFMYFLRGSLPWQGLKADTLKERYQKIGDTKRNTPIEALCENFPEEMATYLRYVRRLDFFEKPDYEYLRTLFTDLFEKKGYTFDYAYDWVGRPIPTPVGSVHVDSGASAITRESHTHRDRPSQQQPLRNQPRSLTSRVFCPAVRPLFPLPSTHINRNNVLEMKPGGRSSYTCKRSLIGSTLTR

SEQ ID NO: 22541 - protein, 406 aa, Homo sapiens
MSEHVEPAAPGPGPNGGGGGPAPARGPRTPNLNPNPLINVRDRLFHALFFKMAVTYSRLFPPAFRRLFEFFVLLKALFVLFVLAYIHIVFSRSPINCLEHVRDKWPREGILRVEVRHNSSRAPVFLQFCDSGGRGSFPGLAVEPGSNLDMEDEEEEELTMEMFGNSSIKFELDIEPKVFKPPSSTEALNDSQEFPFPETPTKVWPQDEYIVEYSLEYGFLRLSQATRQRLSIPVMVVTLDPTRDQCFGDRFSRLLLDEFLGYDDILMSSVKGLAENEENKGFLRNVVSGEHYRFVSMWMARTSYLAAFAIMVIFTLSVSMLLRYSHHQIFVFIVDLLQMLEMNMAIAFPAAPLLTVILALVGMEAIMSEFFNDTTTAFYIILIVWLADQYDAICCHTSTSKRHWLR

SEQ ID NO: 22542 - protein, 465 aa, Homo sapiens
MWVCLRGILDSQAFWHETLRRWECLLAEMKVSRGERSHCPTQTVKKLLEEQRRRQQQQPDAGGVQGQFLPPPEQPLTPSVNEAVTGHPPFPAHSETVGSGPSSLGFPDWDPNTHAAYTDSPYSCPASAAENFLPPDFYPPSDPGQPCPFPQGMEAGPWRVSAPPSGPPQFPAVVPGPSLEVARAHMLALGPQQLLAQDEEGDTLLHLFAARGLRWAAYAAAEVLQVYRRLDIREHKGKTPLLVAAAANQPLIVEDLLNLGAEPNAADHQGRSVLHVAATYGLPGVLLAVLNSGVQVDLEARDFEGLTPLHTAILALNVAMRPSDLCPRVLSTQARDRLDCVHMLLQMGANHTSQEIKSNKTVLHLAVQAANPTLVQLLLELPRGDLRTFVNMKAHGNTALHMAAALPPGPAQEAIVRHLLAAGADPTLRNLENEQPVHLLRPGPGPEGLRQLLKRSRVAPPGLSS

SEQ ID NO: 22543 - protein, 475 aa, Homo sapiens
MDHPSREKDERQRTTKPMAQRSAHCSRPSGSSSSSGVLMVGPNFRVGKKIGCGNFGELRLGKNLYTNEYVAIKLEPIKSRAPQLHLEYRFYKQLGSAGEGLPQVYYFGPCGKYNAMVLELLGPSLEDLFDLCDRTFTLKTVLMIAIQLLSRMEYVHSKNLIYRDVKPENFLIGRQGNKKEHVIHIIDFGLAKEYIDPETKKHIPYREHKSLTGTARYMSINTHLGKEQSRRDDLEALGHMFMYFLRGSLPWQGLKADTLKERYQKIGDTKRNTPIEALCENFPEEMATYLRYVRRLDFFEKPDYEYLRTLFTDLFEKKGYTFDYAYDWVGRPIPTPVGSVHVDSGASAITRESHTHRDRPSQQQPLRNQNVSSERRGEWEIQPSRQTNTSYLTSHLAADRHGGSVQVVSSTNGELNVDDPTGAHSNAPITAHAEVEVVEEAKCIMFHKPWHWSQSSAVKMKFVVFLNMNVNFKCI

SEQ ID NO: 22544 - protein, 504 aa, Homo sapiens
VVSEKCRIDTEILPSLFMRCTTDLNRKDKFPAITHLKFLARDMSEQVLLCASSQTSSIVECWSLRKEGLPVNNIFQQISPVVGDKQPTILKWRILSATNDLDRVSAVALPKLPISLTNTDLKVASDTQFYPGLGLALAFHDGSVHIVHRLSLQTMAVFYSSAAPRPVDEPAMKRPRTAGPAVHLKAMQLSWTSLALVGIDSHGKLSVLRLSPSMGHPLEVGLALRHLLFLLEYCMVTGYDWWDILLHVQPSMVQSLVEKLHEEYTRQTAALQQVLSTRILAMKASLCKLSPCTVTRVCDYHTKLFLIAISSTLKSLLRPHFLNTPDKSPGDRLTEICTKITDVDIDKVMINLKTEEFVLDMNTLQALQQLLQWVGDFVLYLLASLPNQVAMRAQRASRTRRWWMNAACCPASCLSPAWTGCQPATAWLAACSPSSPFVCSLAGRPRCLAVLPPCSSTASPGPQASPRSTTCGGCTLALAPRRNARPAPGAAVSPCSSRPTEPRR

SEQ ID NO: 22545 - protein, 924 aa, Homo sapiens
MVSRMGWGGRRRRLGRWGDLGPGSVPLLPMPLPPPPPPSCRGPGGGRISIFSLSPAPHTRSSPSSFSPPTAGPPCSVLQGTGASQSCHSALPIPATPPTQAQPAMTPASASPSWGSHSTPPLAPATPTPSQQCPQDSPGLRVGPLIPEQDYERLEDCDPEGSQDSPIHGEEQQPLLHVPEGLRGSWHHIQNLDSFFTKIYSYHQRNGFACILLEDVFQLGQFIFIVTFTTFLLRCVDYNVLFANQPSNHTRPGPFHSKVTLSDAILPSAQCAERIRSSPLLVLLLVLAAGFWLVQLLRSVCNLFSYWDIQVFYREALHIPPEELSSVPWAEVQSRLLALQRSGGLCVQPRPLTELDIHHRILRYTNYQVALANKGLLPARCPLPWGGSAAFLSRGLALNVDLLLFRGPFSLFRGGWELPHAYKRSDQRGALAARWGRTVLLLAALNLALSPLVLAWQVLHVFYSHVELLRREPGALGARGWSRLARLQLRHFNELPHELRARLARAYRPAAAFLRTAAPPAPLRTLLARQLVFFAGALFAALLVLTVYDEDVLAVEHVLTAMTALGVTATVARSFIPEEQCQGRAPQLLLQTALAHMHYLPEEPGPGGRDRAYRQMAQLLQYRAVSLLEELLSPLLTPLFLLFWFRPRALEIIDFFHHFTVDVAGVGDICSFALMDVKRHGHPQWLSAGQTEASLSQRAEDGKTELSLMRFSLAHPLWRPPGHSSKFLGHLWGRVQQDAAAWGATSARGPSTPGVLSNCTSPLPEAFLANLFVHPLLPPRDLSPTAPCPAAATASLLASISRIAQDPSSVSPGGTGGQKLAQLPELASAEMSLHVIYLHQLHQQQQQQEPWGEAAASILSRPCSSPSQPPSPDEEKPSWSSDGSSPASSPRQQWGTQKARNLFPGGFQVTTDTQKEPDRASCTD

SEQ ID NO: 22546 - protein, 1117 aa, Homo sapiens
MYRSSARSSVSSHRPKDDGGGGPRSGRSSGSSSGPARRSSPPPPPSGSSSRTPARRPRSPSGHRGRRASPSPPRGRRVSPSPPRARRGSPSPPRGRRLFPPGPAGFRGSSRGESRADYARDGRGDHPGDSGSRRRSPGLCSDSLEKSLRITVGNDHFCVSTPERRRLSDRLGSPVDNLEDMDRDDLTDDSVFTRSSQCSRGLERYISQEEGPLSPFLGQLDEDYRTKETFLHRSDYSPHISCHDELLRGTERNREKLKGYSIRSEERSREAKRPRYDDTVKINSMGGDHPSFTSGTRNYRQRRRSPSPRFLDPEFRELDLARRKREEEEERSRSLSQELVGVDGGGTGCSIPGLSGVLTASEPGYSLHRPEEVSVMPKKSILKKRIEVDIMEPSMQLESFSSSTSSSQDHPLYSGHPSLPLSGAIAAFASEIENKGTMVETALKEPQGNLYQWGPLPGIPKDNSPLREKFGSFLCHKDNLDLKAEGPERHTDFLLPHERASQDGSGFSRILSMLADSTSTQEKRRRSFPDIEDEEKFLYGDEEEDLKAESVPKPLGSSESEVMRQKASSLPSSAPAVKLESLEETNPEYAKIHDLLKTIGLDIGVAEISQLAARTQERLHGKKPSLRSSADRRSSVDRYFSADHCSSVDHRFSADRCSSVDHCFSADRRSSDPHRLESREAHHSNTHSPEVSHPHPPSPVDPYLLTKNSPPFLKSDHPVGHISGPEVVGSGFQSSVAVRCMLPSAPSAPIRLPHTAALSQFHMPRASQFAAARIPPNYQGPAIPPASFDAYRHYMAYAASRWPMYPTSQPSNHPVPEPHRIMPITKQATRSRPNLRVIPTVTPDKPKQKESLRGSIPAAQVPVQVSIPSLIRYNPEKISDEKNRASQKQKVIEEREKLKNDREARQKKMYYLRTELERLHKQQGEMLRKKRREKDGHKDPLLVEVSRLQDNIMKDIAELRQEAEEAEKKQSELDKVAQILGINIFDKSQKSLSDSREPTEKPGKAEKSKSPEKVSSFSNSSSNKESKVNNEKFRTKSPKPAESPQSATKQLDQPTAAYEYYDAGNHWCKDCNTICGTMFDFFTHMHNKKHTQGQFQKSSDFQKEGLQQTFLPPERQG

SEQ ID NO: 22547 - protein, 494 aa, Homo sapiens
MKTYRQREKQGSKVQESTKGPDEAKIKVFVGKIPRDLYEDELVPLFEKAGPIWDLRLMMDPLSGQNRGYAFITFCGKEAAQEAVKLCDSYEIRPGKHLGVCISVANNRLFVGSIPKNKTKENILEEFSKVTEGLVDVILYHQPDDKKKNRGFCFLEYEDHKSAAQARRRLMSGKVKVWGNVVTVEWADPVEEPDPEVMAKVKVLFVRNLATTVTEEILEKSFSEFGKLERVKKLKDYAFVHFEDRGAAVKAMDEMNGKEIEGEEIEIVLAKPPDKKRKERQAARQASRSTAYEDYYYHPPPRMPPPIRGRGRGGGRGGYGYPPDYYGYEDYYDDYYGYDYHDYRGGYEDPYYGYDDGYAVRGRGGGRGGRGAPPPPRGRGAPPPRGRAGYSQRGAPLGPPRGSRGGRGGPAQQQRGRGSRGSRGNRGGNVGGKRKADGYNQPDSKRRQTNNQQNWGSQPIAQQPLQQGGDYSGNYGYNNDNQEFYQDTYGQQWK

SEQ ID NO: 22548 - protein, 1279 aa, Homo sapiens
MRGHGNHSRLKSRCASLGNVHHHQAQMAHGAHCRGGRTPQSPDSRGPTAGGHTRGRWTYRPIEALINVSFPGAKGGRTAEGEPSWAWVFRSGYLQRQALPGLPVSTRVAACWWQHHPGRDSGFLGPGFIDLLREEPSGRADGKAAAQKTGRLYLFPTFLGNKLPEAADSFGEIASGNSVIFTSVLQSSHPPGTPPPSARKPSPGAAMLVCEETLELGAQGCWGSTSPRGQAVSLVGGPTAGGSRLGGAGCTMGLLMALQARRPRDGTWADPRRCSRAVEGSGLTRAALVSPGPSGVEEDTRREGCVLVGSWRSSTHRSRVLIINTPSGRTPWSQGSLGSTGRYNQTRAPGSQQQGLCSDAALHEDFVPEPTPAFFQYPPQAFSKTKVRDLGRGGLYAFSKEEKVSEAQRVEAYETHGLGLSTGRQNPVPSPCKPGCVCQGLALDAEAWPRHPGRRPCAAKEACLGPPGCSGELSLPEEEGIAPGAATAAPAWVPHGRVSRFLTVKLFTYVTMYQCKQERILRLCISGESGRYVRRSRFRNFAALMVSTGVPGVLQLGARPLRGGGHPYGDSQAGKVVEWRAGDRASGLSAGERRFLSQSELQTWPRTPHCVGKKVPQPVGAADLAPDTSLCRKEGSSASRSCRPGPGHLTRREEDSFRQLAFPRFEEVTFPPLTAAERAPSVHGGHSLASQGLVLAGRTRSVASGGKQELSGPLAACIPTQDLKTVLSLPRYPGEFLHPVVYACTAVMLLCLLASFVTYIVHQSAIRISRKGRHTLLNFCFHAALTFTVFAGGINRTKYPILCQAVGIVLHYSTLSTMLWIGVTARNIYKQVTKKAPLCLDTDQPPYPRQPLLRFYLVSGGVPFIICGVTAATNIRNYGTEDEDTACWMAWEPSLGAFYGPAAIITLVTCVYFLGTYVQLRRHPGRRYELRTQPEEQRRLATPEGGRGIRPGTPPAHDAPGASVLQNEHSFQAQLRAAAFTLFLFTATWAFGALAVSQGHFLDMVFSCLYGAFCVTLGLFVLIHHCAKREDVWQCWWACCPPRKDAHPALDANGAALGRAACLHSPGLGQPRGFAHPPGPCKMTNLQAAQGHASCLSPATPCCAKMHCEPLTADEAHVHLQEEGAFGHDPHLHGCLQGRTKPPYFSRHPAEEPEYAYHIPSSLDGSPRSSRTDSPPSSLDGPAGTHTLACCTQGDPFPMVTQPEGSDGSPALYSCPTQPGREAALGPGHLEMLRRTQSLPFGGPSQNGLPKGKLLEGLPFGTDGTGNIRTGPWKNETTV

SEQ ID NO: 22549 - protein, 409 aa, Homo sapiens
MSLAAYCVICCRRIGTSTSPPKSGTHWRDIRNIIKFTGSLILGGSLFLTYEVLALKKAVTLDTQVVEREKMKSYIYVHTVSLDKGENHGIAWQARKELHKAVRKVLATSAKILRNPFADPFSTVDIEDHECAVWLLLRKSKSDDKTTRLEAVREMSETHHWHDYQYRIIAQACDPKTLIGLARSEESDLRFFLLPPPLPSLKEDSSTEEELRQLLASLPQTELDECIQYFTSLALSESSQSLAAQKISTHCDKIEANGGLQLLQRLYRLHKDCPKVQRNIMRVIGNMALNEHLHSSIVRSGWVSIMAEAMKSPHIMESSHAARILANLDRETVQEKYQDGVYVLHPQYRTSQPIKADVLFIHGLMGAAFKTWRQQDSEQAVIEKPMEDEDRYTTCWPKKVHCIQKQRTS

SEQ ID NO: 22550 - protein, 416 aa, Homo sapiens
MQYSAMDEFHPFIEALLPHVRAIAYTWFNLQARKRKYFKKHEKRMSKDEERAVKDELLSEKPEIKQKWASRLLAKLRKDIRQEYREDFVLTVTGKKHPCCVLSNPDQKGKIRRIDCLRQADKVWRLDLVMVILFKGIPLESTDGERLMKSPHCTNPALCVQPHHITVSVKELDLFLAYYVQEQDSGQSGSPSHNDPAKNPPGYLEDSFVKSGVFNVSELVRVSRTPITQGTGVNFPIGEIPSQPYYHDMNSGVNLQRSLSSPPSSKRPKTISIDENMEPSPTGDFYPSPSSPAAGSRTWHERDQDMSSPTTMKKPEKPLFSSASPQDSSPRLSTFPQHHHPGIPGVAHSVISTRTPPPPSPLPFPTQAILPPAPSSYFSHPTIRYPPHLNPQDTLKNYVPSYDPSSPQTSQSWYLG

SEQ ID NO: 22551 - protein, 232 aa, Homo sapiens
MIITKAGRRMFPAMRVKISGLDPHQQYYIAMDIVPVDNKRYRYVYHSSKWMVAGNADSPVPPRVYIHPDSPASGETWMRQVISFDKLKLTNNELDDQGHIILHSMHKYQPRVHVIRKDCGDDLSPIKPVPSGEGVKAFSFPETVFTTVTAYQNQQITRLKIDRNPFAKGFRDSGRNRMGLEALVESYAFWRPSLRTLTFEDIPGIPKQEYRDLKTDYIFPERDNLVSRETKL

SEQ ID NO: 22552 - protein, 1294 aa, Homo sapiens
MSSECDGGSKAVMNGLAPGSNGQDKDMDLTKICTGKGAVTLRASSSYRETPSSSPASPQETRQHESKPGLEPEPSSADEWRLSSSADANGNAQPSSLAAKGYRSVHPNLPSDKSQDSSPLLNEVSSSLIGTDSQAFPSVSKPSSAYPSTTIVNPTIVLLQHNRDPVSERRVGEQDSAPTQEKPTSPGKAIEKRAKDDSRRVVKSTQDLSDVSMDEVGIPLRNTERSKDWYKTMFKQIHKLNRDDDSDLYSPRYSFSEDTKSPLSVPRSKSEMSYIDGEKVVKRSATLPLPARSSSLKSSSERNDWEPPDKKVDTRKYRAEPKSIYEYQPGKSSVLTNEKMSRDISPEEIDLKNEPWYKFFSELEFGKPTNLDKDLSLCQTELEADLEKMETLNKAPSANVPQSSAISPTPEISSETPGYIYSSNFHAVKRESDGAPGDLTSLENERQIYKSVLEGGDIPLQGLSGLKRPSSSASTKVDRKGGNAHMISSSSVHSRTFNTSNALGPVCKHKKPLSAAKACISEILPSKFKPRLSAPSALLQEQKSILLPSEKAQSCENLCVSGSLNDSKRGLPLQVGGSIENLLMRSRRDYDSKSSSTMSLQEYSTSGRRPCPLSRKAGMQFTMLYRDMHQINRSGLFLGSISSSSSVRDLASHFEKSSLALSRGELGPSQEGSEHIPKHTVSSRITAFEQLIQRSRSMPSLDLSGRLSKSPTPVLSRGSLTSARSAESLLESTKLHPKEMDGMNSSGVYASPTCSNMAHHALSFRGLVPSEPLSTCSDDVDRCSNISTDSREGSGGSVHGDFPKHRLNKCKGTCPASYTRFTTIRKHEQQQTSRQPEWRLDARGDKSTLLRNIYLMSPLPFRLKKPLHHHPRQPSPGDSSGLLVGQKPDLPSQPHQDQPPSGGKPVVPTRLSSRHTMARLSRSSEPSQERPTALEDYPRAINNGNSVPYSDHSLDRNNNPQSELAPSRGDSESPRHFIPADYLESTEEFIRRRHDDKEKLLADQRRLKREQEEADIAARRHTGVIPTHHQFITNERFGDLLNIDDTAKRKSGSEMRPARAKFDFKAQTLKELPLQKGDIVYIYKQIDQNWYEGEHHGRVGIFPRTYIELLPPAEKAQPKKLTPVQVLEYGEAIAKFNFNGDTQVEMSFRKGERITLLRQVDENWYEGRIPGTSRQGIFPITYVDVIKRPLVKNPVDYMDLPFSSSPSRSATASPQQPQAQQRRVTPDRSQTSQDLFSYQALYSYIPQNDDELELRDGDIVDVMEKCDDGWFVGTSRRTKQFGTFPGNYVKPLYL

SEQ ID NO: 22553 - protein, 4516 aa, Homo sapiens
MAAQVAAREARDFREAPTLRLTSGAGLEAVGAVELEEEEENEEEAAARRARSFAQDARVRFLGGRLAMMLGFTEEKWSQYLESEDNRQVLGEFLESTSPACLVFSFAASGRLAASQEIPRDANHKLVFISKKITESIGVNDFSQVVLFGELPALSLGHVSAFLDEILVPVLSNKNNHKSWSCFTSQDMEYHIEVMKKKMYIFRGKMSRRTLLPIPTVAGKMDLDQNCSENKPPSNERIILHAIESVVIEWSHQIQEIIERDSVQRLLNGLHLSPQAELDFWMMRRENLSCIYDQLQAPVVLKMVKILTTKQSSYFPTLKDIFLAVENALLEAQDVELYLRPLRRHIQCLQETEFPQTRILIAPLFHTICLIWSHSKFYNTPARVIVLLQEFCNLFINQATAYLSPEDLLRGEIEESLEKVQVAVNILKTFKNSFFNYRKKLASYFMGRKLRPWDFQSHLVFCRFDKFLDRLIKIEDIFATTLEFEKLERLEFGGTKGAILNGQVHEMSEELMELCKLFKQSTYDPSDCTNMEFESDYVAFKSKTLEFDRRLGTIICEAFFNCNGLEAAFKLLTIFGNFLEKPVVMEIFSLHYSTLVHMFNTELDVCKQLYNEHMKQIECGHVVLNKNMPFTSGNMKWAQQVLQRLQMFWSNFASLRYLFLGNPDHALVYQKYVEMTTLLDQFESRIYNEWKSNVDEICEFNLNQPLVKFSAINGLLCVNFDPKLVAVLREVKYLLMLKKQDIPDSALAIFKKRNTILKYIGNLDLLVQGYNKLKQTLLEVEYPLIEDELRAIDEQLTAATTWLTWQDDCWGYIERVRAATSELEHRVERTQKNVKVIQQTMRGWARCVLPPRREHRREAAFTLEDKGDLFTKKYKLIQGDGCKIHNLVEENRKLFKANPSLDTWKIYVEFIDDIVVEGFFQAIMHDLDFFLKNTEKQLKPAPFFQAQMILLPPEIVFKPSLDREAGDGFYDLVEEMLCNSFRMSAQMNRIATHLEIKNYQNDMDNMLGLAEVRQEIMNRVVNVINKVLDFRNTLETHTYLWVDDRAEFMKHFLLYGHAVSSDEMDAHANEEIPEQPPTLEQFKEQIDIYEALYVQMSKFEDFRVFDSWFKVDMKPFKVSLLTIIKKWSWMFQEHLLRFVIDSLNELQEFIKETDSGLQRELNEGDHDGLVDIMVHLLAVRSRQRATDELFEPLKETITLLESYGQKMPEQVYIQLEELPERWETTKKIAATVRHEVSPLHNAEVTLIRKKCILFDAKQAEFRERFRHYAPLGFNAENPYTALDKANEELEALEEEMLQMQESTRLFEVALPEYKQMKQCRKEIKLLKGLWDVIIYVRRSIDNWTKTQWRQIHVEQMDVELRRFAKEIWSLNKEVRVWDAYTGLEGTVKDMTASLRAITELQSPALRDRHWHQLMKAIGVKFLINEATTLADLLALRLHRVEDDVRRIVDKAVKELGTEKVITEISQTWATMKFSYEVHYRTGIPLLKSDEQLFETLEHNQVQLQTLLQSKYVEYFIEQVLSWQNKLNIADLVIFTWMEVQRTWSHLESIFVCSEDIRIQLVKDARRFDGVDAEFKELMFKTAKVENVLEATCRPNLYEKLKDLQSRLSLCEKALAEYLETKRIAFPRFYFVSSADLLDILSKGAQPKQVTCHLAKLFDSIADLQFEDNQDVSAHRAVGMYSKEKEYVPFQAECECVGHVETWLLQLEQTMQETVRHSITEAIVAYEEKPRELWIFDFPAQVALTSSQIWWTTDVGIAFSRLEEGYETALKDFHKKQISQLNTLITLLLGELPPGDRQKIMTICTIDVHARDVVAKLISQKVVSPQAFTWLSQLRHRWEDTQKHCFVNICDAQFQYFYEYLGNSPRLVITPLTDRCYITLTQSLHLTMSGAPAGPAGTGKTETTKDLGRALGMMVYVFNCSEQMDYKSIGNIYKGLVQTGAWGCFDEFNRISVEVLSVVAVQVKMIHDAIRNRKKRFVFLGEAITLKPSVGIFITMNPGYAGRTELPENLKALFRPCAMVAPDIELICEILLVAEGFVDARALARKFITLYTLCKELLSKQDHYDWGLRAIKSVLVVAGSLKRGDKNRPEDQVLMRALRDFNMPKIVTDDIPVFLGLVGDLFPALDVPRRRKLHFEQMVRQSTLELRLQPEESFILKVVQLEELLAVRHSVFVVGNAGTGKSKILRTLNRTYVNMKQKPVWNDLNPKAVTTDELFGFIHHATREWKDGKIVYSYFIGLFSSILREQANLKHDGPKWIVLDGDIDPMWIESLNTVMDDNKVLTLASNERIALTPFMRLLFEIHHLRSATPATVSRAGILYVNPQDLGWNPYVASWIDRRRHQSEKANLTILFDKYVPACLDKLRTSFKTITSIPESSLVQTLCVLLECLLTPENVPSDSPKEVYEVYFVFACIWAFGGTLLQDQISDYQADFSRWWQKEMKAVKFPSQGTIFDYYVDHKTKKLLPWADKIAQFTMDPDVPLQTVLVHTTETARLRYFMELLLEKGKPLMLVGNAGVGKTVFVGDTLASLSEDYIVSRVPFNYYTTSTALQKILEKPLEKKAGHNYGPGGNKKLIYFIDDMNMPEVDLYGTVQPHTLIRQHIDYGHWYDRQKVMLKEIHNCQYVACMNPMVGSFTINPRLQRHFTVFAFNFPSLDALNTIYGQIFSFHFQQQAFAPSILRSGPTLIQATIAFHQTMMCNFLPTAIKFHYIFNLRDLSNVFQGILFASPECLKGPLDLIHLWLHESARVYGDKLIDKKDCDLFQRRMLETAYKYFEGIDSHMLLQQPLIYCHFADRGKDPHYMPVKDWEVLKTILTETLDNYNELNAAMHLVLFEDAMQHVCRISRILRTPQGCALLVGVGGSGKQSLSRLAAYLRGLEVFQITLTEGYGIQELRVDLANLYIRTGAKNMPTVFLLTDAQVLDESFLVLINDLLASGEIPDLFSDEDVDKIISGIHNEVHALGMVDSRENCWKFFMARVRLQLKIILCFSPVGRTLRVRARKFPAIVNCTAIDWFHAWPQEALVSVSRRFIEETKGIEPVHKDSISLFMAHVHTTVNEMSTRYYQNERRHNYTTPKSFLEQISLFKNLLKKKQNEVSEKKERLVNGIQKLKTTASQVGDLKARLASQEAELQLRNHDAEALITKIGLQTEKVSREKTIADAEERKVTAIQTEVFQKQRECEADLLKAEPALVAATAALNTLNRVNLSELKAFPNPPIAVTNVTAAVMVLLAPRGRVPKDRSWKAAKVFMGKVDDFLQALINYDKEHIPENCLKVVNEHYLKDPEFNPNLIRTKSFAAAGLCAWVINIIKFYEVYCDVEPKRQALAQANLELAAATEKLEAIRKKLVDLDRNLSRLTASFEKATAEKVRCQEEVNQTNKTIKLANRLVKELEAKKIRWGQSIKSFEAQEKTLCGDVLLTAAFVSYVGPFTRQYRQELVHCKWVPFLQQKVSIPLTEGLDLISMLTDDATIAAWNNEGLPSDRMSTENAAILTHCERWPLVIDPQQQGIKWIKNKYGMDLKVTHLGQKGFLNAIETALAFGDVILIENLEETIDPVLDPLLGRNTIKKGKYIRIGDKECEFNKNFRLILHTKLANPHYKPELQAQTTLLNFTVTEDGLEAQLLAEVVSIERPDLEKLKLVLTKHQNDFKIELKYLEDDLLLRLSAAEGSFLDDTKLVERLEATKTTVAEIEHKVIEAKENERKINEARECYRPVAARASLLYFVINDLQKINPLYQFSLKAFNVLFHRAIEQADKVEDMQGRISILMESITHAVFLYTSQALFEKDKLTFLSQMAFQILLRKKEIDPLELDFLLRFTVEHTHLSPVDFLTSQSWSAIKAIAVMEEFRGIDRDVEGSAKQWRKWVESECPEKEKLPQEWKKKSLIQKLILLRAMRPDRMTYALRNFVEEKLGAKYVERTRLDLVKAFEESSPATPIFFILSPGVDALKDLEILGKRLGFTIDSGKFHNVSLGQGQETVAEVALEKASKGGHWVILQNVHLVAKWLGTLEKLLERFSQGSHRDYRVFMSAESAPTPDEHIIPQGLLENSIKITNEPPTGMLANLHAALYNFDQDTLEICSKEQEFKSILFSLCYFHACVAGRLRFGPQGWSRSYPFNPGDLTICASVLYNYLEANSKVPWEDLRYLFGEIMYGGHITDDWDRKLCRVYLEEFMNPSLTEDELMLAPGFAAPPYLDYAGYHQYIEEMLPPESPALYGLHPNAEIEFLTVTSNTLFRTLLEMQPRNALSGDELGQSTEEKVKNVLDDILEKLPEEFNMAEIMQKNSNRSPYVLVCFQECERMNILIREIRISLEQLDLSLKGELALSPAVEAQQFALSYDTVPDTWSKLAYPSTYGLAQWFNDLLLRCRELDTWTQDLTLPAVVWLSGFFNPQSFLTAIMQTMARKNEWPLDKTRLTADVTKKTKEDYGHPPREGAYLHGLFMEGARWDTQAGTIVEARLKELACPMPVIFAKATPVDRQETKQTYECPVYRTKLRGPSYIWTFRLKSEEKTAKWVLAGVALLLEA

SEQ ID NO: 22554 - protein, 73 aa, Homo sapiens
NCGLNDHGDFVTPPFRKCSSGQCNPDGAELCSPCGGGAVTPTPAAGGGRTPWRCREAPWRQGTHGRRPHYFHS

SEQ ID NO: 22555 - protein, 544 aa, Homo sapiens
MEALSRAGQEMSLAALKQHDPYITSIADLTGQVALYTFCPKANQWEKTDIEGTLFVYRRSASPYHGFTIVNRLNMHNLVEPVNKDLEFQLHEPFLLYRNASLSIYSIWFYDKNDCHRIAKLMADVVEEETRRSQQAARDKQSPSQANGCSDHRPIDILEMLSRAKDEYERSAPSGHKHLTVEELFGTSLPKEQPAVVGLDSEEMERLPGDASQKEPNSFLPFPFEQLGGAPQSETLGVPSAAHHSVQPEITTPVLITPASITQSNEKHAPTYTIPLSPVLSPTLPAEAPTAQVPPSLPRNSTMMQAVKTTPRQRSPLLNQPVPELSHASLIANQSPFRAPLNVTNTAGTSLPSVDLLQKLRLTPQHDQIQTQPLGKGAMVASFSPAAGQLATPESFIEPPSKTAAARVAASASLSNMVLAPLQSMQQNQDPEVFVQPKVLSSAIPVAGAPLVTATTTAVSSVLLAPSVFQQTVTRSSDLERKASSPSPLTIGTPESQRKPSIILSKSQLQDTLIHLIKNDSSFLSTLHEVYLQVLTKNKDNHNL

SEQ ID NO: 22556 - protein, 94 aa, Homo sapiens
MEKAPPQPQHEGLKSKEHLPQQPAEGKTASRRVPRLRAVVESQAFKNILVDEMDMMHARAATLIQANWRGYWLRQKLISQMMAAKAIQEAWRRF

SEQ ID NO: 22557 - protein, 438 aa, Homo sapiens
MDHPSREKDERQRTTKPMAQRSAHCSRPSGSSSSSGVLMVGPNFRVGKKIGCGNFGELRLGKNLYTNEYVAIKLEPIKSRAPQLHLEYRFYKQLGSAGEGLPQVYYFGPCGKYNAMVLELLGPSLEDLFDLCDRTFTLKTVLMIAIQLLSRMEYVHSKNLIYRDVKPENFLIGRQGNKKEHVIHIIDFGLAKEYIDPETKKHIPYREHKSLTGTARYMSINTHLGKEQSRRDDLEALGHMFMYFLRGSLPWQGLKADTLKERYQKIGDTKRNTPIEALCENFPEEMATYLRYVRRLDFFEKPDYEYLRTLFTDLFEKKGYTFDYAYDWVGRPIPTPVGSVHVDSGASAITRESHTHRDRPSQQQPLRNQVVSSTNGELNVDDPTGAHSNAPITAHAEVEVVEEAKCIMFHKPWHWSQSSAVKMKFVVFLNMNVNFKCI

SEQ ID NO: 22558 - protein, 180 aa, Homo sapiens
MRPSVWAAVAAGLWVLCTVIAEGPPALPALALPLAGAPDAGGCQGAEGPLRGRGAELGAAQLLLPPQEGSSAAIVLRSAPPRGPGHRGRPGSAQRPAPLGAAPRRRPDPGAAGGRGEGCGGLPUAGTARLLQEGPRGPEEASQTPESGLASVPQSQRGLQPPAPAHVGAPAGCTLWALPL

SEQ ID NO: 22559 - protein, 505 aa, Homo sapiens
MSNICQRLWEYLEPYLPCLSTEADKSTVIENPGALCSPQSQRHGHYFVALFDYQARTAEDLSFRAGDKLQVLDTLHEGWWFARHLEKRRDGSSQQLQGYIPSNYVAEDRSLQAEPWFFGAIGRSDAEKQLLYSENKTGSFLIRESESQKGEFSLSVLDGAVVKHYRIKRLDEGGFFLTRRRIFSTLNEFVSHYTKTSDGLCVKLGKPCLKIQVPAPFDLSYKTVDQWEIDRNSIQLLKRLGSGQFGEVWEGLWNNTTPVAVKTLKPGSMDPNDFLREAQIMKNLRHPKLIQLYAVCTLEDPIYIITELMRHGSLQEYLQNDTGSKIHLTQQVDMAAQVASGMAYLESRNYIHRDLAARNVLVGEHNIYKVADFGLARVFKVDNEDIYESRHEIKLPVKWTAPEAIRSNKFSIKSDVWSFGILLYEIITYGKMPYSGMTGAQVIQMLAQNYRLPQPSNCPQQFYNIMLECWNAEPKERPTFETLRWKLEDYFETDSSYSDANNFIR

SEQ ID NO: 22560 - protein, 181 aa, Homo sapiens
LYTPYHKDVAGMGQSLSPLSSSGLGSIHNSQQGLPHYAHPGAAMPTDKMLTPNGFEAHHPAMLGRHGEQHLTPTSAGMVPINGLPPHHPHAHLNAQGHGQLLGTAREPNPSVTGAQAIFAQRVLCRSQGTLSDLLRNPKPWSKLKSGRETFRRMWKWLQEPEFQRMSALRLAGTAREARTA

SEQ ID NO: 22561 - protein, 203 aa, Homo sapiens
NSLLGLPSFYRSYFSQFRKINTLESVDVHCFGHLLYEMTYGRPPDSVPVDSFPPAPSMAVVAVLESTLSCEACKNGMPTISRLLQMPLFSDVLLTTSEKPQFKIPTKLKEALRIAKECIEKRLIEEQKQIHQHRRLTRAQSHHGSEEERKKRKILARKKSKRSALENSEEHSAKYSNSNNSAGSGASSPLTSPSSPTPPSTSG

SEQ ID NO: 22562 - protein, 542 aa, Homo sapiens
MVSKLSQLQTELLAALLESGLSKEALIQALGEPGPYLLAGEGPLDKGESCGGGRGELAELPNGLGETRGSEDETDDDGEDFTPPILKELENLSPEEAAHQKAVVETLLQEDPWRVAKMVKSYLQQHNIPQREVVDTTGLNQSHLSQHLNKGTPMKTQKRAALYTWYVRKQREVAQQFTHAGQGGLIEEPTGDELPTKKGRRNRFKWGPASQQILFQAYERQKNPSKEERETLVEECNRAECIQRGVSPSQAQGLGSNLVTEVRVYNWFANRRKEEAFRHKLAMDTYSGPPPGPGPGPALPAHSSPGLPPPALSPSKVHGVRYGQPATSETAEVPSSSGGPLVTVSTPLHQVSPTGLEPSHSLLSTEAKLVSAAGGPLPPVSTLTALHSLEQTSPGLNQQPQNLIMASLPGVMTIGPGEPASLGPTFTNTGASTLVIGLASTQAQSVPVINSMGSSLTTLQPVQFSQPLHPSYQQPLMPPVQSHVTQSPFMATMAQLQSPHGERPVPHTAGDDDRGWLSMDAGERGAWQALQSACVSGTSVFP

SEQ ID NO: 22563 - protein, 310 aa, Homo sapiens
MDDENATLLTEFVLTGLTYQSEWKIPLFLAFLVIYLITIMANLGLIAVIWKDSHLHIPMYLFLGSLAFVDAWLSSSVTPKMLISFLAKSMIISVSECKIQFFSFGISGTTECFLLATMAYDRYVAICKPLLYPVIMTNGLCIWLLVLSFIGGFLHALIHEGILFRLTFCNSNIIHHFYCDIIPLLKISCTDPSINFLMLFILSGSIQVFTILTVLVSYTFVLFTILKKKVCQRHKESLFHLWSPSLICFFILWPPSLHVCAPCISTSRUSRYGGVSILHCHNSFLKSHYLQPEKUASHRFTDKNIKRKCL

SEQ ID NO: 22564 - protein, 1229 aa, Homo sapiens
MSPAAAAAGAGERRRPIASVRDGRGRGCGGPAGAALLGLSLVGLLLYLVPAAAALAWLAVGTTAAWWGLSREPRGSRPLSSFVQKARHRRTLFASPPAKSTANGNLLEPRTLLEGPDPAELLLMGSYLGKPGPPQPAPAPEGQDLRNRPGRRPPARPAPRSTPPSQPTHRVHHFYPSLPTPLLRPSGRPSPRDRGTLPDRFVITPRRRYPIHQTQYSCPGVLPTVCWNGYHKKAVLSPRNSRMVCSPVTVRIAPPDRRFSRSAIPEQIISSTLSSPSSNAPDPCAKETVLSALKEKKKKRTVEEEDQIFLDGQENKRRRHDSSGSGHSAFEPLVASGVPASFVPKPGSLKRGLNSQSSDDHLNKRSRSSSMSSLTGAYTSGIPSSSRNAITSSYSSTRGISQLWKRNGPSSSPFSSPASSRSQTPERPAKKIREEELCHHSSSSTPLAADKESQGEKAADTTPRKKQNSNSQSTPGSSGQRKRKVQLLPSRRGEQLTLPPPPQLGYSITAEDLDLEKKASLQWFNQALEDKSDAASNSVTETPPTTQPSFTFTLPAAATASPPTSLLAPSTNPLLESLKKMQTPPSLPPCPESAGAATTEALSPPKTPSLLPPLGLSQSGPPGLLPSPSFDSKPPTTLLGLIPAPSMVPATDTKAPPTLQAETATKPQATSAPSPAPKQSFLFGTQNTSPSSPAAPAASSASPMFKPIFTAPPKSEKEGLTPPGPSVSATAPSSSSLPTTTSTTAPTFQPVFSSMGPPASVPLPAPFFKQTTTPATAPTTTAPLFTGLASATSAVAPITSASPSTDSASKPAFGFGINSVSSSSVSTTTSTATAASQPFLFGAPQASAASFTPAMGSIFQFGKPPALPTTTTVTTFSQSLPTAVPTATSSSAADFSGFGSTLATSAPATSSQPTLTFSNTSTPTFNIPFGSSAKSPLPSYPGANPQPAFGAAEGQPPGAAKPALTPSFGSSFTFGNSAAPAPATAPTPAPASTIKIVPAHVPTPIQPTFGGATHSAFGLKATASAFGAPASSQPAFGGSTAVFSFGAATSSGFGATTQTASSGSSSSVFGSTTPSPFTFGGSAAPAGSGSFGINVATPGSSATTGAFSFGAGQSGSTATSTPFTGGLGQNALGTTGQSTPFAFNVGSTTESKPVFGGTATPTFGQNTPAPGVGTSGSSLSFGASSAPAQGFVGVGPFGSAAPSFSIGAGSKTPGARQRLQARRQHTRKK

SEQ ID NO: 22565 - protein, 311 aa, Homo sapiens
MACAAVMIPGLLRCSVGAIRIEAASLRLTLSTLRHLTLTSIMKSKRKTDHMERTASVLRREIVSAAKVCGAASESPSVKSLRLLVADQDFSFKAGQWVDFFIPGVSVVGGFSICSSPRLLEQERVIELAVKYTNHPPALWVHNTCTLDCEVAVRVGGEFFFDPQPADASRNLVLIAGGVGINPLLSILRHAADLLREQANKRNGYEIGTIKLFYSAKNTSELLFKKNILDLVNEFPEKIACSLHVTKQTTQINAELKPYITGRITEKEIRDHISKETLFYICGPPPMTDFFSKQLENNHVPKEHICFEKWW

SEQ ID NO: 22566 - protein, 270 aa, Homo sapiens
EFTHLEFPRRVLPKELGQRMLYRDQNMTGWAYKKIELEDLRFPLVCGEGKKARVMATIGVTRGLGDHSLKVCSSTLPIKPFLSCFPEVRVYDLTQYEHCPDDVLVLGTDGLWDVTTDCEVAATVDRVLSAYEPNDHSSLDFISAPEPALSSCSLGTSAGWSPTMAAIRKKLVIVGDGACGKTCLLIVFSKDQFPEVYVPTVFENYIADIEVDGKQVELALWDTAGQEDYDRLRPLSYPDTDVILMCFSIDSPDSLENIPEKWTPEVKHFC

SEQ ID NO: 22567 - protein, 126 aa, Homo sapiens
MPRSPTSSEDEMAQSFSDYSVGSESDSSKEETIYDTIRATAEKPGGARTEESQGNTLVIRVVIHDLQQTKCIRFNPDATVWVAKQRILCTLTQSLKDVLNYGLFQPASNGRDGRSFPGVSIQEAGV

SEQ ID NO: 22568 - protein, 150 aa, Homo sapiens
MTLQGRADLSGNQGNAAGRLATVHEPVVTQWAVHPPAPAHPSLLDKMEKAPPQPQHEGLKSKEHLPQQPAEGKTASRRVPRLRAVVESQAFKNILVDEMDMMHARAATLIQANWRGYWLRQKLISQMMAAKAIQEAWRRFNKRHILHSSK

SEQ ID NO: 22569 - protein, 215 aa, Homo sapiens
VPFLKRSLPALRQLTPDSAAFIQQSQQQPPPPTSQATTALTAVVLSSSVQRTAGKTAATVTSALQPPVLSLTQPTQVIQQPPKPGALIRPPQVTLTQTPMVALRQPHNRIMLTTPQQIQLNPLQPVPVVKPAVLPGTKALSAVSAQAAAAQKNKLKEPGGGSFRDDDDINDVASMAGVNLSEESARILATNSELVGTLTRSCKDETFLLQAPLQR

SEQ ID NO: 22570 - protein, 506 aa, Homo sapiens
MASGDLYEVERIVDKRKNKKGKWEYLIRWKGYGSTEDTWEPEHHLLHCEEFIDEFNGLHMSKDKRIKSGKQSSTSKLLRDSRGPSVEKLSHRPSDPGKSKGTSHKRKRINPPLAKPKKGYSGKPSSGGDRATKTVSYRTTPSGLQIMPLKKSQNGMENGDAGSEKDERHFGNGSHQPGLDLNDHVGEQDMGECDVNHATLAENGLGSALTNGGLNLHSPVKRKLEAEKDYVFDKRLRYSVRQNESNCRFRDIVVRKEEGFTHILLSSQTSDNNALTPEIMKEVRRALCNAATDDSKLLLLSAVGSVFCSGLDYSYLIGRLSSDRRKESTRIAEAIRDFVKAFIQFKKPIVVAINGPALGLGASILPLCDIVWASEKAWFQTPYATIRLTPAGCSSYTFPQILGVALANEMLFCGRKLTAQEACSRGLVSQVFWPTTFSQEVMLRVKEMASCSAVVLEESKCLVRSFLKSVLEDVNEKECLMLKQLWSSSKGLDSLFSYLQDKIYEV

SEQ ID NO: 22571 - protein, 125 aa, Homo sapiens
MACRALAAGAAGGSATWRPAQGTSVSLLAVVVIVCGVALVAVFLFLFWKLCWMPWRNKEASSPSSANPPLEALQSPSFRGNMADKLKDPSTLGFLEAAVKISHTSPDIPAEVQMSVKEHIMRHTR

SEQ ID NO: 22572 - protein, 1167 aa, Homo sapiens [sequence omitted]

SEQ ID NO: 22573 - protein, 465 aa, Homo sapiens
MSHLTQHTGIHAGEKPYKCEKCGKAFNRSTSLSKHKRIHTGEKPYTCEECGKAFRRSTVLNEHKKIHTGEKPYKCEECGKAFTRSTTLNEHKKIHTGEKPYKCKECGKAFRWSTSLNEHKNIHTGEKPYKCKECGKAFRQSRSLNEHKNIHTGEKPYTCEKCGKAFNQSSSLIIHRSIHSEQKLYKCEECGKAFTWSSSLNKHKRIHTGEKPYTCEECGKAFYRSSHLAKHKRIHTGEKPYTCEECGKAFNQSSTLILHKRIHSGQKPYKCEECGKAFTRSTTLNEHKKIHTGEKPYKCEECGKAFIWSASLNEHKNIHTGEKPYKCKECGKAFNQSSGLIIHRSIHSEQKLYKCEECGKAFTRSTALNEHKKIHSGEKPYKCKECGKAYNLSSTLTKHKRIHTGEKPFTCEECGKAFNWSSSLTKHKIIHTGEKSYKCEECGKAFNRPSTLTVHKRIHTGKEHS

SEQ ID NO: 22574 - protein, 326 aa, Homo sapiens
MDSPSNATVPCGFLLQGFSEFPHLRPVLFLLLLGVHLATLGGNLLILVAVASMPSRQPMLLFLCQLSAIELCYTLVVVPRSLVDLSTPGPPQGQPYLLPELRLSDADVCGSGRGRVLPAGRHGLUPLRGHLPPVALRGRGDPRAVRATGSGLLPQGTGGVRGAHGGHLPPAFLRLPPAAALLLRHHGAAAPGLHAELRRRAASAGRLPGAAAAALGAHPGLLWRHRRRPAPPALPQRPGQGRLHLRLAPGSHLPALRLRHLHVRAAQGQLLPAPGPHPGAGLHQRHAAAVPTHLQPAQPRDHRRPEQGAGAPAARPSSRRGSARAL

SEQ ID NO: 22575 - protein, 582 aa, Homo sapiens
MEALSRAGQEMSLAALKQHDPYITSIADLTGQVALYTFCPKANQWEKTDIEGTLFVYRRSASPYHGFTIVNRLNMHNLVEPVNKDLEFQLHEPFLLYRNASLSIYSIWFYDKNDCHRIAKLMADVVEEETRRSQQAARDKQSPSQANGCSDHRPIDILEMLSRAKDEYERNQMGDSNISSPGLQPSTQLSNLGSTETLEEMPSGSQDKSAPSGHKHLTVEELFGTSLPKEQPAVVGLDSEEMERLPGDASQKEPNSFLPFPFEQLGGAPQSETLGVPSAAHHSVQPEITTPVLITPASITQSNEKHAPTYTIPLSPVLSPTLPAEAPTAQVPPSLPRNSTMMQAVKTTPRQRSPLLNQPVPELSHASLIANQSPFRAPLNVTNTAGTSLPSVDLLQKLRLTPQHDQIQTQPLGKGAMVASFSPAAGQLATPESFIEPPSKTAAARVAASASLSNMVLAPLQSMQQNQDPEVFVQPKVLSSAIPVAGAPLVTATTTAVSSVLLAPSVFQQTVTRSSDLERKASSPSPLTIGTPESQRKPSIILSKSQLQDTLIHLIKNDSSFLSTLHEVYLQVLTKNKDNHNL

SEQ ID NO: 22576 - protein, 416 aa, Homo sapiens
ARGSGSETVPKAEAGPESAAGGQEEEEGEDEEELSGTKVSAPYYSSWGTLEYHNAMVVGTEEAEDGSAGVRVLYLYPTHKSLKPCPFFLEGKCRFKENCRFSHGQVVSLDELRPFQDPDLSSLQAGSACLAKHQDGLWHAARITDVDNGYYTVKFDSLLLREAVVEGDGILPPLRTEATESDSDSDGTGDSSYARVVGSDAVDSGTCSSAFAGWEVHTRGIGSRLLTKMGYEFGKGLGRHAEGRVEPIHAVVLPRGKSLDQCVETLQKQTRVGKAGTNKPPRCRGRGARPGGRPAPRNVFDFLNEKLQGQAPGALEAGAAPAGRRSKDMYHASKSAKRALSLRLFQTEEKIERTQRDIRSIQEALARNAGRHSVASAQLQEKLAGAQRQLGQLRAQEAGLQQEQRKADTHKKMTEF

SEQ ID NO: 22577 - protein, 417 aa, Homo sapiens
MSSKGSSTDGRTDLANGSLSSSPEEMSGAEEGRETSSGIEVEASDLSLSLTGDDGGPNRTSTESRGTDTESSGEDKDSDSMEDTGHYSINDENRVHDRSEEEEEEEEEEEEEQPRRRVQRKRANRDQDSSDDERALEDWVSSETSALPRPRWQALPALRERELGSSARFVYEACGARVFVQRFRLQHGLEGHTGCVNTLHFNQRGTWLASGSDDLKVVVWDWVRRQPVLDFESGHKSNVFQAKFLPNSGDSTLAMCARDGQVRVAELSATQCCKNTKRVAQHKGASHKLALEPDSPCTFLSAGEDAVVFTIDLRQDRPASKLVVTKEKEKKVGLYTIYVNPANTHQFAVGGRDQFVRIYDQRKIDENENNGVLKKFCPHHLSSWPVTMMKTFTSSTPLTVMGPSMLRDTRATEIMPQ

SEQ ID NO: 22578 - protein, 616 aa, Homo sapiens
MELVTFRDVAIEFSPEEWKCLDPAQQNLYRDVMLENYRNLVSLAICSPFSQDLSPVQGIEDSFHKLILKRYEKCGHENLQLRKGCKRVNECKVQKGVNNGVYQCLSTTQSKIFQCNTCVKVFSKFSNSNKHKIRHTGEKPFKCTECGRSFYMSHLTQHTGIHAGEKPYKCEKCGKAFNRSTSLSKHKRIHTGEKPYTCEECGKAFRRSTVLNEHKKIHTGEKPYKCEECGKAFTRSTTLNEHKKIHTGEKPYKCKECGKAFRWSTSLNEHKNIHTGEKPYKCKECGKAFRQSRSLNEHKNIHTGEKPYTCEKCGKAFNQSSSLIIHRSIHSEQKLYKCEECGKAFTWSSSLNKHKRIHTGEKPYTCEECGKAFYRSSHLAKHKRIHTGEKPYTCEECGKAFNQSSTLILHKRIHSGQKPYKCEECGKAFTRSTTLNEHKKIHTGEKPYKCEECGKAFIWSASLNEHKNIHTGEKPYKCKECGKAFNQSSGLIIHRSIHSEQKLYKCEECGKAFTRSTALNEHKKIHSGEKPYKCKECGKAYNLSSTLTKHKRIHTGEKPFTCEECGKAFNWSSSLTKHKIIHTGEKSYKCEECGKAFNRPSTLTVHKRIHTGKEHS

SEQ ID NO: 22579 - protein, 446 aa, Homo sapiens
MLENYRNLVSLGVSISNPDLVTSLEQRKEPYNLKIHETAARPPAVCSHFTQNLWTVQGIEDSFHKLIPKGHEKRGHENLRKTCKSINECKVQKGGYNRINQCLLTTQKKTIQSNICVKVFHKFSNSNKDKIRYTGDKTFKCKECGKSFHVLSRLTQHKRIHTGENPYTCEECGKAFNWSSILTKHKRIHAREKFYKCEECGKGFTRSSHLTKHKRIHTGEKPYICEKCGKAFNQSSTLNLHKRIHSAQKYYKCEECGKAFKWSSSLNEHKRIHAGEKPFSCEECGNVFTTSSDFAKHKRIHTGEKPYKCEECGKSFNRSTTLTTHKRIHTGEKPYTCEECGKAFNWSSTLNVHKRIHSGKNPYKCEDCGKAFKVFANLHNHKKIHTGEKPYICKQCGKAFKQSSHLNKHKKIHTVDKPYKCKECGKAFKQYSNLPQHKRTHTGGKF

SEQ ID NO: 22580 - protein, 451 aa, Homo sapiens
MRVQDTSGTYYWHIPTGTTQWEPPGRASPSQGSSPQEESQLTWTGFAHGEGFEDGEFWKDEPSDEAPMELGLKEPEEGTLTFPAQSLSPEPLPQEEEKLPPRNTNPGIKCFAVRSLGWVEMTEEELAPGRSSVAVNNCIRQLSYHKNNLHDPMSGGWGEGKDLLLQLEDETLKLVEPQSQALLHAQPIISIRVWGVGRDSGRERDFAYVARDKLTQMLKCHVFRCEAPAKNIATSLHEICSKIMAERRNARCLVNGLSLDHSKLVDVPFQVEFPAPKNELVQKFQVYYLGNVPVAKPVGVDVINGALESVLSSSSREQWTPSHVSVAPATLTILHQQTEAVLGECRVRFLSFLAVGRDVHTFAFIMAAGPASFCCHMFWCEPNAASLSEAVQAACMLRYQKCLDARSQASTSCLPAPPAESVARRVGWTVRRGVQSLWGSLKPKRLGAHTP

SEQ ID NO: 22581 - protein, 374 aa, Homo sapiens
MAASAAAAELQASGGPRHPVCLLVLGMAGSGKTTFVQRLTGHLHAQGTPPYVINLDPAVHEVPFPANIDIRDTVKYKEVMKQYGLGPNGGIVTSLNLFATRFDQVMKFIEKAQNMSKYVLIDTPGQIEVFTWSASGTIITEALASSFPTVVIYVMDTSRSTNPVTFMSNMLYACSILYKTKLPFIVVMNKTDIIDHSFAVEWMQDFEAFQDALNQETTYVSNLTRSMSLVLDEFYSSLRVVGVSAVLGTGLDELFVQVTSAAEEYEREYRPEYERLKKSLANAESQQQREQLERLRKDMGSVALDAGTAKDSLSPVLHPSDLILTRGTLDEEDEEADSDTDDIDHRVTEESHEEPAFQNFMQESMAQYWKRNNK

SEQ ID NO: 22582 - protein, 1991 aa, Homo sapiens
MAARLLAPPGPDSFKPFTPESLANIERRIAESKLKKPPKADGSHREDDEDSKPKPNSDLEAGKSLPFIYGDIPQGLVAVPLEDFDPYYLTQKTFVVLNRGKTLFRFSATPALYILSPFNLIRRIAIKILIHSVFSMIIMCTILTNCVFMTFSNPPDWSKNVEYTFTGIYTFESLVKIIARGFCIDGFTFLRDPWNWLDFSVIMMAYITEFVNLGNVSALRTFRVLRALKTISVIPGLKTIVGALIQSVKKLSDVMILTVFCLSVFALIGLQLFMGNLRNKCVVWPINFNESYLENGTKGFDWEEYINNKTNFYTVPGMLEPLLCGNSSDAGQCPEGYQCMKAGRNPNYGYTSFDTFSWAFLALFRLMTQDYWENLYQLTLRAAGKTYMIFFVLVIFVGSFYLVNLILAVVAMAYEEQNQATLEEAEQKEAEFKAMLEQLKKQQEEAQAAAMATSAGTVSEDAIEEEGEEGGGSPRSSSEISKLSSKSAKERRNRRKKRKQKELSEGEEKGDPEKVFKSESEDGMRRKAFRLPDNRIGRKFSIMNQSLLSIPGSPFLSRHNSKSSIFSFRGPGRFRDPGSENEFADDEHSTVEESEGRRDSLFIPIRARERRSSYSGYSGYSQGSRSSRIFPSLRRSVKRNSTVDCNGVVSLIGGPGSHIGGRLLPEVKIDKAATDDSATTEVEIKKKGPGSLLVSMDQLASYGRKDRINSIMSVVTNTLVEELEESQRKCPPCWYKFANTFLIWECHPYWIKLKEIVNLIVMDPFVDLAITICIVLNTLFMAMEHHPMTPQFEHVLAVGNLVFTGIFTAEMFLKLIAMDPYYYFQEGWNIFDGFIVSLSLMELSLADVEGLSVLRSFRLLRVFKLAKSWPTLNMLIKIIGNSVGALGNLTLVLAIIVFIFAVVGMQLFGKSYKECVCKINQDCELPRWHMHDFFHSFLIVFRVLCGEWIETMWDCMEVAGQAMCLIVFMMVMVIGNLVVLNLFLALLLSSFSADNLAATDDDGEMNNLQISVIRIKKGVAWTKLKVHAFMQAHFKQREADEVKPLDELYEKKANCIANHTGADIHRNGDFQKNGNGTTSGIGSSVEKYIIDEDHMSFINNPNLTVRVPIAVGESDFENLNTEDVSSESDPEGSKDKLDDTSSSEGSTIDIKPEVEEVPVEQPEEYLDPDACFTEGCVQRFKCCQVNIEEGLGKSWWILRKTCFLIVEHNWFETFIIFMILLSSGALAFEDIYIEQRKTIRTILEYADKVFTYIFILEMLLKWTAYGFVKFFTNAWCWLDFLIVAVSLVSLIANALGYSELGAIKSLRTLRALRPLRALSRFEGMRVVVNALVGAIPSIMNVLLVCLIFWLIFSIMGVNLFAGKYHYCFNETSEIRFEIEDVNNKTECEKLMEGNNTEIRWKNVKINFDNVGAGYLALLQVATFKGWMDIMYAAVDSRKPDEQPKYEDNIYMYIYFVIFIIFGSFFTLNLFIGVIIDNFNQQKKKFGGQDIFMTEEQKKYYNAMKKLGSKKPQKPIPRPLNKIQGIVFDFVTQQAFDIVIMMLICLNMVTMMVETDTQSKQMENILYWINLVFVIFFTCECVLKMFALRHYYFTIGWNIFDFVVVILSIVGMFLADIIEKYFVSPTLFRVIRLARIGRILRLIKGAKGIRTLLFALMMSLPALFNIGLLLFLVMFIFSIFGMSNFAYVKHEAGIDDMFNFETFGNSMICLFQITTSAGWDGLLLPILNRPPDCSLDKEHPGSGFKGDCGNPSVGIFFFVSYIIISFLIVVNMYIAIILENFSVATEESADPLSEDDFETFYEIWEKFDPDATQFIEYCKLADFADALEHPLRVPKPNTIELIAMDLPMVSGDRIHCLDILFAFTKRVLGDSGELDILRQQMEERFVASNPSKVSYEPITTTLRRKQEEVSAVVLQRAYRGHLARRGFICKKTTSNKLENGGTHREKKESTPSTASLPSYDSVTKPEKEKQQRAEEGRRERAKRQKEVRESKC

SEQ ID NO: 22583 - protein, 627 aa, Homo sapiens
MAATEISVLSEQFTKIKELELMPEKGLKEEEKDGVCREKDHRSPSELEAERTSGAFQDSVLEEEVELVLAPSEESEKYILTLQTVHFTSEAVELQDMSLLSIQQQEGVQVVVQQPGPGLLWLEEGPRQSLQQCVAISIQQELYSPQEMEVLQFHALEENVMVASEDSKLAVSLAETTGLIKLEEEQEKNQLLAERTKEQLFFVETMSGDERSDEIVLTVSNSNVEEQEDQPTAGQADAEKAKSTKNQRKTKGAKGTFHCDVCMFTSSRMSSFNRHMKTHTSEKPHLCHLCLKTFRTVTLLRNHVNTHTGTRPYKCNDCNMAFVTSGELVRHRRYKHTHEKPFKCSMCKYASVEASKLKRHVRSHTGERPFQCCQCSYASRDTYKLKRHMRTHSGEKPYECHICHTRFTQSGTMKIHILQKHGENVPKYQCPHCATIIARKSDLRVHMRNLHAYSAAELKCRYCSAVFHERYALIQHQKTHKNEKRFKCKHCSYACKQERHMTAHIRTHTGEKPFTCLSCNKCFRQKQLLNAHFRKYHDANFIPTVYKCSKCGKGFSRWILWVGNSEVAELGGPGSGPLLRLQSGCPPGLHHPKAGLGPEDPLPGQLRHTTAGTGLSSLLQGPLCRAA

SEQ ID NO: 22584 - protein, 828 aa, Homo sapiens
MNSDQDVALKLAQERAEIVAKYDRGREGAEIEPWEDADYLVYKVTDRFGFLHEEELPDHNVAVERQKHLEIERTTKWLKMLKGWEKYKNTEKFHRRIYKGIPLQLRGEVWALLLEIPKMKEETRDLYSKLKHRARGCSPDIRQIDLDVNRTFRDHIMFRDRYGVKQQSLFHVLAAYSIYNTEVGYCQGMSQITALLLMYMNEEDAFWALVKLFSGPKHAMHGFFVQGFPKLLRFQEHHEKILNKFLSKLKQHLDSQEIYTSFYTMKWFFQCFLDRTPFTLNLRIWDIYIFEGERVLTAMSYTILKLHKKHLMKLSMEELVEFFQETLAKDFFFEDDFVIEQLQISMTELKRAKLDLPEPGKEDEYPKKPLGQLPPELQSWGVHHLSNGQRSVGRPSPLASGRRESGAPHRRHEHSPHPQSRTGTPERAQPPRRKSVEEESKKLKDEADFQRKLPSGPQDSSRQYNHAAANQNSNATSNIRKEFVPKWNKPSDVSATERTAKYTMEGKGRAAHPALAVTVPGPAEVRVSNVRPKMKALDAEDGKRGSTASQYDNVPGPELDSGASVEEALERAYSQSPRHALYPPSPRKHAEPSSSPSKVSNKFTFKVQPPSHARYPSQLDGEARGLAHPPSYSNPPVYHGNSPKHFPTANSSFASPQFSPGTQLNPSRRPHGSTLSVSASPEKSYSRPSPLVLPSSRIEVLPVDTGAGGYSGNSGSPKNGKLIIPPVDYLPDNRTWSEVSYTYRPETQGQSWTRDASRGNLPKYSAFQLAPFQDHGLPAVSVDSPVRYKASPAAEDASPSGYPYSGPPPPAYHYRNRDGLSIQESVLL

SEQ ID NO: 22585 - protein, 315 aa, Homo sapiens
MRQNNNITEFVLLGFSQYPDVQNALFVMFLLIYIVTMVGNLLIVVSIIASPFLGSPVYFFLACLSFIDAVYSTTISPVLIVDLLCDKKTISFPACMGQLFIEHLFGDTDVFLLVVMAYDRYVATCKPLRYLTIMNUQVCILLLVVAVTGGFLHSVFQILVVYSLPFCGPNVIYHFFCNIYPLLDLECTDTYFVGLAVVFNGGAICMVIFTLLLISYGVILNSLKTYSPEGRHKAPFICSSHFIMVILFFVPCIFLYVRPVSNFPIDKFLTVFYSVITPKLNPFIYMLRNSEMRNAIENLLGYQSGKTGFRCSKLN

SEQ ID NO: 22586 - protein, 331 aa, Homo sapiens
MDRAAVARVGAVASASVCALVAGVVLAQYIFTLKRKTGRKTKIIEMMPEFQKSSVRIKNPTRVEEIICGLIKGGAAKLQIITDFDMTLSRFSYKGKRCPTCHNIIDNCKLVTDECRKKLLQLKEKYYAIEVDPVLTVEEKYPYMVEWYTKSHGLLVQQALPKAKLKEIVAESDVMLKEGYENFFDKLQQHSIPVFIFSAGIGDVLEEVIRQAGVYHPNVKVVSNFMDFDETGVLKGFKGELIHVFNKHDGALRNTEYFNQLKDNSNIILLGDSQGDLRMADGVANVEHILKIGYLNDRVDELLEKYMDSYDIVLVQDESLEVANSILQKIL

SEQ ID NO: 22587 - protein, 190 aa, Homo sapiens
AAPPKAVLKLEPPWINVLQEDSVTLTCQGARSPESDSIQWFHNGNLIPTHTQPSYRFKANNNDSGEYTCQTGQTSLSDPVHLTVLSEWLVLQTPHLEFQEGETIMLRCHSWKDKPLVKVTFFQNGKSQKFSHLDPTFSIPQANHSHSGDYHCTGNIGYTLFSSKPVTITVQAWAALHQWGSLWLWSLRLL

SEQ ID NO: 22588 - protein, 1153 aa, Homo sapiens
MSLKPQQQQQQQQQQQQQQQQQQQQQQQPPPAAANVRKPGGSGLLASPAAAPSPSSSSVSSSSATAPSSVVAATSGGGRPGLGRGRNSNKGLPQSTISFDGIYANMRMVHILTSVVGSKCEVQVKNGGIYEGVFKTYSPKCDLVLDAAHEKSTESSSGPKREEIMESILFKCSDFVVVQFKDMDSSYAKRDAFTDSAISAKVNGEHKEKDLEPWDAGELTANEELEALENDVSNGWDPNDMFRYNEENYGVVSTYDSSLSSYTVPLERDNSEEFLKREARANQLAEEIESSAQYKARVALENDDRSEEEKYTAVQRNSSEREGHSINTRENKYIPPGQRNREVISWGSGRQNSPRMGQPGSGSMPSRSTSHTSDFNPNSGSDQRVVNGGVPWPSPCPSPSSRPPSRYQSGPNSLPPRAATPTRPPSRPPSRPSRPPSHPSAHGSPAPVSTMPKRMSSEGPPRMSPKAQRHPRNHRVSAGRGSISSGLEFVSHNPPSEAATPPVARTSPSGGTWSSVVSGVPRLSPKTHRPRSPRQNSIGNTPSGPVLASPQAGIIPTEAVAMPIPAASPTPASPASNRAVTPSSEAKDSRLQDQRQNSPAGNKENIKPNETSPSFSKAENKGISPVVSEHRKQIDDLKKFKNDFRLQPSSTSESMDQLLNKNREGEKSRDLIKDKIEPSAKDSFIENSSSNCTSGSSKPNSPSISPSILSNTEHKRGPEVTSQGVQTSSPACKQEKDDKEEKKDAAEQVRKSTLNPNAKEFNPRSFSQPKPSTTPTSPRPQAQPSPSMVGHQQPTPVYTQPVCFAPNMMYPVPVSPGVQPLYPIPMTPMPVNQAKTYRAVPNMPQQRQDQHHQSAMMHPASAAGPPIAATPPAYSTQYVAYSPQQFPNQPLVQHVPHYQSQHPHVYSPVIQGNARMMAPPTHAQPGLVSSSATQYGAHEQTHAMYACPKLPYNKETSPSFYFAISTGSLAQQYAHPNATLHPHTPHPQPSATPTGQQQSQHGGSHPAPSPVQHHQHQAAQALHLASPQQQSAIYHAGLAPTPPSMTPASNTQSPQNSFPAAQQTVFTIHPSHVQPAYTNPPHMAHVPQAHVQSGMVPSHPTAHAPMMLMTTQPPGGPQAALAQSALQPIPVSTTAHFPYMTHPSVQAHHQQQL

SEQ ID NO: 22589 - protein, 543 aa, Homo sapiens
MNSHSYNGSVGRPLGSGPGALGRDPPDPEAGHPPQPPHSPGLQVVVAKSEPARPSPGSPRGQPQDQDDDEDDEEDEAGRQRASGKPSNVGHRLGHRRALFEKRKRLSDYALIFGMFGIVVMVTETELSWGVYTKESLYSFALKCLISLSTAILLGLVVLYHAREIQLFMVDNGADDWRIAMTCERVFLISLELAVCAIHPVPGHYRFTWTARLAFTYAPSVAEADVDVLLSIPMFLRLYLLGRVMLLHSKIFTDASSRSIGALNKITFNTRFVMKTLMTICPGTVLLVFSISSWIIAAWTVRVCERYHDKQEVTSNFLGAMWLISITFLSIGYGDMVPHTYCGKGVCLLTGIMGAGCTALVVAVVARKLELTKAEKHVHNFMMDTQLTKRVKNAAANVLRETWLIYKHTRLVKKPDQARVRKHQRKFLQAIHQAQKLRSVKIEQGKLNDQANTLTDLAKTQTVMYDLVSELHAQHEELEARLATLESRLDALGASLQALPGLIAQAIRPPPPPLPPRPGPGPQDQAARSSPCRWTPVAPSDCG

SEQ ID NO: 22590 - protein, 566 aa, Homo sapiens
MVDPRYGMCPLKGASGCPGAERSLLVQSYFEKGPLTFRDVAIEFSLEEWQCLDSAQQGLYRKVMLENYRNLVFLGIALTKPDLITCLEQGKEPWNIKRHEMVAKPPVICSHFPQDLWAEQDIKDSFQEAILKKYGKYGHDNLQLQKGCKSVDECKVHKEHDNKLNQCLITTQSNIFQCDPSAKVFHTFSNSNRHKIRHTRKKPFKCKKCEKSFCMLLHLTQHKRFHITENSYQCKDCGKAFNWFSTLTTHRRIHTGEKPYKCEECGKAFNRSSHLTTHKIIHTGEKPYRCEECGKAFNRSSHLTTHKRIHTGVKPYKCTECGKAFNRSSHLTTHRIIHTGEKPYKCEECGKAFNQSSTLTTHKITHAGEKPYKCEECGKAFYRFSYLTKHKTSHTGEKFYKCEECGKGFNWSSALTKHKRIHTGEKPYKCEECGKAFNESSNLTTHKMIHTGEKPYKCDECGKAFNRSSQLTAHKMIHTGEKPYKCEECGKAFNRSSTLTKHKITHTGEKSYKWEECGKDFNQSLSLIKITHTGEKPYKCEKCGKAFYQSSTLTKHKNSYWRELLL

SEQ ID NO: 22591 - protein, 261 aa, Homo sapiens
MRVQDTSGTYYWHIPTGTTQWEPPGRASPSQGSSPQEESQLTWTGFAHGEGFEDGEFWKDEPSDEAPMELGLKEPEEGTLTFPAQSLSPEPLPQEEEKLPPRNTNPGIKCFAVRSLGWVEMTEEELAPGRSSVAVNNCIRQLSYHKNNLHDPMSGGWGEGKDLLLQLEDETLKLVEPQSQALLHAQPIISIRVWGVGRDSGRDFAYVARDKLTQMLKCHVFRCEAPAKNIATSLHEICSKIMAERRNARCLVNGLSLDHSK

SEQ ID NO: 22592 - protein, 308 aa, Homo sapiens
MNTTLFHPYSFLLLGIPGLESMHLWVGFPFFAVFLTAVLGNITILFVIQTDSSLHHPMFYFLAILSSIDPGLSTSTIPKMLGTFWFTLREISFEGCLTQMFFIHLCTGMESAVLVAMAYDCYVAICDPLCYTLVLTNKVVSVMALAIFLRPLVFVIPFVLFILRLPFCGHQIIPHTYGEHMGIARLSCASIRVNIIYGLCAISILVFDIIAIVISYVQILCAVFLLSSHDARLKAFSTCGSHVCVMLTFYMPAFFSFMTIGLVGIYLTLSTFFWLISMUSFHLLSTLUFMVSEPNRLEHKCUKCFSIN

SEQ ID NO: 22593 - protein, 233 aa, Homo sapiens
MAATASPQPLATEDADSENSSFYYYDYLDEVAFMLCRKDAVVSFGKVFLPVFYSLIFVLGLSGNLLLLMVLLRYVPRRRMVEIYLLNLAISNLLFLVTLPFWGISVAWHWVFGSFLCKMVSTLYTINFYSGIFFISCMSLDKYLEIVHAQPYHRLRTRAKSLLLATIVWAVSLAVSIPDMVFVQTHENPKGVWNCHADFGGHGTIWKLFLRFQQNLLGFLLPLLAMIFFYSRI

SEQ ID NO: 22594 - protein, 138 aa, Homo sapiens
MGRPLLLPLLLLLQPPAFLQPGGSTGSGPSYLYGVTQPKHLSASMGGSVEIPFSFYYPWELAIVPNVRISWRRGHFHGQSFYSTRPPSIHKDYVNRLFLNWTEGQESGFLRISNLRKEDQSVYFCRVELDTRRSGRQQ

SEQ ID NO: 22595 - protein, 395 aa, Homo sapiens
MVSVNAPLGAPVESSYDTSPSEGTNLNAPNSLGVSALCAICGDRATGKHYGASSCDGCKGFFRRSVRKNHMYSCRFSRQCVVDKDKRNQCRYCRLKKCFRAGMKKEAVQNERDRISTRRSSYEDSSLPSINALLQAEVLSRQITSPVSGINGDIRAKKIASIADVCESMKEQLLVLVEWAKYIPAFCELPLDDQVALLRAHAGEHLLLGATKRSMVFKDVLLLGNDYIVPRHCPELAEMSRVSIRILDELVLPFQELQIDDNEYAYLKAIIFFDPDAKGLSDPGKIKRLRSQVQVSLEDYINDRQYDSRGRFGELLLLLPTLQSITWQMIEQIQFIKLFGMAKIDNLLQEMLLGGPCQAQEGRGWSGDSPGDRPHTVSSPLSSLASPLCRFGQVA

SEQ ID NO: 22596 - protein, 1068 aa, Homo sapiens
MVDLESEVPPLPPRYRFRDLLLGDQGWQNDDRVQVEFYMNENTFKERLKLFFIKNQRSSLRIRLFNFSLKLLSCLLYIIRVLLENPSQGNEWSHIFWVNRSLPLWGLQVSVALISLFETILLGYLSYKGNIWEQILRIPFILEIINAVPFIISIFWPSLRNLFVPVFLNCWLAKHALENMINDLHRAIQRTQSAMFNQVLILISTLLCLIFTCICGIQHLERIGKKLNLFDSLYFCIVTFSTVGFGDVTPETWSSKLFVVAMICVALVVLPIQFEQLAYLWMERQKSGGNYSRHRAQTEKHVVLCVSSLKIDLLMDFLNEFYAHPRLQDYYVVILCPTEMDVQVRRVLQIPMWSQRVIYLQGSALKDQDLLRAKMDDAEACFILSSRCEVDRTSSDHQTILRAWAVKDFAPNCPLYVQILKPENKFHIKFADHVVCEEEFKYAMLALNCICPATSTLITLLVHTSRGQFGVCLIGVRREDNKNILLNPGPRYIMNSTDICFYINITKEENSAFKNQDQQRKSNVSRSFYHGPSRLPVHSIIASMGTVAIDLQDTSCRSASGPTLSLPTEGSKEIRRPSIAPVLEVADTSSIQTCDLLSDQSEDETTPDEEMSSNLEYAKGYPPYSPYIGSSPTFCHLLHEKVPFCCLRLDKSCQHNYYEDAKAYGFKNKLIIVAAETAGNGLYNFIVPLRAYYRPKKELNPIVLLLDNPLDDLLRCGVTFAANMVVVDKESTMSAEEDYMADAKTIVNVQTLFRLFSSLSIITELTHPANMRFMQFRAKDCYSLALSKLEKKERERGSNLAFMFRLPFAAGRVFSISMLDTLLYQSFVKDYMISITRLLLGLDTTPGSGFLCSMKITADDLWIRTYARLYQKLCSSTGDVPIGIYRTESQKLTTSESRKIASQSQISISVEEWEDTKDSKEQGHHRSNHRNSTSSDQSDHPLLRRKSMQWARRLSRKGPKHSGKTAEKITQQRLNLYRRSERQELAELVKNRMKHLGLSTVGYDEMNDHQSTLSYILINPSPDTRIELNDVVYLIRPDPLAYLPNSEPSRRNSICNVTGQDSREETQL

SEQ ID NO: 22597 - protein, 254 aa, Homo sapiens
MWLLVSVILISRISSVGGEAMFCDFPKINHGILYDEEKYKPFSQVPTGEVFYYSCEYNFVSPSKSFWTRITCAEEGWSPTPKCLRQTHLEGDTVQIICNTGYRLQNNENNISCVERGWSTPPKCRSTISAEKCGPPPPIDNGDITSFLLSVYAPGSSVEYQCQNLYQLEGNNQITCRNGQWSEPPKCLDPCVISQEIMEKYNIKLKWTNQQKLYSRTGDIVEFVCKSGYHPTKSHSFRAMCQNGKLVYPSCEEK

SEQ ID NO: 22598 - protein, 883 aa, Homo sapiens
MKKHRRALALVSCLFLCSLVWLPSWRVCCKESSSASASSYYSQDDNCALENEDVQFQKKNTESKKLSPPVVETLPTVDLHEESSNAVVDSETVENISSSSTSEITPISKLDEIEKSGTIPIAKPSETEQSETDCDVGEALDASAPIEQPSFVSPPDSLVGQHIENVSSSHGKGKITKSEFESKVSASEQGGGDPKSALNASDNLKNESSDYTKPGDIDPTSVASPKDPEDIPTFDEWKKKVMEVEKEKSQSMHASSNGGSHATKKVQKNRNNYASVECGAKILAANPEAKSTSAILIENMDLYMLNPCSTKIWFVIELCEPIQVKQLDIANYELFSSTPKDFLVSISDRYPTNKWIKLGTFHGRDERNVQSFPLDEQMYAKYVKMFIKYIKVELLSHFGSEHFCPLSLIRVFGTSMVEEYEEIADSQYHSERQELFDEDYDYPLDYNTGEDKSSKNLLGSATNAILNMVNIAANILGAKTEDLTEGNKSISENATATAAPKMPESTPVSTPVPSPEYVTTEVHTHDMEPSTPDTPKESPIVQLVQEEEEEASPSTVTLLGSGEQEDESSPWYRKQMEEMQKAFNKTIVKLQNTSRIAEEQDQRQTEAIQLLQAQLTNMTQLVSNLSATVAELKREVSDRQSYLVISLVLCVVLGLMLCMQRCRNTSQFDGDYISKLPKSNQYPSPKRCFSSYDDMNLKRRTSFPLMRSKSLQLTGKEVDPNDLYIVEPLKFSPEKKKKRCKYKIEKIETIKPEEPLHPIANGDIKGRKPFTNQRDFSNMGEVYHSSYKGPPSEGSSETSSQSEESYFCGISACTSLCNGQSQKTKTEKRALKRRRSKVQDQGKLIKTLIQTKSGSLPSLHDIIKGNKEITVGTFGVTAVSGHI

SEQ ID NO: 22599 - protein, 299 aa, Homo sapiens
MFTSSRMSSFNRHMKTHTSEKPHLCHLCLKTFRTVTLLRNHVNTHTGTRPYKCNDCNMAFVTSGELVRHRRYKHTHEKPFKCSMCKYASVEASKLKRHVRSHTGERPFQCCQCSYASRDTYKLKRHMRTHSGEKPYECHICHTRFTQSGTMKIHILQKHGENVPKYQCPHCATIIARKSDLRVHMRNLHAYSAAELKCRYCSAVFHERYALIQHQKTHKNEKRFKCKHCSYACKQERHMTAHIRTHTGEKPFTCLSCNKCFRQKQLLNAHFRKYHDANFIPTVYKCSKCGKGFSRWVLY

SEQ ID NO: 22600 - protein, 982 aa, Homo sapiens
MAELEHLGGKRAESARMRRAEQLRRWRGSLTEQEPAERRGAGRQPLTRRGSPRVRFEDGAVFLAACSSGDTDEVRKLLARGADINTVNVDGLTALHQACIDENLDMVKFLVENRANVNQQDNEGWTPLHAAASCGYLNIAEYFINHGASVGIVNSEGEVPSDLAEEPAMKDLLLEQVKKQGVDLEQSRKEEEQQMLQDARQWLNSGKIEDVRQARSGATALHVAAAKGYSEVLRLLIQAGYELNVQDYDGWTPLHAAAHWGVKEACSILAEALCDMDIRNKLGQTPFDVADEGLVEHLELLQKKQNVLRSEKETRNKLIESDLNSKIQSGFFKNKEKMLYEEETPKSQEMEEENKESSSSSSEEEEGEDEASESETEKEADKKPEAFVNHSNSESKSSITEQIPAPAQNTFSASSARRFSSGLFNKPEEPKDESPSSWRLGLRKTGSHNMLSEVANSREPIRDRGSSIYRSSSSPRISALLDNKDKERENKSYISSLAPRKLNSTSDIEEKENRESAVNLVRSGSYTRQLWRDEAKGNEIPQTIAPSTYVSTYLKRTPHKSQADTTAEKTADNVSSSTPLCVITNRPLPSTANGVTATPVLSITGTDSSVEAREKRRSYLTPVRDEEAESLRKARSRQARQTRRSTQGVTLTDLQEAERTFSRSRAERQAQEQPREKPTDTEGLEGSPEKHEPSAVPATEAGEGQQPWGRSLDEEPICHRLRCPAQPDKPTTPASPSTSRPSLYTSSHLLWTNRFSVPDSESSETTTNTTTAKEMDKNENEEADLDEQSSKRLSIRERRRPKERRRGTGINFWTKDEDETDGSEEVKETWHERLSRLESGGSNPTTSDSYGDRASARARREAREARLATLTSRVEEDSNRDYKKLYESALTENQKLKTKLQEAQLELADIKSKLEKVAQQKQEKTSDRSSVLEMEKRERRALERKMSEMEEEMKVLTELKSDNQRLKDENGALIRVISKLSK

SEQ ID NO: 22601 - protein, 359 aa, Homo sapiens
MAASSSEISEMKGVEESPKVPGEGPGHSEAETGPPQVLAGVPDQPEAPQPGPNTTAAPVDSGPKAGLAPETTETPAGASETAQATDLSLSPGGESKANCSPEDPCQETVSKPEVSKEATADQGSRLESAAPPEPAPEPAPQPDPRPDSQPTPKPALQPELPTQEDPTPEILSESVGEKQENGAVVPLQAGDGEEGPAPEPHSPPSKKSPPANGAPPRVLQQLVEEDRMRRAHSGHPGSPRGSLSRHPSSQLAGPGVEGGEGTQKPRDYIILAILSCFCPMWPVNIVAFAYAVMPAAGGRGRGPASGPGSQALKHRGAGGGSPHHHRLLRHQLRRVPALVAYVPCSGPWRHCGQYGGASV

SEQ ID NO: 22602 - protein, 706 aa, Homo sapiens
MSVPSSLSQSAINANSHGGPALSLPLPLHAAHNQLLNAKLQATAVGPKDLRSAMGEGGGPEPGPANAKWLKEGQNQLRRAATAHRDQNRNVTLTLAEEASQEPEMAPLGPKGLIHLYSELELSAHNAANRGLRGPGLIISTQEQGPDEGEEKAAGEAEEEEEDDDDEEEEEDLSSPPGLPEPLESVEAPPRPQALTDGPREHSKSASLLFGMRNSAASDEDSSWATLSQGSPSYGSPEDTDSFWNPNAFETDSDLPAGWMRVQDTSGTYYWHIPTGTTQWEPPGRASPSQGSSPQEESQLTWTGFAHGEGFEDGEFWKDEPSDEAPMELGLKEPEEGTLTFPAQSLSPEPLPQEEEKLPPRNTNPGIKCFAVRSLGWVEMTEEELAPGRSSVAVNNCIRQLSYHKNNLHDPMSGGWGEGKDLLLQLEDETLKLVEPQSQALLHAQPIISIRVWGVGRDSGRERDFAYVARDKLTQMLKCHVFRCEAPAKNIATSLHEICSKIMAERRNARCLVNGLSLDHSKLVDVPFQVEFPAPKNELVQKFQVYYLGNVPVAKPVGVDVINGALESVLSSSSREQWTPSHVSVAPATLTILHQQTEAVLGECRVRFLSFLAVGRDVHTFAFIMAAGPASFCCHMFWCEPNAASLSEAVQAACMVEQEELVQARPHPPGPSRGRRRKGLVQAWVPSPCSMGTSAVLISLIKSVCT

SEQ ID NO: 22603 - protein, 772 aa, Homo sapiens
MAAESALQVVEKLQARLAANPDPKKLLKYLKKLSTLPITVDILAETGVGKTVNSLRKHEHVGSFARDLVAQWKKLVPVERNAEPDEQDFEKSNSRKRPRDALQKEEEMEGDYQETWKATGSRSYSPDHRQKKHRKLSELERPHKVSHGHERRDERKRCHRMSPTYSSDPESSDYGHVQSPPSCTSPHQMYVDHYRSLEEDQEPIVSHQKPGKGHSNAFQDRLGASQERHLGEPHGKGVVSQNKEHKSSHKDKRPVDAKSDEKASVVSREKSHKALSKEENRRPPSGDNAREKPPSSGVKKEKDREGSSLKKKCLPPSEAASDNHLKKPKHRDPEKAKLDKSKQGLDSFDTGKGAGDLLPKVKEKGSNNLKTPEGKVKTNLDRKSLGSLPKVEETDMEDEFEQPTMSFESYLSYDQPRKKKKKIVKTSATALGDKGLKKNDSKSTGKNLDSVQKLPKVNKTKSEKPAGADLAKLRKVPDVLPVLPDLPLPAIQANYRPLPSLELISSFQPKRKAFSSPQEEEEAGFTGRRMNSKMQVYSGSKCAYLPKMMTLHQQCIRVLKNNIDSIFEVGGVPYSVLEPVLERCTPDQLYRIEEYNHVLIEETDQLWKVHCHRDFKEERPEEYESWREMYLRLQDAREQRLRVLTKNIQFAHANKPKGRQAKMAFVNSVAKPPRDVRRRQEKFGTGGAAVPEKIKIKPAPYPMGSSHASASSISFNPSPEEPAYDGPSTSSAHLAPVVSSTVSYDPRKPTVKKIAPMMAKTIKAFKNRFSRR

SEQ ID NO: 22604 - protein, 513 aa, Homo sapiens
MGRKKIQIQRITDERNRQVTFTKRKFGLMKKAYELSVLCDCEIALIIFNHSNKLFQYASTDMDKVLLKYTEYNEPHESRTNADIIEALHKKHRECESPEVDEVFALTPQTEEKYKKIDEEFDKMMQSYRLASTVPAPNFAMPVTVPVSNQSSLQFSNPSGSLVTPSLVTSSLTDPRLLSPQQPALQRNSVSPGLPQRPASAGAMLGGDLNSANGACPSPVGNGYVSARASPGLLPVANGNSLNKVIPAKSPPPPTHSTQLGAPSRKPDLRVITSQAGKGLMHHLNNAQRLGVSQSTHSLTTPVVSVATPSLLSQGLPFSSMPTAYNTDYQLTSAELSSLPAFSSPGGLSLGNVTAWQQPQQPQQPQQPQPPQQQPPQPQQPQPQQPQQPQQPPQQQSHLVPVSLSNLIPGSPLPHVGAALTVTTHPHISIKSEPVSPSRERSPAPPPPAVFPAARPEPGDGLSSPAGGSYETGDRDDGRGDFGPTLGLLRPAPEPEAEGSAVKRMRLDTWTLK

SEQ ID NO: 22605 - protein, 517 aa, Homo sapiens
MHAALAGPLLAALLATARARPQPPDGGQCRPPGSQRDLNSFLWTIRRDPPAYLFGTIHVPYTRVWDFIPDNSKAAFQASTRVYFELDLTDPYTISALASCQLLPHGENLQDVLPHELYWRLKRHLDYVKLMMPSWMTPAQRGKGLYADYLFNAIAGNWERKRPVWVMLMVNSLTERDVRFRGVPVLDLYLAQQAEKMKKTTGAVEQVEEQCHPLNNGLNFSQVLFALNQTLLQQESVRAGSLQASYTTEDLIKHYNCGDLSAVIFNHDTSQLPNFINTTLPPHEQVTAQEIDSYFRQELIYKRNERMGKRVMALLRENEDKICFFAFGAGHFLGNNTVIDILRQAGLEVDHTPAGQAIHSPAPQSPAPSPEGTSTSPAPVTPAAAVPEAPSVTPTAPPEDEDPALSPHLLLPDSLSQLEEFGRQRKWHKRQSTHQRPRQFNDLWVRIEDSTTASPPPLPLQPTHSSGTAKPPFQLSDQLQQQDPPGPASSSAPTLGLLPAIATTIAVCFLLHSLGPS

SEQ ID NO: 22606 - protein, 125 aa, Homo sapiens
MSLGKRKPSNFYLANFLGKECILSGIMSVNGKKVLHMDRNPYYGGESASITPLEDLYKRFKIPGSPPESMGRGRDWNVDLIPKFLMANGQLVKMLLYTEVTRYLDFKVTEGSFVYKGGKIYKVPS

SEQ ID NO: 22607 - protein, 490 aa, Homo sapiens
MSAMFSQDFFLAIILQDSSADSFWNPNAFETDSDLPAGWMRVQDTSGTYYWHIPTGTTQWEPPGRASPSQGSSPQEESQLTWTGFAHGEGFEDGEFWKDEPSDEAPMELGLKEPEEGTLTFPAQSLSPEPLPQEEEKLPPRNTNPGIKCFAVRSLGWVEMTEEELAPGRSSVAVNNCIRQLSYHKNNLHDPMSGGWGEGKDLLLQLEDETLKLVEPQSQALLHAQPIISIRVWGVGRDSGRERDFAYVARDKLTQMLKCHVFRCEAPAKNIATSLHEICSKIMAERRNARCLVNGLSLDHSKLVDVPFQVEFPAPKNELVQKFQVYYLGNVPVAKPVGVDVINGALESVLSSSSREQWTPSHVSVAPATLTILHQQTEAVLGECRVRFLSFLAVGRDVHTFAFIMAAGPASFCCHMFWCEPNAASLSEAVQAACMLRYQKCLDARSQASTSCLPAPPAESVARRVGWTVRRGVQSLWGSLKPKRLGAHTP

SEQ ID NO: 22608 - protein, 574 aa, Homo sapiens
MSQNGYFEDSSYYKCDTDDTFEAREEILGDEAFDTANSSIVSGESIRFFVNVNLEMQATNTENEATSGGCVLLHTSRKYLKLKNFKEEIRAHRDLDGFLAQASIVLNETATSLDNVLRTMLRRFARDPDNNEPNCNLDLLMAMLFTDAGAPMRGKVHLLSDTIQGVTATVTGVRYQQSWLCIICTMKALQKRHVCISRLVRPQNWGENSCEVRFVILVLAPPKMKSTKTAMEVARTFATMFSDIAFRQKLLETRTEEEFKEALVHQRQLLTMVSHGPVAPRTKERSTVSLPAHRHPEPPKCKDFVPFGKGIREDIARRFPLYPLDFTDGIIGKNKAVGKYITTTLFLYFACLLPTIAFGSLNDENTDGAIDVQKTIAGQSIGGLLYALFSGQPLVILLTTAPLALYIQVIRVICDDYDLDFNSFYAWTGLWNSFFLALYAFFNLSLVMSLFKRSTEEIIALFISITFVLDAVKGTVKTCQASAPASTPASTLPSTPASSPAPRSCPRPHTQARRPPCSASSSCWARSGWATPSTNSRRAPTCTPACERSCPTAPCPSRCSPSPSSAPMASGKSR

SEQ ID NO: 22609 - protein, 499 aa, Homo sapiens
MVSEPVAHGVAEEEMASSTSDSGEESDSSSSSSSTSDSSSSSSTSGSSSGSGSSSSSSGSTSSRSRLYRKKRVPEPSRRARRAPLGTNFVDRLPQAVRNRVQALRNIQDECDKVDTLFLKAIHDLERKYAELNKPLYDRRFQIINAEYEPTEEECEWNSEDEEFSSDEEVQDNTPSEMPPLEGEEEENPKENPEVKAEEKEVPKEIPEVKDEEKEVPKEIPEVKAEEKADSKDCMEATPEVKEDPKEVPQVKADDKEQPKATEAKARAAVRETHKRVPEERLQDSVDLKRARKGKPKREDPKGIPDYWLIVLKNVDKLGPMIQKYDEPILKFLSDVSLKFSKPGQPVSYTFEFHFLPNPYFRNEVLVKTYIIKAKPDHNDPFFSWGWEIEDCKGCKIDWRRGKDVTVTTTQSRTTATGEIEIQPRVVPNASFFNFFSPPEIPMIGKLEPREDAILDEDFEIGQILHDNVILKSIYYYTGEVNGTYYQFGKHYGNKKYRK

SEQ ID NO: 22610 - protein, 124 aa, Homo sapiens
MAATASPQPLATEDADSENSSFYYYDYLDEVAFMLCRKDAVVSFGKVFLPVFYSLIFVLGLSGNLLLLMVLLRYVPRRRMVEIYLLNLAISNLLFLVTLPFWGISVAWHWVFGSFLCKMVSTLY

SEQ ID NO: 22611 - protein, 1031 aa, Homo sapiens
MLSKSVPVSGINCLLDRSDTDGNVSQSSAIDLRKRCSQLEGHSGTRVGSSLRQTFSFLSGMTGKAKTREKEKMKEAKDARYTNGHLFTTISVSGMTMCYACNKSITAKEALICPTCNVTIHNRCKDTLANCTKVKQKQQKAALLKNNTALQSVSLRSKTTIRERPSSAIYPSDSFRQSLLGSRRGRSSLSLAKSVSTTNIAGHFNDESPLGLRRILSQSTDSLNMRNRTLSVESLIDEAEVIYSELMSDFEMDEKDFAADSWSLAVDSSFLQQHKKEVMKQQDVIYELIQTELHHVRTLKIMTRLFRTGMLEELHLEPGVVQGLFPCVDELSDIHTRFLSQLLERRRQALCPGSTRNFVIHRLGDLLISQFSGPSAEQMCKTYSEFCSRHSKALKLYKELYARDKRFQQFIRKVTRPAVLKRHGVQECILLVTQRITKYPLLISRILQHSHGIEEERQDLTTALGLVKELLSNVDEGIYQLEKGARLQEIYNRMDPRAQTPVPGKGPFGREELLRRKLIHDGCLLWKTATGRFKDVLVLLMTDVLVFLQEKDQKYIFPTLDKPSVVSLQNLIVRDIANQEKGMFLISAAPPEMYEVHTASRDDRSTWIRVIQQSVRTCPSREDFPLIETEDEAYLRRIKMELQQKDRALVELLREKVGLFAEMTHFQAEEDGGSGMALPTLPRGLFRSESLESPRGERLLQDAIREVEGLKDLLVGPGVELLLTPREPALPLEPDSGGNTSPGVTANGEARTFNGSIELCRADSDSSQRDRNGNQLRSPQEEALQRLVNLYGLLHGLQAAVAQQDTLMEARFPEGPERREKLCRANSRDGEAGRAGAAPVAPEKQATELALLQRQHALLQEELRRCRRLGEERATEAGSLEARLRESEQARALLEREAEEARRQLAALGQTEPLPAEAPWARRPVDPRRRSLPAGDALYLSFNPPQPSRGTDRLDLPVTTRSVHRNFEDRERQELGSPEERLQDSSDPDTGSEEEGSSRLSPPHSPRDFTRMQDIPEETESRDGEAVASES

SEQ ID NO: 22612 - protein, 798 aa, Homo sapiens
MNDLSKIHPMYQFSLKAFSIVFQKAVERAAPDESLRERVANLIDSITFSVYQYTIRGLFECDKLTYLAQLTFQILLMNREVNAVELDFLLRSPVQTGTASPVEFLSHQAWGAVKVLSSMEEFSNLDRDIEGSAKSWKKFVESECPEKEKLPQEWKNKTALQRLCMLRAMRPDRMTYALRDFVEEKLGSKYVVGRALDFATSFEESGPATPMFFILSPGVDPLKDVESQGRKLGYTFNNQNFHNVSLGQGQEVVAEAALDLAAKKGHWVILQNIHLVAKWLSTLEKKLEEHSENSHPEFRVFMSAEPAPSPEGHIIPQGILENSIKITNEPPTGMHANLHKALDNFTQDTLEMCSRETEFKSILFALCYFHAVVAERRKFGPQGWNRSYPFNTGDLTISVNVLYNFLEANAKVPYDDLRYLFGEIMYGGHITDDWDRRLCRTYLGEFIRPEMLEGELSLAPGFPLPGNMDYNGYHQYIDAELPPESPYLYGLHPNAEIGFLTQTSEKLFRTVLELQPRDSQARDGAGATREEKVKALLEEILERVTDEFNIPELMAKVEERTPYIVVAFQECGRMNILTREIQRSLRELELGLKGELTMTSHMENLQNALYFDMVPESWARRAYPSTAGLAAWFPDLLNRIKELEAWTGDFTMPSTVWLTGFFNPQSFLTAIMQSTARKNEWPLDQMALQCDMTKKNREEFRSPPREGAYIHGLFMEGACWDTQAGIITEAKLKDLTPPMPVMFIKAIPADKQDCRSVYSCPVYKTSQRGPTYVWTFNLKTKENPSKWVLAGVALLLQI

SEQ ID NO: 22613 - protein, 488 aa, Homo sapiens
MYHGMNPSNGDGFLEQQQQQQQPQSPQRLLAVILWFQLALCFGPAQLTGGFDDLQVCADPGIPENGFRTPSGGVFFEGSVARFHCQDGFKLKGATKRLCLKHFNGTLGWIPSDNSICVQEDCRIPQIEDAEIHNKTYRHGEKLIITCHEGFKIRYPDLHNMVSLCRDDGTWNNLPICQGCLRPLASSNGYVNISELQTSFPVGTVISYRCFPGFKLDGSAYLECLQNLIWSSSPPRCLALEVCPLPPMVSHGDFVCHPRPCERYNHGTVVEFYCDPGYSLTSDYKYITCQYGEWFPSYQVYCIKSEQTWPSTHETLLTTWKIVAFTATSVLLVLLLVILARMFQTKFKAHFPPRGPPRSSSSDPDFVVVDGVPVMLPSYDEAVSGGLSALGPGYMASVGQGCPLPVDDQSPPAYPGSGDTDTGPGESETCDSVSGSSELLQSLYSPPRCQESTHPASDNPDIIASTAEEVASTSPGSHHAHWVLFLRN

SEQ ID NO: 22614 - protein, 233 aa, Homo sapiens
TLAGPRLPGIREKSRSPGSSQLRLLELRHSTLLKKVQGAAHFGPVWLASFGTVRTVYVAAPALVEELLRQEGPRPERCSFSPWTEHRRCRQRACGLLTAEGEEWQRLRSLLAPLLLRPQAAARYAGTLNNVVCDLVRRLRRQRGRGTGPPALVRDVAGEFYKFGLEGIAAVLLGSRLGCLEAQVPPDTETFIRAVGSVFVSTLLTMAMPHWLRHLVPGPWGRLCRDWDQMFAF

SEQ ID NO: 22615 - protein, 148 aa, Homo sapiens
MKVRKCSTPEEIKKRKKAVIFCLSADKKCIIVEEGKEILVGDVGVTITDPFKHFVGMLPEKDCRYALYDASFETKESRKEELMFFLWAPELAPLKSKMIYASSKDAIKKKFQGIKHECQANGPEDLNRACIAEKLGGSLIVAFEGCPV

SEQ ID NO: 22616 - protein, 580 aa, Homo sapiens
MSLVPATNYIYTPLNQLKGGTIVNVYGVVKFFKPPYLSKGTDYCSVVTIVDQTNVKLTCLLFSGNYEALPIIYKNGDIVRFHRLKIQVYKKETQGITSSGFASLTFEGTLGAPIIPRTSSKYFNFTTEDHKMVEALRVWASTHMSPSWTLLKLCDVQPMQYFDLTCQLLGKAEVDGASFLLKVWDGTRTPFPSWRVLIQDLVLEGDLSHIHRLQNLTIDILVYDNHVHVARSLKVGSFLRIYSLHTKLQSMNSENQTMLSLEFHLHGGTSYGRGIRVLPESNSDVDQLKKDLESANLTANQHSDVICQSEPDDSFPSSGSVSLYEVERCQQLSATILTDHQYLERTPLCAILKQKAPQQYRIRAKLRSYKPRRLFQSVKLHCPKCHLLQEVPHEGDLDIIFQDGATKTPDVKLQNTSLYDSKIWTTKNQKGRKVAVHFVKNNGILPLSNECLLLIEGGTLSEICKLSNKFNSVIPVRSGHEDLELLDLSAPFLIQGTIHHYGCKQCSSLRSIQNLNSLVDKTSWIPSSVAEALGIVPLQYVFVMTFTLDDGTGVLEAYLMDSVSIRGQILPDSSIRSSDG

SEQ ID NO: 22617 - protein, 181 aa, Homo sapiens
MPGKRGLGWWWARLPLCLLLSLYGPWMPSSLGKPKGHPHMNSIRIDGDITLGGLFPVHGRGSEGKPCGELKKEKGIHRLEAMLFALDRINNDPDLLPNITLGARILDTCSRDTHALEQSLTFVQALIEKDGTEVRCGSGGPPIITKPERVVGVIGASGSSVSIMVANILRLFKGACASPSR

SEQ ID NO: 22618 - protein, 235 aa, Homo sapiens
MLKCHVFRCEAPAKNIATSLHEICSKIMAERRNARCLVNGLSLDHSKLVDVPFQVEFPAPKNELVQKFQVYYLGNVPVAKPVGVDVINGALESVLSSSSREQWTPSHVSVAPATLTILHQQTEAVLGECRVRFLSFLAVGRDVHTFAFIMAAGPASFCCHMFWCEPNAASLSEAVQAACMLRYQKCLDARSQASTSCLPAPPAESVARRVGWTVRRGVQSLWGSLKPKRLGAHTP

SEQ ID NO: 22619 - protein, 602 aa, Homo sapiens
MFPAQDALPRSGLNLKEEPLLPAGLGSVRSWMQGAGILDASTAAQSGVGLARAHFEKQPPSNLRKSNFFHFVLAMYDRQGQPVEVERTAFIDFVEKDREPGAEKTNNGIHYRLRLVYNNGLRTEQDLYVRLIDSMSKQAIIYEGQDKNPEMCRVLLTHEIMCSRCCDRKSCGNRNETPSDPVIIDRFFLKFFLKCNQNCLKNAGNPRDMRRFQVVVSTTVSVDGHVLAVSDNMFVHNNSKHGRRARRLDPSEAATPCIKAISPGEGWTTGGATVIVIGDNFFDGLQVVFGNVLVWSELITPHAIRVQTPPRHIPGVVEVTLSYKSKQFCKGCPGRFVYTALNEPTIDYGFQRLQKVIPRHPGDPERLPKEVLLKRAADLAEALYGVPGSNQELLLKRAADVAEALYSTPRAPGPLAPLAPSHPHPAVVGINAFSSPLAIAVGDATPGPEPGYARSCSSASPRGFAPSPGSQQSGYGGGLGAGLGGYGAPGVAGLGVPGSPSFLNGSTATSPFAIMPSSPPLAAASSMSLPAAAPTTSVFSFSPVNMISAVKQRSAFAPVLRPPSSPPQACPRAHGEGLPDQSFEDSDKFHSPARGLQGLAYS

SEQ ID NO: 22620 - protein, 532 aa, Homo sapiens
MDGIVTEVAVGVKRGSDELLSGSVLSSPNSNMSSMVVTANGNDSKKFKGEDKMDGAPSRVLHIRKLPGEVTETEVIALGLPFGKVTNILMLKGKNQAFLELATEEAAITMVNYYSAVTPHLRNQPIYIQYSNHKELKTDNTLNQRAQAVLQAVTAVQTANTPLSGTTVSESAVTPAQSPVLRIIIDNMYYPVTLDVLHQIFSKFGAVLKIITFTKNNQFQALLQYGDPVNAQQAKLALDGQNIYNACCTLRIDFSKLVNLNVKYNNDKSRDYTRPDLPSGDGQPALDPAIAAAFAKETSLLAVPGALSPLAIPNAAAAAAAAAAGRVGMPGVSAGGNTVLLVSNLNEEMVTPQSLFTLFGVYGDVQRVKILYNKKDSALIQMADGNQSQLAMNHLNGQKMYGKIIRVTLSKHQTVQLPREGLDDQGLTKDFGNSPLHRFKKPGSKNFQNIFPPSATLHLSNIPPSVAEEDLRTLFANTGGTVKAFKFFQRDHKMALLQMATVEEAIQALIDLHNYNLGENHHLRVSFSKSTI

SEQ ID NO: 22621 - protein, 579 aa, Homo sapiens
MAAKSDGAAASASPDPEGAAGGARGSAGGRGEAAAAAGPPGVVGAGGPGPRYELRDCCWVLCALLVFFSDGATDLWLAASYYLQNQHTYFSLTLLFVLLPSLVVQLLSFRWFVYDYSEPAGSPGPAVSTKDSVAGGAAISTKDSAGAFRTKEGSPEPGPQPAPSSASAYRRRCCRLCIWLLQTLVHLLQLGQVWRYLRALYLGLQSRWRGERLRRHFYWQMLFESADVSMLRLLETFLRSAPQLVLQLSLLVHRGGAPDLLPALSTSASLVSLAWTLASYQKVLRDSRDDKRPLSYKGAVAQVLWHLFSIAARGLAFALFASVYKLYFGIFIVAHWCVMTFWVIQGETDFCMSKWEEIIYNMVVGIIYIFCWFNVKEGRSRRRMTLYHCIVLLENAALTGFWYSSRNFSTDFYSLIMVCVVASSFALGIFFMCVYYCLLHPNGPMLGPQAPGCIFRKASEPCGPPADAITSPPRSLPRTTGAERDGASAGERAGTPTPPVFQVRPGLPPTPVARTLRTEGPVIRIDLPRKKYPAWDAHFIDRRLRKTILALEYSSPATPRLQYRSVGTSQELLEYETTV

SEQ ID NO: 22622 - protein, 475 aa, Homo sapiens
MTQMRDSFWNPNAFETDSDLPAGWMRVQDTSGTYYWHIPTGTTQWEPPGRASPSQGSSPQEESQLTWTGFAHGEGFEDGEFWKDEPSDEAPMELGLKEPEEGTLTFPAQSLSPEPLPQEEEKLPPRNTNPGIKCFAVRSLGWVEMTEEELAPGRSSVAVNNCIRQLSYHKNNLHDPMSGGWGEGKDLLLQLEDETLKLVEPQSQALLHAQPIISIRVWGVGRDSGRERDFAYVARDKLTQMLKCHVFRCEAPAKNIATSLHEICSKIMAERRNARCLVNGLSLDHSKLVDVPFQVEFPAPKNELVQKFQVYYLGNVPVAKPVGVDVINGALESVLSSSSREQWTPSHVSVAPATLTILHQQTEAVLGECRVRFLSFLAVGRDVHTFAFIMAAGPASFCCHMFWCEPNAASLSEAVQAACMLRYQKCLDARSQASTSCLPAPPAESVARRVGWTVRRGVQSLWGSLKPKRLGAHTP

SEQ ID NO: 22623 - protein, 365 aa, Homo sapiens
MWLLLTMASLISVLGTTHGLFGKLHPGSPEVTMNISQMITYWGYPNEEYEVVTEDGYILEVNRIPYGKKNSGNTDAGYDVWLGNSRGNTWARRNLYYSPDSVEFWAFSFDEMAKYDLPATIDFIVKKTGQKQLHYVGHSQGTTIGFIAFSTNPSLAKRIKTFYALAPVATVKYTKSLINKLRFVPQSLFKFIFGDKIFYPHNFFDQFLATEVCSREMLNLLCSNALFIICGFDSKNFNTSRLDVYLSHNPAGTSVQNMFHWTQAVKSGKFQAYDWGSPVQNRMHYDQSQPPYYNVTAMNVPIAVWNGGKDLLADPQDVGLLLPKLPNLIYHKEIPFYNHLDFIWAMDAPQEVYNDIVSMISEDKK

SEQ ID NO: 22624 - protein, 344 aa, Homo sapiens
MRRPRQGGGGAGGSAAARARAGGLGGGSVPARARGAPAAARAAWLRDLCARMARPPRQHPGVWASLLLLLLTGPAACAASPADDGAGPGGRGPRGRARGDTGADEAVPRHDSSYGTFAGEFYDLRYLSEEGYPFPTAPPVDPFAKIKVDDCGKTKGCFRYGKPGCNAETCDYFLSYRMIGADVEFELSADTDGWVAVGFSSDKKMGGDDVMACVHDDNGRVRIQHFYNVGQWAKEIQRNPARDEEGVFENNRVTCRFKRPVNVPRDETIVDLHLSWYYLFAWGPAIQGSITRHDIDSPPASERVVSIYKYEDIFMPSAAYQTFSSPFCLLLIVALTFYLLMGTP

SEQ ID NO: 22625 - protein, 702 aa, Homo sapiens
MSPRTSLAEDSCLGRHSPVPRPASRSSSPGAKRRHSCAEALVALPPGASPQRSRSPSPQPSSHVAPQDHGSPAGYPPVAGSAVIMDALNSLATDSPCGIPPKMWKTSPDPSPVSAAPSKAGLPRHIYPAVEFLGPCEQGERRNSAPESILLVPPTWPKPLVPAIPICSIPVTASLPPLEWPLSSQSGSYELRIEVQPKPHHRAHYETEGSRGAVKAPTGGHPVVQLHGYMENKPLGLQIFIGTADERILKPHAFYQVHRITGKTVTTTSYEKIVGNTKVLEIPLEPKNNMRATIDCAGILKLRNADIELRKGETDIGRKNTRVRLVFRVHIPESSGRIVSLQTASNPIECSQRSAHELPMVERQDTDSCLVYGGQQMILTGQNFTSESKVVFTEKTTDGQQIWEMEATVDKDKSQPNMLFVEIPEYRNKHIRTPVKVNFYVINGKRKRSQPQHFTYHPVPAIKTEPTDEYDPTLICSPTHGGLGSQPYYPQHPMVAESPSCLVATMAPCQQFRTGLSSPDARYQQQNPAAVLYQRSKSLSPSLLGYQQPALMAAPLSLADAHRSVLVHAGSQGQSSALLHPSPTNQQASPVIHYSPTNQQLRCGSHQEFQHIMYCENFAPGTTRPGPPPVSQGQRLSPGSYPTVIQQQNATSQRAAKNGPPVSDQKEVLPAGVTIKQEQNLDQTYLDDELIDTHLSWIQNIL

SEQ ID NO: 22626 - protein, 205 aa, Homo sapiens
MHFRNFNYSFSSLIACVANSDIFSESETRAKFESLFRTYDKDITFQYFKSFKRVRINFSNPFSAADARLQLHKTEFLGKEMKLYFAQTLHIGSSHLAPPNPDKQFLISPPASPPVGWKQVEDATPVINYDLLYAISKLGPGEQGPRVGGRQGETQLLPCTREQYHHYPRSSPEPMPACFVSFSVFFCATVPCAGSMPASWHHLQC

SEQ ID NO: 22627 - protein, 170 aa, Homo sapiens
MAATASPQPLATEDADSENSSFYYYDYLDEVAFMLCRKDAVVSFGKVFLPVFYSLIFVLGLSGNLLLLMVLLRYVPRRRMVEIYLLNLAISNLLFLVTLPFWGISVAWHWVFGSFLCKMVSTLYTINFYSGIFFISCMSLDKYLEIVHAQPYHRLRTRAKSLLLATIVWA

SEQ ID NO: 22628 - protein, 578 aa, Homo sapiens
MLLLINVILTLWVSCANGQEVKPCDFPEIQHGGLYYKSLRRLYFPAAAGQSYSYYCDQNFVTPSGSYWDYIHCTQDGWSPTVPCLRTCSKSDVEIENGFISESSSIYILNEETQYNCKPGYATAEGNSSGSITCLQNGWSTQPICIKFCDMPVFENSRAKSNGMWFKLHDTLDYECYDGYESSYGNTTDSIVCGEDGWSHLPTCYNSSENCGPPPPISNGDTTSFPQKVYLPWSRVEYQCQSYYELQGSKYVTCSNGDWSEPPRCISMKPCEFPEIQHGHLYYENTRRPYFPVATGQSYSYYCDQNFVTPSGSYWDYIHCTQDGWLPTVPCLRTCSKSDIEIENGFISESSSIYILNKEIQYKCKPGYATADGNSSGSITCLQNGWSAQPICIKFCDMPVFENSRAKSNGMRFKLHDTLDYECYDGYEISYGNTTGSIVCGEDGWSHFPTCYNSSEKCGPPPPISNGDTTSFLLKVYVPQSRVEYQCQSYYELQGSNYVTCSNGEWSEPPRCIHPCIITEENMNKNNIQLKGKSDIKYYAKTGDTIEFMCKLGYNANTSVLSFQAVCREGIVEYPRCE

SEQ ID NO: 22629 - protein, 301 aa, Homo sapiens
PLYEGLGSGGEKTAVVIDLGEAFTKCGFAGETGPRCIIPSVIKRAGMPKPVRVVQYNINTEELYSYLKEFIHILYFRHLLVNPRDRRVVIIESVLCPSHFRETLTRVLFKYFEVPSVLLAPSHLMALLTLGINSAMVLDCGYRESLVLPIYEGIPVLNCWGALPLGGKALHKELETQLLEQCTVDTSVAKEQSLPSVMGSVPEGVLEDIKARTCFVSDLKRGLKIQAAKFNIDGNNERPSPPPNVDYPLDGEKILHILGSIRDSVVEILFEQDNEEQSVATLILDSLIQCCSCCPGWSAMA

SEQ ID NO: 22630 - protein, 710 aa, Homo sapiens
MSVPSSLSQSAINANSHGGPALSLPLPLHAAHNQLLNAKLQATAVGPKDLRSAMGEGGGPEPGPANAKWLKEGQNQLRRAATAHRDQNRNVTLTLAEEASQEPEMAPLGPKGLIHLYSELELSAHNAANRGLRGPGLIISTQEQGPDEGEEKAAGEAEEEEEDDDDEEEEEDLSSPPGLPEPLESVEAPPRPQALTDGPREHSKSASLLFGMRNSAASDEDSSWATLSQGSPSYGSPEDTDSFWNPNAFETDSDLPAGWMRVQDTSGTYYWHIPTGTTQWEPPGRASPSQGSSPQEESQLTWTGFAHGEGFEDGEFWKDEPSDEAPMELGLKEPEEGTLTFPAQSLSPEPLPQEEEKLPPRNTNPGIKCFAVRSLGWVEMTEEELAPGRSSVAVNNCIRQLSYHKNNLHDPMSGGWGEGKDLLLQLEDETLKLVEPQSQALLHAQPIISIRVWGVGRDSGRERDFAYVARDKLTQMLKCHVFRCEAPAKNIATSLHEICSKIMAERRNARCLVNGLSLDHSKLVDVPFQVEFPAPKNELVQKFQVYYLGNVPVAKPVGVDVINGALESVLSSSSREQWTPSHVSVAPATLTILHQQTEAVLGECRVRFLSFLAVGRDVHTFAFIMAAGPASFCCHMFWCEPNAASLSEAVQAACMLRYQKCLDARSQASTSCLPAPPAESVARRVGWTVRRGVQSLWGSLKPKRLGAHTP

SEQ ID NO: 22631 - protein, 968 aa, Homo sapiens
MATLSLTVNSGDPPLGALLAVEHVKDDVSISVEEGKENILHVSENVIFTDVNSILRYLARVATTAGLYGSNLMEHTEIDHWLEFSATKLSSCDSFTSTINELNHCLSLRTYLVGNSLSLADLCVWATLKGNAAWQEQLKQKKAPVHVKRWFGFLEAQQAFQSVGTKWDVSTTKARVAPEKKQDVGKFVELPGAEMGKVTVRFPPEASGYLHIGHAKAALLNQHYQVNFKGKLIMRFDDTNPEKEKEDFEKVILEDVAMLHIKPDQFTYTSDHFETIMKYAEKLIQEGKAYVDDTPAEQMKAEREQRIDSKHRKNPIEKNLQMWEEMKKGSQFGQSCCLRAKIDMSSNNGCMRDPTLYRCKIQPHPRTGNKYNVYPTYDFACPIVDSIEGVTHALRTTEYHDRDEQFYWIIEALGIRKPYIWEYSRLNLNNTVLSKRKLTWFVNEGLVDGWDDPRFPTVRGVLRRGMTVEGLKQFIAAQGSSRSVVNMEWDKIWAFNKKLRALCKKVIDPVAPRYVALLKKEVIPVNVPEAQEEMKEVAKHPKNPEVGLKPVWYSPKVFIEGADAETFSEGEMVTFINWGNLNITKIHKNADGKIISLDAKLNLENKDYKKTTKVTWLAETTHALPIPVICVTYEHLITKPVLGKDEDFKQYVNKNSKHEELMLGDPCLKDLKKGDIIQLQRRGFFICDQPYEPVSPYSCKEAPCVLIYIPDGHTKEMPTSGSKEKTKVEATKNETSAPFKERPTPSLNNNCTTSEDSLVLYNRVAVQGDVVRELKAKKAPKEDVDAAVKQLLSLKAEYKEKTGQEYKPGNPPAEIGQNISSNSSASILESKSLYDEVAAQGEVVRKLKAEKSPKAKINEAVECLLSLKAQYKEKTGKEYIPGQPPLSQSSDSSPTRNSEPAGLETPEAKVLFDKVASQGEVVRKLKTEKAPKDQVDIAVQELLQLKAQYKSLIGVEYKPVSATGAEDK

SEQ ID NO: 22632 - protein, 152 aa, Homo sapiens
IKASQILASRGAELFQATIVKAVKARIEEEKKSMDQLKRQMDRIKARQQKYKKGKERMLSLTQEPGEGQDMQKLSEEDDEREADKQKAKGKKKQWWRPWVDHASSRFSRSPYNLIDSNPYILDQNSGVPVTHVFHAWFDPCDLIGGRSVGKF

SEQ ID NO: 22633 - protein, 776 aa, Homo sapiens
MEIGWMHNRRQRQVLVFFVLLSLSGAGAELGSYSVVEETERGSFVANLGKDLGLGLTEMSTRKARIISQGNKQHLQLKAQTGDLLINEKLDREELCGPTEPCILHFQVLMENPLEIFQAELRVIDINDHSPMFTEKEMILKIPENSPLGTEFPLNHALDLDVGSNNVQNYKISPSSHFRVLIHEFRDGRKYPELVLDKELDREEEPQLRLTLTALDGGSPPRSGTAQVRIEVVDINDNAPEFEQPIYKVQIPENSPLGSLVATVSARDLDGGANGKISYTLFQPSEDISKTLEVNPMTGEVRLRKQVDFEMVTSYEVRIKATDGGGLSGKCTLLLQVVDVNDNPPQVTMSALTSPIPENSPEIVVAVFSVSDPDSGNNGKTISSIQEDLPFLLKPSVKNFYTLVTERALDREARAEYNITLTVTDMGTPRLKTEHNITVQISDVNDNAPTFTQTSYTLFVRENNSPALHIGSVSATDRDSGTNAQVTYSLLPPQDPHLPLASLVSINADNGHLFALRSLDYEALQAFEFRVGATDRGSPALSREALVRVLVLDANDNSPFVLYPLQNGSAPCTELVPRAAEPGYLVTKVVAVDGDSGQNAWLSYQLLKATEPGLFGVWAHNGEVRTARLLSERDAAKQRLVVLVKDNGEPPRSATATLHVLLVDGFSQPFLPLPEAAPGQTQANSLTVYLVVALASVSSLFLFSVLLFVAVRLCRRSRAASVGRCSMPEGPFPGRLVDVSGTGTLSQSYQYEVCLTGGSETSEFKFLKPIIPNFSP

SEQ ID NO: 22634 - protein, 648 aa, Homo sapiens
AACSGASRRSERRMPTVCGSSSRRISSTAVPWMNVFSSTPRRSRSRPGGPCPGREGGWLPLVGWPRAAGASQSGWFAFQLAQDDAWKCPHCQVLQQGMVKLSLWTLPDILIIHLKRFCQVGERRNKLSTLVKFPLSGLNMAPHVAQRSTSPEAGLGPWPSWKQPDCLPTSYPLDFLYDLYAVCNHHGNLQGGHYTAYCRNSLDGQWYSYDDSTVEPLREDEVNTRGAYILFYQKRNSIPPWSASSSMRGSTSSSLSDHWLLRLGSHAGSTRGSLLSWSSAPCPSLPQVPDSPIFTNSLCNQEKGGLEPRRLVRGVKGRSISMKAPTTSRAKQGPFKTMPLRWSFGSKEKPPGASVELVEYLESRRRPRSTSQSIVSLLTGTAGEDEKSASPRSNVALPANSEDGGRAIERGPAGVPCPSAQPNHCLAPGNSDGPNTARKLKENAGQDIKLPRKFDLPLTVMPSVEHEKPARPEGQKAMNWKESFQMGSKSSPPSPYMGFSGNSKDSRRGTSELDRPLQGTLTLLRSVFRKKENRRNERAEVSPQVPPVSLVSGGLSPAMDGQAPGSPPALRIPEGLARGLGSRLERDVWSAPSSLRLPRKASRAPRGSALGMSQRTVPGEQASYGTFQRVKYHTLSLGRKKTLPESSF

SEQ ID NO: 22635 - protein, 905 aa, Homo sapiens
MQREAAFRLGHCHPLRIMGSVDQEEPNAHKVASPPSGPAYPDDVLDYGLKPYSPLASLSGEPPGRFGEPDRVGPQKFLSAAKPAGASGLSPRIEITPSHELIQAVGPLRMRDAGLLVEQPPLAGVAASPRFTLPVPGFEGYREPLCLSPASSGSSASFISDTFSPYTSPCVSPNNGGPDDLCPQFQNIPAHYSPRTSPIMSPRTSLAEDSCLGRHSPVPRPASRSSSPGAKRRHSCAEALVALPPGASPQRSRSPSPQPSSHVAPQDHGSPAGYPPVAGSAVIMDALNSLATDSPCGIPPKMWKTSPDPSPVSAAPSKAGLPRHIYPAVEFLGPCEQGERRNSAPESILLVPPTWPKPLVPAIPICSIPVTASLPPLEWPLSSQSGSYELRIEVQPKPHHRAHYETEGSRGAVKAPTGGHPVVQLHGYMENKPLGLQIFIGTADERILKPHAFYQVHRITGKTVTTTSYEKIVGNTKVLEIPLEPKNNMRATIDCAGILKLRNADIELRKGETDIGRKNTRVRLVFRVHIPESSGRIVSLQTASNPIECSQRSAHELPMVERQDTDSCLVYGGQQMILTGQNFTSESKVVFTEKTTDGQQIWEMEATVDKDKSQPNMLFVEIPEYRNKHIRTPVKVNFYVINGKRKRSQPQHFTYHPVPAIKTEPTDEYDPTLICSPTHGGLGSQPYYPQHPMVAESPSCLVATMAPCQQFRTGLSSPDARYQQQNPAAVLYQRSKSLSPSLLGYQQPALMAAPLSLADAHRSVLVHAGSQGQSSALLHPSPTNQQASPVIHYSPTNQQLRCGSHQEFQHIMYCENFAPGTTRPGPPPVSQGQRLSPGSYPTVIQQQNATSQRAAKNGPPVSDQKEVLPAGVTIKQEQNLDQTYLDDVNEIIRKEFSGPPARNQT

SEQ ID NO: 22636 - protein, 421 aa, Homo sapiens
MYHGMNPSNGDGFLEQQQQQQQPQSPQRLLAVILWFQLALCFGPAQLTGDCRIPQIEDAEIHNKTYRHGEKLIITCHEGFKIRYPDLHNMVSLCRDDGTWNNLPICQGCLRPLASSNGYVNISELQTSFPVGTVISYRCFPGFKLDGSAYLECLQNLIWSSSPPRCLALEAQVCPLPPMVSHGDFVCHPRPCERYNHGTVVEFYCDPGYSLTSDYKYITCQYGEWFPSYQVYCIKSEQTWPSTHETLLTTWKIVAFTATSVLLVLLLVILARMFQTKFKAHFPPRGPPRSSSSDPDFVVVDGVPVMLPSYDEAVSGGLSALGPGYMASVGQGCPLPVDDQSPPAYPGSGDTDTGPGESETCDSVSGSSELLQSLYSPPRCQESTHPASDNPDIIASTAEEVASTSPGIDIADEIPLMEEDP

SEQ ID NO: 22637 - protein, 1121 aa, Homo sapiens
MDALEDYVWPRATSELILLPVTGLECVGDRLLAGEGPDVLVYSLDFGGHLRMIKRVQNLLGHYLIHGFRVRPEPNGDLDLEAMVAVFGSKGLRVVKISWGQGHFWELWRSGLWNMSDWIWDARWLEGNIALALGHNSVVLYDPVVGCILQEVPCTDRCTLSSACLIGDAWKELTIVAGAVSNQLLVWYPATALADNKPVAPDRRISGHVGIIFSMSYLESKGLLATASEDRSVRIWKVGDLRVPGGRVQNIGHCFGHSARVWQVKLLENYLISAGEDCVCLVWSHEGEILQAFRGHQGRGIRAIAAHERQAWVITGGDDSGIRLWHLVGRGYRGLGVSALCFKSRSRPGTLKAVTLAGSWRLLAVTDTGALYLYDVEVKCWEQLLEDKHFQSYCLLEAAPGPEGFGLCAMANGEGRVKVVPINTPTAAVDQTLFPGKVHSLSWALRGYEELLLLASGPGGVVACLEISAAPSGKAIFVKERCRYLLPPSKQRWHTCSAFLPPGDFLVCGDRRGSVLLFPSRPGLLKDPGVGGKARAGAGAPVVGSGSSGGGNAFTGLGPVSTLPSLHGKQGVTSVTCHGGYVYTTGRDGAYYQLFVRDGQLQPVLRQKSCRGMNWLAGLRIVPDGSMVILGFHANEFVVWNPRSHEKLHIVNCGGGHRSWAFSDTEAAMAFAYLKDGDVMLYRALGGCTRPHVILREGLHGREITCVKRVGTITLGPEYGVPSFMQPDDLEPGSEGPDLTDIVITCSEDTTVCVLALPTTTGSAHALTAVCNHISSVRAVAVWGIGTPGGPQDPQPGLTAHVVSAGGRAEMHCFSIMVTPDPSTPSRLACHVMHLSSHRLDEYWDRQRNRHRMVKVDPETRYMSLAVCELDQPGLGPLVAAACSDGAVRLFLLQDSGRILQLLAETFHHKRCVLKVHSFTHEAPNQRRRLLLCSAATDGSLAFWDLTTMLDHDSTVLEPPVDPGLPYRLGTPSLTLQAHSCGINSLHTLPTREGHHLVASGSEDGSLHVFVLAVEMLQLEEAVGEAGLVPQLRVLEEYSVPCAHAAHVTGLKILSPSIMVSASIDQRLTFWRLGHGEPTFMNSTVFHVPDVADMDCWPVSPEFGHRCALGGQGLEVYNWYD

SEQ ID NO: 22638 - protein, 648 aa, Homo sapiens
MELVTFRDVAIEFSPEEWKCLDPAQQNLYRDVMLENYRNLVSLGFVISNPDLVTCLEQIKEPCNLKIHETAAKPPAICSPFSQDLSPVQGIEDSFHKLILKRYEKCGHENLQLRKGCKRVNECKVQKGVNNGVYQCLSTTQSKIFQCNTCVKVFSKFSNSNKHKIRHTGEKPFKCTECGRSFYMSHLTQHTGIHAGEKPYKCEKCGKAFNRSTSLSKHKRIHTGEKPYTCEECGKAFRRSTVLNEHKKIHTGEKPYKCEECGKAFTRSTTLNEHKKIHTGEKPYKCKECGKAFRWSTSLNEHKNIHTGEKPYKCKECGKAFRQSRSLNEHKNIHTGEKPYTCEKCGKAFNQSSSLIIHRSIHSEQKLYKCEECGKAFTWSSSLNKHKRIHTGEKPYTCEECGKAFYRSSHLAKHKRIHTGEKPYTCEECGKAFNQSSTLILHKRIHSGQKPYKCEECGKAFTRSTTLNEHKKIHTGEKPYKCEECGKAFIWSASLNEHKNIHTGEKPYKCKECGKAFNQSSGLIIHRSIHSEQKLYKCEECGKAFTRSTALNEHKKIHSGEKPYKCKECGKAYNLSSTLTKHKRIHTGEKPFTCEECGKAFNWSSSLTKHKIIHTGEKSYKCEECGKAFNRPSTLTVHKRIHTGKEHS

SEQ ID NO: 22639 - protein, 211 aa, Homo sapiens
MGGAVSAGEDNDELIDNLKEAQYIRTELVEQAFRAIDRADYYLEEFKENAYKDLAWKHGNIHLSAPCIYSEPCHSESGKSRLVQLPPVAVRSLQDLARIAIRGTIKKIIHQETVSKNGNGLKNTPRFKRRRVRRRRMETIVFLDKEVFASRISNPSDDNSCEDLEEERREEEEKTPPETKPDPPVNFLRQKVLSLPLPDPLKYYLLYYREK

SEQ ID NO: 22640 - protein, 447 aa, Homo sapiens
MGGGRLGAPMERHGRASATSVSSAGEQAAGDPEGRRQEPLRRRASSASVPAVGASAEGTRRDRLGSYSGPTSVSRQRVESLRKKRPLFPWFGLDIGGTLVKLVYFEPKDITAEEEEEEVESLKSIRKYLTSNVAYGSTGIRDVHLELKDLTLCGRKGNLHFIRFPTHDMPAFIQMGRDKNFSSLHTVFCATGGGAYKFEQDFLTIGDLQLCKLDELDCLIKGILYIDSVGFNGRSQCYYFENPADSEKCQKLPFDLKNPYPLLLVNIGSGVSILAVYSKDNYKRVTGTSLGGGTFFGLCCLLTGCTTFEEALEMASRGDSTKVDKLVRDIYGGDYERFGLPGWAVASSFGNMMSKEKREAVSKEDLARATLITITNNIGSIARMCALNENINQVVFVGNFLRINTIAMRLLAYALDYWSKGQLKALFSEHEGYFGAVGALLELLKIP

SEQ ID NO: 22641 - protein, 462 aa, Homo sapiens
AVILWFQLALCFGPAQLTGGFDDLQVCADPGIPENGFRTPSGGVFFEGSVARFHCQDGFKLKGATKRLCLKHFNGTLGWIPSDNSICVQEDCRIPQIEDAEIHNKTYRHGEKLIITCHEGFKIRYPDLHNMVSLCRDDGTWNNLPICQGCLRPLASSNGYVNISELQTSFPVGTVISYRCFPGFKLDGSAYLECLQNLIWSSSPPRCLALEAQVCPLPPMVSHGDFVCHPRPCERYNHGTVVEFYCDPGYSLTSDYKYITCQYGEWFPSYQVYCIKSEQTWPSTHETLLTTWKIVAFTATSVLLVLLLVILARMFQTKFKAHFPPRGPPRSSSSDPDFVVVDGVPVMLPSYDEAVSGGLSALGPGYMASVGQGCPLPVDDQSPPAYPGSGDTDTGPGESETCDSVSGSSELLQSLYSPPRCQESTHPASDNPDIIASTAEEVASTSPGIDIADEIPLMEEDP

SEQ ID NO: 22642 - protein, 431 aa, Homo sapiens
MSYTGFVQGSETTLQSTYSDTSAQPTCDYGYGTWNSGTNRGYEGYGYGYGYGQDNTTNYGINQRLDMVPHLETDMMQGGVYGSGGERYDSYESCDSRAVLSERDLYRSGYDYSELDPEMEMAYEGQYDAYRDQFRMRGNDTFGPRAQGWARDARSGRPMASGYGRMWEDPMGARGQCMSGASRLPSLFSQNIIPEYGMFQGMRGGGAFPGGSRFGFGFGNGMKQMRRTWKTWTTADFRTKKKKRKQGGSPDEPDSKATRTDCSDNSDSDNDEGTEGEATEGLEGTEAVEKGSRVDGEDEEGKEDGREEGKEDPEKGALTTQDENGQTKRKLQAGKKSQDKQKKRQRDRMVERAPALALASSASDSCSCWTFLSLAGARPLGSPDKADPVAQIRTSGRGSSLCVLCANTGPSMRTRWPAILTASSTRNTLST

SEQ ID NO: 22643 - protein, 332 aa, Homo sapiens
MLEGVEHLLLLLLLTDVNSKELQSGNQTSVSHFILVGLHHPPQLGAPLFLAFLVIYLLTVSGNGLIILTVLVDIRLHRPMCLFLCHLSFLDMTISCAIVPKMLAGFLLGSRIISFGGCVIQLFSFHFLGCTECFLYTLMAYDRFLAICKPLHYATIMTHRVCNSLALGTWLGGTIHSLFQTSFVFRLPFCGPNRVDYIFCDIPAMLRLACADTAINELVTFADIGFLALTCFMLILTSYGYIVAAILRIPSADGRRNAFSTCAAHLTVVIVYYVPCTFIYLRPCSQEPLDGVVAVFYTVITPLLNSIIYTLCNKEMKAALQRLGGHKEVQPH

SEQ ID NO: 22644 - protein, 1484 aa, Homo sapiens [sequence omitted]

SEQ ID NO: 22645 - protein, 168 aa, Homo sapiens
RAQTEKHVVLCVSSLKIDLLMDFLNEFYAHPRLQDYYVVILCPTEMDVQVRRVLQIPMWSQRVIYLQGSALKDQDLLRAKMDDAEACFILSSRCEVDRTSSDHQTILRAWAVKDFAPNCPLYVQILKPENKFHIKFAVLKAGNPRSRCQHDPVLRRPAIARTMAEDVR

SEQ ID NO: 22646 - protein, 139 aa, Homo sapiens
MAIDSGFRNSGITVGKRGKTMLAVRSTHGLEVPLSHKGKLMVTEEYIDFLLNVANQKMEENKKRIERFYNCLQHALERETMTNLHPKIKEKNNSSYIHKKKRNPEKTRAQCITKESDEELENDDDDDLGINVTIFPEDY

SEQ ID NO: 22647 - protein, 142 aa, Homo sapiens
MAATASPQPLATEDADSENSSFYYYDYLDEVAFMLCRKDAVVSFGKVFLPVFYSLIFVLGLSGNLLLLMVLLRYVPRRRMVEIYLLNLAISNLLFLVTLPFWGISVAWHWVFGSFLCKMVSTLYTINFYSGIFFISCMSLDK

SEQ ID NO: 22648 - protein, 1405 aa, Homo sapiens; identical to SEQ ID NO: 8467

SEQ ID NO: 22649 - protein, 665 aa, Homo sapiens
MAATEISVLSEQFTKIKELELMPEKGLKEEEKDGVCREKDHRSPSELEAERTSGAFQDSVLEEEVELVLAPSEESEKYILTLQTVHFTSEAVELQDMSLLSIQQQEGVQVVVQQPGPGLLWLEEGPRQSLQQCVAISIQQELYSPQEMEVLQFHALEENVMVASEDSKLAVSLAETTGLIKLEEEQEKNQLLAERTKEQLFFVETMSGDERSDEIVLTVSNSNVEEQEDQPTAGQADAEKAKSTKNQRKTKGAKGTFHCDVCMFTSSRMSSFNRHMKTHTSEKPHLCHLCLKTFRTVTLLRNHVNTHTGTRPYKCNDCNMAFVTSGELVRHRRYKHTHEKPFKCSMCKYASVEASKLKRHVRSHTGERPFQCCQCSYASRDTYKLKRHMRTHSGEKPYECHICHTRFTQSGTMKIHILQKHGENVPKYQCPHCATIIARKSDLRVHMRNLHAYSAAELKCRYCSAVFHERYALIQHQKTHKNEKRFKCKHCSYACKQERHMTAHIRTHTGEKPFTCLSCNKCFRQKQLLNAHFRKYHDANFIPTVYKCSKCGKGFSRWINLHRHSEKCGSGEAKSAASGKGRRTRKRKQTILKEATKGQKEAAKGWKEAANGDGVISAHRNLCLLGSSDSHASVSGAGITDARHHAWLIVLLFLVEMGFYHVSHS

SEQ ID NO: 22650 - protein, 421 aa, Homo sapiens
MSVSVLSPSRLLGDVSGILQAASLLILLLLLIKAVQLYLHRQWLLKALQQFPCPPSHWLFGHIQELQQDQELQRIQKWVETFPSACPHWLWGGKVRVQLYDPDYMKVILGRSDPKSHGSYRFLAPWIGYGLLLLNGQTWFQHRRMLTPAFHYDILKPYVGLMADSVRVMLDKWEELLGQDSPLEVFQHVSLMTLDTIMKCAFSHQGSIQVDRPSDPTEEGSTTEGGGAGEDQEEEAFGFSGYPPLGQRAPGLPRPCWCSGWNCFRNHLDQMPYTTMCIKEALRLYPPVPGIGRELSTPVTFPDGRSLPKGIMVLLSIYGLHHNPKVWPNPEVFDPFRFAPGSAQHSHAFLPFSGGSRNCIGKQFAMNELKVATALTLLRFELLPDPTRIPIPIARLVLKSKNGIHLRLRRLPNPCEDKDQL

SEQ ID NO: 22651 - protein, 1086 aa, Homo sapiens
MFLMPTSSELNSGQNFLTQWMTNPSRAGVILNRGFPILEADKEKRAAVDISTSFPIKGTHFSDSFSFINEEDSLLEEQKLESNNPYKPQSDKSETHTAFPCIKKGPQVAACHSAPGHQEENKNDFIPDLASEFKEGAYKDPLFKKLEQLKEVQQKKQEQLKRQQLEQLQRLMEEQEKLLTMVSGQCTLPGLSLLPDDQSQKHRSPGNTTTGERATCCFPSYVYPDPTQEETYPSNILSHEQSNFCRTAHGDFVLTSKRASPNLFSEAQYQEAPVEKNNLKEENRNHPTGESILCWEKVTEQIQEANDKNLQKHDDSSEVANIEERPIKAAIGERKQTFEDYLEEQIQLEEQELKQKQLKEAEGPLPIKAKPKQPFLKRGEGLARFTNAKSKFQKGKESKLVTNQSTSEDQPLFKMDRQQLQRKTALKNKELCADNPILKKDSKARTKSGSVTLSQKPKMLKCSNRKSLSPSGLKIQTGKKCDGQFRDQIKFENKVTSNNKENVTECPKPCDTGCTGWNKTQGKDRLPLSTGPASRLAAKSPIRETMKESESSLDVSLQKKLETWEREKEKENLELDEFLFLEQAADEISFSSNSSFVLKILERDQQICKGHRMSSTPVKAVPQKTNPADPISHCNRSEDLDHTAREKESECEVAPKQLHSLSSADELREQPCKIRKAVQKSTSENQTEWNARDDEGVPNSDSSTDSEEQLDVTIKPSTEDRERGISSREDSPQVCDDKGPFKDTRTQEDKRRDVDLDLSDKDYSSDESIMESIKHKVSEPSRSSSLSLSKMDFDDERTWTDLEENLCNHDVVLGNESTYGTPQTCYPNNEIGILDKTIKRKIAPVKRGEDLSKSRRSRSPPTSELMMKFFPSLKPKPKSDSHLGNELKLNISQDQPPGDNARSQVLREKIIELETEIEKFKAENASLAKLRIERESALEKLRKEIADFEQQKAKELARIEEFKKEEMRKLQKERKVFEKYTTAARTFPDKKEREEIQTLKQQIADLREDLKRKETKWSSTHSRLRSQIQMLVRENTDLREEIKVMERFRLDAWKRAEAIESSLEVEKKDKLAAIHLEDPSLHLLVI

SEQ ID NO: 22652 - protein, 247 aa, Homo sapiens [sequence omitted]

SEQ ID NO: 22653 - protein, 1271 aa, Homo sapiens
MDRGAAAAQGTAPPQDGEQPAESPEPPPPWPPPPPPPAPPPAPPLLSEASPEPIPEPCPELAPGPCPEATSESATELYTEPTPEPATEPASEPAPEPATEPAPEPATEPAPEPAPEPATESAPEPTPEPALESVPEPAPELTPEVAPELAPEPTPEPVTELAPEFCPEAAPEFRPSPAPCLLQCPVDTRERGLKTSPSPSPSPSPRTPMSWSRIKKILKEGPMLKNCNSFKRWKLRYFLVQGQKLYFAHHPAFAHFETIDLSQATVAESSCRNLCHSFCVITPQRKITLAAPNRKDMEEWINIIKTIQQGEIYKIPAAENNPFLVGMHCWYSSYSHRTQHCNVCRESIPALSRDAIICEVCKVKSHRLCALRASKDCKWNTLSITDDLLLPADEVNMPHQWVEGNMPVSSQCAVCHESCGSYQRLQDFRCLWCNSTVHDDCRRRFSKECCFRSHRSSVIPPTALSDPKGDGQLVVSSDFWNLDWSSACSCPLLIFINSKSGDHQGIVFLRKFKQYLNPSQVFDLLKGGPEAGLSMFKNFARFRILVCGGDGSVSWVLSLIDAFGLHEKCQLAVIPLGTGNDLARVLGWGAFWNKSKSPLDILNRVEQASVRILDRWSVMIRETPRQTPLLKGQVEMDVPRFEAAAIQHLESAATELNKILKAKYPTEMIIATRFLCSAVEDFVVDIVKAWGQIKQNNTAIVSVILKSDLMYDRLSVLIDVLAEEAAATSAEKSATEYADSSKADRKPFIPQIDHIAKCKLELATKAQSLQKSLKLIIFQVEQALDEESRQTISVKNFSSTFFLEDDPEDINQTSPRRRSRRGTLSSISSLKSEDLDNLNLDHLHFTPESIRFKEKCVMNNYFGIGLDAKISLDFNTRRDEHPGQYNSRLKNKMWYGLLGTKELLQRSYRKLEERVHLECDGETISLPNLQGIVVLNITSYAGGINFWGSNTATTEYEAPAIDDGKLEVVAIFGSVQMAMSRIINLHHHRIAQCHEVMITIDGEEGIPVQVDGEAWIQRPGLIKIRYKNAAQMLTRDRDFENSMKMWEYKHTEIQAAPQPQLDFQDSQESLSDEEYAQMQHLARLAENLISKLNDLSKIHQHVSVLMGSVNASANILNDIFYGQDSGNEMGAASCIPIETLSRNDAVDVTFSLKGLYDDTTAFLDEKLLRSAEDETALQSALDAMNKEFKKLSEIDWMNPIFVPEEKSSDTDSRSLRLKIKFPKLGKKKVEEERKPKSGQSVQSFIGNLWHRRHREDEAEGDDPLTPSRSQL

SEQ ID NO: 22654 - protein, 192 aa, Homo sapiens [sequence omitted]

SEQ ID NO: 22655 - protein, 1442 aa, Homo sapiens
MPFKIQWFFKAVADGLSLEKELEAALHRDDVEFISDLIACLLQGCYQRRDITPQTFHSYLEDIINYRWELEEGKPNPLREASFQDLPLRTRVEILHRLCDYRLDADDVFDLLKGLDADSLRVEPLGEDNSGALYWYFYGTRMYKEDPVQGKSNGELSLSRESEGQKNVSSIPGKTGKRRGRPPKRKKLQEEILLSEKQEENSLASEPQTRHGSQGPGQGTWWLLCQTEEEWRQVTESFRERTSLRERQLYKLLSEDFLPEICNMIAQKGKRPQRTKAELHPRWMSDHLSIKPVKQEETPVLTRIEKQKRKEEEEERQILLAVQKKEQEQMLKEERKRELEEKVKAVEDRAKRRKLREERAWLLAQGKELPPELSHLDPNSPMREEKKTKDLFELDDDFTAMYKVLDVVKAHKDSWPFLEPVDESYAPNYYQIIKAPMDISSMEKKLNGGLYCTKEEFVNDMKTMFRNCRKYNGESSEYTKMSDNLERCFHRAMMKHFPGEDGDTDEEFWIREDEKREKRRSRAGRSGGSHVWTRSRDPEGSSRKQQPMENGGKSLPPTRRAPSSGDDQSSSSTQPPREVGTSNGRGFSHPLHCGGTPSQAPFLNQMRPAVPGTFGPLRGSDPATLYGSSGVPEPHPGEPVQQRQPFTMQPPVGINSLRGPRLGTPEEKQMCGGLTHLSNMGPHPGSLQLGQISGPSQDGSMYAPAQFQPGFIPPRHGGAPARPPDFPESSEIPPSHMYRSYKYLNRVHSAVWNGNHGATNQGPLGPDEKPHLGPGPSHQPRTLGHVMDSRVMRPPVPPNQWTEQSGFLPHGVPSSGYMRPPCKSAGHRLQPPPVPAPSSLFGAPAQALRGVQGGDSMMDSPEMIAMQQLSSRVCPPGVPYHPHQPAHPRLPGPFPQVAHPMSVTVSAPKPALGNPGRAPENSEAQEPENDQAEPLPGLEEKPPGVGTSEGVYLTQLPHPTPPLQTDCTRQSSPQERETVGPELKSSSSESADNCKAMKGKNPWPSDSSYPGPAAQGCVRDLSTVADRGALSENGVIGEASPCGSEGKGLGSSGSEKLLCPRGRTLQETMPCTGQNAATPPSTDPGLTGGTVSQFPPLYMPGLEYPNSAAHYHISPGLQGVGPVMGGKSPASHPQHFPPRGFQSNHPHSGGFPRYRPPQGMRYSYHPPPQPSYHHYQRTPYYACPQSFSDWQRPLHPQGSPSGPPASQPPPPRSLFSDKNAMASLQGCETLNAALTSPTRMDAVAAKVPNDGQNPGPEEEKLDESMERPESPKEFLDLDNHNAATKRQSSLSASEYLYGTPPPLSSGMGFGSSAFPPHSVMLQTGPPYTPQRPASHFQPRAYSSPVAALPPHHPGATQPNGLSQEGPIYRCQEEGLGHFQAVMMEQIGTRSGIRGPFQEMYRPSGMQMHPVQSQASFPKTPTAATSQEEVPPHKPPTLPLDQS

SEQ ID NO: 22656 - protein, 187 aa, Homo sapiens
MAIYKQSQHMTEVVRRCPHHERCSDSDGLAPPQHLIRVEGNLRVEYLDDRNTFRHSVVVPYEPPEVGSDCTTIHYNYMCNSSCMGGMNRRPILTIITLEDSSGNLLGRNSFEVRVCACPGRDRRTEEENLRKKGEPHHELPPGSTKRALPNNTSSSPQPKKKPLDGEYFTLQMLLDLRWCYFLINSS

SEQ ID NO: 22657 - protein, 540 aa, Homo sapiens
MPLRDETLREVWASDSGHEEESLSPEAPRRPKQRPAPAQRLRKKRTEAPESPCPTGSKPRKPGAGRTGRPREEPSPDPAQARAPQTVYARFLRDPEAKKRDPRETFLVARAPDAEDEEEEEEEDEEDEEEEAEEKKEKILLPPKKPLREKSSADLKERRAKAQGPRGDLGSPDPPPKPLRVRNKEAPAGEGTKMRKTKKKGSGEADKDPSGSPASARKSPAAMFLVGEGSPDKKALKKKGTPKGARKEEEEEEEAATVIKKSNQKGKAKGKGKKKEERAPSPPVEVDEPREFVLRPAPQGRTVRCRLTRDKKGMDRGMYPSYFLHLDTEKKVFLLAGRKRKRSKTANYLISIDPTNLSRGGENFIGKLRSNLLGNRFTVFDNGQNPQRGYSTNVASLRQELAAVIYETNVLGFRGPRRMTVIIPGMSAENERVPIRPRNASDGLLVRWQNKTLESLIELHNKPPVWNDDSGSYTLNFQGRVTQASVKNFQIVHADDPDYIVLQFGRVAEDAFTLDYRYPLCALQAFAIALSSFDGKLACE

SEQ ID NO: 22658 - protein, 486 aa, Homo sapiens
MLFPTSAQESSRGLPDANDLCLGLQSLSLTGWDRPWSTQDSDSSAQSSTHSVLSMLHNPLGNVLGKPPLSFLPLDPLGSDLVDKFPAPSVRGSRLDTRPILDSRSSSPSDSDTSGFSSGSDHLSDLISSLRISPPLPFLSLSGGGPRDPLKMGVGSRMDQEQAALAAVTPSPTSASKRWPGASVWPSWDLLEAPKDPFSIEREARLHRQAAAVNEATCTWSGQLPPRNYKNPIYSCKVFLGGVPWDITEAGLVNTFRVFGSLSVEWPGKDGKHPRCPPKGYVYLVFELEKSVRSLLQACSHDPLSPDGLSEYYFKMSSRRMRCKEVQVIPWVLADSNFVRSPSQRLDPSRTVFVGALHGMLNAEALAAILNDLFGGVVYAGIDTDKHKYPIGSGRVTFNNQRSYLKAVSAAFVEIKTTKFTKKVQIDPYLEDSLCHICSSQPGPFFCRDQVCFKYFCRSCWHWRHSMEGLRHHSPLMRNQKNRDSS

SEQ ID NO: 22659 - protein, 866 aa, Homo sapiens
MEGAGPRGAGPARRRGAGGPPSPLLPSLLLLLLLWMLPDTVAPQELNPRGRNVCRAPGSQVPTCCAGWRQQGDECGIAVCEGNSTCSENEVCVRPGECRCRHGYFGANCDTKCPRQFWGPDCKELCSCHPHGQCEDVTGQCTCHARRWGARCEHACQCQHGTCHPRSGACRCEPGWWGAQCASACYCSATSRCDPQTGACLCHAGWWGRSCNNQCACNSSPCEQQSGRCQCRERTFGARCDRYCQCFRGRCHPVDGTCACEPGYRGKYCREPCPAGFYGLGCRRRCGQCKGQQPCTVAEGRCLTCEPGWNGTKCDQPCATGFYGEGCSHRCPPCRDGHACNHVTGKCTRCNAGWIGDRCETKCSNGTYGEDCAFVCADCGSGHCDFQSGRCLCSPGVHGPHCNVTCPPGLHGADCAQACSCHEDTCDPVTGACHLETNQRKGVMGAGALLVLLVCLLLSLLGCCCACRGKDPTRRELSLGRKKAPHRLCGRFSRISMKLPRIPLRRQKLPKVVVAHHDLDNTLNCSFLEPPSGLEQPSPSWSSRASFSSFDTTDEGPVYCVPHEEAPAESRDPEVPTVPAEAPAPSPVPLTTPASAEEAIPLPASSDSERSASSVEGPGGALYARVARREARPARARGEIGGLSLSPSPERRKPPPPDPATKPKVSWIHGKHSAAAAGRAPSPPPPGSEAAPSPSKRKRTPSDKSAHTVEHGSPRTRDPTPRPPGLPEEATALAAPSPPRARARGRGPGLLEPTDAGGPPRSAPEAASMLAAELRGKTRSLGRAEVALGAQGPREKPAPPQKAKRSVPPASPARAPPATETPGPEKAATDLPAPETPRKKTPIQKPPRKKSREAAGELGRAGAPTL

SEQ ID NO: 22660 - protein, 84 aa, Homo sapiens
SLPSDPLELVVSEPLSISPSPTPAGSLGHLKTREEAAWASVGSDCDEAGVHPRCAPLERSTPAVGAAHTAPPVLTWRPLCSGHP

SEQ ID NO: 22661 - protein, 314 aa, Homo sapiens
MVVVGILLAYLAGWVLEWRWLAVLGCVPPSLMLLLMCFMPETPRFLLTQHRRQEAMAALRFLWGSEQGWEDPPIGAEQSFHLALLRQPGIYKPFIIGVSLMAFQQLSGVNAVMFYAETIFEEAKFKDSSLASVVVGVIQVLFTAVAALIMDRAGRRLLLVLSGVVMVFSTSAFGAYFKLTQGGPGNSSHVAISAPVSAQPVDASVGLAWLAVGSMCLFIAGFAVGWGPIPWLLMSEIFPLHVKGVATGICVLTNWLMAFLVTKEFSSLMEVLRPYGAFWLASAFCIFSVLFTLFCVPETKGKTLEQITAHFEGR

SEQ ID NO: 22662 - protein, 254 aa, Homo sapiens
MQVQCQQSPVLAGSATLVALGALALYVAKPSGYGKHTESLKPAATRLPARAAWFLQELPSFAVPAGILARQPLSLFGPPGTVLLGLFCLHYFHRTFVYSLLNRGRPYPAILILRGTAFCTGNGVLQGYYLIYCAEYPDGWYTDIRFSLGVFLFILGMGINIHSDYILRQLRKPGEISYRIPQGGLFTYVSGANFLGEIIEWIGYALATWSLPALAFAFFSLCFLGLRAFHHHRFYLKMFEDYPKSRKALIPFIF

SEQ ID NO: 22663 - protein, 1155 aa, Homo sapiens
MAYTENGEVYFIDHNTKTTSWLDPRCLNKQQKPLEECEDDEGVHTEELDSELELPAGWEKIEDPVYGIYYVDHINRKTQYENPVLEAKRKKQLEQQQQQQQQQQQQQQQQQQQQTEEWTEDHSALVPPVIPNHPPSNPEPAREVPLQGKPFFTRNPSELKGKFIHTKLRKSSRGFGFTVVGGDEPDEFLQIKSLVLDGPAALDGKMETGDVIVSVNDTCVLGHTHAQVVKIFQSIPIGASVDLELCRGYPLPFDPDDPNTSLVTSVAILDKEPIIVNGQETYDSPASHSSKTGKVNGMKDARPSSPADVASNSSHGYPNDTVSLASSIATQPELITVHIVKGPMGFGFTIADSPGGGGQRVKQIVDSPRCRGLKEGDLIVEVNKKNVQALTHNQVVDMLVECPKGSEVTLLVQRGGLPVPKKSPKSQPLERKDSQNSSQHSVSSHRSLHTASPSHSTQVLPEFPPAEAQAPDQTDSSGQKKPDPFKIWAQSRSMYENRLPDYQEQDIFLWRKETGFGFRILGGNEPGEPIYIGHIVPLGAADTDGRLRSGDELICVDGTPVIGKSHQLVVQLMQQAAKQGHVNLTVRRKVVFAVPKTENEVPSPASSHHSSNQPASLTEEKRTPQGSQNSLNTVSSGSGSTSGIGSGGGGGSGVVSTVVQPYDVEIRRGENEGFGFVIVSSVSRPEAGTTFGNACVAMPHKIGRIIEGSPADRCGKLKVGDRILAVNGCSITNKSHSDIVNLIKEAGNTVTLRIIPGDESSNATLLTNAEKIATITTTHTPSQQGTQETRNTTKPKQESQFEFKAPQATQEQDFYTVELERGAKGFGFSLRGGREYNMDLYVLRLAEDGPAERCGKMRIGDEILEINGETTKNMKHSRAIELIKNGGRRVRLFLKRGDGSVPEYDPSSDRHGPATGPQGVPEVRAGPDRRQHPSLESSYPPDLHKSSPHGEKRAHARDPKGSREYSRQPNEHHTWNGTSRKPDSGACRPKDRAPEGRRDAQAERAAAANGPKRRSPEKRREGTRSADNTLERREKHEKRRDVSPERRRERSPTRRRDGSPSRRRRSLERLLEQRRSPERRRGGSPERRAKSTDRRRARSPERRRERSLDKRNREDRASHREREEANLKQDAGRSSRHPPEQRRRPYKECSTDLSI

SEQ ID NO: 22664 - protein, 472 aa, Homo sapiens
TAFLGPKDLFPYDKCKDKYGKPNKRKGFNEGLWEIQNNPHASYSAPPPVSSSDSEAPEANPADGSDADEDDEDRGVMAVTAVTATAASDRMESDSDSDKSSDNSGLKRKTPALKMSVSKRARKASSDLDQASVSPSEEENSESSSESEKTSDQDFTPEKKAAVRAPRRGPLGGRKKKKAPSASDSDSKADSDGAKPEPVAMARSASSSSSSSSSSDSDVSVKKPPRGRKPAEKPLPKPRGRKPKPERPPSSSSSDSDSDEVDRISEWKRRDEARRRELEARRRREQEEELRRLREQEKEEKERRRERADRGEAERGSGGSSGDELREDDEPVKKRGRKGRGRGPPSSSDSEPEAELEREAKKSAKKPQSSSTEPARKPGQKEKRVRPEEKQQAKLECNGVISAHCNLRLPGSSDSPASALPSSWDYRHPPPRLANFCCFSRHGVSSCWPGWSRSPDPVICPPQPPKVLGLQV

SEQ ID NO: 22665 - protein, 1688 aa, Homo sapiens
MTEAITEAAVASSEEVSEERDDLGPLELHDSGTFQQVVNLLDIIDSESAKTDTTGAGLDMRKTLASVIIMEKATTEPSVVINTLIRCLQVPEISTQRKVNIYNILQDIIQQEGELEEQCVQRLVAIASKEMREIPEMEGYMKAEVASDTLVALSRNHFSLVMYELQHHLKPLNLTDEFVIITLAKLANGNVFEFMPYMGITLATIFTMLRLANEAKIRQAICSAMETFCETVQFYLKHLEESVYPVMTEEEFALKVFPMYRYFVTVWLRHYNPEVKLGVIKSLKPMLGLLLPNDDLREQVYDYIPLLLAEYQGKGHLPPFANPLQVLRQILELSVTTNTPVPQMQLHTIFTELHVQVCNKAPAQHQYSSQNLMEMVHCFVALARSYPKELMKFFFSQMETNKEAVRVGTLNLIRAIVSADEPRMSIRAIYLAIRVVKNTISDTRSKVRMAILHIIGQLALCGYQERIKGWGLKYLSVQLTLSTYKLTNRREKFYQRDLEERMVHKVTMDTVKIITSSVSGMTTEFWVRLLCYIMETDYVEALTPICISLTNLAEHQLHGQDVDVSVAGKSRQVDLPAPQKLLARLLVLMSSPYKGEGRGIAMLNLLRTLSQSIAPSMADMWELEIALLVRYLEEHTEFTWDQKAWEDKLIQFLRNSLKKTRGSSWSLRLSKELNNQIASFDSPSLEKGFLYRALGFTLATGLEASKVEVLLLELLYKTDYSNDFDSEGVIMCFGLCARGQVKTVLNVLHDFEERIQESEQSWQISAWRKDHPWRRETVKSALMVMYSCVASYCHPQLLLNLVDSPITAKIIHHYVSSCQDICLKMAFMKSVVQVTKAINNIKDLEDFHFAQKTTLTSIIVAVIKAEPTDNLVSPVRALAMEALSHLSKLKPFYSTEENSELMDISIHSVISLQLPGEDNESIKTLYANALSSLEQLMESLLQRQLDPKGLQEMVQLLEKWILSEKEWEREKAVSLHLYLMWIYVHSTAVCIHLKLGQFGTMVGLIAPCTCDAHQRTRMASMNVLSSLLDLHASQTCSLWGPSKQKELEKCKGDLQSTDVEKIFCASSRIAKVVCMEFSCDEVVSLIQKLCENTGAMNLQHDKASVTWIAFFLQMRAKELEDKVAEILSAILVHLPVVDHPEVRRLLIDGILLLAHHHQETILTSLLRQPLPMESHLAEVWLAVSENVPFARTMLHSLMGRLQSRLSPRISATSKADIWRLAAVDPLMTLCTIHLLIQKLDENDKLPDFLPDLIYTLLLQLGSSHRPEAAPPVLKMWKLVHTTPLPEEMNLQRCSRGRVTIKSMQLLFKRVKSQHLAHTLDEQAVWDLLQDGGTFLEGVSLLARLCMQHVEGHRQRLAELVLRGMDSEVLSCRISSTAVCVEMRHRFMSGPVLYQEKLLKPAALLLEKGADQEEDEALRVLSLRALGNMALGAPKKVKQYRKVLLEKCLGPLREPVSNSVTAEGMEALTKILAELREGDVGSSFDAMSEQCRIFFDNESELLRLKAFILFGKLARVVGMSKKHFFKGEVKKAWIPLMLHSQDPCSNAAQACMATMFQCVHFWGWKSLEHPSGPSDTATDDKMTVFQTTMCSILTRKKPAVLYRFLLETMAYVKNNLSRIRIAACNLAGIIMKQMSTHYLKKLDFPALRNSLQELQLDPDPGVRRAALETLTVLDSCSQHGFLASPQGMS

SEQ ID NO: 22666 - protein, 240 aa, Homo sapiens
MPPLLFEVSSLENAFQIGGHPWHYIVTPNKKKQKGVFHICALKDNSLAKNGIQEMDCCSLESDWIYFHPDASGRIIHVGPNQVKVLKLTEIENNSSQHQISEDFVILANRENHKNENVLTVTASGRVVKKSFNLLDDDPEQETFKIVDYEDELDLLSVVAVTQIDAEGKAHLDFHCNEYGTLLKSIPLVESWDVTYSHEVYFDRDLVLHIEQKPNRVFSCYVYQMICDTGEEEETINRSC

SEQ ID NO: 22667 - protein, 197 aa, Homo sapiens
MFGLKRNAVIGLNLYCGGAGLGAGSGGATRPGGRLLATGAKDTKPMGRSGATSRKALETLRRVGDGVQRNHETAFQGMLRKLDIKNEDDVKSLSRVMIHVFSDGVTNWGRIVTLISFGAFVAKHLKTINQESCIEPLAESITDVLVRTKRDWLVKQRGWDGFVEFFHVEDLEGGIRNVLLAFAGVAGVGAGLAYLIR

SEQ ID NO: 22668 - protein, 712 aa, Homo sapiens
MEENPTLESEAWGSSREWLAPREARGAPCSSPGPSLSSVLNELPSAATLRYRDPGVLPWGALEEEEEDGGRSRKAFTEVTQTELQDPHPSRELPWPMQARRAHRQRNASRDQVVYGSGTKTDRWARLLRRSKEKTKEGLRSLQPWAWTLKRIGGQFGAGTESYFSLLRFLLLLNVLASVLMACMTLLPTWLGGAPPGPPGPDISSPCGSYNPHSQGLVTFATQLFNLLSGEGYLEWSPLFYGFYPPRPRLAVTYLCWAFAVGLICLLLILHRSVSGLKQTLLAESEALTSYSHRVFSAWDFGLCGDVHVRLRQRIILYELKVELEETVVRRQAAVRTLGQQARVWLVRVLLNLLVVALLGAAFYGVYWATGCTVELQEMPLVQELPLLKLGVNYLPSIFIAGVNFVLPPVFKLIAPLEGYTRSRQIVFILLRTVFLRLASLVVLLFSLWNQITCGGDSEAEDCKTCGYNYKQLPCWETVLGQEMYKLLLFDLLTVLAVALLIQFPRKLLCGLCPGALGRLAGTQEFQVPDEVLGLIYAQTVVWVGSFFCPLLPLLNTVKFLLLFYLKKLTLFSTCSPAARTFRASAANFFFPLVLLLGLAISSVPLLYSIFLIPPSKLCGPFRGQSSIWAQIPESISSLPETTQNFLFFLGTQAFAVPLLLISSILMAYTVALANSYGRLISELKRQRETEAQNKVFLARRAVALTSTKPAL

SEQ ID NO: 22669 - protein, 633 aa, Homo sapiens
MAGAQTLLTFRDVAIEFSLEEWKCLDLAQQNLYRDVMLENYRNLFSVGLTVCKPGLITCLEQRKEPWNVKRQEAADGHPEMGFHHATQACLELLGSSDLPASASQSAGITGVNHRAQPGLNVSVDKFTALCSPGVLQTVKWFLEFRCIFSLAMSSHFTQDLLPEQGIQDAFPKRILRGYGNCGLDNLYLRKDWESLDECKLQKDYNGLNQCSSTTHSKIFQYNKYVKIFDNFSNLHRRNISNTGEKPFKCQECGKSFQMLSFLTEHQKIHTGKKFQKCGECGKTFIQCSHFTEPENIDTGEKPYKCQECNNVIKTCSVLTKNRIYAGGEHYRCEEFGKVFNQCSHLTEHEHGTEEKPCKYEECSSVFISCSSLSNQQMILAGEKLSKCETWYKGFNHSPNPSKHQRNEIGGKPFKCEECDSIFKWFSDLTKHKRIHTGEKPYKCDECGKAYTQSSHLSEHRRIHTGEKPYQCEECGKVFRTCSSLSNHKRTHSEEKPYTCEECGNIFKQLSDLTKHKKTHTGEKPYKCDECGKNFTQSSNLIVHKRIHTGEKPYKCEECGRVFMWFSDITKHKKTHTGEKPYKCDECGKNFTQSSNLIVHKRIHTGEKPYKCEKCGKAFTQFSHLTVHESIHT

SEQ ID NO: 22670 - protein, 1198 aa, Homo sapiens
MVILQQGDHVWMDLRLGQEFDVPIGAVVKLCDSGQVQVVDDEDNEHWISPQNATHIKPMHPTSVHGVEDMIRLGDLNEAGILRNLLIRYRDHLIYTYTGSILVAVNPYQLLSIYSPEHIRQYTNKKIGEMPPHIFAIADNCYFNMKRNSRDQCCIISGESGAGKTESTKLILQFLAAISGQHSWIEQQVLEATPILEAFGNAKTIRNDNSSRFGKYIDIHFNKRGAIEGAKIEQYLLEKSRVCRQALDERNYHVFYCMLEGMSEDQKKKLGLGQASDYNYLAMGNCITCEGRVDSQEYANIRSAMKVLMFTDTENWEISKLLAAILHLGNLQYEARTFENLDACEVLFSPSLATAASLLEVNPPDLMSCLTSRTLITRGETVSTPLSREQALDVRDAFVKGIYGRLFVWIVDKINAAIYKPPSQDVKNSRRSIGLLDIFGFENFAVNSFEQLCINFANEHLQQFFVRHVFKLEQEEYDLESIDWLHIEFTDNQDALDMIANKPMNIISLIDEESKFPKGTDTTMLHKLNSQHKLNANYIPPKNNHETQFGINHFAGIVYYETQGFLEKNRDTLHGDIIQLVHSSRNKFIKQIFQADVAMGAETRKRSPTLSSQFKRSLELLMRTLGACQPFFVRCIKPNEFKKPMLFDRHLCVRQLRYSGMMETIRIRRAGYPIRYSFVEFVERYRVLLPGVKPAYKQGDLRGTCQRMAEAVLGTHDDWQIGKTKIFLKDHHDMLLEVERDKAITDRVILLQKVIRGFKDRSNFLKLKNAATLIQRHWRGHNCRKNYGLMRLGFLRLQALHRSRKLHQQYRLARQRIIQFQARCRAYLVRKAFRHRLWAVLTVQAYARGMIARRLHQRLRAEYLWRLEAEKMRLAEEEKLRKEMSAKKAKEEAERKHQERLAQLAREDAERELKEKEAARRKKELLEQMERARHEPVNHSDMVDKMFGFLGTSGGLPGQEGQAPSGFEDLERGRREMVEEDLDAALPLPDEDEEDLSEYKFAKFAATYFQGTTTHSYTRRPLKQPLLYHDDEGDQLAALAVWITILRFMGDLPEPKYHTAMSDGSEKIPVMTKIYETLGKKTYKRELQALQGEGEVLQAQLPEGQKKSSVRHKLVHLTLKKKSKLTEEVTKRLHDGESTVQGNSMLEDRPTSNLEKLHFIIGNGILRTPGPESLLVAEWCLCQPSKRLSRPGFGFAAS

SEQ ID NO: 22671 - protein, 1568 aa, Homo sapiens
MAGVGAAALSLLLHLGALALAAGAEGGAVPREPPGQQTTAHSSVLAGNSQEQWHPLREWLGRLEAAVMELREQNKDLQTRVRQLESCECHPASPQCWGLGRAWPEGARWEPDACTACVCQDGAAHCGPQAHLPHCRGCSQNGQTYGNGETFSPDACTTCRCLTGAVQCQGPSCSELNCLESCTPPGECCPICRPGCDYEGQLYEEGVTFLSSSNPCLQCTCLRSRVRCMALKCPPSPCPEPVLRPGHCCPTCQGCTEGGSHWEHGQEWTTPGDPCRICRCLEGHIQCRQRECASLCPYPARPLPGTCCPVCDGCFLNGREHRSGEPVGSGDPCSHCRCANGSVQCEPLPCPPVPCRHPGKIPGQCCPVCDGCEYQGHQYQSQETFRLQERGLCVRCSCQAGEVSCEEQECPVTPCALPASGRQLCPACELDGEEFAEGVQWEPDGRPCTACVCQDGVPKCGAVLCPPAPCQHPTQPPGACCPSCDSCTYHSQVYANGQNFTDADSPCHACHCQDGTVTCSLVDCPPTTCARPQSGPGQCCPRCPDCILEEEVFVDGESFSHPRDPCQECRCQEGHAHCQPRPCPRAPCAHPLPGTCCPNDCSGCAFGGKEYPSGADFPHPSDPCRLCRCLSGNVQCLARRCVPLPCPEPVLLPGECCPQCPAAPAPAGCPRPGAAHARHQEYFSPPGDPCRRCLCLDGSVSCQRLPCPPAPCAHPRQGPCCPSCDGCLYQGKEFASGERFPSPTAACHLCLCWEGSVSCEPKACAPALCPFPARGDCCPDCDGCEYLGESYLSNQEFPDPREPCNLCTCLGGFVTCGRRPCEPPGCSHPLIPSGHCCPTCQGCRYHGVTTASGETLPDPLDPTCSLCTCQEGSMRCQKKPCPPALCPHPSPGPCFCPVCHSCLSQGREHQDGEEFEGPAGSCEWCRCQAGQVSCVRLQCPPLPCKLQVTERGSCCPRCRGCLAHGEEHPEGSRWVPPDSACSSCVCHEGVVTCARIQCISSCAQPRQGPHDCCPQCSDCEHEGRKYEPGESFQPGADPCEVCICEPQPEGPPSLRCHRRQCPSLVGCPPSQLLPPGPQHCCPTCAEALSNCSEGLLGSELAPPDPCYTCQCQDLTWLCIHQACPELSCPLSERHTPPGSCCPVCRAPTQSCVHQGREVASGERWTVDTCTSCSCMAGTVRCQSQRCSPLSCGPDKAPALSPGSCCPRCLPRPASCMAFGDPHYRTFDGRLLHFQGSCSYVLAKDCHSGDFSVHVTNDDRGRSGVAWTQEVAVLLGDMAVRLLQDGAVTVDGHPVALPFLQEPLLYVELRGHTVILHAQPGLQVLWDGQSQVEVSVPGSYQGRTCGLCGNFNGFAQDDLQGPEGLLLPSEAAFGNSWQVSEGLWPGRPCSAGREVDPCRAAGYRARREANARCGVLKSSPFSRCHAVVPPEPFFAACVYDLCACGPGSSADACLCDALEAYASHCRQAGVTPTWRGPTLCVVGCPLERGFVFDECGPPCPRTCFNQHIPLGELAAHCVRPCVPGCQCPAGLVEHEAHCIPPEACPQVLLTGDQPLGARPSPSREPQETP

SEQ ID NO: 22672 - protein, 376 aa, Homo sapiens
MVVEVDSMPAASSVKKPFGLRSKMGKWCCRCFPCYRESGKSNVGTSGDHDDSAMKTLRSKMGKWCHHCFPCCRGSGKSNVGASGDHDDSAMKTLRNKMGKWCCHCFPCCRGSGKSKVGAWGDYDDSAFMEPRYHVRGEDLDKLHRAAWWGKVPRKDLIVMLRDTDVNKKDKQKRTALHLASANGNSEVVKLLLDRRCQLNVLDNKKRTALIKAVQCQEDECALMLLEHGTDPNIPDEYGNTTLHYAIYNEDKLMAKALLLYGADIESKNKHGLTPLLLGVHEQKQQVVKFLIKKKANLNALDRYGRTALILAVCCGSASIVSLLLEQNIDVSSQDLSGQTAREYAVSSHHHVICQLLSDYKEKQMLKISSENSNPG

SEQ ID NO: 22673 - protein, 164 aa, Homo sapiens
GTVAIGGYWAGSRDVKKYMKHKRDDGPEKQEDEAVDVTPVMTCVFVVMCCSMLVLLYYFYDLLVYVVIGIFCLASATGLYSCLAPCVRRLPFGKCRIPNNSLPYFHKRPQARMLLLALFCVAVSVVWGVFRNEDQWAWVLQDALGIAFCLYMLKTIRLPTFKAC

SEQ ID NO: 22674 - protein, 315 aa, Homo sapiens [sequence omitted]

SEQ ID NO: 22675 - protein, 1136 aa, Homo sapiens [sequence omitted]

SEQ ID NO: 22676 - protein, 496 aa, Homo sapiens
MTKSNGEEPKMGGRMERFQQGVRKRTLLAKKKVQNITKEDVKSYLFRNAFVLLTVTAVIVGMAALDSKASGKMGMRAVVYYMTTTIIAVVIGIIIVIIIHPGKGTKENMHREGKIVRVTAADAFLDLIRNMFPPNLVEACFKQFKTNYEKRSFKVPIQANETLVGAVINNVSEAMETLTRITEELVPVPGSVNGVNALGLVVFSMCFGFVIGNMKEQGQALREFFDSLNEAIMRLVAVIMWYAPVGILFLIAGKIVEMEDMGVIGGQLAMYTVTVIVGLLIHAVIVLPLLYFLVTRKNPWVFIGGLLQALITALGTSSSSATLPITFKCLEENNGVDKRVTRFVLPVGATINMDGTALYEALAAIFIAQVNNFELNFGQIITISITATAASIGAAGIPQAGLVTMVIVLTSVGLPTDDITLIIAVDWFLDRLRTTTNVLGDSLGAGIVEHLSRHELKNRDVEMGNSVIEENEMKKPYQLIAQDNETEKPIDSETKM

SEQ ID NO: 22677 - protein, 1260 aa, Homo sapiens
MGSVTGAVLKTLLLLSTQNWNRVEAGNSYDCDDPLVSALPQASFSSSSELSSSHGPGFARLNRRDGAGGWSPLVSNKYQWLQIDLGERMEVTAVATQGGYGSSNWVTSYLLMFSDSGWNWKQYRQEDSIWGFSGNANADSVVYYRLQPSIKARFLRFIPLEWNPKGRIGMRIEVFGCAYRSEVVDLDGKSSLLYRFDQKSLSPIKDIISLKFKTMQSDGILLHREGPNGDHITLQLRRARLFLLINSGEAKLPSTSTLVNLTLGSLLDDQHWHSVLIQRLGKQVNFTVDEHRHHFHARGEFNLMNLDYEGNVSFSCSQPQSMPVTFLSSRSYLALPDFSGEEEVSATFQFRTWNKAGLLLFSELQLISGGILLFLSDGKLKSNLYQPGKLPSDITAGVELNDGQWHSVSLSAKKNHLSVAVDGQMASAAPLLGPEQIYSGGTYYFGGCPDKSFGSKCKSPLGGFQGCMRLISISGKVVDLISVQQGSLGNFSDLQIDSCGISDRCLPNYCEHGGECSQSWSTFHCNCTNTGYRGATCHNSIYEQSCEAYKHRGNTSGFYYIDSDGSGPLEPFLLYCNMTETAWTIIQHNGSDLTRVRNTNPENPYAGFFEYVASMEQLQATINRAEHCEQEFTYYCKKSRLVNKQDGTPLSWWVGRTNETQTYWGGSSPDLQKCTCGLEGNCIDSQYYCNCDADRNEWTNDTGLLAYKEHLPVTKIVITDTGRLHSEAAYKLGPLLCQGDRSFWNSASFDTEASYLHFPTFHGELSADVSFFFKTTASSGVFLENLGIADFIRIELRSPTVVTFSFDVGNGPFEISVQSPTHFNDNQWHHVRVERNMKEASLQVDQLTPKTQPAPADGHVLLQLNSQLFVGGTATRQRGFLGCIRSLQLNGMTLDLEERAQVTPEVQPGCRGHCSSYGKLCRNGGKCRERPIGFFCDCTFSAYTGPFCSNEISAYFGSGSSVIYNFQENYLLSKNSSSHAASFHGDMKLSREMIKFSFRTTRTPSLLLFVSSFYKEYLSVIIAKNGSLQIRYKLNKYQEPDVVNFDFKNMADGQLHHIMINREEGVVFIEIDDNRRRQVHLSSGTEFSAVKSLVLGRILEHSDVDQDTALAGAQGFTGCLSAVQLSHVAPLKAALHPSHPDPVTVTGHVTESSCMAQPGTDATSRERTHSFADHSGTIDDREPLANAIKSDSAVIGGLIAVVIFILLCITAIAVRIYQQKRLYKRSEAKRSENVDSAEAVLKSELNIQNAVNENQKEYFF

SEQ ID NO: 22678 - protein, 1004 aa, Homo sapiens
MAALHTTPDSPAAQLERAEDGSECDPDQEEEEEEEEKGEEVQEVEEEEEEIVVEEEEEGVAEVVQDAQVEAVAEVEVEADVEEEDVKEVLAEEECPALGTQERLSRGGDAKSPVLQEKGLQASRAPATPRDEDLEEEEEEEEDEDEDDLLTAGCQELVTFEDVAVYFSLEEWERLEADQRGLYQEVMQENYGILVSLGYPIPKPDLIFRLEQGEEPWVPDSPRPEEGDIVTGVYTGAWFWTDDIEDHEEEDDEDFLAEVAEEENEPPGLWSAAYGVGDVPGTWGPDDSDSAQTPEGWGPDPGGLGVLADGSEAKPFLPGREPGANLLSPWAFPAAVAPPAGRPETTCDVCGKVFPHRSRLAKHQRYHAAVKPFGCEECGKGFVYRSHLAIHQRTHTGEKPFPCPDCGKRFVYKSHLVTHRRIHTGERPYRCAFCGAGFGRRSYLVTHQRTHTGERPYPCSHCGRSFSQSSALARHQAVHTADRPHCCPDCGQAFRLRADFQRHRRGGGCAEAGGDGPRREPGETAAAAGPEDTDPGPEGSEVGEADGEAEAAAEEREEAAVAAPTPSGKVDPAPERRFLELGNGLGEGEGPSSHPLGFHFPVHPKSWLHPDSFPILGLPDFRERLPVDGRPLPAPLGGPLSLVEGTGLACDPFGGGGAAGGGGGLRAFGPAIGGLLAEPAPAALAEEESPWICSDCGKTFGRRAALAKHQRYHAGERPHRCADCGKSFVYGSHLARHRRTHTGERPFPCPECGARFARGSHLAAHVRGHTGEKPFVCGVCGAGFSRRAHLTAHGRAHTGERPYACGECGRRFGQSAALTRHQWAHAEEKPHRCPDCGKGFGHSSDFKRHRRTHTGEKPFRCADCGRGFAQRSNLAKHRRGHTGERPFPCPECGKRFSQRSVLVTHQRTHTGERPYACANCGRRFSQSSHLLTHMKTHRGATAAPGSGSAPAPAPKPEAAAKGPSSAGPGERGSALLEFAGGTSFGSEHQAAFAGPSGAYREGVL

SEQ ID NO: 22679 - protein, 453 aa, Homo sapiens
MQQTSWNPLGGTCKQPPGRTHSAVELWKPGAQDASSQAQGGSSCILREEARMPHSAGGTAGVGLEAAEPTALLTRAEPPSEPTEIRPQKRKKGPAPKMLGNELCSVCGDKASGFHYNVLSCEGCKGFFRRSVIKGAHYICHSGGHCPMDTYMRRKCQECRLRKCRQAGMREECVLSEEQIRLKKLKRQEEEQAHATSLPPRASSPPQILPQLSPEQLGMIEKLVAAQQQCNRRSFSDRLRVTPWPMAPDPHSREARQQRFAHFTELAIVSVQEIVDFAKQLPGFLQLSREDQIALLKTSAIEVMLLETSRRYNPGSESITFLKDFSYNREDFAKAGLQVEFINPIFEFSRAMNELQLNDAEFALLIAISIFSADRPNVQDQLQVERLQHTYVEALHAYVSIHHPHDRLMFPRMLMKLVSLRTLSSVHSEQVFALRLQDKKLPPLLSEIWDVHE

SEQ ID NO: 22680 - protein, 520 aa, Homo sapiens
MAAVAVAVREDSGSGMKAESPWAWVGREMTKEEKLQLRKEKKQQKKKRKEEKGAEPETGSAVSAAQCQGPTRELPESGIQLGTPREKVPAGRSKAELRAERRAKQEAERALKQARKGEQGGPPPKASPSTAGETPSGVKRLPEYPQVDDLLLRRLVKKPERQQVPTRKDYGSKVSLFSHLPQYSRQNSLTQFMSIPSSVIHPAMVRLGLQYSQGLVSGSNARCIALLRALQQVIQDYTTPPNEELSRDLVNKLKPYMSFLTQCRPLSASMHNAIKFLNKEITSVGSSKREEEAKSELRAAIDRYVQEKIVLAAQAISRFAYQKISNGDVILVYGCSSLVSRILQEAWTEGRRFRVVVVDSRPWLEGRHTLRSLVHAGVPASYLLIPAASYVLPEVSKVLLGAHALLANGSVMSRVGTAQLALVARAHNVPVLVCCETYKFCERVQTDAFVSNELDDPDDLQCKRGEHVALANWQNHASLRLLNLVYDVTPPELVDLVITELGMIPCSSVPVVLRVKSSDQ

SEQ ID NO: 22681 - protein, 561 aa, Homo sapiens
MAFPLEEEAGRIKDCWDNQEAPALSTCSNANIFRRINAILDNSLDFSRVCTTPINRGIHDHLPDFQDSEETVTSRMLFPTSAQESSRGLPDANDLCLGLQSLSLTGWDRPWSTQDSDSSAQSSTHSVLSMLHNPLGNVLGKPPLSFLPLDPLGSDLVDKFPAPSVRGSRLDTRPILDSRSSSPSDSDTSGFSSGSDHLSDLISSLRISPPLPFLSLSGGGPRDPLKMGVGSRMDQEQAALAAVTPSPTSASKRWPGASVWPSWDLLEAPKDPFSIEREARLHRQAAAVNEATCTWSGQLPPRNYKNPIYSCKVFLGGVPWDITEAGLVNTFRVFGSLSVEWPGKDGKHPRCPPKGYVYLVFELEKSVRSLLQACSHDPLSPDGLSEYYFKMSSRRMRCKEVQVIPWVLADSNFVRSPSQRLDPSRTVFVGALHGMLNAEALAAILNDLFGGVVYAGIDTDKHKYPIGSGRVTFNNQRSYLKAVSAAFVEIKTTKFTKKVQIDPYLEDSLCHICSSQPGPFFCRDQVCFKYFCRSCWHWRHSMEGLRHHSPLMRNQKNRDSS

SEQ ID NO: 22682 - protein, 575 aa, Homo sapiens
MDPEDEGVAGVMSVGPPAARLQEPVTFRDVAVDFTQEEWGQLDPTQRILYRDVMLETFGHLLSIGPELPKPEVISQLEQGTELWVAERGTTQGCHPAWEPRSESQASRKEEGLPEEEPSHVTGREGFPTDAPYPTTLGKDRECQSQSLALKEQNNLKQLEFGLKEAPVQDQGYKTLRLRENCVLSSSPNPFPEISRGEYLYTYDSQITDSEHNSSLVSQQTGSPGKQPGENSDCHRDSSQAIPITELTKSQVQDKPYKCTDCGKSFNHNAHLTVHKRIHTGERPYMCKECGKAFSQNSSLVQHERIHTGDKPYKCAECGKSFCHSTHLTVHRRIHTGEKPYECQDCGRAFNQNSSLGRHKRTHTGEKPYTCSVCGKSFSRTTCLFLHLRTHTEERPYECNHCGKGFRHSSSLAQHQRKHAGEKPFECRQRLIFEQTPALTKHEWTEALGCDPPLSQDERTHRSDRPFKCNQCGKCFIQSSHLIRHQITHTREEQPHGRSRRREQSSSRNSHLVQHQHPNSRKSSAGGAKAGQPESRALALFDIQKIMQEKNPVHVIGVEEPSVGASMLFDIREST

SEQ ID NO: 22683 - protein, 1364 aa, Homo sapiens
MLSFVDTRTLLLLAVTLCLATCQFFETVRKGPAGDRGPRGERGPPGPPGRDGEDGPTGPPGPPGPPGPPGLGGNFAAQYDGKGVGLGPGPMGLMGPRGPPGAAGAPGPQGFQGPAGEPGEPGQTGPAGARGPAGPPGKAGEDGHPGKPGRPGERGVVGPQGARGFPGTPGLPGFKGIRGHNGLDGLKGQPGAPGVKGEPGAPGENGTPGQTGARGLPGERGRVGAPGPAGARGSDGSVGPVGPAGPIGSAGPPGFPGAPGPKGEIGAVGNAGPAGPAGPRGEVGLPGLSGPVGPPGNPGANGLTGAKGAAGLPGVAGAPGLPGPRGIPGPVGAAGATGARGLVGEPGPAGSKGESGNKGEPGSAGPQGPPGPSGEEGKRGPNGEAGSAGPPGPPGLRGSPGSRGLPGADGRAGVMGPPGSRGASGPAGVRGPNGDAGRPGEPGLMGPRGLPGSPGNIGPAGKEGPVGLPGIDGRPGPIGPAGARGEPGNIGFPGPKGPTGDPGKNGDKGHAGLAGARGAPGPDGNNGAQGPPGPQGVQGGKGEQGPPGPPGFQGLPGPSGPAGEVGKPGERGLHGEFGLPGPAGPRGERGPPGESGAAGPTGPIGSRGPSGPPGPDGNKGEPGVVGAVGTAGPSGPSGLPGERGAAGIPGGKGEKGEPGLRGEIGNPGRDGARGAPGAVGAPGPAGATGDRGEAGAAGPAGPAGPRGSPGERGEVGPAGPNGFAGPAGAAGQPGAKGERGAKGPKGENGVVGPTGPVGAAGPAGPNGPPGPAGSRGDGGPPGMTGFPGAAGRTGPPGPSGISGPPGPPGPAGKEGLRGPRGDQGPVGRTGEVGAVGPPGFAGEKGPSGEAGTAGPPGTPGPQGLLGAPGILGLPGSRGERGLPGVAGAVGEPGPLGIAGPPGARGPPGAVGSPGVNGAPGEAGRDGNPGNDGPPGRDGQPGHKGERGYPGNIGPVGAAGAPGPHGPVGPAGKHGNRGETGPSGPVGPAGAVGPRGPSGPQGIRGDKGEPGEKGPRGLPGLKGHNGLQGLPGIAGHHGDQGAPGSVGPAGPRGPAGPSGPAGKDGRTGHPGTVGPAGIRGPQGHQGPAGPPGPPGPPGPPGVSGGGYDFGYDGDFYRADQPRSAPSLRPKDYEVDATLKSLNNQIETLLTPEGSRKNPARTCRDLRLSHPEWSSGYYWIDPNQGCTMDAIKVYCDFSTGETCIRAQPENIPAKNWYRSSKDKKHVWLGETINAGSQFEYNVEGVTSKEMATQLAFMRLLANYASQNITYHCKNSIAYMDEETGNLKKAVILQGSNDVELVAEGNSRFTYTVLVDGCSKKTNEWGKTIIEYKTNKPSRLPFLDIAPLDIGGADQEFFVDIGPVCFK

SEQ ID NO: 22684 - protein, 292 aa, Homo sapiens [sequence omitted]

SEQ ID NO: 22685 - protein, 652 aa, Homo sapiens
MPPRAPPAPGPRPPPRAAAATDTAAGAGGAGGAGGAGGPGFRPLAPRPWRWLLLLALPAACSAPPPRPVYTNHWAVQVLGGPAEADRVAAAHGYLNLGQIGNLEDYYHFYHSKTFKRSTLSSRGPHTFLRMDPQVKWLQQQEVKRRVKRQVRSDPQALYFNDPIWSNMWYLHCGDKNSRCRSEMNVQAAWKRGYTGKNVVVTILDDGIERNHPDLAPNYDSYASYDVNGNDYDPSPRYDASNENKHGTRCAGEVAASANNSYCIVGIAYNAKIGGIRMLDGDVTDVVEAKSLGIRPNYIDIYSASWGPDDDGKTVDGPGRLAKQAFEYGIKKGRQGLGSIFVWASGNGGREGDYCSCDGYTNSIYTISVSSATENGYKPWYLEECASTLATTYSSGAFYERKIVTTDLRQRCTDGHTGTSVSAPMVAGIIALALEANSQLTWRDVQHLLVKTSRPAHLKASDWKVNGAGHKVSHFYGFGLVDAEALVVEAKKWTAVPSQHMCVAASDKRPRSIPLVQVLRTTALTSACAEHSDQRVVYLEHVVVRTSISHPRRGDLQIYLVSPSGTKSQLLAKRLLDLSNEGFTNWEFMTVHCWGEKAEGQWTLEIQDLPSQVRNPEKQGDLETPVANQLTTEEREPGLKHVFRWQIEQELW

SEQ ID NO: 22686 - protein, 270 aa, Homo sapiens
MQRARPTLWAAALTLLVRCEPCDARALAQCAPPPAVCAELVREPGCGCCLTCALSEGQPCGIYTERCGSGLRCQPSPDEARPLQALLDGRGLCVNASAVSRLRAYLLPAPPAPGNASESEEDRSAGSVESPSVSSTHRVSDPKFHPLHSKIIIIKKGHAKDSQRYKVDYESQSTDTQNFSSESKRETEYGPCRREMEDTLNHLKFLNVLSPRGVHIPNCDKKGFYKKKQCRPSKGRKRGFCWCVDKYGQPLPGYTTKGKEDVHCYSMQSK

SEQ ID NO: 22687 - protein, 1353 aa, Homo sapiens
MERLCSDGFAFPHYYIKPYHLKRIHRAVLRGNLEKLKYLLLTYYDANKRDRKERTALHLACATGQPEMVHLLVSRRCELNLCDREDRTPLIKAVQLRQEACATLLLQNGADPNITDVFGRTALHYAVYNEDTSMIEKLLSHGTNIEECSKNEYQPLLLAVSRRKVKMVEFLLKKKANVNAIDYLGRSALILAVTLGEKDIVILLLQHNIDVFSRDVYGKLAEDYASEAENRVIFDLIYEYKRKRYEDLPINSNPVSPQKQRAEKATSDDKDSVSNIATEIKEGPISGTVSSQKQPAEKATSDEKDSVSNIATEIKEGQQSGTVSPQKQSAQKVIFKKKVSLLNIATRIMGGGKSGTVSSQKQPASKTASDKTDSALNTATEIKDGLQCGTVSSQKQQALKATTDEEGSVSNIATEIKDGEKSGTVSSQKKPALKATSDEKDSFSNITREKKDGEISRTVSSQKPPALKATSVKEDSVLNIAREKKDGEKSRTVSFEQPPGLKATRDEKDSLLNIARGKKDGEKTRRVSSHKQPSLKATSDKEDSVPNMATETKDEQISGTVSCQKQPALKATSDKKDSVSNIPTEIKDGQQSGTVSSQKQPAWKATSVKKDSVSNIATEIKDGQIRGTVSSQRRPALKTTGDEKDSVSNIAREIKDGEKSGTVSPQKQSAQKVIFKKKVSLLNIATRITGGGKSGTEYPENLRTLKATIENKDSVLNTATKMKEVQTSTPAEQDLEMASEGEQKRLEEYENNQPQVKNQIHSRDDLDDIIQSSQTVSEDGDSLCCNCKNVILLIDQHEMKCKDCVHLLKIKNTFCLWKRLIKLKDNHCEQLRVKIRKLKNKASVLQKRISEKEEIKSQLKHEILELEKELCSLRFAIQQEKKKRRNVEELHQKVREKLRITEEQYRIEADVTKPIKPALKSAEVELKTGGNNSNQVSETDEKEDLLHENRLMQDEIARLRLEKDTIKNQNLEKKYLKDFEIVKRKHEDLQKALKRNGETLAKTIACYSGQLAALTDENTTLRSKLEKQRESRQRLETEMQSYRCRLNAARCDHDQSHSSKRDQELAFQGTVDKCRHLQENLNSHVLILSLQLSKAESKSRVLKTELHYTGEALKEKALVFEHVQSELKQKQSQMKDIEKMYKSGYNTMEKCIEKQERFCQLKKQNMLLQQQLDDARNKADNQEKAILNIQARCDARVQNLQAECRKHRLLLEEDNKMLVNELNHSKEKECQYEKEKAEREVAVRQLQQKRDDVLNKGSATKALLDASSRHCTYLENGMQDSRKKLDQMRSQFQEIQDQLTATIRCTKEMEGDTQKLEVEHVMMRKIIKKQDDQIERLEKILQHSSLMLQVFES

SEQ ID NO: 22688 - protein, 1429 aa, Homo sapiens
MLYINRENWCTIEPCPDAASLLASKQSPECENFLDVGLGRECTSKQGVLKRESGSDSDLFHSPSDDMDSIIFPKPEEEHLACDITGSSSSTDDTASLDRHSSHGSDVSLSQILKPNRSRDRQSLDGFYSHGMGAEGRESESEPADPGDVEEEEMDSITEVPANCSVLRSSMRSLSPFRRHSWGPGKNAASDAEMNHRSSMRVLGDVVRRPPIHRRSFSLEGLTGGAGVGNKPSSSLEVSSANAEELRHPFSGEERVDSLVSLSEEDLESDQREHRMFDQQICHRSKQQGFNYCTSAISSPLTKSISLMTISHPGLDNSRPFHSTFHNTSANLTESITEENYNFLPHSPSKKDSEWKSGTKVSRTFSYIKNKMSSSKKSKEKEKEKDKIKEKEKDSKDKEKDKKTVNGHTFSSIPVVGPISCSQCMKPFTNKDAYTCANCSAFVHKGCRESLASCAKVKMKQPKGSLQAHDTSSLPTVIMRNKPSQPKERPRSAVLLVDETATTPIFANRRSQQSVSLSKSVSIQNITGVGNDENMSNTWKFLSHSTDSLNKISKVNESTESLTDEGVGTDMNEGQLLGDFEIESKQLEAESWSRIIDSKFLKQQKKDVVKRQEVIYELMQTEFHHVRTLKIMSGVYSQGMMADLLFEQQMVEKLFPCLDELISIHSQFFQRILERKKESLVDKSEKNFLIKRIGDVLVNQFSGENAERLKKTYGKFCGQHNQSVNYFKDLYAKDKRFQAFVKKKMSSSVVRRLGIPECILLVTQRITKYPVLFQRILQCTKDNEVEQEDLAQSLSLVKDVIGAVDSKVASYEKKVRLNEIYTKTDSKSIMRMKSGQMFAKEDLKRKKLVRDGSVFLKNAAGRLKEVQAVLLTDILVFLQEKDQKYIFASLDQKSTVISLKKLIVREVAHEEKGLFLISMGMTDPEMVEVHASSKEERNSWIQIIQDTINTLNRDEDEGIPSENEEEKKMLDTRARELKEQLHQKDQKILLLLEEKEMIFRDMAECSTPLPEDCSPTHSPRVLFRSNTEEALKGGPLMKSAINEVEILQGLVSGNLGGTLGPTVSSPIEQDVVGPVSLPRRAETFGGFDSHQMNASKGGEKEEGDDGQDLRRTESDSGLKKGGNANLVFMLKRNSEQVVQSVVHLYELLSALQGVVLQQDSYIEDQKLVLSERALTRSLSRPSSLIEQEKQRSLEKQRQDLANLQKQQAQYLEEKRRREREWEARERELREREALLAQREEEVQQGQQDLEKEREELQQKKGTYQYDLERLRAAQKQLEREQEQLRREAERLSQRQTERDLCQVSHPHTKLMRIPSFFPSPEEPPSPSAPSIAKSGSLDSELSVSPKRNSISRTHKDKGPFHILSSTSQTNKGPEGQSQAPASTSASTRLFGLTKPKEKKEKKKKNKTSRSQPGDGPASEVSAEGEEIFC

SEQ ID NO: 22689 - protein, 817 aa, Homo sapiens
MAAQPRGGDYRGFFLLSILLGTPWEAWAGRILYSVSEETDKGSFVGDIAKDLGLEPRELAERGVRIISRGRTQLFALNQRSGSLVTAGRIDREEICAQSARCLVNFNILMEDKMNLYPIDVEIIDINDNVPRFLTEEINVKIMENTAPGVRFPLSEAGDPDVGTNSLQSYQLSPNRHFSLAVQSGDDETKYPELVLERVLDREEERVHHLVLTASDGGDPPRSSTAHIQVTVVDVNDHTPVFSLPQYQVTVPENVPVGTRLLTVHAIDLDEGVNGEVTYSFRKITPKLPKMFHLNSLTGEISTLEGLDYEETAFYEMEVQAQDGPGSLTKAKVLITVLDVNDNAPEVTMTSLSSSIPEDTPLGTVIALFYLQDRDSGKNGEVTCTIPENLPFKLEKSIDNYYRLVTTKNLDRETLSLYNITLKATDGGTPPLSRETHIFMQVADTNDNPPTFPHSSYSVYIAENNPRGASIFLVTAQDHDSEDNAQITYSLAEDTIQGAPVSSYVSINSDTGVLYALQSFDYEQLRELQLRVTAHDSGDPPLSSNMSLSLFVLDQNDNPPEILYPALPTDGSTGMELAPRSAEPGYLVTKVVAVDKDSGQNAWLSYLLLKASEPGLFAVGLYTGEVRTARALLDRDALKQSLVVAVQDHGQPPLSATVTLTVAVADSIPEVLADLGSLEPSDGPYNYDLTLYLVVAVATVSCVFLAFVLVLLALRLRRWHKSRLLQASEGGLANVPTSHFVGMDGVQAFLQTYSHEVSLTADSRKSHLIFPQPNYVDMLISQESCEKNDSLLTSVDFQECKENLPSIQVSPALPLFP

SEQ ID NO: 22690 - protein, 761 aa, Homo sapiens [sequence omitted]

SEQ ID NO: 22691 - protein, 781 aa, Homo sapiens
MAANVGDQRSTDWSSQYSMVAGAGRENGMETPMHENPEWEKARQALASISKSGAAGGSAKSSSNGPVASAQYVSQAEASALQQQQYYQWYQQYNYAYPYSYYYPMPPVPGMDESMSYQAPPQQLPSAQPPQPSNPPHGAHTLNSGPQPGTAPATQHSQAGPATGQAYGPHTYTEPAKPKKGQQLWNRMKPAPGTGGLKFNIQKRPFAVTTQSFGSNAEGQHSGFGPQPNPEKVQNHSGSSARGNLSGKPDDWPQDMKEYVERCFTACESEEDKDRTEKLLKEVLQARLQDGSAYTIDWSREPLPGLTREPVAESPKKKRWEAASSLHPPRGAGSATRGGGAPSQRGTPGAGGAGRARGNSFTKFGNRNVFMKDNSSSSSTDSRSRSSSRSPTRHFRRSDSHSDSDSSYSGNECHPVGRRNPPPKGRGGRGAHMDRGRGRAQRGKRHDLAPTKRSRKKMAALECEDPERELKKQKRAARFQHGHSRRLRLEPLVLQMSSLESSGADPDWQELQIVGTCPDITKHYLRLTCAPDPSTVRPVAVLKKSLCMVKCHWKEKQDYAFACEQMKSIRQDLTVQGIRTEFTVEVYETHARIALEKGDHEEFNQCQTQLKSLYAENLPGNVGEFTAYRILYYIFTKNSGDITTELAYLTRELKADPCVAHALALRTAWALGNYHRFFRLYCHAPCMSGYLVDKFADRERKVALKAMIKTYVVPSSLLPLLFPSFRLVSSCIKLSPCPLLPLPPVFLLIFFSPFPPSLSAFFPWFSTGKTVPPSLPPSSAM

SEQ ID NO: 22692 - protein, 808 aa, Homo sapiens
MQVQDATRRPSAVRFLSSFLQGRRHSTSDPVLRLQQARRGSGLGSGSATKLLSSSSLQVMVAVSSVSHAEGNPTFPERKSKGNLERPTPKYTKVGERLRHVIPGHMACSMACGGRACKYENPARWSEQEQAIKGVYSSWVTDNILAMARPSSELLEKYHIIDQFLSHGIKTIINLQRPGEHASCGNPLEQESGFTYLPEAFMEAGIYFYNFGWKDYGVASLTTILDMVKVMTFALQEGKVAIHCHAGLGRTGVLIACYLVFATRMTADQAIIFVRAKRPNSIQTRGQLLCVREFTQFLTPLRNIFSCCDPKAHAVTLPQYLIRQRHLLHGYEARLLKHVPKIIHLVCKLLLDLAENRPVMMKDVSEGPGLSAEIEKTMSEMVTMQLDKELLRHDSDVSNPPNPTAVAADFDNRGMIFSNEQQFDPLWKRRNVECLQPLTHLKRRLSYSDSDLKRAENLLEQGETPQTVPAQILVGHKPRQQKLISHCYIPQSPEPDLHKEALVRSTLSFWSQSKFGGLEGLKDNGSPIFHGRIIPKEAQQSGAFSADVSGSHSPGEPVSPSFANVHKDPNPAHQQVSHCQCKTHGVGSPGSVRQNSRTPRSPLDCGSSPKAQFLVEHETQDSKDLSEAASHSALQSELSAEARRILAAKALANLNESVEKEELKRKVEMWQKELNSRDGAWERICGERDPFILCSLMWSWVEQLKEPVITKEDVDMLVDRRADAAEALFLLEKGQHQTILCVLHCIVNLQTIPVDVEEAFLAHAIKAFTKVNFDSENGPTVYNTLKKIFKHTLEEKRKMTKDGPKPGL

SEQ ID NO: 22693 - protein, 1642 aa, Homo sapiens
FLVSFMVDARGGSMRGSRHHGMRIIIPPRKCTAPTRITCRLVKRHKLANPPPMVEGEGLASRLVEMGPAGAQFLGPVIVEIPHFGSMRGKERELIVLRSENGETWKEHQFDSKNEDLTELLNGMDEELDSPEELGKKRICRIITKDFPQYFAVVSRIKQESNQIGPEGGILSSTTVPLVQASFPEGALTKRIRVGLQAQPVPDEIVKKILGNKATFSPIVTVEPRRRKFHKPITMTIPVPPPSGEGVSNGYKGDTTPNLRLLCSITGGTSPAQWEDITGTTPLTFIKDCVSFTTNVSARFWLADCHQVLETVGLATQLYRELICVPYMAKFVVFAKMNDPVESSLRCFCMTDDKVDKTLEQQENFEEVARSKDIEVLEGKPIYVDCYGNLAPLTKGGQQLVFNFYSFKENRLPFSIKIRDTSQEPCGRLSFLKEPKTTKGLPQTAVCNLNITLPAHKKIEKTDRRQSFASLALRKRYSYLTEPGMKTVERSTGATRSLPTTYSYKPFFSTRPYQSWTTAPITVPGPAKSGFTSLSSSSSNTPSASPLKSIWSVSTPSPIKSTLGASTTSSVKSISDVASPIRSFRTMSSPIKTVVSQSPYNIQVSSGTLARAPAVTEATPLKGLASNSTFSSRTSPVTTAGSLLERSSITMTPPASPKSNINMYSSSLPFKSIITSAAPLISSPLKSVVSPVKSAVDVISSAKITMASSLSSPVKQMPGHAEVALVNGSISPLKYPSSSTLINGCKATATLQEKISSATNSVSSVVSAATDTVEKVFSTTTAMPFSPLRSYVSAAPSAFQSLRTPSASALYTSLGSSISATTSSVTSSIITVPVYSVVNVLPEPALKKLPDSNSFTKSAAALLSPIKTLTTETHPQPHFSRTSSPVKSSLFLAPSALKLSTPSSLSSSQEILKDVAEMKEDLMRMTAILQTDVPEEKPFQPELPKEGRIDDEEPFKIVEKVKEDLVKVSEILKKDVCVDNKGSPKSPKSDKGHSPEDDWIEFSSEEIREARQQAAASQSPSLPERVQVKAKAASEKDYNLTKVIDYLTNDIGSSSLTNLKYKFEDAKKDGEERQKRVLKPAIALQEHKLKMPPASMRTSTSEKELCKMADSFFGTDTILESPDDFSQHDQDKSPLSDSGFETRSEKTPSAPQSAESTGPKPLFHEVPIPPVITETRTEVVHVIRSYDPSAGDVPQTQPEEPVSPKPSPTFMELEPKPTTSSIKEKVKAFQMKASSEEDDHNRVLSKGMRVKEETHITTTTRMVYHSPPGGEGASERIEETMSVHDIMKAFQSGRDPSKELAGLFEHKSAVSPDVHKSAAETSAQHAEKDNQMKPKLERIIEVHIEKGPQSPCERTDIRMAIVADHLGLSWTELARELNFSVDEINQIRVENPNSLISQSFMLLKKWVTRDGKNATTDALTSVLTKINRIDIVTLLEGPIFDYGNISGTRSFADENNVFHDPVDGWQNETSSGNLESCAQARRVTGGLLDRLDDSPDQCRDSITSYLKGEAGKFEANGSHTEITPEAKTKSYFPESQNDVGKQSTKETLKPKIHGSGHVEEPASPLAAYQKSLEETSKLIIEETKPCVPVSMKKMSRTSPADGKPRLSLHEEEGSSGSEQKQGEGFKVKTKKEIRHVEKKSHS

SEQ ID NO: 22694 - protein, 848 aa, Homo sapiens [sequence omitted]

SEQ ID NO: 22695 - protein, 957 aa, Homo sapiens
MAQVAMSTLPVEDEESSESRMVVTFLMSALESMCKELAKSKAEVACIAVYETDVFVVGTERGRAFVNTRKDFQKDFVKYCVEEEEKAAEMHKMKSTTQANRMSVDAVEIETLRKTVEDYFCFCYGKALGKSTVVPVPYEKMLRDQSAVVVQGLPEGVAFKHPENYDLATLKWILENKAGISFIIKRPFLEPKKHVGGRVMVTDADRSILSPGGSCGPIKVKTEPTEDSGISLEMAAVTVKEESEDPDYYQYNIQGSHHSSEGNEGTEMEVPAEDDDYSPPSKRPKANELPQPPVPEPANAGKRKVREFNFEKWNARITDLRKQVEELFERKYAQAIKAKGPVTIPYPLFQSHVEDLYVEGLPEGIPFRRPSTYGIPRLERILLAKERIRFVIKKHELLNSTREDLQLDKPASGVKEEWYARITKLRKMVDQLFCKKFAEALGSTEAKAVPYQKFEAHPNDLYVEGLPENIPFRSPSWYGIPRLEKIIQVGNRIKFVIKRPELLTHSTTEVTQPRTNTPVKEDWNVRITKLRKQVEEIFNLKFAQALGLTEAVKVPYPVFESNPEFLYVEGLPEGIPFRSPTWFGIPRLERIVRGSNKIKFVVKKPELVISYLPPGMASKINTKALQSPKRPRSPGSNSKVPEIEVTVEGPNNNNPQTSAVRTPTQTNGSNVPFKPRGREFSFEAWNAKITDLKQKVENLFNEKCGEALGLKQAVKVPFALFESFPEDFYVEGLPEGVPFRRPSTFGIPRLEKILRNKAKIKFIIKKPEMFETAIKESTSSKSPPRKINSSPNVNTTASGVEDLNIIQVTIPDDDNERLSKVEKARQLREQVNDLFSRKFGEAIGMGFPVKVPYRKITINPGCVVVDGMPPGVSFKAPSYLEISSMRRILDSAEFIKFTVIRPFPGLVINNQLVDQSESEGPVIQESAEPSQLEVPATEEIKETDGSSQIKQEPDPTW

SEQ ID NO: 22696 - protein, 671 aa, Homo sapiens
MQFVSTRPQPQQLGIQGLGLDSGSWSWAQALPPEEVCHQEPALRGEMAEGMPPMQAQEWDMDARRPMPFQFPPFPDRAPVFPDRMMREPQLPTAEISLWTVVAAIQAVERKVDAQASQLLNLEGRTGTAEKKLADCEKTAVEFGNHMESKWAVLGTLLQEYGLLQRRLENLENLLRNRNFWVLRLPPGSKGEAPKVPVTFVDIAVYFSEDEWKNLDEWQKELYNNLVKENYKTLMSLDAEGSVPKPDAPVQAEPREEPCVWEQRHPEEREIPMDPEAGAEPLVPAQDASSQVKREDTLCVRGQRGLEERAIPTESITDSPISAQDLLSRIKQEEHQCVWDQQDLADRDIPTDPNSESLISAHDILSWIKQEEQPYPWGPRDSMDGELGLDSGPSDSLLMVKNPPPAPPQPQPQPQPPQPQLQSQPQPQSLPPIAVAENPGGPPSRGLLDDGFQVLPGERGSGEAPPGGDRSTGGGGGDGGGGGGGAEAGTGAGGGCGSCCPGGLRRSLLLHGARSKPYSCPECGKSFGVRKSLIIHHRSHTKERPYECAECEKSFNCHSGLIRHQMTHRGERPYKCSECEKTYSRKEHLQNHQRLHTGERPFQCALCGKSFIRKQNLLKHQRIHTGERPYTCGECGKSFRYKESLKDHLRVHSGGPGPGAPRQLPPPPERD

SEQ ID NO: 22697 - protein, 291 aa, Homo sapiens
MTTAKEPSASGKSVQQQEQELVGSNPPQRNWKGIAIALLVILVICSLIVTSVILLTPAEDNSLSQKKKVTVEDLFSEDFKIHDPEAKWISDTEFIYREQKGTVRLWNVETNTSTVLIEGKKIESLRAIRYEISPDREYALFSYNVEPMKKVKSRKLTLPHSKSCDSLAVSQACSPACHQGCFLHYITMSLPLHCLRDYVSAVNGYSTALPACHVQGGPVSDIPWRPWLEDCRRVPGGRTANGTRLRSHAPAALRQHCPLSYECGRCEASHLLTPGIMHSSYRQISGQRATE

SEQ ID NO: 22698 - protein, 504 aa, Homo sapiens
MKQTKLEIQKALAEDATVYEYDSIYDEMQKKKEENNPKLLLGKDRKPKYIHNLLKAVEIRKKEQEKRMEKKIQREREMEKGEFDDKEAFVTSAYKKKLQERAEEEEREKRAAALEACLDVTKQKDLSGFYRHLLNQAVGEEEVPKCSFREARSGIKEEKSRGFSNEVSSKNRIPQEKCILQTDVKVEENPDADSDFDAKSSADDEIEETRVNCRREKVIETPENDFKHHRSQNHSRSPSEERGHSTRHHTKGSRTSRGHEKREDQHQQKQSRDQENHYTDRDYRKERDSHRHREASHRDSHWKRHEQEDKPRARDQRERSDRVWKREKDREKYSQREQERDRQQNDQNRPSEKGEKEEKSKAKEEHMKVRKERYENNDKYRDREKREVGVQSSERNQDRKESSPNSRAKDKFLDQERSNKMRNMAKDKERNQEKPSNSESSLGAKHRLTEEGQEKGKEQERPPEAVSKFAKRNNEETVMSARDRYLARQMARVNAKTYIEKEDD

SEQ ID NO: 22699 - protein, 538 aa, Homo sapiens
KMLCSKDSLGLKEELTDEDREKVAVHEGINSGTAMSRGLYQPATIFMGRQMSAILSMRDFSTEHKSPQPTKNFSIPDPHSHRQTAQSSNVTDSCVVQTSNDTQCLNKSDNIDGKASLQIGEKMPVTASVLSEEEQTHCLEIGSNTRHGKSNLSEGKKSAELNSPLRERLSPENRTTDLKCDSSSGSEGEILTREHIEVEEKRASPPVSPIPVSEYCESENKWSQEKHSPWEGVSDHLAHREPKSQKPFRKMQEEEEESWSTSSDLTISISEDDLILESPEPQPNPGGKMEGEDGIEALKLIHAEQERVALSTEKNCILQTLSSPDSEKESSTNAPTREPGQTPDSDVPRAQVGQHVATLKEHDNSVKEEATALLRKALTEECGRRSAIHSSESSCSLPSILNDNSGIKEAKPAVWLNSVPTREQETEAYQLLKKATLQDNTNQTENRFQKTDASVSHLSGLNIGSGAFETKTANKIASEASFSSSEGSPLSRHENKKKPVINLKSNALWDESDDSNSEIEAALRPRNHNTDDSDDFYD

SEQ ID NO: 22700 - protein, 257 aa, Homo sapiens
MAWSSKSWLCLIASSCPRDTLLPSAHHASPVPASHLTQVSNGCVSKILGRYYRTGVLEPKGIGGSKPRLATPPVVARIAQLKGECPALFAWEIQRQLCAEGLCTQDKTPSVSSINRVLRALQEDQGLPCTRLRSPAVLAPAVLTPHSGSETPRGTHPGTGHRNRTIFSPSQAEALEKEFQRGQYPDSVARGKLATATSLPEDTVRVWFSNRRAKWRRQEKLKWEMQLPGASQGLTVPRVAPGIISAQGPTVFMSRKY

SEQ ID NO: 22701 - protein, 926 aa, Homo sapiens
IMLLTDPEIESSLLISSDEGATYQKYRLNFYIQSLLFHPKQEDWILAYSQDQKLYSSAEFGRRWQLIQEGVVPNRFYWSVMGSNKEPDLVHLEARTVDGHSHYLTCRMQNCTEANRNQPFPGYIDPDSLIVQDHYVFVQLTSGGRPHYYVSYRRNAFAQMKLPKYALPKDMHVISTDENQVFAAVQEWNQNDTYNLYISDTRGVYFTLALENVQSSRGPEGNIMIDLYEVAGIKGMFLANKKIDNQVKTFITYNKGRDWRLLQAPDTDLRGDPVHCLLPYCSLHLHLKVSENPYTSGIIASKDTAPSIIVASGNIGSELSDTDISMFVSSDAGNTWRQIFEEEHSVLYLDQGGVLVAMKHTSLPIRHLWLSFDEGRSWSKYSFTSIPLFVDGVLGEPGEETLIMTVFGHFSHRSEWQLVKVDYKSIFDRRCAEEDYRPWQLHSQGEACIMGAKRIYKKRKSERKCMQGKYAGAMESEPCVCTEADFDCDYGYERHSNGQCLPAFWFNPSSLSKDCSLGQSYLNSTGYRKVVSNNCTDGVREQYTAKPQKCPGKAPRGLRIVTADGKLTAEQGHNVTLMVQLEEGDVQRTLIQVDFGDGIAVSYVNLSSMEDGIKHVYQNVGIFRVTVQVDNSLGSDSAVLYLHVTCPLEHVHLSLPFVTTKNKEVNATAVLWPSQVGTLTYVWWYGNNTEPLITLEGSISFRFTSEGMNTITVQVSAGNAILQDTKTIAVYEEFRSLRLSFSPNLDDYNPDIPEWRRDIGRVIKKSLVEATGVPGQHILVAVLPGLPTTAELFVLPYQDPAGENKRSTDDLEQISELLIHTLNQNSVHFELKPGVRVLVHAAHLTAAPLVDLTPTHSGSAMLMLLSVVFVGLAVFVIYKFKRRVALPSPPSPSTQPGDSSLRLQRARHATPPSTPKRGSAGAQYAI

SEQ ID NO: 22702 - protein, 851 aa, Homo sapiens
MHFILDPEDPGAPQASTEGKPKHRRLRGGVVMAAPPARPDHTRLLQICLLLGVLVEIRAEQILYSVFEEQEEGSVVGNIAKDLGLAPRELAERGVRIVSRGRTQLFALNPRSGTLVTAGRIDREELCDRSPNCVTNLEILLEDTVKILRVEVEIIDVNDNPPSFGTEQREIKVAENENPGARFPLPEAFDPDVGVNSLQGYQLNSNGYFSLDVQSGADGIKYPELVLERALDREEEAVHHLVLTAFDGGDPVRSGTARILIILVDTNDNAPVFTQPEYHVSVRENVPVGTRLLTVKATDPDEGANGDVTYSFRKVRDKISQLFQLNSLSGDITILGGLDYEDSGFYDIDVEAHDGPGLRARSKVLVTVLDENDNAPEVTVTSLTSSVQESSSPGTVIALFNVHDSDSGGNGLVTCSIPDNLPFTLEKTYGNYYRLLTHRTLDREEVSEYNITVTATDQGTPPLSTETHISLQVMDINDNPPTFPHASYSAYIPENNPRGASILSMTAQDPDSGDNARITYSLAEDTFQGAPLSSYVSINSNTGILYALCSFDYEQFRDLQLLMTASDSGDPPLSSNVSLSLFVLDQNDNVPEILYPTFPTDGSTGVELAPRSADSGYLVTKVVAVDRDSGQNAWLSYSLLKSSEPGLFAVGLHTGEVRTARALLDRDALKQRLVVVVQDHGQPPLSATVTLTVAVADSIPDVLADLGSLKPSADPDDSGLTLYLVVAVAAVSCVFLAFVTVLLALKLRRWHKSRLLHAEGSRLAGVPASHFVGVDGVRAFLQTYSHEVSLTADSRKSHLIFSQPSYADTLISRESCEKSEPLLITQDLLETKGDPNLQVSQSYNRSYHTEI

SEQ ID NO: 22703 - protein, 511 aa, Homo sapiens
MGGRKMATDEENVYGLEENAQSRQESTRRLILVGRTGAGKSATGNSILGQRRFFSRLGATSVTRACTTGSRRWDKCHVEVVDTPDIFSSQVSKTDPGCEERGHCYLLSAPGPHALLLVTQLGRFTAQDQQAVRQLSHGAFSPSTWLLLNCVCSTSLSPVNSIPAHRRRAGLSLLPLHLPERGPAARASVTATLEDRAQQPFLERMGGFQRGKYGTMAEGRSEDNLSATPPALRIILVGKTGCGKSATGNSILGQPVFESKLRAQSVTRTCQVKTGTWNGRKVLVVDTPSIFESQADTQELYKNIGDCYLLSAPGPHVLLLVIQLGRFTAQDTVAIRKVKEVFGTGAMRHVVILFTHKEDLGGQALDDYVANTDNCSLKDLVRECERRYCAFNNWGSVEEQRQQQAELLAVIERLGREREGSFHSNDLFLDAQLLQRTGAGACQEDYRQYQAKVEWQVEKHKQELRENESNWAYKALLRVKHLMLLHYEIFVFLLLCSILFFIIFLFIFHYI

SEQ ID NO: 22704 - protein, 700 aa, Homo sapiens [sequence omitted]

SEQ ID NO: 22705 - protein, 1070 aa, Homo sapiens
MADEEAGGTERMEISAELPQTPQRLASWWDQQVDFYTAFLHHLAQLVPEIYFAEMDPDLEKQEESVQMSIFTPLEWYLFGEDPDICLEKLKHSGAFQLCGRVFKSGETTYSCRDCAIDPTCVLCMDCFQDSVHKNHRYKMHTSTGGGFCDCGDTEAWKTGPFCVNHEPGRAGTIKENSRCPLNEEVIVQARKIFPSVIKYVVEMTIWEEEKELPPELQIREKNERYYCVLFNDEHHSYDHVIYSLQRALDCELAEAQLHTTAIDKEGRRAVKAGAYAACQEAKEDIKSHSENVSQHPLHVEVLHSEIMAHQKFALRLGSWMNKIMSYSSDFRQIFCQACLREEPDSENPCLISRLMLWDAKLYKGARKILHELIFSSFFMEMEYKKLFAMEFVKYYKQLQKEYISDDHDRSISITALSVQMFTVPTLARHLIEEQNVISVITETLLEVLPEYLDRNNKFNFQGYSQDKLGRVYAVICDLKYILISKPTIWTERLRMQFLEGFRSFLKILTCMQGMEEIRRQVGQHIEVDPDWEAAIAIQMQLKNILLMFQEWCACDEELLLVAYKECHKAVMRCSTSFISSSKTVVQSCGHSLETKSYRVSEDLVSIHLPLSRTLAGLHVRLSRLGAVSRLHEFVSFEDFQVEVLVEYPLRCLVLVAQVVAEMWRRNGLSLISQVFYYQDVKCREEMYDKDIIMLQIGASLMDPNKFLLLVLQRYELAEAFNKTISTKDQDLIKQYNTLIEEMLQVLIYIVGERYVPGVGNVTKEEVTMREIIHLLCIEPMPHSAIAKNLPENENNETGLENVINKVATFKKPGVSGHGVYELKDESLKDFNMYFYHYSKTQHSKAEHMQKKRRKQENKDEALPPPPPPEFCPAFSKVINLLNCDIMMYILRTVFERAIDTDSNLWTEGMLQMAFHILALGLLEEKQQLQKAPEEEVTFDFYHKASRLGSSAMNIQMLLEKLKGIPQLEGQKDMITWILQMFDTVKRLREKSCLIVATTSGSESIKNDEITHDKEKAERKRKAEAARLHRQKIMAQMSALQKNFIETHKLMYDNTSEMPGKEDSIMEEER

SEQ ID NO: 22706 - protein, 1338 aa, Homo sapiens [sequence omitted]

SEQ ID NO: 22707 - protein, 1397 aa, Homo sapiens; identical to SEQ ID NO: 22436

SEQ ID NO: 22708 - protein, 461 aa, Homo sapiens
MSGSSGPAPTPAVTKARRGDLTLQHGGGGRLGPRVGALTAAGGPCRKQLPPPPLSSLLGQGPGPGVQLDIASQSLDQEILLKVKTEIEEELKSLDKEISEAFTSTGFDRHTSPVFSPANPESSMEDCLAHLGEKVSQELKEPLHKALQMLLSQPVTYQAFRECTLETTVHASGWNKGTVFSLESEEEEYPGITAEDSNDIYILPSDNSGQVSPPESPTVTTSWQSESLPVSLSASQSWHTESLPVSLGPESWQQIAMDPEEVKSLDSNGAGEKSENNSSNSDIVHVEKEEVPEGMEEAAVASVVLPARELQEALPEAPAPLLPHITATSLLGTREPDTEVITVEKSSPATSLFVELDEEEVKAATTEPTEVEEVVPALEPTETLLSEKEINAREESLVEELSPASEKKPVPPSEGKSRLSPAGEMKPMPLSEGKSILLFGGAAAVAILAVAIGVALALRKK

SEQ ID NO: 22709 - protein, 300 aa, Homo sapiens
MASPSLPGSDCSQIIDHSHVPEFEVATWIKITLILVYLIIFVMGLLGNSATIRVTQVLQKKGYLQKEVTDHMVSLACSDILVFLIGMPMEFYSIIWNPLTTSSYTLSCKLHTFLFEACSYATLLHVLTLSFERYIAICHPFRYKAVSGPCQVKLLIGFVWVTSALVALPLLFAMGTEYPLVNVPSHRGLTCNRSSTRHHEQPETSNMSICTNLSSRWTVFQSSIFGAFVVYLVVLLSVAFMCWNMMQVLMKSQKGSLAGGTRPPQLRKSESEESRTARRQTIIFLRLGFLPLWVCSLPDQ

SEQ ID NO: 22710 - protein, 1226 aa, Homo sapiens
MSSPLQRAVGDTKRALSASSSSSASLPFDDRDSNHTSEGNGDSLLADEDTDFEDSLNRNVKKRAAKRPPKTTPVAKHPKKGSRVVHRHSRKQSEPPANDLFNAVKAAKSDMQSLVDEWLDSYKQDQDAGFLELVNFFIQSCGCKGIVTPEMFKKMSNSEIIQHLTEQFNEDSGDYPLIAPGPSWKKFQGSFCEFVRTLVCQCQYSLLYDGFPMDDLISLLTGLSDSQVRAFRHTSTLAAMKLMTSLVKVALQLSVHQDNNQRQYEAERNKGPGQRAPERLESLLEKRKELQEHQEEIEGMMNALFRGVFVHRYRDVLPEIRAICIEEIGCWMQSYSTSFLTDSYLKYIGWTLHDKHREVRLKCVKALKGLYGNRDLTTRLELFTSRFKDRMVSMVMDREYDVAVEAVRLLILILKNMEGVLTDADCESVYPVVYASHRGLASAAGEFLYWKLFYPECEIRMMGGREQRQSPGAQRTFFQLLLSFFVESELHDHAAYLVDSLWDCAGARLKDWEGLTSLLLEKDQNLGDVQESTLIEILVSSARQASEGHPPVGRVTGRKGLTSKERKTQADDRVKLTEHLIPLLPQLLAKFSADAEKVTPLLQLLSCFDLHIYCTGRLEKHLELFLQQLQEVVVKHAEPAVLEAGAHALYLLCNPEFTFFSRADFARSQLVDLLTDRFQQELEELLQSSFLDEDEVYNLAATLKRLSAFYNTHDLTRWELYEPCCQLLQKAVDTGEVPHQVILPALTLVYFSILWTLTHISKSDASQKQLSSLRDRMVAFCELCQSCLSDVDTEIQEQAFVLLSDLLLIFSPQMIVGGRDFLRPLVFFPEATLQSELASFLMDHVFIQPGDLGSGDSQEDHLQIERLHQRRRLLAGFCKLLLYGVLEMDAASDVFKHYNKFYNDYGDIIKETLTRARQIDRSHCSRILLLSLKQLYTELLQEHGPQGLNELPAFIEMRDLARRFALSFGPQQLQNRDLVVMLHKEGIQFSLSELPPAGSSNQPPNLAFLELLSEFSPRLFHQDKQLLLSYLEKCLQHVSQAPGHPWGPVTTYCHSLSPVENTAETSPQVLPSSKRRRVEGPAKPNREDVSSSQEESLQLNSIPPTPTLTSTAVKSRQPLWGLKEMEEEDGSELDFAQGSQPVAGTERSRFLGPQYFQTPHNPSGPGLGNQLMRLSLMEEDEEEELEIQDESNEERQDTDMQASSYSSTSERGLDLLDSTELDIEDF

SEQ ID NO: 22711 - protein, 1606 aa, Homo sapiens [sequence omitted]

SEQ ID NO: 22712 - protein, 650 aa, Homo sapiens
MLRLQMTDGHISCTAVEFSYMSKISLNTPPGTKVKLSGIVDIKNGFLLLNDSNTTVLGGEVEHLIEKWELQRSLSKHNRSNIGTEGGPPPFVPFGQCVSHVQVDSRELDRRKTLQVTMPVKPTNDNDEFEKQRTAAIAEVAKSKETKTFGGGGGGARSNLNMNAAGNRNREVLQKEKSTKSEGKHEGVYRELVDEKALKHITEMGFSKEASRQALMDNGNNLEAALNVLLTSNKQKPVMGPPLRGRGKGRGRIRSEDEEDLGNARPSAPSTLFDFLESKMGTLNVEEPKSQPQQLHQGQYRSSNTEQNGVKDNNHLRHPPRNDTRQPRNEKPPRFQRDSQNSKSVLEGSGLPRNRGSERPSTSSVSEVWAEDRIKCDRPYSRYDRTKDTSYPLGSQHSDGAFKKRDNSMQSRSGKGPSFAEAKENPLPQGSVDYNNQKRGKRESQTSIPDYFYDRKSQTINNEAFSGIKIEKHFNVNTDYQNPVRSNSFIGVPNGEVEMPLKGRRIGPIKPAGPVTAVPCDDKIFYNSGPKRRSGPIKPEKILESSIPMEYAKMWKPGDECFALYWEDNKFYRAEVEALHSSGMTAVVKFIDYGNYEEVLLSNIKPIQTEAWEEEGTYDQTLEFRRGGDGQPRRSTRPTQQFYQPPRARN

SEQ ID NO: 22713 - protein, 1215 aa, Homo sapiens
MEQLPGVPPGPPHPVRPPPPPPPPMPLQLEAHLRSHGLEPAAPSPRLRPEESLDPPGAMQELLGALEPLPPAPGDTGVGPPNSEGKDPAGAYRSPSPQGTKAPRFVPLTSICFPDSLLQDEERSFFPTMEEMFGGGAADDYGKAGPPEDEGDPKAGAGPPPGPPAYDPYGPYCPGRASGAGPETPGLGLDPNKPPELPSTVNAEPLGLIQSGPHQAAPPPPPPPPPPPAPASEPKGGLTSPIFCSTKPKKLLKTSSFHLLRRRDPPFQTPKKLYAQEYEFEADEDKADVPADIRLNPRRLPDLVSSCRSRPALSPLGDIDFCPPNPGPDGPRRRGRKPTKAKRDGPPRPRGRPRIRPLEVPTTAGPASASTPTDGAKKPRGRGRGRGRKAEEAGGTRLEPLKPLKIKLSVPKAGEGLGTSSGDAISGTDHNSLDSSLTREKIEAKIKEVEEKQPEMKSGFMASFLDFLKSGKRHPPLYQAGLTPPLSPPKSVPPSVPARGLQPQPPATPAVPHPPPSGAFGLGGALEAAESEGLGLGCPSPCKRLDEELKRNLETLPSFSSDEEDSVAKNRDLQESISSAISALDDPPLAGPKDTSTPDGPPLAPAAAVPGPPPLPGLPSANSNGTPEPPLLEEKPPPTPPPAPTPQPQPPPPPPPPQPALPSPPPLVAPTPSSPPPPPLPPPPPPAMPSPPPPPPPAAAPLAAPPEEPAAPSPEDPELPDTRPLHLAKKQETAAVCGETDEEAGESGGEGIFRERDEFVIRAEDIPSLKLALQTGREPPPIWRVQKALLQKFTPEIKDGQRQFCATSNYLGYFGDAKNRYQRLYVKFLENVNKKDYVRVCARKPWHRPPVPVRRSGQAKNPVSAGGSSAPPPKAPAPPPKPETPEKTTSEKPPEQTPETAMPEPPAPEKPSLLRPVEKEKEKEKVTRGERPLRGERATSGRQTRPERSLATGQPATSRLPKARPTKVKAEPPPKKRKKWLKEAGGNATAGGGPPGSSSDSESSPGAPSEDERAVPGRLLKTRAMREMYRSYVEMLVSTALDPDMIQALEDTHDELYLPPMRKIDGLLNEHKKKVLKRLSLSPALQDALHTFPQLQVEQSGEGSPEEGAVRLRPAGEPYNRKTLSKLKRSVVRAQEFKVELEKSGYYTLYHSLHHYKYHTFLRCRDQTLAIEGGAEDLGQEEVVQQCMRNQPWLEQLFDSFSDLLAQAQAHSRCG

SEQ ID NO: 22714 - protein, 814 aa, Homo sapiens
MLERKYGGRLVTRHAARTIQTAFRQYQMNKNFERLRSSMSENRMSRRIVLSNMRMQFSFEGPEKVHSSYFEGKQVSVTNDGSQLGALVSPECGDLSEPTTLKSPAPSSDFADAITELEDAFSRQVKSLAESIDDALNCRSLHTEEAPALDAARARDTEPQTALHGMDHRKLDEMTASYSDVTLYIDEEELSPPLPLSQAGDRPSSTESDLRLRAGGAAPDYWALAHKEDKADTDTSCRSTPSLERQEQRLRVEHLPLLTIEPPSDSSVDLSDRSERGSLKRQSAYERSLGGQQGSPKHGPHSGAPKSLPREEPELRPRPPRPLDSHLAINGSANRQSKSESDYSDGDNDSINSTSNSNDTINCSSESSSRDSLREQTLSKQTYHKEARNSWDSPAFSNDVIRKRHYRIGLNLFNKKPEKGVQYLIERGFVPDTPVGVAHFLLQRKGLSRQMIGEFLGNRQKQFNRDVLDCVVDEMDFSTMELDEALRKFQAHIRVQGEAQKVERLIEAFSQRYCICNPGVVRQFRNPDTIFILAFAIILLNTDMYSPNVKPERKMKLEDFIKNLRGVDDGEDIPREMLMGIYERIRKRELKTNEDHVSQVQKVEKLIVGKKPIGSLHPGLGCVLSLPHRRLVCYCRLFEVPDPNKPQKLGLHQREIFLFNDLLVVTKIFQKKKNSVTYSFRQSFSLYGMQVLLFENQYYPNGIRLTSSVPGADIKVLINFNAPNPQDRKKFTDDLRESIAEVQEMEKHRIESELEKQKGVVRPSMSQCSSLKKESGNGTLSRACLDDSYASGEGLKRSALSSSLRDLSEAGVHH

SEQ ID NO: 22715 - protein, 351 aa, Homo sapiens
MTRLLDAEWWRRSEAGHLRRQVAAVLFFPEGTCSNKKALLKFKPGAFIAGVPVQPVLIRYPNSLDTTSWAWRGPGVLKVLWLTASQPCSIVDVEFLPVYHPSPEESRDPTLYANNVQRVMAQALGIPATECEFVGSLPVIVVGRLKVALEPQLWELGKVLRKAGLSAGYVDAGAEPGRSRMISQEEFARQLQLSDPQTVAGAFGYFQQDTKGLVDFRDVALALAALDGGRSLEELTRLAFELFAEEQAEGPNRLLYKDGFSTILHLLLGSPHPAATALHAELCQAGSSQGLSLCQFQNFSLHDPLYGKLFSTYLRPPHTSRGTSQTPNASSPGNPTALANGTVQAPKQKGD

SEQ ID NO: 22716 - protein, 179 aa, Homo sapiens
MLWEQIKQIIQRITWVSPPAITLEWKRKVAQEAIESLSASKLAKSICSQFRTRLNSSHEAFAASLRQLEAGHSGRLEKTEDLWLRVRKDHAPRLARLSLESCSLQDVLLHRKPKLGQELGRGQYGVVYLCDNWGGHFPCALKSVVPPDEKHWNDLALEFHYMRWVLASFISMRKIQRRI

SEQ ID NO: 22717 - protein, 570 aa, Homo sapiens
MQLEYETQIKKMLCSKDSLGLKEELTDEDREKVAVHEGINSGTAMSRGLYQPATIFMGRQMSAILSMRDFSTEHKSPQPTKNFSIPDPHSHRQTAQSSNVTDSCVVQTSNDTQCLNKSDNIDGKASLQIGEKMPVTASVLSEEEQTHCLEIGSNTRHGKSNLSEGKKSAELNSPLRERLSPENRTTDLKCDSSSGSEGEILTREHIEVEEKRASPPVSPIPVSEYCESENKWSQEKHSPWEGVSDHLAHREPKSQKPFRKMQEEEEESWSTSSDLTISISEDDLILESPEPQPNPGGKMEGEDGIEALKLIHAEQERVALSTEKNCILQTLSSPDSEKESSTNAPTREPGQTPDSDVPRAQVGQHVATLKEHDNSVKEEATALLRKALTEECGRRSAIHSSESSCSLPSILNDNSGIKEAKPAVWLNSVPTREQEVSSGCGDKSKKENVAADIPITETEAYQLLKKATLQDNTNQTENRFQKTDASVSHLSGLNIGSGAFETKTANKIASEASFSSSEGSPLSRHENKKKPVINLKSNALWDESDDSNSEIEAALRPRNHNTDDSDDFYD

SEQ ID NO: 22718 - protein, 711 aa, Homo sapiens
MSDYSTGGPPPGPPPPAGGGGGAGGAGGGPPPGPPGAGDRGGGGPGGGGPGGGSAGGPSQPPGGGGPGIRKDAFADAVQRARQIAAKIGGDAATTVNNSTPDFGFGGQKRQLEDGDQPESKKLASQGDSISSQLGPIHPPPRTSMTEEYRVPDGMVGLIIGRGGEQINKIQQDSGCKVQISPDSGGLPERSVSLTGAPESVQKAKMMLDDIVSRGRGGPPGQFHDNANGGQNGTVQEIMIPAGKAGLVIGKGGETIKQLQERAGVKMILIQDGSQNTNVDKPLRIIGDPYKVQQACEMVMDILRERDQGGFGDRNEYGSRIGGGIDVPVPRHSVGVVIGRSGEMIKKIQNDAGVRIQFKQDDGTGPEKIAHIMGPPDRCEHAARIINDLLQSLRSGPPGPPGGPGMPPGGRGRGRGQGNWGPPGGEMTFSIPTHKCGLVIGRGGENVKAINQQTGAFVEISRQLPPNGDPNFKLFIIRGSPQQIDHAKQLIEEKIEGPLCPVGPGPGGPGPAGPMGPFNPGPFNQGPPGAPPHAGGPPPHQYPPQGWGNTYPQWQPPAPHDPSKAAAAAADPNAAWAAYYSHYYQQPPGPVPGPAPAPAAPPAQGEPPQPPPTGQSDYTKAWEEYYKKIGQQPQQPGAPPQQDYTKAWEEYYKKQAQVATGGGPGAPPGSQDPFPQQPSPLLPPALAQLPRPRPSPLPGLVCCLFICSRGD

SEQ ID NO: 22719 - protein, 867 aa, Homo sapiens
DLPDESVSVQKDFMVLKTKDEHAQSNEIVVNDSGSDNVKKQRTEMSSKAMPDSFSEQQAKDLACHITSDLATRGPWDKKVFRTWESSGATNNKSQKEKLSHVLVHDVRENHIGHPESKSVDQKNEFMSVTERERKLLTNGSLSEIKEMTVKSPSKKVLYREYVVKEGDHPGGLLDQPSRRSESSAVSHIPVRVADERRMLSSNIPDGFCEQSAFPKHELSQKLSQSSMSKETVETQHFNSIEDEKVTYSEISKVSKHQSYVGLCPPLEETETSPTKSPDSLEFSPGKESPSSDVFDHSPIDGLEKLAPLAQTEGGKEIKTLPVYVSFVQVGKQYEKEIQQGGVKKIISQECKTVQETRGTFYTTRQQKQPPSPQGSPEDDTLEQVSFLDSSGKSPLTPETPSSEEVSYEFTSKTPDSLIAYIPGKPSPIPEVSEESEEEEQAKSTSLKQTTVEETAVEREMPNDVSKDSNQRPKNNRVAYIEFPPPPPLDADQIESDKKHHYLPEKEVDMIEVNLQDEHDKYQLAEPVIRVQPPSPVPPGADVSDSSDDESIYQPVPVKKYTFKLKEVDDEQKEKPKASAEKASNQKELESNGSGKDNEFGLGLDSPQNEIAQNGNNDQSITECSIATTAEFSHDTDATEIDSLDGYDLQDEDDGLTESDSKLPIQAMEIKKDIWNTEGILKPADRSFSQSKLEVIEEEGKVGPDEDKPPSKSSSSEKTPDKTDQKSGAQFFTLEGRHPDRSVFPDTYFSYKVDEEFATPFKTVATKGLDFDPWSNNRGDDEVFDSKSREDETKPFGLAVEDRSPATTPDTTPARTPTDESTPTSEPNPFPFHEGKMFEMTRSGAIDMSKRDFVEERLQFFQIVVRP

SEQ ID NO: 22720 - protein, 791 aa, Homo sapiens
MDVCVRLALWLLWGLLLHQGQSLSHSHSEKATGTSSGANSEESTAAEFCRIDKPLCHSEDEKLSFEAVRNIHKLMDDDANGDVDVEESDEFLREDLNYHDPTVKHSTFHGEDKLISVEDLWKAWKSSEVYNWTVDEVVQWLITYVELPQYEETFRKLQLSGHAMPRLAVTNTTMTGTVLKMTDRSHRQKLQLKALDTVLFGPPLLTRHNHLKDFMLVVSIVIGVGGCWFAYIQNRYSKEHMKKMMKDLEGLHRAEQSLHDLQERLHKAQEEHRTVEVEKVHLEKKLRDEINLAKQEAQRLKELREGTENERSRQKYAEEELEQVREALRKAEKELESHSSWYAPEALQKWLQLTHEVEVQYYNIKKQNAEKQLLVAKEGAEKIKKKRNTLFGTFHVAHSSSLDDVDHKILTAKQALSEVTAALRERLHRWQQIEILCGFQIVNNPGIHSLVAALNIDPSWMGSTRPNPAHFIMTDDVDDMDEEIVSPLSMQSPSLQSSVRQRLTEPQHGLGSQRLVEGEAGHFLTSRVSLRRMRSLSSGQSFSSEGYGTSSPSASAAASCSSSITTITTTTTTTTTFTTVHVHPVYYHHSTSYFLQMEPYPDTPPSDSTAVMPGHSESLGDLTHSDSESSLHMSDRQRVAPKPPQMSRAADEALNAMTSNGSHRLIEGVHPGSLVEKLPDSPALAKKALLALNHGLDKAHSLMELSPSAPPGGSPHLDSSRSHSPSSPDPDTPSPVGDSRALQASRNTRIPHLAGKKAVAEEDNGSIGEETDSSPGRKKFPLKIFKKPLKK

SEQ ID NO: 22721 - protein, 779 aa, Homo sapiens
MGEVTAEEVEKFLDSNIGFAKQYYNLHYRAKLISDLLGAKEAAVDFSNYHSPSSMEESEIIFDLLRDFQENLQTEKCIFNVMKKLCFLLQADRMSLFMYRTRNGIAELATRLFNVHKDAVLEDCLVMPDQEIVFPLDMGIVGHVAHSKKIANVPNTEEILLWSGSKVFEELTDIERQFHKALYTVRAFLNCDRYSVGLLDMTKQKEFFDVWPVLMGEVPPYSGPRTPDGREINFYKVIDYILHGKEDIKVIPNPPPDHWALVSGLPAYVAQNGLICNIMNAPAEDFFAFQKEPLDESGWMIKNVLSMPIVNKKEEIVGVATFYNRKDGKPFDEMDETLMESLTQFLGWSVLNPDTYESMNKLENRKDIFQDIVKYHVKCDNEEIQKILKTREVYGKEPWECEEEELAEILQAELPDADKYEINKFHFSDLPLTELELVKCGIQMYYELKVVDKFHIPQEALVRFMYSLSKGYRKITYHNWRHGFNVGQTMFSLLVTGKLKRYFTDLEALAMVTAAFCHDIDHRGTNNLYQMKSQNPLAKLHGSSILERHHLEFGKTLLRDESLNIFQNLNRRQHEHAIHMMDIAIIATDLALYFKKRTMFQKIVDQSKTYESEQEWTQYMMLEQTRKEIVMAMMMTACDLSAITKPWEVQSQVALLVAAEFWEQGDLERTVLQQNPIPMMDRNKADELPKLQVGFIDFVCTFVYKEFSRFHEEITPMLDGITNNRKEWKALADEYDAKMKVQEEKKQKQQSAKSAAAGNQPGGNPSPGGATTSKSCCIQ

SEQ ID NO: 22722 - protein, 2213 aa, Homo sapiens
MARGARPSAAGGGGGGAEPPERAGPGRPRGSPPGRARPSLAPRPGPEPSRPRAAPETSGGDTAGAGRCGGRRAAKLGPGRRGWWALLALQLHLLRALAQGRCAPYFKTEPGLPQIHLEGNRLVLTCLAEGSWPLEFKWMRDDSELTTYSSEYKYIIPSLQKLDAGFYRCVVRNRMGALLQRKSEVQVAYMGSFMDTDQRKTVSQGRAAILNLLPITSYPRPQVTWFREGHKIIPSNRIAITLENQLVILATTTSDAGAYYVQAVNEKNGENKTSPFIHLSIARDVGTPETMAPTIVVPPGNRSVVAGSSETTLECIASARPVEDLSVTWKRNGVRITSGLHSFGRRLTISNPTSADTGPYVCEAALPGSAFEPARATAFLFIIEPPYFTAEPESRISAEVEETVDIGCQAMGVPLPTLQWYKDAISISRLQNPRYKVLASGGLRIQKLRPEDSGIFQCFASNEGGEIQTHTYLDVTNIAPVFTQRPVDTTVTDGMTAILRCEVSGAPKPAITWKRENHILASGSVRIPRFMLLESGGLQIAPVFIQDAGNYTCYAANTEGSLNASATLTVWNRTSIVHPPEDHVVIKGTTATLHCGATHDPRVSLRYVWKKDNVALTPSSTSRIVVEKDGSLLISQTWSGDIGDYSCEIVSEGGNDSRMARLEVIELPHSPQNLLVSPNSSHSHAVVLSWVRPFDGNSPILYYIVELSENNSPWKVHLSNVGPEMTGVTVSGLTPARTYQFRVCAVNEVGRGQYSAETSRLMLPEEPPSAPPKNIVASGRTNQSIMVQWQPPPETEHNGVLRGYILRYRLAGLPGEYQQRNITSPEVNYCLVTDLIIWTQYEIQVAAYNGAGLGVFSRAVTEYTLQGVPTAPPQNVQTEAVNSTTIQFLWNPPPQQFINGINQGYKLLAWPADAPEAVTVVTIAPDFHGVHHGHITNLKKFTAYFTSVLCFTTPGDGPPSTPQLVWTQEDKPGAVGHLSFTEILDTSLKVSWQEPLEKNGIITGYQISWEVYGRNDSRLTHTLNSTTHEYKIQGLSSLTTYTIDVAAVTAVGTGLVTSSTISSGVPPDLPGAPSNLVISNISPRSATLQFRPGYDGKTSISRWIVEGQVGAIGDEEEWVTLYEEENEPDAQMLEIPNLTPYTHYRFRMKQVNIVGPSPYSPSSRVIQTLQAPPDVAPTSVTVRTASETSLRLRWVPLPDSQYNGNPESVGYRIKYWRSDLQSSAVAQVVSDRLEREFTIEELEEWMEYELQMQAFNAVGAGPWSEVVRGRTRESVPSAAPENVSAEAVSSTQILLTWTSVPEQDQNGLILGYKILFRAKDLDPEPRSHIVRGNHTQSALLAGLRKFVLYELQVLAFTRIGNGVPSTPLILERTKDDAPGPPVRLVFPEVRLTSVRIVWQPPEEPNGIILGYQIAYRLASSSPHTFTTVEVGATVRQFTATDLAPESAYIFRLSAKTRQGWGEPLEATVITTEKRERPAPPRELLVPQAEVTARSLRLQWVPGSDGASPIRYFTMQVRELPRGEWQTYSSSISHEATACVVDRLRPFTSYKLRLKATNDIGDSDFSSETEAVTTLQDVPGEPPGSVSATPHTTSSVLIQWQPPRDESLNGLLQGYRIYYRELEYEAGSGTEAKTLKNPIALHAELTAQSSFKTVNSSSTSTMCELTHLKKYRRYEVIMTAYNIIGESPASAPVEVFVGEAAPAMAPQNVQVTPLTASQLEVTWDPPPPESQNGNIQGYKIYYWEADSQNETEKMKVLFLPEPVVRLKNLTSHTKYLVSISAFNAAGDGPKSDPQQGRTHQAAPGAPSFLAFSEITSTTLNVSWGEPAAANGILQGYRVVYEPLAPVQGVSKVVTVEVRGNWQRWLKVRDLTKGVTYFFRVQARTITYGPELQANITAGPAEGSPGSPRDVLVTKSASELTLQWTEGHSGDTPTTGYVIEARPSDEGLWDMFVKDIPRSATSYTLSLDKLRQGVTYEFRVVAVNEAGYGEPSNPSTAVSAQVEAPFYEEWWFLLVMALSSLIVILLVVFALVLHGQNKKYKNCSTGKGISTMEESVTLDNGGFAALELSSRHLNVKSTFSKKNGTRSPPRPSPGGLHYSDEDICNKYNGAVLTESVSLKEKSADASESEATDSDYEDALPKHSFVNHYMSDPTYYNSWKRRAQGRAPAPHRYEAVAGSEAGAQLHPVITTQSAGGVYTPAGPGARTPLTGFSSFV

SEQ ID NO: 22723 - protein, 937 aa, Homo sapiens
IMLLTDPEIESSLLISSDEGATYQKYRLNFYIQSLLFHPKQEDWILAYSQDQKLYSSAEFGRRWQLIQEGVVPNRFYWSVMGSNKEPDLVHLEARTVDGHSHYLTCRMQNCTEANRNQPFPGYIDPDSLIVQDHYVFVQLTSGGRPHYYVSYRRNAFAQMKLPKYALPKDMHVISTDENQVFAAVQEWNQNDTYNLYISDTRGVYFTLALENVQSSRGPEGNIMIDLYEVAGIKGMFLANKKIDNQVKTFITYNKGRDWRLLQAPDTDLRGDPVHCLLPYCSLHLHLKVSENPYTSGIIASKDTAPSIIVASGNIGSELSDTDISMFVSSDAGNTWRQIFEEEHSVLYLDQGGVLVAMKHTSLPIRHLWLSFDEGRSWSKYSFTSIPLFVDGVLGEPGEETLIMTVFGHFSHRSEWQLVKVDYKSIFDRRCAEEDYRPWQLHSQGEACIMGAKRIYKKRKSERKCMQGKYAGAMESEPCVCTEADFDCDYGYERHSNGQCLPAFWFNPSSLSKDCSLGQSYLNSTGYRKVVSNNCTDGVREQYTAKPQKCPGKAPRGLRIVTADGKLTAEQGHNVTLMVQLEEGDVQRTLIQVDFGDGIAVSYVNLSSMEDGIKHVYQNVGIFRVTVQVDNSLGSDSAVLYLHVTCPLEHVHLSLPFVTTKNKEVNATAVLWPSQVGTLTYVWWYGNNTEPLITLEGSISFRFTSEGMNTITVQVSAGNAILQDTKTIAVYEEFRSLRLSFSPNLDDYNPDIPEWRRDIGRVIKKSLVEATGVPGQHILVAVLPGLPTTAELFVLPYQDPAGENKRSTDDLEQISELLIHTLNQNSVHFELKPGVRVLVHAAHLTAAPLVDLTPTHSGSAMLMLLSVVFVGLAVFVIYKFKRKIPGINVYAQMQNEKEQEMISPVSHSESRPNVPQTELRRPGQLIDEKVESQLIGE

SEQ ID NO: 22724 - protein, 89 aa, Homo sapiens
MPVNSSGPDWVTVIPRRIKETNSLELSQGSGTFPSGYYYKDQWRPRKFKMRQFNDPTTLQSAYKEKWCIYLVTQQSGNGLNTLLHLFQI

SEQ ID NO: 22725 - protein, 1539 aa, Homo sapiens
MFRQFYLWTCLASGIILGSLFEICLGQYDDDCKLARGGPPATIVAIDEESRNGTILVDNMLIKGTAGGPDPTIELSLKDNVDYWVLMDPVKQMLFLNSTGRVLDRDPPMNIHSIVVQVQCINKKVGTIIYHEVRIVVRDRNDNSPTFKHESYYATVNELTPVGTTIFTGFSGDNGATDIDDGPNGQIEYVIQYNPDDPTSNDTFEIPLMLTGNIVLRKRLNYEDKTRYFVIIQANDRAQNLNERRTTTTTLTVDVLDGDDLGPMFLPCVLVPNTRDCRPLTYQAAIPELRTPEELNPIIVTPPIQAIDQDRNIQPPSDRPGILYSILVGTPEDYPRFFHMHPRTAELSLLEPVNRDFHQKFDLVIKAEQDNGHPLPAFAGLHIEILDENNQSPYFTMPSYQGYILESAPVGATISDSLNLTSPLRIVALDKDIEDTKDPELHLFLNDYTSVFTVTQTGITRYLTLLQPVDREEQQTYTFSITAFDGVQESEPVIVNIQVMDANDNTPTFPEISYDVYVYTDMRPGDSVIQLTAVDADEGSNGEITYEILVGAQGDFIINKTTGLITIAPGVEMIVGRTYALTVQAADNAPPAERRNSICTVYIEVLPPNNQSPPRFPQLMYSLEISEAMRVGAVLLNLQATDREGDSITYAIENGDPQRVFNLSETTGILTLGKALDRESTDRYILIITASDGRPDGTSTATVNIVVTDVNDNAPVFDPYLPRNLSVVEEEANAFVGQVKATDPDAGINGQVHYSLGNFNNLFRITSNGSIYTAVKLNREVRDYYELVVVATDGAVHPRHSTLTLAIKVLDIDDNSPVFTNSTYTVLVEENLPAGTTILQIEAKDVDLGANVSYRIRSPEVKHFFALHPFTGELSLLRSLDYEAFPDQEASITFLVEAFDIYGTMPPGIATVTVIVKDMNDYPPVFSKRIYKGMVAPDAVKGTPITTVYAEDADPPGLPASRVRYRVDDVQFPYPASIFEVEEDSGRVITRVNLNEEPTTIFKLVVVAFDDGEPVMSSSATVKILVLHPGEIPRFTQEEYRPPPVSELATKGTMVGVISAAAINQSIVYSIVSGNEEDTFGINNITGVIYVNGPLDYETRTSYVLRVQADSLEVVLANLRVPSKSNTAKVYIEIQDENNHPPVFQKKFYIGGVSEDARMFTSVLRVKATDKDTGNYSVMAYRLIIPPIKEGKEGFVVETYTGLIKTAMLFHNMRRSYFKFQVIATDDYGKGLSGKADVLVSVVNQLDMQVIVSNVPPTLVEKKIEDLTEILDRYVQEQIPGAKVVVESIGARRHGDAFSLEDYTKCDLTVYAIDPQTNRAIDRNELFKFLDGKLLDINKDFQPYYGEGGRILEIRTPEAVTSIKKRGESLGYTEGALLALAFIIILCCIPAILVVLVSYRQFKVRQAECTKTARIQAALPAAKPAVPAPAPVAAPPPPPPPPPGAHLYEELGDSSMHKNYPWSLELILARNMDKIITVMSMGMKCLNMGVAVDCYHQLDRRNMVRWLVKLRKNMRRKRKSQRKLKNQRLKLESLVRRKK

SEQ ID NO: 22726 - protein, 314 aa, Homo sapiens
MWGLVRLLLAWLGGWGCMGRLAAPARAWAGSREHPGPALLRTRRSWVWNQFFVIEEYAGPEPVLIGKLHSDVDRGEGRTKYLLTGEGAGTVFVIDEATGNIHVTKSLDREEKAQYVLLAQAVDRASNRPLEPPSEFIIKIITCVGALLALVVLFVALRRQKQEALMVLEEEDVRENIITYDDEGGGEEDTEAFDITALQNPDGAAPPAPGPPARRDVLPRARVSRQPRPPGPADVAQLLALRLREADEDPGVPPYDSVQVYGYEGRGSSCGSLSSLGSGSEAGGAPGPAEPLDDWGPLFRTLAELYGAKEPPAP

SEQ ID NO: 22727 - protein, 623 aa, Homo sapiens
MPPRAPPAPGPRPPPRAAAATDTAAGAGGAGGAGGAGGPGFRPLAPRPWRWLLLLALPAACSAPPPRPVYTNHWAVQVLGGPAEADRVAAAHGYLNLGQIGNLEDYYHFYHSKTFKRSTLSSRGPHTFLRMDPQVKWLQQQEVKRRVKRQVRSDPQALYFNDPIWSNMWYLHCGDKNSRCRSEMNVQAAWKRGYTGKNVVVTILDDGIERNHPDLAPNYDSYASYDVNGNDYDPSPRYDASNENKHGTRCAGEVAASANNSYCIVGIAYNAKIGGIRMLDGDVTDVVEAKSLGIRPNYIDIYSASWGPDDDGKTVDGPGRLAKQAFEYGIKKGRQGLGSIFVWASGNGGREGDYCSCDGYTNSIYTISVSSATENGYKPWYLEECASTLATTYSSGAFYERKIVTTDLRQRCTDGHTGTSVSAPMVAGIIALALEANSQLTWRDVQHLLVKTSRPAHLKASDWKVNGAGHKVSHFYGFGLVDAEALVVEAKKWTAVPSQHMCVAASDKRPRSIPLVQVLRTTALTSACAEHSDQRVVYLEHVVVRTSISHPRRGDLQIYLVSPSGTKSQLLAKRLLDLSNEGFTNWEFMTVHCWGEKAEGQWTLEIQDLPSQVRNPEKQGNLD

SEQ ID NO: 22728 - protein, 189 aa, Homo sapiens
MAFIAKSFYDLSAISLDGEKVDFNTFRGRAVLIENVASLGTTTRDFTQLNELQCRFPRRLVVLGFPCNQFGHQENCQNEEILNSLKYVRPGGGYQPTFTLVQKCEVNGQNEHPVFAYLKDKLPYPYDDPFSLMTDPKLIIWSPVRRSDVAWNFEKFLIGPEGEPFRRYSRTFPTINIEPDIKRLLKVAI

SEQ ID NO: 22729 - protein, 1533 aa, Homo sapiens
MPVKRLREVVSQNHGDHLVLLKDELPCVPPALSANKRLPVGTGTSLNGTSRGSSDLTSARNCYQPLLENPMVSESDFSKDVAVQVLPLDKIEENNKQKANDIFISQYTMGQKDALRTVLKQKAQSMPVFKEVKVHLLEDAGIEKDAVTQETRISPSGIDSATTVAAATAAAIATAAPLIKVQSDLEAKVNSVTELLSKLQETDKHLQRVTEQQTSIQRKQEKLHCHDHEKQMNVFMEQHIRHLEKLQQQQIDIQTHFISAALKTSSFQPVSMPSSRAVEKYSVKPEHPNLGSCNPSLYNTFASKQAPLKEVEDTSFDKQKSPLETPAPRRFAPVPVSRDDELSKRENLLEEKENMEVSCHRGNVRLLEQILNNNDSLTRKSESSNTTSLTRSKIGWTPEKTNRFPSCEELETTKVTMQKSDDVLHDLGQKEKETNSMVQPKESLSMLKLPDLPQNSVKLQTTNTTRSVLKDAEKILRGVQNNKKVLEENLEAIIRAKDGAAMYSLINALSTNREMSEKIRIRKTVDEWIKTISAEIQDELSRTDYEQKRFDQKNQRTKKGQNMTKDIRTNTQDKTVNKSVIPRKHSQKQIEEHFRNLPMRGMPASSLQKERKEGLLKATTVIQDEDYMLQVYGKPVYQGHRSTLKKGPYLRFNSPSPKSRPQRPKVIERVKGTKVKSIRTQTDFYATKPKKMDSKMKHSVPVLPHGDQQYLFSPSREMPTFSGTLEGHLIPMAILLGQTQSNSDTMPPAGVIVSKPHPVTVTTSIPPSSRKVETGVKKPNIAIVEMKSEKKDPPQLTVQVLPSVDIDSISNSSADVLSPLSSPKEASLPPVQTWIKTPEIMKVDEEEVKFPGTNFDEIIDVIQEEEKCDEIPDSEPILEFNRSVKADSTKYNGPPFPPVASTFQPTADILDKVIERKETLENSLIQWVEQEIMSRIISGLFPVQQQIAPSISVSVSETSEPLTSDIVEGTSSGALQLFVDAGVPVNSNVIKHFVNEALAETIAVMLGDREAKKQGPVATGVSGDASTNETYLPARVCTPLPTPQPTPPCSPSSPAKECVLVKTPDSSPCDSDHDMAFPVKEICAEKGDDMPAIMLVNTPTVTPTTTPPPAAAVFTPTLSDISIDKLKVSSPELPKPWGDGDLPLEEENPNSPQEELHPRAIVMSVAKDEEPESMDFPAQPPPPEPVPFMPFPAGTKAPSPSQMPGSDSSTLESTLSVTVTETETLDKPISEGEILFSCGQKLAPKILEDIGLYLTNLNDSLSSTLHDAVEMEDDPPSEGQVIRMSHKKFHADAILSFAKQNQESAVSQQAVYHSEDLENSVGELSEGQRPQLTAAAENILMGHSLYMQPPVTNTQSLDQQCDPKPLSRQFDTVSGSIYEDSCASHGPMSLGELELEPNSKLVLPTTLLTAQENDVNLPVAAEDFSQYQLKQNQDVKQVEHKPSQSYLRVRNKSDIAPSQQQVSPGDMDRTQIELNPYLTCVFSGGKAVPLSASQMPPAKMSVMLPSVNLEDCSQSLSLSTMQEDMESSGADTF

SEQ ID NO: 22730 - protein, 288 aa, Homo sapiens
MMRRTLENRNAQTKQLQTAVSNVEKHFGELCQIFAAYVRKTARLRDKADLLVNEINAYAATETPHLKLGLMNFADEFAKLQDYRQAEVERLEAKVVEPLKTYGTIVKMKRDDLKATLTARNREAKQLTQLERTRQRNPSDRHVLLAETELQRAAMDASRTSRHLEETINNFERQKMKDIKTIFSEFITIEMLFHGKALEVYTAAYQNIQNIDEDEDLEVFRNSLYAPDYSSRLDIVRANSKSPLQRSLSAKCVSGTGQVSTCRLRKDQQAEDDEDDELDVTEEENFLK

SEQ ID NO: 22731 - protein, 4388 aa, Homo sapiens
MLEGLVAWVLNTYLGKYVNNLNTDQLSVALLKGAVELENLPLKKDALKELELPFEVKAGFIGKVTLQIPFYRPHVDPWVISISSLHLIGAPEKIQDFNDEKEKLLERERKKALLQALEEKWKNDRQQKGESYWYSVTASVVTRIVENIELKIQDVHLRFEDGVTNPSHPFAFGICIKNVSMQNAVNEPVQKLMRKKQLDVAEFSIYWDVDCTLLGDLPQMELQEAMARSMESRSHHYVLEPVFASALLKRNCSKKPLRSRHSPRIDCDIQLETIPLKLSQLQYRQIMEFLKELERKERQVKFRRWKPKVAISKNCREWWYFALNANLYEIREQRKRCTWDFMLHRARDAVSYTDKYFNKLKGGLLSTDDKEEMCRIEEEQSFEELKILRELVHDRFHKQEELAESLREPQFDSPGACPGAPEPGGGSGMLQYLQSWFPGWGGWYGQQTPEGNVVEGLSAEQQEQWIPEEILGTEEFFDPTADASCMNTYTKRDHVFAKLNLQLQRGTVTLLHKEQGTPQMNESAFMQLEFSDVKLLAESLPRRNSSLLSVRLGGLFLRDLATEGTMFPLLVFPNPQKEVGRVSQSFGLQTTSADRSDHYPAADPDGPVFEMLYERNPAHSHFERRLNVSTRPLNIIYNPQAIKKVADFFYKGKVHTSGFGYQSELELRVAEAARRQYNKLKMQTKAEIRQTLDRLLVGDFIEESKRWTVRLDISAPQVIFPDDFKFKNPVLVVVDLGRMLLTNTQDNSRRKSRDGSASEETQFSDDEYKTPLATPPNTPPPESSSSNGEKTPPFSGVEFSEEQLQAHLMSTKMYERYSLSFMDLQIMVGRVKDNWKHVQDIDVGPTHVVEKFNVHLQLERRLIYTSDPKYPGAVLSGNLPDLKIHINEDKISALKNCFALLTTPEMKTSDTQIKEKIFPQEEQRGSLQDSVMNLTQSIVLLEQHTREVLVESQLLLAEFKVNCMQLGVESNGRYISVLKVFGTNAHFVKRPYDAEVSLTVHGLLLVDTMQTYGADFDLLMASHKNLSFDIPTGSLRDSRAQSPVSGPNVAHLTDGATLNDRSATSVSLDKILTKEQESLIKLEYQFVSSECPSMNLDSTLQVISLQVNNLDIILNPETIVELIGFLQKSFPKEKDDLSPQPLMTDFERSFREQGTYQSTYEQNTEVAVEIHRLNLLLLRTVGMANREKYGRKIATASIGGTKVNVSMGSTFDMNGSLGCLQLMDLTQDNVKNQYVVSIGNSVGYENIISDIGYFESVFVRMEDAALTEALSFTFVERSKQECFLNLKMASLHYNHSAKFLKELTLSMDELEENFRGMLKSAATKVTTVLATKTAEYSEMVSLFETPRKTREPFILEENEIYGFDLASSHLDTVKLILNINIESPVVSIPRKPGSPELLVGHLGQIFIQNFVAGDDESRSDRLQVEIKDIKLYSLNCTQLAGREAVGSEGSRMFCPPSGSGSANSQEEAHFTRHDFFESLHRGQAFHILNNTTIQFKLEKIPIERESELTFSLSPDDLGTSSIMKIEGKFVNPVQVVLAKHVYEQVLQTLDNLVYSEDLNKYPASATSSPCPDSPLPPLSTCGESSVERKENGLFSHSSLSNTSQKSLSVKEVKSFTQIQATFCISELQVQLSGDLTLGAQGLVSLKFQDFEVEFSKDHPQTLSIQIALHSLLMEDLLEKNPDSKYKNLMVSRGAPKPSSLAQKEYLSQSCPSVSNVEYPDMPRSLPSHMEEAPNVFQLYQRPTSASRKKQKEVQDKDYPLTPPPSPTVDEPKILVGKSKFDDSLVHINIFLVDKKHPEFSSSYNRVNRSIDVDFNCLDVLITLQTWVVILDFFGIGSTADNHAMRLPPEGILHNVKLEPHASMESGLQDPVNTKLDLKVHSLSLVLNKTTSELAKANVSKLVAHLEMIEGDLALQGSIGSLSLSDLTCHGEFYRERFTTSGEEALIFQTFKYGRPDPLLRREHDIRVSLRMASVQYVHTQRFQAEVVAFIQHFTQLQDVLGRQRAAIEGQTVRDQAQRCSRVLLDIEAGAPVLLIPESSRSNNLIVANLGKLKVKNKFLFAGFPGTFSLQDKESVPSASPTGIPKHSLRKTTSTEEPRGTHSQGQFTMPLAGMSLGSLKSEFVPSTSTKQQGPQPTLSVGQESSSPEDHVCLLDCVVVDLQDMDIFAAERHPREYSKAPEDSSGDLIFPSYFVRQTGGSLLTEPCRLKLQVERNLDKEISHTVPDISIHGNLSSVHCSLDLYKYKLIRGLLENNLGEPIEEFMRPYDLQDPRIHTVLSGEVYTCMCFLIDMVNVSLELKDPKRKEGAGSLARFDFKKCKLLYESFSNQTKSINLVSHSMMAFDTRYAGQKTSPGMTNVFSCIFQPAKNSSTTQGSIQIELHFRSTKDSSCFTVVLNNLRVFLIFDWLLLVHDFLHTPSDIKKQNHVTPSRHRNSSSESAIVPKTVKSGVVTKRSSLPVSNERHLEVKVNVTGTEFVVIEDVSCFDTNAIILKGTTVLTYKPRFVDRPFSGSLFGIEVFSCRLGNEHDTALSIVDPVQIQMELVGNSSYQNSSGLMDAFNSEDFPPVLEIQLQALDIRLSYNDVQLFLAIAKSIPEQANAAVPDSVALESDSVGTYLPGASRVGEEIREGTRHTLDPVLELQLARLQELGFSMDDCRKALLACQGQLKKAASWLFKNAEPLKSLSLASTSRDSPGAVAAPLISGVEIKAESVCICFIDDCMDCDVPLAELTFSRLNFLQRVRTSPEGYAHFTLSGDYYNRALSGWEPFIEPWPCSVSWQQQAASRLHPPRLKLEAKAKPRLDINITSVLIDQYVSTKESWMADYCKDDKDIESAKSEDWMGSSVDPPCFGQSLPLVYLRTRSTASLTNLEHQIYARAEVKTPKRRQPFVPFALRNHTGCTLWFATLTTTPTRAALSHSGSPGVVPEGNGTFLDDTHNVSEWREVLTGEEIPFEFEARGKLRHRHTHDLRIHQLQVRVNGWEQVSPVSVDKVGTFFRYAAPDKNSSSSTIGSPSSRTNIIHPQVYFSSLPPVRVVFAVTMEGSARKVITVRSALIVRNRLETPMELRLDSPSAPDKPVVLPAIMPGDSFAVPLHLTSWRLQARPKGLGVFFCKAPIHWTNVVKTAEISSSKRECHSMDTEKSRFFRFCVAIKKENYPDYMPSNIFSDSAKQIFRQPGHTIYLLPTVVICNLLPCELDFYVKGMPINGTLKPGKEAALHTADTSQNIELGVSLENFPLCKELLIPPGTQNYMVRMRLYDVNRRQLNLTIRIVCRAEGSLKIFISAPYWLINKTGLPLIFRQDNAKTDAAGQFEEHELARSLSPLLFCYADKEQPNLCTMRIGRGIHPEGMPGWCQGFSLDGGSGVRALKVIQQGNRPGLIYNIGIDVKKGRGRYIDTCMVIFAPRYLLDNKSSHKLAFAQREFARGQGTANPEGYISTLPGSSVVFHWPRNDYDQLLCVRLMDVPNCIWSGGFEVNKNNSFHINMRDTLGKCFFLRVEITLRGATYRISFSDTDQLPPPFRIDNFSKVPVVFTQHGVAEPRLRTEVKPMTSLDYAWDEPTLPPFITLTVKGAGSSEINCNMNDFQDNRQLYYENFIYIAATYTFSGLQEGTGRPVASNKAITCAELVLDVSPKTQRVILKKKEPGKRSQLWRMTGTGMLAHEGSSVPHNPNKPSAARSTEGSAILDIAGLAAVTDNRYEPLMLRKPDRRRSTTQTWSFREGKLTCGLHGLVVQAKGGLSGLFDGAEVVLGPDTSMELLGPVPPEQQFINQKMRPGSGMLSIRVIPDGPTRALQITDFCHRKSSRSYEVDELPVTEQELQKLKNPDTEQELEVLVRLEGGIGLSLINKVPEELVFASLTGINVHYTQLATSHMLELSIQDVQVDNQLIGTTQPFMLYVTPLSNENEVIETGPAVQVNAVKFPSKSALTNIYKHLMITAQRFTVQIEEKLLLKLLSFFGYDQAESEVEKYDENLHEKTAEQGGTPIRYYFENLKISIPQIKLSVFTSNKLPLDLKALKSTLGFPLIRFEDAVINLDPFTRVHPYETKEFIINDILKHFQEELLSQAARILGSVDFLGNPMGLLNDVSEGVTGLIKYGNVGGLIRNVTHGVSNSAAKFAGTLSDGLGKTMDNRHQSEREYIRYHAATSGEHLVAGIHGLAHGIIGGLTSVITSTVEGVKTEGGVSGFISGLGKGLVGTVTKPVAGALDFASETAQAVRDTATLSGPRTQAQRVRKPRCCTGPQGLLPRYSESQAEGQEQLFKLTDNIQDEFFIAVENIDSYCVLISSKAVYFLKSGDYVDREAIFLEVKYDDLYHCLVSKDHGKVYVQVTKKAVSTSSGVSIPGPSHQKPMVHVKSEVLAVKLSQEINYAKSLYYEQQLMLRLSENREQLELDS

SEQ ID NO: 22732 - protein, 522 aa, Homo sapiens
MLYEKFSPAGPILSIRVCRDMITRRSLGYAYVNFQQPADAERALDTMNFDVIKGKPVRIMWSQRDPSLRKSGVGNIFIKNLDKSIDNKALYDTFSAFGNILSCKVVCDENGSKGYGFVHFETQEAAERAIEKMNGMLLNDRKVFVGRFKSRKEREAELGARAKEFTNVYIKNFGEDMDDERLKDLFGKFGPALSVKVMTDESGKSKGFGFVSFERHEDAQKAVDEMNGKELNGKQIYVGRAQKKVERQTELKRKFEQMKQDRITRYQGVNLYVKNLDDGIDDERLRKEFSPFGTITSAKVMMEGGRSKGFGFVCFSSPEEATKAVTEMNGRIVATKPLYVALAQRKEERQAHLTNQYMQRMASVRAVPNPVINPYQPAPPSGYFMAAIPQTQNRAAYYPPSQIAQLRPSPRWTAQGARPHPAVHVQGQEPLTASMLASAPPQEQKQMLGERLFPLIQAMHPTLAGKITGMLLEIDNSELLHMLESPESLRSKVDEAVAVLQAHQAKEAAQKAVNSATGVPTV

SEQ ID NO: 22733 - protein, 427 aa, Homo sapiens [sequence omitted]

SEQ ID NO: 22734 - protein, 1022 aa, Homo sapiens [sequence omitted]

SEQ ID NO: 22735 - protein, 171 aa, Homo sapiens
MLDTSCLQTSDSKFFSFGTRTGSPCSSACRHPIVGPCDCKIESLGYNRLILQIGRGTVVPEPFSTESFTLDVYRYKDSLKEDIQKADLVISHAGAGSCLETLEKGKPLVVVINEKLMNNHQLELAKQLHKEGHLFYCTCRLILKKCLLVVEGGDKEILWVAGGSQLGLKFC

SEQ ID NO: 22736 - protein, 1011 aa, Homo sapiens
PELGVGTLPEHDSQDAGPIVPKISGLERSQEKSQDCCKEPIFEPVVLKDPCPQVAQPIPQPQTEPQLRAPSPDPDLVQRTEAPPQPPPLSTQPPQGPPEAQLQPAPQPQVQRPPRPQSPTQLLHQNLPPVQAHPSAQSLSQPLSAYNSSSLSLNSLSSSRSSTPAKTQPAPPHISHHPSASPFPLSLPNHSPLHSFTPTLQPPAHSHHPNMFAPPTALPPPPPLTSGSLQVAGHPAGSTYSEQDILRQELNTRFLASQSADRGASLGPPPYLRTEFHQHQHQHQHTHQHTHQHTFTPFPHAIPPTAIMPTPAPPMFDKYPTKVDPFYRHSLFHSYPPAVSGIPPMIPPTGPFGSLQGAFQPKTSNPIDVAARPGTVPHTLLQKDPRLTDPFRPMLRKPGKWCAMHVHIAWQIYHHQQKVKKQMQSDPHKLDFGLKPEFLSRPPGPSLFGAIHHPHDLARPSTLFSAAGAAHPTGTPFGPPPHHSNFLNPAAHLEPFNRPSTFTGLAAVGGNAFGGLGNPSVTPNSMFGHKDGPSVQNFSNPHEPWNRLHRTPPSFPTPPPWLKPGELERSASAAAHDRDRDVDKRDSSVSKDDKERESVEKRHSSHPSPAPVLPVNALGHTRSSTEQIRAHLNTEAREKDKPKERERDHSESRKDLAADEHKAKEGHLPEKDGHGHEGRAAGEEAKQLARVPSPYVRTPVVESARPNSTSSREAEPRKGEPAYENPKKSSEVKVKEERKEDHDLPPEAPQTHRASEPPPPNSSSSVHPGPLASMPMTVGVTGIHPMNSISSLDRTRMMTPFMGISPLPGGERFPYPSFHWDPIRDPLRDPYRELDIHRRDPLGRDFLLRNDPLHRLSTPRLYEADRSFRDREPHDYSHHHHHHHHPLSVDPRREHERGGHLDERERLHMLREDYEHTRLHSVHPASLDGHLPHPSLITPGLPSMHYPRISPTAGNQNGLLNKTPPTAALSAPPPLISTLGGRPVSPRRTTPLSAEIRERPPSHTLKDIEAR

SEQ ID NO: 22737 - protein, 620 aa, Homo sapiens
MKTRPSSLESVTCWRAKFMEAFFSHVLRGTIDVSSDRRLCDQRFSPLLHSSRHVRQLTICNMLQGATELVAEPNRRVLETLASSLHTLKFRHLLFSDVAAQQSLRQLLHQLIHHGAVSQVSLYSWPVPESALFILILTMSAGFWQPGPGGPPCRLCGEASRGRAPSRDEGSLLLGSRRPRRDAAERCAAALMASRRKSEAKQMPRAAPATRVTRRSTQESLTAGGTDLKRELHPPATSHEAPGTKRSPSAPAATSSASSSTSSYKRAPASSAPQPKPLKRFKRAAGKKGARTRQGPGAESEDLYDFVFIVAGEKEDGEEMEIGEVACGALDGSDPSCLGLPALEASQRFRSISTLELFTVPLSTEAALTLCHLLSSWVSLESLTLSYNGLGSNIFRLLDSLRALSGQAGCRLRALHLSDLFSPLPILELTRAIVRALPLLRVLSIRVDHPSQRDNPGVPGNAGPPSHIIGDEEIPENCLEQLEMGFPRGAQPAPLLCSVLKASGSLQQLSLDSATFASPQDFGLVLQTLKEYNLALKRLSFHDMNLADCQSEVLFLLQNLTLQEITFSFCRLFEKRPAQFLPEMVAAMKGNSTLKGLRLPGNRLGGGQTLGRERGKELGL

SEQ ID NO: 22738 - protein, 849 aa, Homo sapiens
MSEERSLSLLAKAVDPRHPNMMTDVVKLLSAVCIVGEESILEEVLEALTSAGEEKKIDRFFCIVEGLRHNSVQLQVACMQLINALVTSPDDLDFRLHIRNEFMRCGLKEILPNLKCIKNDGLDIQLKVFDEHKEEDLFELSHRLEDIRAELDEAYDVYNMVWSTVKETRAEGYFISILQHLLLIRNDYFIRQQYFKLIDECVSQIVLHRDGMDPDFTYRKRLDLDLTQFVDICIDQAKLEEFEEKASELYKKFEKEFTDHQETQAELQKKEAKINELQAELQAFKSQFGALPADCNIPLPPSKEGGTGHSALPPPPPLPSGGGVPPPPPPPPPPPLPGMRMPFSGPVPPPPPLGFLGGQNSPPLPILPFGLKPKKEFKPEISMRRLNWLKIRPHEMTENCFWIKVNENKYENVDLLCKLENTFCCQQKERREEEDIEEKKSIKKKIKELKFLDSKIAQNLSIFLSSFRVPYEEIRMMILEVDETRLAESMIQNLIKHLPDQEQLNSLSQFKSEYSNLCEPEQFVVVMSNVKRLRPRLSAILFKLQFEEQVNNIKPDIMAVSTACEEIKKSKSFSKLLELVLLMGNYMNAGSRNAQTFGFNLSSLCKLKDTKSADQKTTLLHFLVEICEEKYPDILNFVDDLEPLDKASKVSVETLEKNLRQMGRQLQQLEKELETFPPPEDLHDKFVTKMSRFVISAKEQYETLSKLHENMEKLYQSIIGYYAIDVKKVSVEDFLTDLNNFRTTFMQAIKENIKKREAEEKEKRVRIAKELAERERLERQQKKKRLLEMKTEGDETGVMDNLLEALQSGAAFRDRRKRTPMPKDVRQSLSPMSQRPVLKVCNHGNKPYL

SEQ ID NO: 22739 - protein, 1443 aa, Homo sapiens
MYAVYKQAHPPTGLEFSMYCNFFNNSERNLVVAGTSQLYVYRLNRDAEALTKNDRSTEGKAHREKLELAASFSFFGNVMSMASVQLAGAKRDALLLSFKDAKLSVVEYDPGTHDLKTLSLHYFEEPELRDGFVQNVHTPRVRVDPDGRCAAMLVYGTRLVVLPFRRESLAEEHEGLVGEGQRSSFLPSYIIDVRALDEKLLNIIDLQFLHGYYEPTLLILFEPNQTWPGRVAVRQDTCSIVAISLNITQKVHPVIWSLTSLPFDCTQALAVPKPIGGVVVFAVNSLLYLNQSVPPYGVALNSLTTGTTAFPLRTQEGVRITLDCAQATFISYDKMVISLKGGEIYVLTLITDGMRSVRAFHFDKAAASVLTTSMVTMEPGYLFLGSRLGNSLLLKYTEKLQEPPASAVREAADKEEPPSKKKRVDATAGWSAAGKSVPQDEVDEIEVYGSEAQSGTQLATYSFEVCDSILNIGPCANAAVGEPAFLSEEFQNSPEPDLEIVVCSGHGKNGALSVLQKSIRPQVVTTFELPGCYDMWTVIAPVRKEEEDNPKGEGTEQEPSTTPEADDDGRRHGFLILSREDSTMILQTGQEIMELDTSGFATQGPTVFAGNIGDNRYIVQVSPLGIRLLEGVNQLHFIPVDLGAPIVQCAVADPYVVIMSAEGHVTMFLLKSDSYGGRHHRLALHKPPLHHQSKVITLCLYRDLSGMFTTESRLGGARDELGGRSGPEAEGLGSETSPTVDDEEEMLYGDSGSLFSPSKEEARRSSQPPADRDPAPFRAEPTHWCLLVRENGTMEIYQLPDWRLVFLVKNFPVGQRVLVDSSFGQPTTQGEARREEATRQGELPLVKEVLLVALGSRQSRPYLLVHVDQELLIYEAFPHDSQLGQGNLKVRFKKVPHNINFREKKPKPSKKKAEGGGAEEGAGARGRVARFRYFEDIYGYSGVFICGPSPHWLLVTGRGALRLHPMAIDGPVDSFAPFHNVNCPRGFLYFNRQGELRISVLPAYLSYDAPWPVRKIPLRCTAHYVAYHVESKVYAVATSTNTPCARIPRMTGEEKEFETIERDERYIHPQQEAFSIQLISPVSWEAIPNARIELQEWEHVTCMKTVSLRSEETVSGLKGYVAAGTCLMQGEEVTCRGRILIMDVIEVVPEPGQPLTKNKFKVLYEKEQKGPVTALCHCNGHLVSAIGQKIFLWSLRASELTGMAFIDTQLYIHQMISVKNFILAADVMKSISLLRYQEESKTLSLVSRDAKPLEVYSVDFMVDNAQLGFLVSDRDRNLMVYMYLPEAKESFGGMRLLRRADFHVGAHVNTFWRTPCRGATEGLSKKSVVWENKHITWFATLDGGIGLLLPMQEKTYRRLLMLQNALTTMLPHHAGLNPRAFRMLHVDRRTLQNAVRNVLDGELLNRYLYLSTMERSELAKKIGTTPDIILDDLLETDRVTAHF

SEQ ID NO: 22740 - protein, 400 aa, Homo sapiens [sequence omitted]

SEQ ID NO: 22741 - protein, 3684 aa, Homo sapiens
MLWWEEVEDCYEREDVQKKTFTKWVNAQFSKFGKQHIENLFSDLQDGRRLLDLLEGLTGQKLPKEKGSTRVHALNNVNKALRVLQNNNVDLVNIGSTDIVDGNHKLTLGLIWNIILHWQVKNVMKNIMAGLQQTNSEKILLSWVRQSTRNYPQVNVINFTTSWSDGLALNALIHSHRPDLFDWNSVVCQQSATQRLEHAFNIARYQLGIEKLLDPEDVDTTYPDKKSILMYITSLFQVLPQQVSIEAIQEVEMLPRPPKVTKEEHFQLHHQMHYSQQITVSLAQGYERTSSPKPRFKSYAYTQAAYVTTSDPTRSPFPSQHLEAPEDKSFGSSLMESEVNLDRYQTALEEVLSWLLSAEDTLQAQGEISNDVEVVKDQFHTHEGYMMDLTAHQGRVGNILQLGSKLIGTGKLSEDEETEVQEQMNLLNSRWECLRVASMEKQSNLHRVLMDLQNQKLKELNDWLTKTEERTRKMEEEPLGPDLEDLKRQVQQHKVLQEDLEQEQVRVNSLTHMVVVVDESSGDHATAALEEQLKVLGDRWANICRWTEDRWVLLQDILLKWQRLTEEQCLFSAWLSEKEDAVNKIHTTGFKDQNEMLSSLQKLAVLKADLEKKKQSMGKLYSLKQDLLSTLKNKSVTQKTEAWLDNFARCWDNLVQKLEKSTAQISQAVTTTQPSLTQTTVMETVTTVTTREQILVKHAQEELPPPPPQKKRQITVDSEIRKRLDVDITELHSWITRSEAVLQSPEFAIFRKEGNFSDLKEKVNAIEREKAEKFRKLQDASRSAQALVEQMVNEGVNADSIKQASEQLNSRWIEFCQLLSERLNWLEYQNNIIAFYNQLQQLEQMTTTAENWLKIQPTTPSEPTAIKSQLKICKDEVNRLSDLQPQIERLKIQSIALKEKGQGPMFLDADFVAFTNHFKQVFSDVQAREKELQTIFDTLPPMRYQETMSAIRTWVQQSETKLSIPQLSVTDYEIMEQRLGELQALQSSLQEQQSGLYYLSTTVKEMSKKAPSEISRKYQSEFEEIEGRWKKLSSQLVEHCQKLEEQMNKLRKIQNHIQTLKKWMAEVDVFLKEEWPALGDSEILKKQLKQCRLLVSDIQTIQPSLNSVNEGGQKIKNEAEPEFASRLETELKELNTQWDHMCQQVYARKEALKGGLEKTVSLQKDLSEMHEWMTQAEEEYLERDFEYKTPDELQKAVEEMKRAKEEAQQKEAKVKLLTESVNSVIAQAPPVAQEALKKELETLTTNYQWLCTRLNGKCKTLEEVWACWHELLSYLEKANKWLNEVEFKLKTTENIPGGAEEISEVLDSLENLMRHSEDNPNQIRILAQTLTDGGVMDELINEELETFNSRWRELHEEAVRRQKLLEQSIQSAQETEKSLHLIQESLTFIDKQLAAYIADKVDAAQMPQEAQKIQSDLTSHEISLEEMKKHNQGKEAAQRVLSQIDVAQKKLQDVSMKFRLFQKPANFEQRLQESKMILDEVKMHLPALETKSVEQEVVQSQLNHCVNLYKSLSEVKSEVEMVIKTGRQIVQKKQTENPKELDERVTALKLHYNELGAKVTERKQQLEKCLKLSRKMRKEMNVLTEWLAATDMELTKRSAVEGMPSNLDSEVAWGKATQKEIEKQKVHLKSITEVGEALKTVLGKKETLVEDKLSLLNSNWIAVTSRAEEWLNLLLEYQKHMETFDQNVDHITKWIIQADTLLDESEKKKPQQKEDVLKRLKAELNDIRPKVDSTRDQAANLMANRGDHCRKLVEPQISELNHRFAAISHRIKTGKASIPLKELEQFNSDIQKLLEPLEAEIQQGVNLKEEDFNKDMNEDNEGTVKELLQRGDNLQQRITDERKREEIKIKQQLLQTKHNALKDLRSQRRKKALEISHQWYQYKRQADDLLKCLDDIEKKLASLPEPRDERKIKEIDRELQKKKEELNAVRRQAEGLSEDGAAMAVEPTQIQLSKRWREIESKFAQFRRLNFAQIHTVREETMMVMTEDMPLEISYVPSTYLTEITHVSQALLEVEQLLNAPDLCAKDFEDLFKQEESLKNIKDSLQQSSGRIDIIHSKKTAALQSATPVERVKLQEALSQLDFQWEKVNKMYKDRQGRFDRSVEKWRRFHYDIKIFNQWLTEAEQFLRKTQIPENWEHAKYKWYLKVSLFVFSKHTFCLQRQKTGEEIIQQSSKTDASILQEKLGSLNLRWQEVCKQLSDRKKRLEEQKNILSEFQRDLNEFVLWLEEADNIASIPLEPGKEQQLKEKLEQVKLLVEELPLRQGILKQLNETGGPVLVSAPISPEEQDKLENKLKQTNLQWIKVSRALPEKQGEIEAQIKDLGQLEKKLEDLEEQLNHLLLWLSPIRNQLEIYNQPNQEGPFDVKETEIAVQAKQPDVEEILSKGQHLYKEKPATQPVKRKLEDLSSEWKAVNRLLQELRAKQPDLAPGLTTIGASPTQTVTLVTQPVVTKETAISKLEMPSSLMLEVPALADFNRAWTELTDWLSLLDQVIKSQRVMVGDLEDINEMIIKQKATMQDLEQRRPQLEELITAAQNLKNKTSNQEARTIITDRIERIQNQWDEVQEHLQNRRQQLNEMLKDSTQWLEAKEEAEQVLGQARAKLESWKEGPYTVDAIQKKITETKQLAKDLRQWQTNVDVANDLALKLLRDYSADDTRKVHMITENINASWRSIHKRVSEREAALEETHRLLQQFPLDLEKFLAWLTEAETTANVLQDATRKERLLEDSKGVKELMKQWQDLQGEIEAHTDVYHNLDENSQKILRSLEGSDDAVLLQRRLDNMNFKWSELRKKSLNIRSHLEASSDQWKRLHLSLQELLVWLQLKDDELSRQAPIGGDFPAVQKQNDVHRAFKRELKTKEPVIMSTLETVRIFLTEQPLEGLEKLYQEPRELPPEERAQNVTRLLRKQAEEVNTEWEKLNLHSADWQRKIDETLERLRELQEATDELDLKLRQAEVIKGSWQPVGDLLIDSLQDHLEKVKALRGEIAPLKENVSHVNDLARQLTTLGIQLSPYNLSTLEDLNTRWKLLQVAVEDRVRQLHEAHRDFGPASQHFLSTSVQGPWERAISPNKVPYYINHETQTTCWDHPKMTELYQSLADLNNVRFSAYRTAMKLRRLQKALCLDLLSLSAACDALDQHNLKQNDQPMDILQIINCLTTIYDRLEQEHNNLVNVPLCVDMCLNWLLNVYDTGRTGRIRVLSFKTGIISLCKAHLEDKYRYLFKQVASSTGFCDQRRLGLLLHDSIQIPRQLGEVASFGGSNIEPSVRSCFQFANNKPEIEAALFLDWMRLEPQSMVWLPVLHRVAAAETAKHQAKCNICKECPIIGFRYRSLKHFNYDICQSCFFSGRVAKGHKMHYPMVEYCTPTTSGEDVRDFAKVLKNKFRTKRYFAKHPRMGYLPVQTVLEGDNMETPVTLINFWPVDSAPASSPQLSHDDTHSRIEHYASRLAEMENSNGSYLNDSISPNESIDDEHLLIQHYCQSLNQDSPLSQPRSPAQILISLESEERGELERILADLEEENRNLQAEYDRLKQQHEHKGLSPLPSPPEMMPTSPQSPRDAELIAEAKLLRQHKGRLEARMQILEDHNKQLESQLHRLRQLLEQPQAEAKVNGTTVSSPSTSLQRSDSSQPMLLRVVGSQTSDSMGEEDLLSPPQDTSTGLEEVMEQLNNSFPSSRGRNTPGKPMREDTM

SEQ ID NO: 22742 - protein, 4126 aa, Homo sapiens
MEPEDLPWPGELEEEEEEEEEEEEEEEEAAAAAAANVDDVVVVEEVEEEAGRELDSDSHYGPQHLESIDDEEDEEAKAWLQAHPGRILPPLSPPQHRYSEGERTSLEKKTESWHCLPQEMDSSQTLDTSQTRFNVRTEDTEVTDFPSLEEGILTQSENQVKEPNRDLFCSPLLVIQDSFASPDLPLLTCLTQDQEFAPDSLFHQSELSFAPLRGIPDKSEDTEWSSRPSEVSEALFQATAEVASDLASSRFSVSQHPLIGSTAVGSQCPFLPSEQGNNEETISSVDELKIPKDCDRYDDLCSYMSWKTRKDTQWPENNLADKDQVSVATSFDITDENIATKRSDHFDAARSYGQYWTQEDSSKQAETYLTKGLQGKVESDVITLDGLNENAVVCSERVAELQRKPTRESEYHSSDLRMLRMSPDTVPKAPKHLKAGDTSKGGIAKVTQSNLKSGITTTPVDSDIGSHLSLSLEDLSQLAVSSPLETTTGQHTDTLNQKTLADTHLTEETLKVTAIPEPADQKTATPTVLSSSHSHRGKPSIFYQQGLPDSHLTEEALKVSAAPGLADQTTGMSTLTSTSYSHREKPGTFYQQELPESNLTEEPLEVSAAPGPVEQKTGIPTVSSTSHSHVEDLLFFYRQTLPDGHLTDQALKVSAVSGPADQKTGTATVLSTPHSHREKPGIFYQQEFADSHQTEETLTKVSATPGPADQKTEIPAVQSSSYSQREKPSILYPQDLADSHLPEEGLKVSAVAGPADQKTGLPTVPSSAYSHREKLLVFYQQALLDSHLPEEALKVSAVSGPADGKTGTPAVTSTSSASSSLGEKPSAFYQQTLPNSHLTEEALKVSIVPGPGDQKTGIPSAPSSFYSHREKPIIFSQQTLPDFLFPEEALKVSAVSVLAAQKTGTPTVSSNSHSHSEKSSVFYQQELPDSDLPRESLKMSAIPGLTDQKTVPTPTVPSGSFSHREKPSIFYQQEWPDSYATEKALKVSTGPGPADQKTEIPAVQSSSYPQREKPSVLYPQVLSDSHLPEESLKVSAFPGPADQMTDTPAVPSTFYSQREKPGIFYQQTLPESHLPKEALKISVAPGLADQKTGTPTVTSTSYSQHREKPSIFHQQALPGTHIPEEAQKVSAVTGPGNQKTWIPRVLSTFYSQREKPGIFYQQTLPGSHIPEEAQKVSPVLGPADQKTGTPTPTSASYSHTEKPGIFYQQVLPDNHPTEEALKISVASEPVDQTTGTPAVTSTSYSQYREKPSIFYQQSLPSSHLTEEAKNVSAVPGPADQKTVIPILPSTFYSHTEKPGVFYQQVLPHSHPTEEALKISVASEPVDQTTGTPTVTSTSYSQHTEKPSIFYQQSLPGSHLTEEAKNVSAVPGPGDRKTGIPTLPSTFYSHTEKPGSFYQQVLPHSHLPEEALEVSVAPGPVDQTIGTPTVTSPSSSFGEKPIVIYKQAFPEGHLPEESLKVSVAPGPVGQTTGAPTITSPSYSQHRAKSGSFYQLALLGSQIPEEALRVSSAPGPADQTTGIPTITSTSYSFGEKPIVNYKQAFPDGHLPEEALKVSIVSGPTEKKTDIPAGPLGSSALGEKPITFYRQALLDSPLNKEVVKVSAAPGPADQKTETLPVHSTSYSNRGKPVIFYQQTLSDSHLPEEALKVPPVPGPDAQKTETPSVSSSLYSYREKPIVFYQQALPDSELTQEALKVSAVPQPADQKTGLSTVTSSFYSHTEKPNISYQQELPDSHLTEEALKVSNVPGPADQKTGVSTVTSTSYSHREKPIVSYQRELPHFTEAGLKILRVPGPADQKTGINILPSNSYPQREHSVISYEQELPDLTEVTLKAIGVPGPADQKTGIQIASSSSYSNREKASIFHQQELPDVTEEALNVFVVPGQGDRKTEIPTVPLSYYSRREKPSVISQQELPDSHLTEEALKVSPVSIPAEQKTGIPIGLSSSYSHSHKEKLKISTVHIPDDQKTEFPAATLSSYSQIEKPKISTVIGPNDQKTPSQTAFHSSYSQTVKPNILFQQQLPDRDQSKGILKISAVPELTDVNTGKPVSLSSSYFHREKSNIFSPQELPGSHVTEDVLKVSTIPGPAGQKTVLPTALPSSFSHREKPDIFYQKDLPDRHLTEDALKISSALGQADQITGLQTVPSGTYSHGENHKLVSEHVQRLIDNLNSSDSSVSSNNVLLNSQADDRVVINKPESAGFRDVGSEEIQDAENSAKTLKEIRTLLMEAENMALKRCNFPAPLARFRDISDISFIQSKKVVCFKEPSSTGVSNGDLLHRQPFTEESPSSRCIQKDIGTQTNLKCRRGIENWEFISSTTVRSPLQEAESKVSMALEETLRQYQAAKSVMRSEPEGCSGTIGNKIIIPMMTVIKSDSSSDASDGNGSCSWDSNLPESLESVSDVLLNFFPYVSPKTSITDSREEEGVSESEDGGGSSVDSLAAHVKNLLQCESSLNHAKEILRNAEEEESRVRAHAWNMKFNLAHDCGYSISELNEDDRRKVEEIKAELFGHGRTTDLSKGLQSPRGMGCKPEAVCSHIIIESHEKGCFRTLTSEHPQLDRHPCAFRSAGPSEMTRGRQNPSSCRAKHVNLSASLDQNNSHFKVWNSLQLKSHSPFQNFIPDEFKISKGLRMPFDEKMDPWLSELVEPAFVPPKEVDFHSSSQMPSPEPMKKFTTSITFSSHRHSKCISNSSVVKVGVTEGSQCTGASVGVFNSHFTEEQNPPRDLKQKTSSPSSFKMHSNSQDKEVTILAEGRRQSQKLPVDFERSFQEEKPLERSDFTGSHSEPSTRANCSNFKEIQISDNHTLISMGRPSSTLGVNRSSSRLGVKEKNVTITPDLPSCIFLEQRELFEQSKAPRADDHVRKHHSPSPQHQDYVAPDLPSCIFLEQRELFEQCKAPYVDHQMRENHSPLPQGQDSIASDLPSPISLEQCQSKAPGVDDQMNKHHFPLPQGQDCVVEKNNQHKPKSHISNINVEAKFNTVVSQSAPNHCTLAASASTPPSNRKALSCVHITLCPKTSSKLDSGTLDERFHSLDAASKARMNSEFNFDLHTVSSRSLEPTSKLLTSKPVAQDQESLGFLGPKSSLDFQVVQPSLPDSNTITQDLKTIPSQNSQIVTSRQIQVNISDFEGHSNPEGTPVFADRLPEKMKTPLSAFSEKLSSDAVTQITTESPEKTLFSSEIFINAEDRGHEIIEPGNQKLRKAPVKFASSSSVQQVTFSRGTDGQPLLLPYKPSGSTKMYYVPQLRQIPPSPDSKSDTTVESSHSGSNDAIAPDFPAQVLGTRDDDLSATVNIKHKEGIYSKRVVTKASLPVGEKPLQNENADASVQVLITGDENLSDKKQQEIHSTRAVTEAAQAKEKESLQKDTADSSAAAAAEHSAQVGDPEMKNLPDTKAITQKEEIHRKKTVPEEAWPNNKESLQINIEESECHSEFENTTRSVFRSAKFYIHHPVHLPSDQDICHESLGKSVFMRHSWKDFFQHHPDKHREHMCLPLPYQNMDKTKTDYTRIKSLSINVNLGNKEVMDTTKSQVRDYPKHNGQISDPQRDQKVTPEQTTQHTVSLNELWNKYRERQRQQRQPELGDRKELSLVDRLDRLAKILQNPITHSLQVSESTHDDSRGERSVKEWSGRQQQRNKLQKKKRFKSLEKSHKNTGELKKSKVLSHHRAGRSNQIKIEQIKFDKYILSKQPGFNYISNTSSDCRPSEESELLTDTTTNILSGTTSTVESDILTQTDREVALHERSSSVSTIDTARLIQAFGHERVCLSPRRIKLYSSITNQQRRYLEKRSKHSKKVLNTGHPLVTSEHTRRRHIQVANHVISSDSISSSASSFLSSNSTFCNKQNVHMLNKGIQAGNLEIVNGAKKHTRDVGITFPTPSSSEAKLEENSDVTSWSEEKREEKMLFTGYPEDRKLKKNKKNSHEGVSWFVPVENVESRSKKENVPNTCGPGISWFEPITKTRPWREPLREQNCQGQHLDGRGYLAGPGREAGRDLLRPFVRATLQESLQFHRPDFISRSGERIKRLKLIVQERKLQSMLQTERDALFNIDRERQGHQNRMCPLPKRVFLAIQKNKPISKKEMIQRSKRIYEQLPEVQKKREEEKRKSEYKSYRLRAQLYKKRVTNQLLGRKVPWD

SEQ ID NO: 22743 - protein, 170 aa, Homo sapiens
MASLLKVDQEVKLKVDSFRERITSEAEDLVANFFPKKLLELDSFLKEPILNIHDLTQLLIPRIEDGNNFGVSIQEETVAELRTVESEAASYLDQISRYYITRAKLVSKIAKYPHVEDYRRTVTEIDEKEYISLRLIISELRNQYVTLHDMILKNIEKIKRPRSSNAETLY

SEQ ID NO: 22744 - protein, 1972 aa, Homo sapiens
MAADDDNGDGTSLFDVFSASPLKNNDEGSLDIYAGLDSAVSDSASKSCVPSRNCLDLYEEILTEEGTAKEATYNDLQVEYGKCQLQMKELMKKFKEIQTQNFSLINENQSLKKNISALIKTARVEINRKDEEISNLHQRLSEFPHFRNNHKTARTFDTVKTKDLKSRSPHLDDCSKTDHRAKSDVSKDVHHSTSLPNLEKEGKPHSDKRSTSHLPTSVEKHCTNGVWSRSHYQVGEGSSNEDSRRGRKDIRHSQFNRGTERVRKDLSTGCGDGEPRILEASQRLQGHPEKYGKGEPKTESKSSKFKSNSDSDYKGERINSSWEKETPGERSHSRVDSQSDKKLERQSERSQNINRKEVKSQDKEERKVDQKPKSVVKDQDHWRRSERASLPHSKNEITFSHNSSKYHLEERRGWEDCKRDKSVNSHSFQDGRCPSSLSNSRTHKNIDSKEVDAMHQWENTPLKAERHRTEDKRKREQESKEENRHIRNEKRVPTEHLQKTNKETKKTTTDLKKQNEPKTDKGEVLDNGVSEGADNKELAMKAESGPNETKNKDLKLSFMKKLNLTLSPAKKQPVSQDNQHKITDIPKSSGVCDSESSMQVKTVAYVPSISEHILGEAAVSEHTMGETKSTLLEPKVALLAVTEPRIGISETNKEDENSLLVRSVDNTMHCEEPICGTETSFPSPMEIQQTESLFPSTGMKQTINNGRAAAPVVMDVLQTDVSQNFGLELDTKRNDNSDYCGISEGMEMKVALSTTVSETTESILQPSIEEADILPIMLSEDNNPKFEPSVIVTPLVESKSCHLEPCLPKETLDSSLQQTELMDHRMATGETNSVYHDDDNSVLSIDLNHLRPIPEAISPLNSPVRPVAKVLRNESPPQVPVYNNSHKDVFLPNSAHSTSKSQSDLNKENQKPIYKSDKCTEADTCKNSPLDELEEGEIRSDSETSKPQESFEKNSKRRVSADVRKSKTIPRRGKSTVCLDKDSRKTHVRIHQTNNKWNKRPDKSSRSSKTEKKDKVMSTSSLEKIVPIIAVPSSEQEIMHMLRMIRKHVRKNYMKFKAKFSLIQFHRIIESAILSFTSLIKHLNLHKISKSVTTLQKNLCDIIESKLKQVKKNGIVDRLFEQQLPDMKKKLWKFVDDQLDYLFAKLKKILVCDSKSFGRDSDEGKLEKTSKQNAQYSNSQKRSVDNSNRELLKEKLSKSEDPVHYKSLVGCKKSEENYQDQNNSSINTVKHDIKKNFNICFDNIKNSQSEERSLEVHCPSTPKSEKNEGSSIEDAQTSQHATLKPERSFEILTEQQASSLTFNLVSDAQMGEIFKSLLQGSDLLDSSVNCTEKSEWELKTPEKQLLETLKCESIPACTTEELVSGVASPCPKMISDDNWSLLSSEKGPSLSSGLSLPVHPDVLDESCMFEVSTNLPLSKDNVCSVEKSKPCVSSILLEDLAVSLTVPSPLKSDGHLSFLKPDMSSSSTPEEVISAHFSEDALLEEEDASEQDIHLALESDNSSSKSSCSSSWTSRSVAPGFQYHPNLPMHAVIMEKSNDHFIVKIRRATPSTSSGLKQSMMPDELLTSLPRHGKEADEGPEKEYISCQNTVFKSVEELENSNKNVDGSKSTHEEQSSMIQTQVPDIYEFLKDASDKMGHSDEVADECFKLHQVWETKVPESIEELPSMEEISHSVGEHLPNTYVDLTKDPVTETKNLGEFIEVTVLHIDQLGCSGGNLNQSAQILDNSLQADTVGAFIDLTQDASSEAKSEGNHPALAVEDLGCGVIQVDEDNCKEEKAQVANRPLKCIVEETYIDLTTESPSSCEVKKDELKSEPGSNCDNSELPGTLHNSHKKRRNISDLNHPHKKQRKETDLTNKEKTKKPTQDSCENTEAHQKKASKKKAPPVTKDPSSLKATPGIKDSSAALATSTSLSAKNVIKKKGEIIILWTRNDDREILLECQKRGPSFKTFAYLAAKLDKNPNQVTTQFLHL

SEQ ID NO: 22745 - protein, 455 aa, Homo sapiens
MQDDKTGGVPIRTVKSFLSKIPSVVTGTDIVQWLMKNLSIEDPVEAIHLGSLIAAQGYIFPISDHVLTMKDDGTFYRFQAPYFWPSNCWEPENTDYAIYLCKRTMQNKARLELADYEAENLARLQRAFARKWEFIFMQAEAQVKIDRKKDKTERKILDSQERAFWDVHRPVPGCVNTTEMDIRKCRRLKNPQKVKKSVYGVTEESQAQSPVHVLSQPIRKTTKEDIRKQITFLNAQIDRHCLKMSKVAESLIAYTEQYVEYDPLITPAEPSNPWISDDVALWDIEMSKEPSQQRVKRWGFSFDEILKDQVGRDQFLRFLESEFSSENLRFWLAVQDLKKQPLQDVAKRVEEIWQEFLAPGAPSAINLDSHSYEITSQNVKDGGRYTFEDAQEHIYKLMKSDSYARFLRSNAYQDLLLAKKKPESEQGRRTSLEKFTRSVGKSLAGKRLTGLMQSS

SEQ ID NO: 22746 - protein, 584 aa, Homo sapiens [sequence omitted]

SEQ ID NO: 22747 - protein, 354 aa, Homo sapiens
MDDLMLSPDDIEQWFTEDPGPDEAPRMPEAAPPVAPAPAAPTPAAPAPAPSWPLSSSVPSQKTYQGSYGFRLGFLHSGTAKSVTCTYSPALNKMFCQLAKTCPVQLWVDSTPPPGTRVRAMAIYKQSQHMTEVVRRCPHHERCSDSDGLAPPQHLIRVEGNLRVEYLDDRNTFRHSVVVPYEPPEVGSDCTTIHYNYMCNSSCMGGMNRRPILTIITLEDSSGNLLGRNSFEVRVCACPGRDRRTEEENLRKKGEPHHELPPGSTKRALPNNTSSSPQPKKKPLDGEYFTLQIRGRERFEMFRELNEALELKDAQAGKEPGGSRAHSSHLKSKKGQSTSRHKKLMFKTEGPDSD

SEQ ID NO: 22748 - protein, 236 aa, Homo sapiens [sequence omitted]

SEQ ID NO: 22749 - protein, 468 aa, Homo sapiens
MAFPAGFGWAAATAAYQVEGGWDADGKGPCVWDTFTHQGGERVFKNQTGDVACGSYTLWEEDLKCIKQLGLTHYRFSLSWSRLLPDGTTGFINQKGIDYYNKIIDDLLKNGVTPIVTLYHFDLPQTLEDQGGWLSEAIIESFDKYAQFCFSTFGDRVKQWITINEANVLSVMSYDLGMFPPGIPHFGTGGYQAAHNLIKAHARSWHSYDSLFRKKQKGMVSLSLFAVWLEPADPNSVSDQEAAKRAITFHLDLFAKPIFIDGDYPEVVKSQIASMSQKQGYPSSRLPEFTEEEKKMIKGTADFFAVQYYTTRLIKYQENKKGELGILQDAEIEFFPDPSWKNVDWIYVVPWGVCKLLKYIKDTYNNPVIYITENGFPQSDPAPLDDTQRWEYFRQTFQELFKAIQLDKVNLQVYCAWSLLDNFEWNQGYSSRFGLFHVDFEDPARPRVPYTSAKEAKIIRNNGLEAHL

SEQ ID NO: 22750 - protein, 74 aa, Homo sapiens
MKNVDSDDLVTGTLPKLKSSKEWLEPKPLCFMEVLAKEDTEAAIQSILYKENSVIKKQRVILSRKRTAVLSGGK

SEQ ID NO: 22751 - protein, 979 aa, Homo sapiens
MGTRLPLVLRQLRRPPQPPGPPRRLRVPCRASSGGGGGGGGGREGLLGQRRPQDGQARSSCSPGGRTPAARDSIVREVIQNSKEVLSLLQEKNPAFKPVLAIIQAGDDNLMQEINQNLAEEAGLNITHICLPPDSSEAEIIDEILKINEDTRVHGLALQISENLFSNKVLNALKPEKDVDGVTDINLGKLVRGDAHECFVSPVAKAVIELLEKSVGVNLDGKKILVVGAHGSLEAALQCLFQRKGSMTMSIQWKTRQLQSKLHEADIVVLGSPKPEEIPLTWIQPGTTVLNCSHDFLSGKVGCGSPRIHFGGLIEEDDVILLAAALRIQNMVSSGRRWLREQQHRRWRLHCLKLQPLSPVPSDIEISRGQTPKAVDVLAKEIGLLADEIEIYGKSKAKVRLSVLERLKDQADGKYVLVAGITPTPLGEGKSTVTIGLVQALTAHLNVNSFACLRQPSQGPTFGVKGGAAGGGYAQVIPMEEFNLHLTGDIHAITAANNLLAAAIDTRILHENTQTDKALYNRLVPLVNGVREFSEIQLARLKKLGINKTDPSTLTEEEVSKFARLDIDPSTITWQRVLDTNDRFLRKITIGQGNTEKGHYRQAQFDIAVASEIMAVLALTDSLADMKARLGRMVVASDKSGQPVTADDLGVTGALTVLMKDAIKPNLMQTLEGTPVFVHAGPFANIAHGNSSVLADKIALKLVGEEGFVVTEAGFGADIGMEKFFNIKCRASGLVPNVVVLVATVRALKMHGGGPSVTAGVPLKKEYTEENIQLVADGCCNLQKQIQITQLFGVPVVVALNVFKTDTRAEIDLVCELAKRAGAFDAVPCYHWSVGGKGSVDLARAVREAASKRSRFQFLYDVQVPIVDKIRTIAQAVYGAKDIELSPEAQAKIDRYTQQGFGNLPICMAKTHLSLSHQPDKKGVPRDFILPISDVRASIGAGFIYPLVGTMSTMPGLPTRPCFYDIDLDTETEQVKGLF

SEQ ID NO: 22752 - protein, 923 aa, Homo sapiens
MGSGAGELGRAERLPVLFLFLLSLFCPALCEQIRYRIPEEMPKGSVVGNLATDLGFSVQELPTRKLRVSSEKPYFTVSAESGELLVSSRLDREEICGKKPACALEFEAVAENPLNFYHVNVEIEDINDHTPKFTQNSFELQISESAQPGTRFILEVAEDADIGLNSLQKYKLSLNPSFSLIIKEKQDGSKYPELALEKTLDREQQSYHRLVLTALDGGHPPLSGTTELRIQVTDANDNPPVFNRDVYRVSLRENVPPGTTVLQVSATDQDEGINSEITYSFYRTGQIFSLNSKSGEITTQKKLDFEETKEYSMVVEGRDGGGLVAQCTVEINIQDENDNSPEVTFHSLLEMILENAVPGTLIALIKIHDQDSGENGEVNCQLQGEVPFKIISSSKNSYKLVTDGTLDREQTPEYNVTITATDRGKPPLSSSISVILHIRDVNDNAPVFHQASYLVSVPENNPPGASIAQVCASDLDLGLNGQVSYSIMASDLEPLALASYVSMSAQSGVVFAQRAFDYEQLRTFELTLQARDQGSPALSANVSLRVLVGDRNDNAPRVLYPALGPDGSALFDMVPRAAEPGYLVTKVVAVDADSGHNAWLSYHVLQASEPGLFSLGLRTGEVRTARALGDRDAARQRLLVAVRDGGQPPLSATATLHLVFADSLQEVLPDITDRPVPSDPQAELQFYLVVALALISVLFLLAVILAVALRLRRSSSPAAWSCFQPGLCVKSGPVVPPNYSQGTLPYSYNLCVAHTGKTEFNFLKCSEQLSSGQDILCGDSSGALFPLCNSSESTSHPELQAPPNTDWRFSQAQRPGTSGSQNGDDTGTWPNNQFDTEMLQAMILASASEAADGSSTLGGGAGTMGLSARYGPQFTLQHVPDYRQNVYIPGSNATLTNAAGKRDGKAPAGGNGNKKKSGKKEKK

SEQ ID NO: 22753 - protein, 569 aa, Homo sapiens
MRDNTSPISVILVSSGSRGNKLLFRYPFQRSQEHPASQTSKPRSRYAASNTGDHADEQDGDSRFSDVILATILATKSEMCGQKFELKIDNVRFVGHPTLLQHALGQISKTDPSPKREAPTMILFNVVFALRANADPSVINCLHNLSRRIATVLQHEERRCQYLTREAKLILALQDEVSAMADGNEGPQSPFHHILPKCKLARDLKEAYDSLCTSGVVRLHINSWLEVSFCLPHKIHYAASSLIPPEAIERSLKAIRPYHALLLLSDEKSLLGELPIDCSPALVRVIKTTSAVKNLQQLAQDADLALLQVFQLAAHLVYWGKAIIIYPLCENNVYMLSPNASVCLYSPLAEQFSHQFPSHDLPSVLAKFSLPVSLSEFRNPLAPAVQETQLIQMVVWMLQRRLLIQLHTYVCLMASPSEEEPRPREDDVPFTARVGGRSLSTPNALSFGSPTSSDDMTLTSPSMDNSSAELLPSGDSPLNQRMTENLLASLSEHERAAILSVPAAQNPEDLRMFARLLHYFRGRHHLEEIMYNENTRRSQLLMLFDKFRSVLVVTTHEDPVIAVFQALLP

SEQ ID NO: 22754 - protein, 592 aa, Homo sapiens
MAAAVAAALARLLAAFLLLAAQVACEYGMVHVVSQAGGPEGKDYCILYNPQWAHLPHDLSKASFLQLRNWTASLLCSAADLPARGFSNQIPLVARGNCTFYEKVRLAQGSGARGLLIVSRERLVPPGGNKTQYDEIGIPVALLSYKDMLDIFTRFGRTVRAALYAPKEPVLDYNMVIIFIMAVGTVAIGGYWAGSRDVKKRYMKHKRDDGPEKQEDEAVDVTPVMTCVFVVMCCSMLVLLYYFYDLLVYVVIGIFCLASATGLYSCLAPCVRRLPFGKCRIPNNSLPYFHKRPQARMLLLALFCVAVSVVWGVFRNEDQWAWVLQDALGIAFCLYMLKTIRLPTFKACTLLLLVLFLYDIFFVFITPFLTKSGSSIMVEVATGPSDSATREKLPMVLKVPRLNSSPLALCDRPFSLLGFGDILVPGLLVAYCHRFDIQVQSSRVYFVACTIAYGVGLLVTFVALALMQRGQPALLYLVPCTLVTSCAVALWRRELGVFWTGSGFAKVLPPSPWAPAPADGPQPPKDSATPLSPQPPSEEPATSPWPAEQSPKSRTSEEMGAGAPMREPGSPAESEGRDQAQPSPVTQPGASA

SEQ ID NO: 22755 - protein, 585 aa, Homo sapiens
MQSCESSGDSADDPLSRGLRRRGQPRVVVIGAGLAGLAAAKALLEQGFTDVTVLEASSHIGGRVQSVKLGHATFELGATWIHGSHGNPIYHLAEANGLLEETTDGERSVGRISLYSKNGVACYLTNHGRRIPKDVVEEFSDLYNEVYNLTQEFFRHDKPVNAESQNSVGVFTREEVRNRIRNDPDDPEATKRLKLAMIQQYLKVESCESSSHSMDEVSLSAFGEWTEIPGAHHIIPSGFMRVVELLAEGIPAHVIQLGKPVRCIHWDQASARPRGPEIEPRGEGDHNHDTGEGGQGGEEPRGGRWDEDEQWSVVVECEDCELIPADHVIVTVSLGVLKRQYTSFFRPGLPTEKVAAIHRLGIGTTDKIFLEFEEPFWGPECNSLQFVWEDEAESHTLTYPPELWYRKICGFDVLYPPERYGHVLSGWICGEEALVMEKCDDEAVAEICTEMLRQFTGNPNIPKPRRILRSAWGSNPYFRGSYSYTQVGSSGADVEKLAKPLPYTESSKTAHGSSTKQQPGHLFSSKCPEQPLDANRGAVKPMQVLFSGEATHRKYYSTTHGALLSGQREAARLIEMYRDLFQQGT

SEQ ID NO: 22756 - protein, 791 aa, Homo sapiens
MDASSDPYLPYDGGGDSIPLRELHKRGTHYTMTNGGSINSSTHLLDLLDEPIPGVGTYDDFHTIDWVREKCKDRERHRRINSKKKESAWEMTKSLYDAWSGWLVVTLTGLASGALAGLIDIAADWMTDLKEGICLSALWYNHEQCCWGSNETTFEERDKCPQWKTWAELIIGQAEGPGSYIMNYIMYIFWALSFAFLAVSLVKVFAPYACGSGIPEIKTILSGFIIRGYLGKWTLMIKTITLVLAVASGLSLGKEGPLVHVACCCGNIFSYLFPKYSTNEAKKREVLSAASAAGVSVAFGAPIGGVLFSLEEVSYYFPLKTLWRSFFAALVAAFVLRSINPFGNSRLVLFYVEYHTPWYLFELFPFILLGVFGGLWGAFFIRANIAWCRRRKSTKFGKYPVLEVIIVAAITAVIAFPNPYTRLNTSELIKELFTDCGPLESSSLCDYRNDMNASKIVDDIPDRPAGIGVYSAIWQLCLALIFKIIMTVFTFGIKVPSGLFIPSMAIGAIAGRIVGIAVEQLAYYHHDWFIFKEWCEVGADCITPGLYAMVGAAACLGGVTRMTVSLVVIVFELTGGLEYIVPLMAAVMTSKWVGDAFGREGIYEAHIRLNGYPFLDAKEEFTHTTLAADVMRPRRNDPPLAVLTQDNMTVDDIENMINETSYNGFPVIMSKESQRLVGFALRRDLTIAIESARKKQEGIVGSSRVCFAQHTPSLPAESPRPLKLRSILDMSPFTVTDHTPMEIVVDIFRKLGLRQCLVTHNGRLLGIITKKDILRHMAQTANQDPASIMFN

SEQ ID NO: 22757 - protein, 872 aa, Homo sapiens
MGDSDDEYDRRRRDKFRRERSDYDRSRERDERRRGDDWNDREWDRGRERRSRGEYRDYDRNRRERFSPPRHELSPPQKRMRRDWDEHSSDPYHSGYEMPYAGGGGGPTYGPPQPWGHPDVHIMQHHVLPIQARLGSIAEIDLGVPPPVMKTFKEFLLSLDDSVDETEAVKRYNDYKLDFRRQQMQDFFLAHKDEEWFRSKYHPDEVGKRRQEARGALQNRLRVFLSLMETGWFDNLLLDIDKADAIVKMLDAAVIKMEGGTENDLRILEQEEEEEQAGKPGEPSKKEEGRAGAGLGDGERKTNDKDEKKEDGKQAENDSSNDDKTKKSEGDGDKEEKKEDSEKEAKKSSKKRNRKHSGDDSFDEGSVSESESESESGQAEEEKEEAEEALKEKEKPKEEEWEKPKDAAGLECKPRPLHKTCSLFMRNIAPNISRAEIISLCKRYPGFMRVALSEPQPERRFFRRGWVTFDRSVNIKEICWNLQNIRLRECELSPGVNRDLTRRVRNINGITQHKQIVRNDIKLAAKLIHTLDDRTQLWASEPGTPPLPTSLPSQNPILKNITDYLIEEVSAEEEELLGSSGGAPPEEPPKEGNPAEINVERDEKLIKVLDKLLLYLRIVHSLDYYNTCEYPNEDEMPNRCGIIHVRGPMPPNRISHGEVLEWQKTFEEKLTPLLSVRESLSEEEAQKMGRKDPEQEVEKFVTSNTQELGKDKWLCPLSGKKFKGPEFVRKHIFNKHAEKIEEVKKEVAFFNNFLTDAKRPALPEIKPAQPPGPAQSLTPGLPYPHQTPQGLMPYGQPRPPILGYGAGAVRPAVPTGGPPYPHAPYGAGRGNYDAFRGQGGYPGKPRNRMVRGDPRAIVEYRDLDAPDDVDFF

SEQ ID NO: 22758 - protein, 681 aa, Homo sapiens
MADPVAGIAGSAAKSVRPFRSSEAYVEAMKEDLAEWLNALYGLGLPGGGDGFLTGLATGTTLCQHANAVTEAARALAAARPARGVAFQAHSVVPGSFMARDNVATFIGWCRVELGVPEVLMFETEDLVLRKNEKSVVLCLLEVARRGARLGLLAPRLVQFEQEIERELRAAPPAPNAPAAGEDTTETAPAPGTPARGPRMTPSDLRNLDELVREILGRCTCPDQFPMIKVSEGKYRVGDSSLLIFVRVLRSHVMVRVGGGWDTLEHYLDKHDPCRCSSTAHRPPQPRVCTFSPQRVSPTTSPRPASPVPGSERRGSRPEMTPVSLRSTKEGPETPPRPRDQLPPHPRSRRYSGDSDSSASSAQSGPLGTRSDDTGTGPRRERPSRRLTTGTPASPRRPPALRSQSRDRLDRGRPRGAPGGRGAQLSVPSPARRARSQSREEQAVLLVRRDRDGQHSWVPRGRGSGGSGRSTPQTPRARSPAAPRLSRVSSPSPELGTTPASIFRTPLQLDPQQEQQLFRRLEEEFLANARALEAVASVTPTGPAPDPARAPDPPAPDSAYCSSSSSSSSLSVLGGKCGQPGDSGRTANGLPGPRSQALSSSSDEGSPCPGMGGPLDAPGSPLACTEPSRTWARGRMDTQPDRKPSRIPTPRGPRRPSGPAELGTWHALHSVTPRAEPDSWM

SEQ ID NO: 22759 - protein, 1043 aa, Homo sapiens
MLCGLSRETPGEADDGPYSKGGKDAGGADVSLACRRQSIPEEFRGITVVELIKKEGSTLGLTISGGTDKDGKPRVSNLRPGGLAARSDLLNIGDYIRSVNGIHLTRLRHDEIITLLKNVGERVVLEVEYELPPPAPENNPRIISKTVDVSLYKEGNSFGFVLRGGAHEDGHKSRPLVLTYVRPGGPADREGSLKVGDRLLSVDGIPLHGASHATALATLRQCSHEALFQVEYDVATPDTVANASGPLMVEIVKTPGSALGISLTTTSLRNKSVITIDRIKPASVVDRSGALHPGDHILSIDGTSMEHCSLLEATKLLASISEKVRLEILPVPQSQRPLRPSEAVKVQRSEQLHRWDPCVPSCHSPRPGHCRMPTWATPAGQDQSRSLSSTPFSSPTLNHAFSCNNPSTLPRGSQPMSPRTTMGRRRQRRREHKSSLSLASSTVGPGGQIVHTETTEVVLCGDPLSGFGLQLQGGIFATETLSSPPLVCFIEPDSPAERCGLLQVGDRVLSINGIATEDGTMEEANQLLRDAALAHKVVLEVEFDVAESVIPSSGTFHVKLPKKRSVELGITISSASRKRGEPLIISDIKKGSVAHRTGTLEPGDKLLAIDNIRLDNCPMEDAVQILRQCEDLVKLKIRKDEDNSDELETTGAVSYTVELKRYGGPLGITISGTEEPFDPIVISGLTKRGLAERTGAIHVGDRILAINNVSLKGRPLSEAIHLLQVAGETVTLKIKKQLDRPLLPRKSGSLSETSDADEDPADALKGGLPAARFSPAVPSVDSAVESWDSSATEGGFGGPGSYTPQAAARGTTPQERRPGWLRGSPPPTEPRRTSYTPTPADESFPEEEEEDDWEPPTSPAPGPAREEGFWRMFGEALEDLESCGQSELLRELEASIMTGTVQRVALEGRPGHRPWQRGREVRASPAEMEELLLPTPLEMHKVTLHKDPMRHDFGFSVSDGLLEKGVYVHTVRPDGPAHRGGLQPFDRVLQVNHVRTRDFDCCLAVPLLAEAGDVLELIISRKPHTAHSSRAPRSPGPSSPRML

SEQ ID NO: 22760 - protein, 647 aa, Homo sapiens [sequence omitted]

SEQ ID NO: 22761 - protein, 963 aa, Homo sapiens
MLYYLKQEVIGNECQKVFDGVDASDIDVWVPEPDHSEVPAEWWDFDADKSLLIGVFKHGYEKYNTIRADPALCFLERVGKPDEKAVAAEQRANDYMDGDVEDPEYKPAPAIFKDDIEDDVSSPGDLVIADGDGQLMEGDKVYWPTQSALTTRLRRLITAYQRTNKNRQIQQIQPTFSVPTSVMQPIYEEATLNPKMAAKIERQQRWTRREEADFYRVVSTFGVVFDPDRGQFDWTKFRAMARLHKKTDDSLEKYLYAFMSMCRRVCRLPSKEESTTHMKAYDEESVASLSTTQDETQDSFQMNNGTPESAYILQGGYMLAASYWPKDRVMINRLDSICQTVLKGKWPSARRSYDANTVASFYTTKLLDSPGAATEYSDPSVPTPPGAGVKEEHDQSTQMSKVKKHVREKEFTVKIKDEGGLKLTFQKQGLAQKRPFDGEDGALGQQQYLTRLRELQSASETSLVNFPKSIPVSGTSIQPTLGANGVILDNQPIVKKRRGRRKNVEGVDIFFFNRNKPPNHVSLGLTSSQISTGINPALSYTQPQGIPDTESPVPVINLKDGTRLAGDDAPKRKDLEKWLKEHPGYVEDLGAFIPRMQLHEGRPKQKRHRCRNPNKLDVNSLTGEERVQLINRRNARKVGGAFAPPLKDLCRFLKENSEYGVAPEWGDVVKQSGFLPESMYERILTGPVVREEVSRRGRRPKSGIAKATAAAAAASATSVSGNPLLANGLLPGVDLTTLQALQQNLQNLQSLQVTAGLMGMPTGLPSGGEAKNMAAMFPMLLSGMAGLPNLLGMGGLLTKPTESGTEDKKGSDSKESEGKTERTESQSSENGGENSVSSSPSTSSTAALNTAAAANPLALNPLLLSNILYPGMLLTPGLNLHIPTLSQSNTFDVQNKNSDLGSSKSVEVKEEDSRIKDQEDKGGTEPSPLNENSTDEGSEKADASSGSDSTSSSSEDSDSSNED

SEQ ID NO: 22762 - protein, 149 aa, Homo sapiens
MAEMEKEGRPPENKRSRKPAHPVKREINEEMKNFAENTMNELLGWYGYDKVELKDGEDIEFRSYPTDGESRQHISVLKENSLPKPKLPEDSVISPYNISTGYSGLATGNGLSDSPAGSKDHGSVPIIVPLIPPPFIKPPADEKTEAQKS

SEQ ID NO: 22763 - protein, 336 aa, Homo sapiens
MDADEGQDMSQVSVGKPHKCGYCGRSYKQRSSLEEHKERCHNYLESMGLPGTLYPVIKEETNHSEMAEDLCKIGSERSLVLDRLASNVAKRKSSMPQKFLGDKGLSDTPYDSSASYEKENEMMKSHVMDQAINNAINYLGAESLRPLVQTPPGGSEVVPVISPMYQLHKPLAEGTPRSNHSAQDSAVENLLLLSKAKLVPSEREASPSNSCQDSTDTESNNEEQRSGLIYLTNHIAPHARNGLSLKEEHRAYDLLRAASENSQDALRVVSTSGEQMKVYKCEHCRVLFLDHVMYTIHMGCHGFRDPFECNMCGYHSQDRYEFSSHITRGEHRFHMS

SEQ ID NO: 22764 - protein, 289 aa, Homo sapiens
MLNNLTDCEDGDGGANPGDGNPKESSPFINSTDTEKGKEYDGKNMALFEEEMDTSPMVSSLLSGLANYTNLPQGSREHEEAENNEGGKKKPVQAPRMGTFMGVYLPCLQNIFGVILFLRLTWVVGIAGIMESFCMVFICCSCTMLTAISMSAIATNGVVPAGGSYYMISRSLGPEFGGAVGLCFYLGTTFAGAMYILGTIEILLRREQPLLIGSYASWGQDRGGVLLKRKKPRGPRPTEEAPPRCLRWGAGVSPQSACRLLPVSHGSSPKTEIVELEGAPSPEFPPWDK

SEQ ID NO: 22765 - protein, 2812 aa, Homo sapiens
MVPPVWTLLLLVGAALFRKEKPPDQKLVVRSSRDNYVLTQCDFEDDAKPLCDWSQVSADDEDWVRASGPSPTGSTGAPGGYPNGEGSYLHMESNSFHRGGVARLLSPDLWEQGPLCVHFAHHMFGLSWGAQLRLLLLSGEEGRRPDVLWKHWNTQRPSWMLTTVTVPAGFTLPTRLMFEGTRGSTAYLDIALDALSIRRGSCNRVCMMQTCSFDIPNDLCDWTWIPTASGAKWTQKKGSSGKPGVGPDGDFSSPGSGCYMLLDPKNARPGQKAVLLSPVSLSSGCLSFSFHYILRGQSPGAALHIYASVLGSIRKHTLFSGQPGPNWQAVSVNYTAVGRIQFAVVGVFGKTPEPAVAVDATSIAPCGEGFPQCDFEDNAHPFCDWVQTSGDGGHWALGHKNGPVHGMGPAGGFPNAGGHYIYLEADEFSQAGQSVRLVSRPFCAPGDICVEFAYHMYGLGEGTMLELLLGSPAGSPPIPLWKRVGSQRPYWQNTSVTVPSGHQQPMQLIFKGIQGSNTASVVAMGFILINPGTCPVKVLPELPPVSPVSSTGPSETTGLTENPTISTKKPTVSIEKPSVTTEKPTVPKEKPTIPTEKPTISTEKPTIPSEKPNMPSEKPTIPSEKPTILTEKPTIPSEKPTIPSEKPTISTEKPTVPTEEPTTPTEETTTSMEEPVIPTEKPSIPTEKPSIPTEKPTISMEETIISTEKPTISPEKPTIPTEKPTIPTEKSTISPEKPTTPTEKPTIPTEKPTISPEKPTTPTEKPTISPEKLTIPTEKPTIPTEKPTIPTEKPTISTEEPTTPTEETTISTEKPSIPMEKPTLPTEETTTSVEETTISTEKLTIPMEKPTISTEKPTIPTEKPTISPEKLTIPTEKLTIPTEKPTIPIEETTISTEKLTIPTEKPTISPEKPTISTEKPTIPTEKPTIPTEETTISTEKLTIPTEKPTISPEKLTIPTEKPTISTEKPTIPTEKLTIPTEKPTIPTEKPTIPTEKLTALRPPHPSPTATGLAALVMSPHAPSTPMTSVILGTTTTSRSSTERCPPNARYESCACPASCKSPRPSCGPLCREGCVCNPGFLFSDNHCIQASSCNCFYNNDYYEPGAEWFSPNCTEHCRCWPGSRVECQISQCGTHTVCQLKNGQYGCHPYAGTATCLVYGDPHYVTFDGRHFGFMGKCTYILAQPCGNSTDPFFRVTAKNEEQGQEGVSCLSKVYVTLPESTVTLLKGRRTLVGGQQVTLPAIPSKGVFLGASGRFVELQTEFGLRVRWDGDQQLYVTVSSTYSGKLCGLCGNYDGNSDNDHLKLDGSPAGDKEELGNSWQTDQDEDQECQKYQVVNSPSCDSSLQSSMSGPGFCGRLVDTHGPFETCLLHVKAASFFDSCMLDMCGFQGLQHLLCTHMSTMTTTCQDAGHAVKPWREPHFCPMACPPNSKYSLCAKPCPDTCHSGFSGMFCSDRCVEACECNPGFVLSGLECIPRSQCGCLHPAGSYFKVGERWYKPGCKELCVCESNNRIRCQPWRCRAQEFCGQQDGIYGCHAQGAATCTASGDPHYLTFDGALHHFMGTCTYVLTRPCWSRSQDSYFVVSATNENRGGILEVSYIKAVHVTVFDLSISLLRGCKVMLNGHRVALPVWLAQGRVTIRLSSNLVLLYTNFGLQVRYDGSHLVEVTVPSSYGGQLCGLCGNYNNNSLDDNLRPDRKLAGDSMQLGAAWKLPESSEPGCFLVGGKPSSCQENSMADAWNKNCAILINPQGPFSQCHQVVPPQSSFASCVHGQCGTKGDTTALCRSLQAYASLCAQAGQAPAWRNRTFCPMRCPPGSSYSPCSSPCPDTCSSINNPRDCPKALPCAESCECQKGHILSGTSCVPLGQCGCTDPAGSYHPVGERWYTENTCTRLCTCSVHNNITCFQSTCKPNQICWALDGLLHCRASGVGVCQLPGESHYVSFDGSNHSIPDACTLVLVKVCHPAMALPFFKISAKHEKEEGGTEAFRLHEVYIDIYDAQVTLQKGHRVLINSKQVTLPAISQIPGVSVKSSSIYSIVNIKIGVQVKFDGNHLLEIEIPTTYYGKVCGMCGNFNDEEEDELMMPSDEVANSDSEFVNSWKDKDIDPSCQSLLVDEQQIPAEQQENPSGNCRAADLRRAREKCEAALRAPVWAQCASRIDLTPFLVDCANTLCEFGGLYQALCQALQAFGATCQSQGLKPPLWRNSSFCPLECPAYSSYTNCLPSCSPSCWDLDGRCEGAKVPSACAEGCICQPGYVLSEDKCVPRSQCGCKDAHGGSIPLGKSWVSSGCTEKCVCTGGAIQCGDFRCPSGSHCQLTSDNSNSNCVSDKSEQCSVYGDPRYLTFDGFSYRLQGRMTYVLIKTVDVLPEGVEPLLVEGRNKMDPPRSSIFLQEVITTVYGYKVQLQAGLELVVNNQKMAVPYRPNEHLRVTLWGQRLYLVTDFELVVSFGGRKNAVISLPSMYEGLVSGLCGNYDKNRKNDMMLPSGALTQNLNTFGNSWEVKTEDALLRFPRAIPAEEEGQGAELGLRTGLQVSECSPEQLASNSTQACRVLADPQGPFAACHQTVAPEPFQEHCVLDLCSAQDPREQEELRCQVLSGHGVSSRYHISELYDTLPSILCQPGRPRGLRGPLRGRLRQHPRLCLQWHPEPPLADCGCTSNGIYYQLGSSFLTEDCSQRCTCASSRILLCEPFSCRAGEVCTLGNHTQGCFPESPCLQNPCQNDGQCREQGATFTCECEVGYGGGLCMEPRDAPPPRKPASNLVGVLLGLLVPVVVVLLAVTRECIYRTRRKREKTQEGDRLARLVDTDTVLDCAC

SEQ ID NO: 22766 - protein, 1079 aa, Homo sapiens
MVKSPMNRELVATYEVTLSVIDNASDLPERSVSVPNAKLTVNVLDVNDNTPQFKPFGITYYMERILEGATPGTTLIAVAAVDPDKGLNGLVTYTLLDLVPPGYVQLEDSSAGKVIANRTVDYEEVHWLNFTVRASDNGSPPRAAEIPVYLEIVDINDNNPIFDQPSYQEAVFEDVPVGTIILTVTATDADSGNFALIEYSLGDGESKFAINPTTGDIYVLSSLDREKKDHYILTALAKDNPGDVASNRRENSVQVVIQVLDVNDCRPQFSKPQFSTSVYENEPAGTSVITMMATDQDEGPNGELTYSLEGPGVEAFHVDMDSGLVTTQRPLQSYEKFSLTVVATDGGEPPLWGTTMLLVEVIDVNDNRPVFVRPPNGTILHIREEIPLRSNVYEVYATDKDEGLNGAVRYSFLKTAGNRDWEFFIIDPISGLIQTAQRLDRESQAVYSLILVASDLGQPVPYETMQPLQVALEDIDDNEPLFVRPPKGSPQYQLLTVPEHSPRGTLVGNVTGAVDADEGPNAIVYYFIAAGNEEKNFHLQPDGCLLVLRDLDREREAIFSFIVKASSNRSWTPPRGPSPTLDLVADLTLQEVRVVLEDINDQPPRFTKAEYTAGVATDAKVGSELIQVLALDADIGNNSLVFYSILAIHYFRALANDSEDVGQVFTMGSMDGILRTFDLFMAYSPGYFVVDIVARDLAGHNDTAIIGIYILRDDQRVKIVINEIPDRVRGFEEEFIHLLSNITGAIVNTDNVQFHVDKKGRVNFAQTELLIHVVNRDTNRILDVDRVIQMIDENKEQLRNLFRNYNVLDVQPAISVRLPDDMSALQMAIIVLAILLFLAAMLFVLMNWYYRTVHKRKLKAIVAGSAGNRGFIDIMDMPNTNKYSFDGANPVWLDPFCRNLELAAQAEHEDDLPENLSEIADLWNSPTRTHGTFGREPAAVKPDDDRYLRAAIQEYDNIAKLGQIIREGPIKLIQTELDEEPGDHSPGQGSLRFRHKPPVELKGPDGIHVVHGSTGTLLATDLNSLPEEDQKGLGRSLETLTAAEATAFERNARTESAKSTPLHKLRDVIMETPLEITEL

SEQ ID NO: 22767 - protein, 432 aa, Homo sapiens
MNASEFRRRGKEMVDYMANYMEGIEGRQVYPDVEPGYLRPLIPAAAPQEPDTFEDIINDVEKIIMPGVTHWHSPYFFAYFPTASSYPAMLADMLCGAIGCIGFSWAASPACTELETVMMDWLGKMLELPKAFLNEKAGEGGGVIQGSASEATLVALLAARTKVIHRLQAASPELTQAAIMEKLVAYSSDQMVATLGTTTCCSFDNLLEVGPICNKEDIWLHVDAAYAGSAFICPEFRHLLNGVEFADSFNFNPHKWLLVNFDCSAMWVKKRTDLTGAFRLDPTYLKHSHQDSGLITDYRHWQIPLGRRFRSLKMWFVFRMYGVKGLQAYIRKHVQLSHEFESLVRQDPRFEICVEVILGLVCFRLKGSNKVNEALLQRINSAKKIHLVPCHLRDKFVLRFAICSRTVESAHVQRAWEHIKELAADVLRAERE

SEQ ID NO: 22768 - protein, 1461 aa, Homo sapiens [sequence omitted]

SEQ ID NO: 22769 - protein, 959 aa, Homo sapiens
MFWKFDLNTTSHVDKLLDKEHVTLQELMDEDDILQECKAQNQKLLDFLCRQQCMEELVSLITQDPPLDMEEKVRFKYPNTACELLTCDVPQISDRLGGDESLLSLLYDFLDHEPPLNPLLASFFSKTIGNLIARKTEQVITFLKKKDKFISLVLKHIGTSALMDLLLRLVSCVEPAGLRQDVLHWLNEEKVIQRLVELIHPSQDEDRQSNASQTLCDIVRLGRDQGSQLQEALEPDPLLTALESQDCVEQLLKNMFDGDRTESCLVSGTQVLLTLLETRRVGTEGLVDSFSQGLERSYAVSSSVLHGIEPRLKDFHQLLLNPPKKKAILTTIGVLEEPLGNARLHGARLMAALLHTNTPSINQELCRLNTMDLLLDLFFKYTWNNFLHFQVELCIAAILSHAAREERTEASGSESRVEPPHENGNRSLETPQPAASLPDNTMVTHLFQKCCLVQRILEAWEANDHTQAAGGMRRGNMGHLTRIANAVVQNLERGPVQTHISEVIRGLPADCRGRWESFVEETLTETNRRNTVDLVSTHHLHSSSEDEDIEGAFPNELSLQQAFSDYQIQQMTANFVDQFGFNDEEFADQDDNINAPFDRIAEINFNIDADEDSPSAALFEACCSDRIQPFDDDEDEDIWEDSDTRCAARVMARPRFGAPHASESCSKNGPERGGQDGKASLEAHRDAPGAGAPPAPGKKEAPPVEGDSEGAMWTAVFDEPANSTPTAPGVVRDVGSSVWAAGTSAPEEKGWAKFTDFQPFCCSESGPRCSSPVDTECSHAEGSRSQGPEKAFSPASPCAWNVCVTRKAPLLASDSSSSGGSHSEDGDQKAASAMDAVSRGPGREAPPLPTVARTEEAVGRVGCADSRLLSPACPAPKEVTAAPAVAVPPEATVAITTALSKAGPAIPTPAVSSALAVAVPLGPIMAVTAAPAMVATLGTVTKDGKTDAPPEGAALNGPV

SEQ ID NO: 22770 - protein, 882 aa, Homo sapiens
MIPPLKSPAAFHEQRRSLERARTEDYLKRKIRSRPERSELVRMHILEETSAEPSLQAKQLKLKRARLADDLNEKIAQRPGPMELVEKNILPVESSLKEAIIVGQVNYPKVADSSSFDEDSSDALSPEQPASHESQGSVPSPLEARVSEPLLSATSASPTQQSQPKSASEKSQRSKKAKELKPKVKKLKYHQYIPPDQKQDRGAPPMDSSYAKILQQQQLFLQLQILNQQQQQHHNYQAILPAPPKSAGEALGSSGTPPVRSLSTTNSSSSSGAPGPCGLARQNSTSLTGKPGALPANLDDMKVAELKQELKLRSLPVSGTKTELIERLRAYQDQISPVPGAPKAPAATSILHKAGEVVVAFPAARLSTGPALVAAGLAPAEVVVATVASSGVVKFGSTGSTPPVSPTPSERSLLSTGDENSTPGDTFGEMVTSPLTQLTLQASPLQILVKEEGPRAGSCCLSPGGRAELEGRDKDQMLQEKDKQIEALTRMLRQKQQLVERLKLQLEQEKRAQQPAPAPAPLGTPVKQENSFSSCQLSQQPLGPAHPFNPSLAAPATNHIDPCAVAPGPPSVVVKQEALQPEPEPVPAPQLLLGPQGPSLIKGVAPPTLITDSTGTHLVLTVTNKNADSPGLSSGSPQQPSSQPGSPAPAPSAQMDLEHPLQPLFGTPTSLLKKEPPGYEEAMSQQPKQQENGSSSQQMDDLFDILIQSGEISADFKEPPSLPGKEKPSPKTVCGSPLAAQPSPSAELPQAAPPPPGSPSLPGRLEDFLESSTGLPLLTSGHDGPEPLSLIDDLHSQMLSSTAILDHPPSPMDTSELHFVPEPSSTMGLDLADGHLDSMDWLELSSGGPVLSLAPLSTTAPSLFSTDFLDGHDLQLHWDSCL

SEQ ID NO: 22771 - protein, 1447 aa, Homo sapiens
MPKNAAVSNLDIESKLSVYYRAPWHQQRNIFLPATRPPCVEELHRHARQSLQALRREHRSRSDRREQRAAAPLSIAAPPLPAYPPAHSQRRREFKDRHFLTSHPPEDEDTDVMLGQRPKNPIHNIPSTLDKQTNWSKALPLPTPEEKMKQDAQVISSCIIPINVTGVGFDREASIRCSLVHSQSVLQRRRKLRRRKTISGIPRRVQQEIDSDESPVARERNVIVHTNPDPSNTVNRISGTRDSECQTEDILIAAPSRRRIRAQRGQSIAASLSHSAGNISALADKGDTMFTPAVSSRTRSRSLPREGNRGGDAEPKVGAKPSAYEEGESFVGDHERTPNDFSEAPSSPSAQDHQPTLGLACSQHLHSPQHKLSERGRSRLSRMAADSGSCDISSNSDTFGSPIHCISTAGVLLSSHMDQKDDHQSSSGNWSGSSSTCPSQTSETIPPAASPPLTGSSHCDSELSLNTAPHANEDASVFVTEQYNDHLDKVRGHRANSFTSTVADLLDDPNNSNTSDSEWNYLHHHHDASCRQDFSPERPKADSLGCPSFTSMATYDSFLEKSPSDKADTSSHFSVDTEGYYTSMHFDCGLKGNKSYVCHYAALGPENGQGVGASPGLPDCAWQDYLDHKRQGRPSISFRKPKAKPTPPKRSSSLRKSDGNADISEKKEPKISSGQHLPHSSREMKLPLDFANTPSRMENANLPTKQEPSWINQSEQGIKEPQLDASDIPPFKDEVAESTHYADLWLLNDLKTNDPYRSLSNSSTATGTTVIECIKSPESSESQTSQSESRATTPSLPSVDNEFKLASPEKLAGLASPSSGYSSQSETPTSSFPTAFFSGPLSPGGSKRKPKVPERKSSLQQPSLKDGTISLSKDLELPIIPPTHLDLSALHNVLNKPFHHRHPLHVFTHNKQNTVGETLRSNPPPSLAITPTILKSVNLRSINKSEEVKQKEENNTDLPYLEESTLTTAALSPSKIRPHTANKSVSRQYSTEDTILSFLDSSAVEMGPDKLHLEKNSTFDVKNRCDPETITSAGSSLLDSNVTKDQVRTETEPIPENTPTKNCAFPTEGFQRVSAARPNDLDGKIIQYGPGPDETLEQVQKAPSAGLEEVAQPESVDVITSQSDSPTRATDVSNQFKHQFVMSRHHDKVPGTISYESEITSVNSFPEKCSKQENIASGISAKSASDNSKAEETQGNVDEASLKESSPSDDSIISPLSEDSQAEAEGVFVSPNKPRTTEDLFAVIHRSKRKVLGRKDSGDMSVRSKSRAPLSSSSSSASSITSPSSNVTTPNSQRSPGLIYRNAKKSNTSNEEFKLLLLKKGSRSDSSYRMSATEILKSPILPKPPGELTAESPQSTDDAHQGSQGAEALSPLSPCSPRVNAEGFSSKSFATSASARVGRSRAPPAASSSRYSVRCRLYNTPMQAISEGETENSDGSPHDDRSSQSST

SEQ ID NO: 22772 - protein, 770 aa, Homo sapiens
MLQQVNGHNPGSDGQAREYLREDLQEFLGGEVLLYKLDDLTRVNPVTLETVLRCLQARYMADTFYTNAGCTLVALNPFKPVPQLYSPELMREYHAAPQPQKLKPHVFTVGEQTYRNVKSLIEPVNQSIVVSGESGAGKTWTSRCLMKFYAVVATSPASWESHKIAERIEQRILNSNPVMEAFGNACTLRNNNSSRFGKFIQLQLNRAQQMTGAAVQTYLLEKTRVACQASSERNFHIFYQICKGASEDERLQWHLPEGAAFSWLPNPERSLEEDCFEVTREAMLHLGIDTPTQNNIFKVLAGLLHLGNIQFAASEDEAQPCQPMDDAKYSVRTAASLLGLPEDVLLEMVQIRTIRAGRQQQVFRKPCARAECDTRRDCLAKLIYARLFDWLVSVINSSICADTDSWTTFIGLLDVYGFESFPDNSLEQLCINYANEKLQLEACGLVETIHISAAGFPIRVSHRNFVERYKLLRRLHPCTSSGPDSPYPAKGLPEWCPHSEEATLEPLIQDILHTLPVLTQAAAITGDSAEAMPAPMHCGRTKVFMTDSMLELLECGRARVLEQCARCIQGGWRRHRHREQERQWRAVMLIQAAIRSWLTRKHIQRLHAAATVIKRAWQKWRIRMACLAAKELDGVEEKHFSQAPCSLSTSPLQTRLLEAIIRLWPLGLVLANTAMGVGSFQRKLVVWACLQLPRGSPSSYTVQTAQDQAGVTSIRALPQGSIKFHCRKSPLRYADICPEPSPYSITGFNQILLERHRLIHVTSSAFTGLG

SEQ ID NO: 22773 - protein, 749 aa, Homo sapiens
MAEQVLPQALYLSNMRKAVKIRERTPEDIFKPTNGIIHHFKTMHRYTLEMFRTCQFCPQFREIIHKALIDRNIQATLESQKKLNWCREVRKLVALKTNGDGNCLMHATSQYMWGVQDTDLVLRKALFSTLKETDTRNFKFRWQLESLKSQEFVETGLCYDTRNWNDEWDNLIKMASTDTPMARSGLQYNSLEEIHIFVLCNILRRPIIVISDKMLRSLESGSNFAPLKVGGIYLPLHWPAQECYRYPIVLGYDSHHFVPLVTLKDSGPEIRAVPLVNRDRGRFEDLKVHFLTDPENEMKEKLLKEYLMVIEIPVQGWDHGTTHLINAAKLDEANLPKEINLVDDYFELVQHEYKKWQENSEQGRREGHAQNPMEPSVPQLSLMDVKCETPNCPFFMSVNTQPLCHECSERRQKNQNKLPKLNSKPGPEGLPGMALGASRGEAYEPLAWNPEESTGGPHSAPPTAPSPFLFSETTAMKCRSPGCPFTLNVQHNGFCERCHNARQLHASHAPDHTRHLDPGKCQACLQDVTRTFNGICSTCFKRTTAEASSSLSTSLPPSCHQRSKSDPSRLVRSPSPHSCHRAGNDAPAGCLSQAARTPGDRTGTSKCRKAGCVYFGTPENKGFCTLCFIEYRENKHFAAASGKVSPTASRFQNTIPCLGRECGTLGSTMFEGYCQKCFIEAQNQRFHEAKRTEEQLRSSQRRDVPRTTQSTSRPKCARASCKNILACRSEELCMECQHQPEDGPWGPPG

SEQ ID NO: 22774 - protein, 508 aa, Homo sapiens
MVVSEVDIAKADPAAASHPLLLNGDATVAQKNPGSVAENNLCSQYEEKVRPCIDLIDSLRALGVEQDLALPAIAVIGDQSSGKSSVLEALSGVALPRGSGIVTRCPLVLKLKKLVNEDKWRGKVSYQDYEIEISDASEVEKEINKAQNAIAGEGMGISHELITLEISSRDVPDLTLIDLPGITRVAVGNQPADIGYKIKTLIKKYIQRQETISLVVVPSNVDIATTEALSMAQEVDPEGDRTIGILTKPDLVDKGTEDKVVDVVRNLVFHLKKGYMIVKCRGQQEIQDQLSLSEALQREKIFFENHPYFRDLLEEGKATVPCLAEKLTSELITHICKSLPLLENQIKETHQRITEELQKYGVDIPEDENEKMFFLIDKVNAFNQDITALMQGEETVGEEDIRLFTRLRHEFHKWSTIIENNFQEGGQQAHLQPHPFDHPVLHAPDVRPAASEGHAAAPAGQGHLQLAPEGAERHQRQAEVPEGAACTADAGSAPACPVPRLTTLCPAP

SEQ ID NO: 22775 - protein, 662 aa, Homo sapiens
MSHVAVENALGLDQQFAGLDLNSSDNQSGGSTASKGRYIPPHLRNREATKGFYDKDSSGWSSSKDKDAYSSFGSRSDSRGKSSFFSDRGSGSRGRFDDRGRSDYDGIGSRGDRSGFGKFERGGNSRWCDKSDEDDWSKPLPPSERLEQELFSGGNTGINFEKYDDIPVEATGNNCPPHIESFSDVEMGEIIMGNIELTRYTRPTPVQKHAIPIIKEKRDLMACAQTGSGKTAAFLLPILSQIYSDGPGEALRAMKENGRYGRRKQYPISLVLAPTRELAVQIYEEARKFSYRSRVRPCVVYGGADIGQQIRDLERGCHLLVATPGRLVDMMERGKIGLDFCKYLVLDEADRMLDMGFEPQIRRIVEQDTMPPKGVRHTMMFSATFPKEIQMLARDFLDEYIFLAVGRVGSTSENITQKVVWVEESDKRSFLLDLLNATGKDSLTLVFVETKKGADSLEDFLYHEGYACTSIHGDRSQRDREEALHQFRSGKSPILVATAVAARGLDISNVKHVINFDLPSDIEEYVHRIGRTGRVGNLGLATSFFNERNINITKDLLDLLVEAKQEVPSWLENMAYEHHYKGSSRGRSKSSRFSGGFGARDYRQSSGASSSSFSSSRASSSRSGGGGHGSSRGFGGGGYGGFYNSDGYGGNYNSQGVDWWGN

SEQ ID NO: 22776 - protein, 976 aa, Homo sapiens
MMTSVGTNRARGNWEQPQNQNQTQHKQRPQATAEQIRLAQMISDHNDADFEEKVKQLIDITGKNQDECVIALHDCNGDVNRAINVLLEGNPDTHSWEMVGKKKGVSGQKDGGQTESNEEGKENRDRDRDYSRRRGGPPRRGRVRGQENGLDGTKSGGPSGRGTERGRRGRGRGRGGSGRRGGRFSAQGMGTFNPADYAEPANTDDNYGNSSGNTWNNTGHFEPDDGTSAWRTATEEWGTEDWNEDLSETKIFTASNVSSVPLPAENVTITAGQRIDLAVLLGKTPSTMENDSSNLDPSQAPSLAQPLVFSNSKQTAISQPASGNTFSHHSMVSMLGKGFGDVGEAKGGSTTGSQFLEQFKTAQALAQLAAQHSQSGSTTTSSWDMGSTTQSPSLVQYDLKNPSDSAVHSPFTKRQAFTPSSTMMEVFLQEKSPAVATSTAAPPPPSSPLPSKSTSAPQMSPGSSDNQSSSPQPAQQKLKQQKKKASLTSKIPALAVEMPGSADISGLNLQFGALQFGSEPVLSDYESTPTTSASSSQAPSSLYTSTASESSSTISSNQSQESGYQSGPIQSTTYTSQNNAQGPLYEQRSTQTRRYPSSISSSPQKDLTQAKNGFSSVQATQLQTTQSVEGATGSAVKSDSPSTSSIPPLNETVSAASLLTTTNQHSSSLGGLSHSEEIPNTTTTQHSSTLSTQQNTLSSSTSSGRTSTSTLLHTSVESEANLHSSSSTFSTTSSTVSAPPPVVSVSSSLNSGSSLGLSLGSNSTVTASTRSSVATTSGKAPPNLPPGVPPLLPNPYIMAPGLLHAYPPQVYGYDDLQMLQTRFPLDYYSIPFPTPTTPLTGRDGSLASNPYSGDLTKFGRGDASSPAPATTLAQPQQNQTQTHHTTQQTFLNPALPPGYSYTSLPYYTGVPGLPSTFQYGPAVFPVAPTSSKQHGVNVSVNASATPFQQPSGYGSHGYNTGRKYPPPYKHFWTAES

SEQ ID NO: 22777 - protein, 1127 aa, Homo sapiens
MAECGRGGAAGGALPTSPGPALGAKGALKAGVGEGGGGGGRLGHGRARYDSGGVSNGDCSLGVSGDEARASPTRGPRGVALAPTPSAVVCTLPRESKPGGLPRRSSIIKDGTKQKRERKKTVSFSSMPTEKKISSASDCINSMVEGSELKKVRSNSRIYHRYFLLDADMQSLRWEPSKKDSEKAKIDIKSIKEVRTGKNTDIFRSNGISDQISEDCAFSVIYGENYESLDLVANSADVANIWVTGLRYLISYGKHTLDMLESSQDNMRTSWVSQMFSEIDVDNLGHITLCNAVQCIRNLNPGLKTSKIELKFKELHKSKDKAGTEVTKEEFIEVFHELCTRPEIYFLLVQFSSNKEFLDTKDLMMFLEAEQGVAHINEEISLEIIHKYEPSKEGQEKGWLSIDGFTNYLMSPDCYIFDPEHKKVCQDMKQPLSHYFINSSHNTYLIEDQFRGPSDITGYIRALKMGCRSVELDVWDGPDNEPVIYTGHTMTSQIVFRSVIDIINKYAFFASEYPLILCLENHCSIKQQKVMVQHMKKLLGDKLYTTSPNVEESYLPSPDVLKGKILIKAKKLSSNCSGVEGDVTDEDEGAEMSQRMGKENMEQPNNVPVKRFQLCKELSELVSICKSVQFKEFQVSFQVQKYWEVCSFNEVLASKYANENPGDFVNYNKRFLARVFPSPMRIDSSNMNPQDFWKCGCQIVAMNFQTPGLMMDLNIGWFRQNGNCGYVLRPAIMREEVSFFSANTKDSVPGVSPQLLHIKIISGQNFPKPKGSGAKGDVVDPYVYVEIHGIPADCAEQRTKTVHQNGDAPIFDESFEFQINLPELAMVRFVVLDDDYIGDEFIGQYTIPFECLQTGYRHVPLQSLTGEVLAHASLFVHVAITNRRGGGKPHKRGLSVRKGKKSREYASLRTLWIKTVDEVFKNAQPPIRDATDLRENMQNAVVSFKELCGLSSVANLMQCMLAVSPRFLGPDNTPLVVLNLSEQYPTMELQGIVPEVLKKIVTTYDMMIQSLKALIENADAVYEKIVHCQKAAMEFHEHLHSIGTKEGLKERKLQKAVESFTWNITILKGQADLLKYAKNETLENLKQIHFAAVSCGLNKPGTENADVQKPRRSLEVIPEKANDETGE

SEQ ID NO: 22778 - protein, 685 aa, Homo sapiens [sequence omitted]

SEQ ID NO: 22779 - protein, 289 aa, Homo sapiens [sequence omitted]

SEQ ID NO: 22780 - protein, 894 aa, Homo sapiens
MARQKKMGQSVLRAVFFLVLGLLGHSHGGFPNTISIGGLFMRNTVQEHSAFRFAVQLYNTNQNTTEKPFHLNYHVDHLDSSNSFSVTNAFCSQFSRGVYAIFGFYDQMSMNTLTSFCGALHTSFVTPSFPTDADVQFVIQMRPALKGAILSLLGHYKWEKFVYLYDTERGFSILQAIMEAAVQNNWQVTARSVGNIKDVQEFRRIIEEMDRRQEKRYLIDCEVERINTILEQVVILGKHSRGYHYMLANLGFTDILLERVMHGGANITGFQIVNNENPMVQQFIQRWVRLDEREFPEAKNAPLKYTSALTHDAILVIAEAFRYLRRQRVDVSRRGSAGDCLANPAVPWSQGIDIERALKMVQVQGMTGNIQFDTYGRRTNYTIDVYEMKVSGSRKAGYWNEYERFVPFSDQQISNDSASSENRTIVVTTILESPYVMYKKNHEQLEGNERYEGYCVDLAYEIAKHVRIKYKLSIVGDGKYGARDPETKIWNGMVGELVYGRADIAVAPLTITLVREEVIDFSKPFMSLGISIMIKKPQKSKPGVFSFLDPLAYEIWMCIVFAYIGVSVVLFLVSRFSPYEWHLEDNNEEPRDPQSPPDPPNEFGIFNSLWFSLGAFMQQGCDISPRSLSGRIVGGVWWFFTLIIISSYTANLAAFLTVERMVSPIESAEDLAKQTEIAYGTLDSGSTKEFFRRSKIAVYEKMWSYMKSAEPSVFTKTTADGVARVRKSKGKFAFLLESTMNEYIEQRKPCDTMKVGGNLDSKGYGVATPKGSALRTPVNLAVLKLSEQGILDKLKNKWWYDKGECGAKDSGSKDKTSALSLSNVAGVFYILVGGLGLAMMVALIEFCYKSRAESKRMKLTKNTQNFKPAPATNTQNYATYREGYNVYGTESVKI

SEQ ID NO: 22781 - protein, 588 aa, Homo sapiens
MFYLDLTLFHRAEETGEESFSVQNGSIHQKDAVNDDDFEPYLSSQTNQSNSYPPMSDPYMPSYYAPSIGFPYSLGEAAWSTAGDQPMPYLTTYGQMSNGEHHYIPDGVFSQPGALGNTPPFLGQHGFNFFPGNADFSTWGTSGSQGQSTQSSAYSSSYGYPPSSLGRAITDGQAGFGNDTLSKVPGISSIEQGMTGLKIGGDLTAAVTKTVGTALSSSGMTSIATNSVPPVSSAAPKPTSWAAIARKPAKPQPKLKPKGNVGIGGSAVPPPPIKHNMNIGTWDEKGSVVKAPPTQPVLPPQTIIQQPQPLIQPPPLVQSQLPQQQPQPPQPQQQQGPQPQAQPHQVQPQQQQLQNRWVAPRNRGAGFNQNNGAGSENFGLGVVPVSASPSSVEVHPVLEKLKAINNYNPKDFDWNLKNGRVFIIKSYSEDDIHRSIKYSIWCSTEHGNKRLDAAYRSLNGKGPLYLLFSVNGSGHFCGVAEMKSVVDYNAYAGVWSQDKWKGKFEVKWIFVKDVPNNQLRHIRLENNDNKPVTNSRDTQEVPLEKAKQVLKIIATFKHTTSIFDDFAHYEKRQEEEEAMRRERNRNKQ

SEQ ID NO: 22782 - protein, 209 aa, Homo sapiens
MFCQLAKTCPVQLWVDSTPPPGTRVRAMAIYKQSQHMTEVVRRCPHHERCSDSDGLAPPQHLIRVEGNLRVEYLDDRNTFRHSVVVPYEPPEVGSDCTTIHYNYMCNSSCMGGMNRRPILTIITLEDSSGNLLGRNSFEVRVCACPGRDRRTEEENLRKKGEPHHELPPGSTKRALPNNTSSSPQPKKKPLDGEYFTLQDQTSFQKENC

SEQ ID NO: 22783 - protein, 1809 aa, Homo sapiens
MSGASVKVAVRVRPFNSRETSKESKCIIQMQGNSTSIINPKNPKEAPKSFSFDYSYWSHTSPEDPCFASQNRVYNDIGKEMLLHAFEGYNVCIFAYGQTGAGKSYTMMGKQEESQAGIIPQLCEELFEKINDNCNEEMSYSVEVSYMEIYCERVRDLLNPKNKGNLRVREHPLLGPYVEDLSKLAVTSYTDIADLMDAGNKARTVAATNMNETSSRSHAVFTIVFTQKKHDNETNLSTEKVSKISLVDLAGSERADSTGAKGTRLKEGANINKSLTTLGKVISALAEVDNCTSKSKKKKKTDFIPYRDSVLTWLLRENLGGNSRTAMVAALSPADINYDETLSTLRYADRAKQIKCNAVINEDPNAKLVRELKEEVTRLKDLLRAQGLGDIIDNLKDFQNNKHRYLLASENQRPGHFSTASMGSLTSSPSSCSLSSQVGLTSVTSIQERIMSTPGGEEAIERLKESEKIIAELNETWEEKLRKTEAIRMEREALLAEMGVAIREDGGTLGVFSPKKTPHLVNLNEDPLMSECLLYYIKDGITRVGQADAERRQDIVLSGAHIKEEHCIFRSERSNSGEVIVTLEPCERSETYVNGKRVSQPVQLRSGNRIIMGKNHVFRFNHPEQARAEREKTPSAETPSEPVDWTFAQRELLEKQGIDMKQEMEKRLQEMEILYKKEKEEADLLLEQQRLDYESKLQALQKQVETRSLAAETTEEEEEEEEVPWTQHEFELAQWAFRKWKSHQFTSLRDLLWGNAVYLKEANAISVELKKKVQFQFVLLTDTLYSPLPPELLPTEMEKTHEDRPFPRTVVAVEVQDLKNGATHYWSLEKLKQRLDLMREMYDRAGEMASSAQDESETTVTGSDPFYDRFHWFKLVGSSPIFHGCVNERLADRTPSPTFSTADSDITELADEQQDEMEDFDDEAFVDDAGSDAGTEEGSDLFSDGHDPFYDRSPWFILVGRAFVYLSNLLYPVPLIHRVAIVSEKGEVRGFLRVAVQAIAADEEAPDYGSGIRQSGTAKISFDNEYFNQSDFSSVAMTRSGLSLEELRIVEGQGQSSEVITPPEEISRINDLDLKSSTLLDGKMVMEGFSEEIGNHLKLGSAFTFRVTVLQASGILPEYADIFCQFNFLHRHDEAFSTEPLKNNGRGSPLAFYHVQNIAVEITESFVDYIKTKPIVFEVFGHYQQHPLHLQGQELNSPPQPCRRFFPPPMPLSKPVPATKLNTMSKTSLGQSMSKYDLLVWFEISELEPTGEYIPAVVDHTAGLPCQGTFLLHQGIQRRITVTIIHEKGSELHWKDVRELVVGRIRNKPEVDEAAVDAILSLNIISAKYLKSSHNSSRTFYRFEAVWDSSLHNSLLLNRVTPYGEKIYMTLSAYLELDHCIQPAVITKDVCMVFYSRDAKISPPRSLRSLFGSGYSKSPDSNRVTGIYELSLCKMSDTGSPGMQRRRRKILDTSVAYVRGEENLAGWRPRGDSLILEHQWELEKLELLHEVEKTRHFLLLRERLGDSIPKSLSDSLSPSLSSGTLSTSTSISSQISTTTFESAITPSESSGYDSGDIESLVDREKELATKCLQLLTHTFNREFSQVHGSVSDCKLSDISPIGRDPSESSFSSATLTPSSTCPSLVDSRSNSLDQKTPEANSRASSPCPEFEQFQIVPAVETPYLARAGKNEFLNLVPDIEEIRPSSVVSKKGYLHFKEPLYSNWAKHFVVVRRPYVFIYNSDKDPVERGIINLSTAQVEYSEDQQAMVKTPNTFAVCTKHRGVLLQALNDKDMNDWLYAFNPLLAGTIRPGHLASEIIREDKSVSFSCQ

SEQ ID NO: 22784 - protein, 1266 aa, Homo sapiens
RLKELKQREFARNVASKSWKDEKKQEKALKRLHQLAELRQQSECVSGNGPAYKAPRVAIEKQLQQGIFPIKNGRKVSCMKSALLLKGKNLPRIISDKQRSTMPNRHQLQSDRRCLFGNQVLQTSSDLSNANHRTGVSFTFSKKVHLKLESSASVFSENTEETHDCNKSPIYKTKQTADKCKCCRFANKDTHLTKEKEVNISPSHLESVLHNTISINSKILQDKHDSIDETLEDSIGIHASFSKSNIHLSDVDFTPTSREKETRNTLKNTLENCVNHPCQANASFSPPNIYNHSDARISECLDEFSSLEPSEQKSTVHLNPNSRIENREKSLDKTERVSKNVQRLVKEACTHNVASKPLPFLHVQSKDGHTTLQWPTELLLFTKTEPCISYGCNPLYFDFKLSRNTKEDHNLEDLKTELGKKPLELKTKRESQVSGLTEDQQKLIQEDYQYPKPKTMIANPDWEKFQRKYNLDYSDSEPNKSEYTFSANDLEMKNPKVPLYLNTSLKDCAGKNNSSENKLKEASRAHWQGCRKAVLNDIDEDLSFPSYISRFKKHKLIPCSPHLEFEDERQFNCKSSPCTVGGHSDHGKDFSVILKSNHISMTSKVSGCGNQRYKRYSPQSCLSRYSSSLDTSPSSMSSLRSTCSSHRFNGNSRGNLLCFHKREHHSVERHKRKCLKHNCFYLSDDITKSSQMQSEPQKERNCKLWESFKNEKYSKRRYCHCRERQKLGKNQQQFSGLKSTRIIYCDSNSQISCTGSSKKPPNCQGTQHDRLDSYSIEKMYYLNKSKRNQESLGSPHICDLGKVRPMKCNSGNISCLLKNCSSGPSETTESNTAEGERTPLTAKILLERVQAKKCQEQSSNVEISSNSCKSELEAPSQVPCTIQLAPSGCNRQALPLSEKIQYASESRNDQDSAIPRTTEKDKSKSSHTNNFTILADTDCDNHLSKGIIHLVTESQSLNIKRDATTKEQSKPLISEIQPFIQSCDPVPNEFPGAFPSNKYTGVTDSTETQEDQINLDLQDVSMHINHVEGNINSYYDRTMQKPDKVEDGLEMCHKSISPPLIQQPITFSPDEIDKYKILQLQAQQHMQKQLLSKHLRVLPAAGPTAFSPASTVQTVPVHQHTSITTIHHTFLQHFAVSASLSSHSSHLPIAHLHPLSQAHFSPISFSTLTPTIIPAHPTFLAGHPLHLVAATPFHPSHITLQPLPPTAFIPTLFGPHLNPATTSIIHLNPLIQPVFQGQDFCHHSCSSQMQQLNEVKEALNVSTHLN

SEQ ID NO: 22785 - protein, 511 aa, Homo sapiens
MAAAVAAALARLLAAFLLLAAQVACEYGMVHVVSQAGGPEGKDYCILYNPQWAHLPHDLSKASFLQLRNWTASLLCSAADLPARGFSNQIPLVARGNCTFYEKVRLAQGSGARGLLIVSRERLVPPGGNKTQYDEIGIPVALLSYKDMLDIFTRFGRTVRAALYAPKEPVLDYNMVIIFIMAVGTVAIGGYWAGSRDVKKRYMKHKRDDGPEKQEDEAVDVTPVMTCVFVVMCCSMLVLLYYFYDLLVYVVIGIFCLASATGLYSCLAPCVRRLPFGKCRIPNNSLPYFHKRPQARMLLLALFCVAVSVVWGVFRNEDQWAWVLQDALGIAFCLYMLKTIRLPTFKACTLLLLVLFLYDIFFVFITPFLTKSGSSIMVEVATGPSDSATREKLPMVLKVPRLNSSPLALCDRPFSLLGFGDILVPGLLVAYCHRFDIQVQSSRVYFVACTIAYGVGLLVTFVALALMQRGQPALLYLVPCTLVTSCAVALWRRELGVFWTGSGFAVNTSLL

SEQ ID NO: 22786 - protein, 1681 aa, Homo sapiens
MFRQFYLWTCLASGIILGSLFEICLGQYDDDWQYEDCKLARGGPPATIVAIDEESRNGTILVDNMLIKGTAGGPDPTIELSLKDNVDYWVLMDPVKQMLFLNSTGRVLDRDPPMNIHSIVVQVQCINKKVGTIIYHEVRIVVRDRNDNSPTFKHESYYATVNELTPVGTTIFTGFSGDNGATDIDDGPNGQIEYVIQYNPDDPTSNDTFEIPLMLTGNIVLRKRLNYEDKTRYFVIIQANDRAQNLNERRTTTTTLTVDVLDGDDLGPMFLPCVLVPNTRDCRPLTYQAAIPELRTPEELNPIIVTPPIQAIDQDRNIQPPSDRPGILYSILVGTPEDYPRFFHMHPRTAELSLLEPVNRDFHQKFDLVIKAEQDNGHPLPAFAGLHIEILDENNQSPYFTMPSYQGYILESAPVGATISDSLNLTSPLRIVALDKDIEDTKDPELHLFLNDYTSVFTVTQTGITRYLTLLQPVDREEQQTYTFSITAFDGVQESEPVIVNIQVMDANDNTPTFPEISYDVYVYTDMRPGDSVIQLTAVDADEGSNGEITYEILVGAQGDFIINKTTGLITIAPGVEMIVGRTYALTVQAADNAPPAERRNSICTVYIEVLPPNNQSPPRFPQLMYSLEISEAMRVGAVLLNLQATDREGDSITYAIENGDPQRVFNLSETTGILTLGKALDRESTDRYILIITASDGRPDGTSTATVNIVVTDVNDNAPVFDPYLPRNLSVVEEEANAFVGQVKATDPDAGINGQVHYSLGNFNNLFRITSNGSIYTAVKLNREVRDYYELVVVATDGAVHPRHSTLTLAIKVLDIDDNSPVFTNSTYTVLVEENLPAGTTILQIEAKDVDLGANVSYRIRSPEVKHFFALHPFTGELSLLRSLDYEAFPDQEASITFLVEAFDIYGTMPPGIATVTVIVKDMNDYPPVFSKRIYKGMVAPDAVKGTPITTVYAEDADPPGLPASRVRYRVDDVQFPYPASIFEVEEDSGRVITRVNLNEEPTTIFKLVVVAFDDGEPVMSSSATVKILVLHPGEIPRFTQEEYRPPPVSELATKGTMVGVISAAAINQSIVYSIVSGNEEDTFGINNITGVIYVNGPLDYETRTSYVLRVQADSLEVVLANLRVPSKSNTAKVYIEIQDENNHPPVFQKKFYIGGVSEDARMFTSVLRVKATDKDTGNYSVMAYRLIIPPIKEGKEGFVVETYTGLIKTAMLFHNMRRSYFKFQVIATDDYGKGLSGKADVLVSVVNQLDMQVIVSNVPPTLVEKKIEDLTEILDRYVQEQIPGAKVVVESIGARRHGDAFSLEDYTKCDLTVYAIDPQTNRAIDRNELFKFLDGKLLDINKDFQPYYGEGGRILEIRTPEAVTSIKKRGESLGYTEGALLALAFIIILCCIPAILVVLVSYRQVFKGRQAECTKTARIQAALPAAKPAVPAPAPVAAPPPPPPPPPGAHLYEELGDSSMYEMPQYGSRRRLLPPAGQEEYGEVVGEAEEEYEEEEWARKRMIKLVVDREYETSSTGEDSAPECQRNRLHHPSIHSNINGNIYIAQNGSVVRTRRACLTDNLKVASPVRLGGPFKKLDKLAVTHEENVPLNTLSKGPFSTEKMNARPTLVTFAPCPVGTDNTAVKPLRNRLKSTVEQESMIDSKNIKEALEFHSDHTQSDDEELWMGPWNNLHIPMTKL

SEQ ID NO: 22787 - protein, 1054 aa, Homo sapiens
MSVSLQNYSPMMAQKSQGSDNLQEGQEKSKREILKCTKSAWAPLDEWLPPDPEEESQSLTIPMLEDSKQESIQQWLDSGFFVSANENFQQVIDRTVSLYEQGMVQMTVKDYMRSLHQFSETPILSRGTSFNSCYSTASVPQSIPEWLEFWEIDPVEILLDLGFGADEPDICMQIPARFLGCGSAARGINIRVFLEAQKQRMDIENPNLYGRFRQLEILDHVTNAFSSLLSDVSILPNRAEEKAGGESVQRTSVSAAKEHRRRMGKLLRRASKQNIRRDCNPEVSESFKVKDEVFVPFTKPWDCGAELAATSINHKQNHLSLSVEHQSLQACDDLLPYPPHGLLSKQWPCSSMPAKQAPPSCVSEGSVKGRTQKENLFQTNKLKSLSHLAGKGPDSFEMEEVQSFEEETGNPLDMTSGTVGARVDRANSCQSDSSGFLEEPLEPLPLQMPSLPNSQSPAENGGRKPRDQSHSLVSSQDCQLESDGPDSKSRASMSFSSQEANALEQRASVSVMEEEFLLEAMEGPPELYIPDMACAKTTTRGECPRKDSHLWQLLPMPHAEYEVTRPTATSKYDHPLGFMVTHVTEMQDSFVRPEGAGKVQSHHNESQRSPGNDHTQDKFLHVDSEAPREEESSGFCPHTNHSLLVPESSSQCIPKHSEITPYATDLAQTSEKLIPHLHKLPGDPAQVKSRSGTLGQILPGTEAEMENLPLNTGSSRSVMTQMSSSLVSAAQRAVALGTGPRGTSLECTVCDPVTATETRLGTKARQLNDASIQTSALSNKTLTHGPQPLTKSVSLDSGFSSICPMGTCHAIPAHCCICCHHHPHCHGERQSPGPEPSVCRHCLCSLTGHQEAQFMTTLKALQDTTVRELCSCTVHEMEAMKTICQSFREYLEEIEQHLMGQQALFSRDMSEEEREEAEQLQTLREALRQQVAELEFQLGDRAQQIREGILLQLEVLTAEPPEHYSNLHQYNWIEESNGQTSCSKIHPGMAPRTVFPPDDGQEAPCSGGTQLAAFTPPTLENSTRMSPSSSAWAKLGPTPLSNCPVGEKDADVFL

SEQ ID NO: 22788 - protein, 246 aa, Homo sapiens
LSLLDIVLCLTVIPKVLAIFWFDLRSISFPACFLQVFIMNSFLTMESCTFMIMAYDRYVAICKPLQYSSIITDQFVARAAIFVVARNGLLTMPIPILSSRLRYCAGHIIKNCICTNVSVSKLSCDDITLNQSYQFVIGWTLLGSDLILIVLSYFFILKTVLRIKGEGDMAKALGTCGSHFILILFFTTVLLVLVITNLARKRIPPDVPILLNILHHLIPPALNPIVYGVRTKEIKQGIQNLLRRLC

SEQ ID NO: 22789 - protein, 305 aa, Homo sapiens
MAPRRARGCRTLGLPALLLLLLLRPPATRDARDRLAVLAGRSRISESFNHEVQTHEACVRLRTMENCPQCHHHRTSRQQAGITCPPPMSVEHADIWVKSYSLYSRERYICNSGFKRKAGTSSLTECVLNKATNVAHWTTPSLKCIRDPALVHQRPAPPSTVTTAGVTPQPESLSPSGKEPAASSPSSNNTAATTAAIVPGSQLMPSKSPSTGTTEISSHESSHGTPSQTTAKNWELTASASHQPPGVYPQGHSDTTGRKQHLLPDFQASFQRDCINKHIEDKECWTVASFLLFCTMFVSTCWYTL

SEQ ID NO: 22790 - protein, 568 aa, Homo sapiens
MDVGELLSYQPNRGTKRPRDDEEEEQKMRRKQTGTRERGRYREEEMTVVEEADDDKKRLLQIIDRDGEEEEEEEEPLDESSVKKMILTFEKRSYKNQELRIKFPDNPEKFMESELDLNDIIQEMHVVATMPDLYHLLVELNAVQSLLGLLGHDNTDILSDLTSVAVVDLLQELTDIDTLHESEEGAEVLIDALVDGQVVALLVQNLERLDESVKEEADGVHNTLAIVENMAEFRPEMCTEGAQQGLLQWLLKRLKAKMPFDANKLYCSEVLAILLQDNDENRELLGELDGIDVLLQQLSVFKRHNPSTAEEQEMMENLFDSLCSCLMLSSNRERFLKGEGLQLMNLMLREKKISRSSALKVLDHAMIGPEGTDNCHKFVDILGLRTIFPLFMKSPRKIKKVGTTEKEHEEHVCSILASLLRNLRGQQRTRLLNKFTENDSEKVDRLMELHFKYLGAMQVADKKIEGEKHDMVRRGEIIDNDTEEEFYLRRLDAGLFVLQHICYIMAEICNANVPQIRQRVHQILNMRGSSIKIVRHIIKEYAENIGDGRSPEFRENEQKRILGLLENF

SEQ ID NO: 22791 - protein, 1016 aa, Homo sapiens
MRGSGPRGAGRRRPPSGGGDTPITPASLAGCYSAPRRAPLWTCLLLCAALRTLLASPSNEVNLLDSRTVMGDLGWIAFPKNGWEEIGEVDENYAPIHTYQVCKVMEQNQNNWLLTSWISNEGASRIFIELKFTLRDCNSLPGGLGTCKETFNMYYFESDDQNGRNIKENQYIKIDTIAADESFTELDLGDRVMKLNTEVRDVGPLSKKGFYLAFQDVGACIALVSVRVYYKKCPSVVRHLAVFPDTITGADSSQLLEVSGSCVNHSVTDEPPKMHCSAEGEWLVPIGKCMCKAGYEEKNGTCQVCRPGFFKASPHIQSCGKCPPHSYTHEEASTSCVCEKDYFRRESDPPTMACTRPPSAPRNAISNVNETSVFLEWIPPADTGGRKDVSYYIACKKCNSHAGVCEECGGHVRYLPRQSGLKNTSVMMVDLLAHTNYTFEIEAVNGVSDLSPGARQYVSVNVTTNQAAPSPVTNVKKGKIAKNSISLSWQEPDRPNGIILEYEIKYFEKDQETSYTIIKSKETTITAEGLKPASVYVFQIRARTAAGYGVFSRRFEFETTPVSVAASSDQSQIPVIAVSVTVGVILLAVVIGVLLSGRRCGYSKAKQDPEEEKMHFHNGHIKLPGVRTYIDPHTYEDPNQAVHEFAKEIEASCITIERVIGAGEFGEVCSGRLKLPGKRELPVAIKTLKVGYTEKQRRDFLGEASIMGQFDHPNIIHLEGVVTKSKPVMIVTEYMENGSLDTFLKKNDGQFTVIQLVGMLRGISAGMKYLSDMGYVHRDLAARNILINSNLVCKVSDFGLSRVLEDDPEAAYTTRGGKIPIRWTAPEAIAFRKFTSASDVWSYGIVMWEVVSYGERPYWEMTNQDVIKAVEEGYRLPSPMDCPAALYQLMLDCWQKERNSRPKFDEIVNMLDKLIRNPSSLKTLVNASCRVSNLLAEHSPLGSGAYRSVGEWLEAIKMGRYTEIFMENGYSSMDAVAQVTLEDLRRLGVTLVGHQKKIMNSLQEMKVQLVNGMVPL

SEQ ID NO: 22792 - protein, 543 aa, Homo sapiens
MGTSLSPNDPWPLNPLSIQQTTLLLLLSVLATVHVGQRLLRQRRRQLRSAPPGPFAWPLIGNAAAVGQAAHLSFARLARRYGDVFQIRLGSCPIVVLNGERAIHQALVQQGSAFADRPAFASFRVVSGGRSMAFGHYSEHWKVQRRAAHSMMRNFFTRQPRSRQVLEGHVLSEARELVALLVRGSADGAFLDPRPLTVVAVANVMSAVCFGCRYSHDDPEFRELLSHNEEFGRTVGAGSLVDVMPWLQYFPNPVRTVFREFEQLNRNFSNFILDKFLRHCESLRPGAAPRDMMDAFILSAEKKAAGDSHGGGARLDLENVPATITDIFGASQDTLSTALQWLLLLFTRYPDVQTRVQAELDQVVGRDRLPCMGDQPNLPYVLAFLYEAMRFSSFVPVTIPHATTANTSVLGYHIPKDTVVFVNQWSVNHDPLKWPNPENFDPARFLDKDGLINKDLTSRVMIFSVGKRRCIGEELSKMQLFLFISILAHQCDFRANPNEPAKMNFSYGLTIKPKSFKVNVTLRESMELLDSAVQNLQAKETCQ

SEQ ID NO: 22793 - protein, 1682 aa, Homo sapiens; identical to SEQ ID NO: 15022

SEQ ID NO: 22794 - protein, 685 aa, Homo sapiens
MKYKVITPVRTGHGYVYEYPSRYQKDVYDIPPSHTTQGVYDIPPSSAKGPVFSVPVGEIKPQGVYDIPPTKGVYAIPPSACRDEAGLREKDYDFPPPMRQAGRPDLRPEGVYDIPPTCTKPAGKDLHVKYNCDIPGAAEPVARRHQSLSPNHPPPQLGQSVGSQNDAYDVPRGVQFLEPPAETSEKANPQERDGVYDVPLHNPPDAKGSRDLVDGINRLSFSSTGSTRSNMSTSSTSSKESSLSASPAQDKRLFLDPDTAIERLQRLQQALEMGVSSLMALVTTDWRCYGYMERHINEIRTAVDKVELFLKEYLHFVKGAVANAACLPELILHNKMKRELQRVEDSHQILSQTSHDLNECSWSLNILAINKPQNKCDDLDRFVMVAKTVPDDAKQLTTTINTNAEALFRPGPGSLHLKNGPESIMNSTEYPHGGSQGQLLHPGDHKAQAHNKALPPGLSKEQAPDCSSSDGSERSWMDDYDYVHLQGKEEFERQQKELLEKENIMKQNKMQLEHHQLSQFQLLEQEITKPVENDISKWKPSQSLPTTNSGVSAQDRQLLCFYYDQCETHFISLLNAIDALFSCVSSAQPPRIFVAHSKFVILSAHKLVFIGDTLTRQVTAQDIRNKVMNSSNQLCEQLKTIVMATKMAALHYPSTTALQEMVHQVTDLSRNAQLFKRSLLEMATF

SEQ ID NO: 22795 - protein, 196 aa, Homo sapiens
MNIKGSPWKGSLLLLLVSNLLLSHYIHNLSSEMFSEFDKRYTHGRGFITKAINSCHTSSLATPEDKEQAQQMNQKDFLSLIVSILRSWNEPLYHLVTEVRGMQEAPEAILSKAVEIEEQTKRLLEGMELIVSQVHPETKENEIYPVWSGLPSLQMADEESRLSAYYNLLHCLRRDSHKIDNYLKLLKCRIIHNNNC

SEQ ID NO: 22796 - protein, 874 aa, Homo sapiens
MAANVGDQRSTDWSSQYSMVAGAGRENGMETPMHENPEWEKARQALASISKSGAAGGSAKSSSNGPVASAQYVSQAEASALQQQQYYQWYQQYNYAYPYSYYYPMSMYQSYGSPSQYGMAGSYGSATPQQPSAPQHQGTLNQPPVPGMDESMSYQAPPQQLPSAQPPQPSNPPHGAHTLNSGPQPGTAPATQHSQAGPATGQAYGPHTYTEPAKPKKGQQLWNRMKPAPGTGGLKFNIQKRPFAVTTQSFGSNAEGQHSGFGPQPNPEKVQNHSGSSARGNLSGKPDDWPQDMKEYVERCFTACESEEDKDRTEKLLKEVLQARLQDGSAYTIDWSREPLPGLTREPVAESPKKKRWEAASSLHPPRGAGSATRGGGAPSQRGTPGAGGAGRARGNSFTKFGNRNVFMKDNSSSSSTDSRSRSSSRSPTRHFRRSDSHSDSDSSYSGNECHPVGRRNPPPKGRGGRGAHMDRGRGRAQRGKRHDLAPTKRSRKKMAALECEDPERELKKQKRAARFQHGHSRRLRLEPLVLQMSSLESSGADPDWQELQIVGTCPDITKHYLRLTCAPDPSTVRPVAVLKKSLCMVKCHWKEKQDYAFACEQMKSIRQDLTVQGIRTEFTVEVYETHARIALEKGDHEEFNQCQTQLKSLYAENLPGNVGEFTAYRILYYIFTKNSGDITTELAYLTRELKADPCVAHALALRTAWALGNYHRFFRLYCHAPCMSGYLVDKFADRERKVALKAMIKTYVVPSSLLPLLFPSFRLAPPLRPAPGRRPPPAPNPCPGPCFPIIFLHSALPSPVPLALLVGHLCVPGHSSPSPHCSQLTASGASSPPHLCVSSSCSLLPGPPSSLLALGFLRTLRSLLSQLVAVLPP

SEQ ID NO: 22797 - protein, 1542 aa, Homo sapiens
MLPCKKRRTTVTESLQHKGNQEENNVDLESAVKPESDQVKDLSSVSLSWDPSHGRVAGFEVQSLQDAGNQLGMEDTSLSSGMLTQNTNVPILEGVDVAISQGITLPSLESFHPLNIHIGKGKLHATGSKRGKKMTLRPGPVTQEDRCDHLTLKEPFSGEPSEEVKEEGGKPQMNSEGEIPSLPSGSQSAKPVSQPRKSTQPDVCASPQEKPLRTLFHQPEEEIEDGGLFIPMEEQDNEESEKRRKKKKGTKRKRDGRGQEGTLAYDLKLDDMLDRTLEDGAKQHNLTAVNVRNILHEVITNEHVVAMMKAAISETEDMPMFEPKMTRSKLKEVVEKGVVIPTWNISPIKKANEIKPPQFVDIHLEEDDSSDEEYQPDDEEEDETAEESLLESDVESTASSPRGAKKSRLRQSSEMTETDEESGILSEAEKVTTPAIRHISAEVVPMGPPPPPKPKQTRDSTFMEKLHAVDEELASSPVCMDSFQPMDDSLIAFRTRSKMPLKDVPLGQLEAELQAPDITPDMYDPNTADDEDWKMWLGGLMNDDVGNEDEADDDDDPEYNFLEDLDEPDTEDFRTDRAVRITKKEVNELMEELFETFQDEMGFSNMEDDGPEEEECVAEPRPNFNTPQALRFEEPLANLLNEQHRTVKELFEQLKMKKSSAKQLQEVEKVKPQSEKVHQTLILDPAQRKRLQQQMQQHVQLLTQIHLLATCNPNLNPEATTTRIFLKELGTFAQSSIALHHQYNPKFQTLFQPCNLMGAMQLIEDFSTHVSIDCSPHKTVKKTANEFPCLPKQVAWILATSKVFMYPELLPVCSLKAKNPQDKIVFTKAEDNLLALGLKHFEGTEFPNPLISKYLLTCKTAHQLTVRIKNLNMNRAPDNIIKFYKKTKQLPVLGKCCEEIQPHQWKPPIEREEHRLPFWLKASLPSIQEELRHMADGAREVGNMTGTTEINSDRSLEKDNLELGSESRYPLLLPKGVVLKLKPVATRFPRKAWRQKRSSVLKPLLIQPSPSLQPSFNPGKTPARSTHSEAPPSKMVLRIPHPIQPATVLQTVPGVPPLGVSGGESFESPAALPAVPPEARTSFPLSESQTLLSSAPVPKVMLPSLAPSKFRKPYVRRRPSKRRGVKASPCMKPAPVIHHPASVIFTVPATTVKIVSLGGGCNMIQPVNAAVAQSPQTIPITTLLVNPTSFPCPLNQSLVASSVSPLIVSGNSVNLPIPSTPEDKAHVNVDIACAVADGENAFQGLEPKLEPQELSPLSATVFPKVEHSPGPPLADAECQEGLSENSACRWTVVKTEEGRQALEPLPQGIQESLNNPTPGDLEEIVKMEPEEAREEISGSPERDICDDIKVEHAVELDTGAPSEELSSAGEVTKQTVLQKEEERSQPTKTPSSSQEPPDEGTSGTDVNKGSSKNALSSMDPEVRLSSPPGKPEDSSSVDGQSVGTPVGPETGGEKNGPEEEEEEDFDDLTQDEEDEMSSASEESVLSVPELQVRAGEYSQVFRGLSNMYHLLICHLLACCTMDSPKIICIFVNALWDMIVELR

SEQ ID NO: 22798 - protein, 626 aa, Homo sapiens
MSWKSSLPTFFCHIYSFFHDFLYWLCGKSVKSCTTSGNSFFKQEFIILGMMAFMDFSVTMMALSLEEEAGRIKDCWDNQEAPALSTCSNANIFRRINAILDNSLDFSRVCTTPINRGIHDHLPDFQDSEETVTSRMLFPTSAQESSRGLPDANDLCLGLQSLSLTGWDRPWSTQDSDSSAQSSTHSVLSMLHNPLGNVLGKPPLSFLPLDPLGSDLVDKFPAPSVRGSRLDTRPILDSRSSSPSDSDTSGFSSGSDHLSDLISSLRISPPLPFLSLSGGGPRDPLKMGVGSRMDQEQAALAAVTPSPTSASKRWPGASVWPSWDLLEAPKDPFSIEREARLHRQAAAVNEATCTWSGQLPPRNYKNPIYSCKVFLGGVPWDITEAGLVNTFRVFGSLSVEWPGKDGKHPRCPPKGNMPKGYVYLVFELEKSVRSLLQACSHDPLSPDGLSEYYFKMSSRRMRCKEVQVIPWVLADSNFVRSPSQRLDPSRTVFVGALHGMLNAEALAAILNDLFGGVVYAGIDTDKHKYPIGSGRVTFNNQRSYLKAVSAAFVEIKTTKFTKKVQIDPYLEDSLCHICSSQPGPFFCRDQVCFKYFCRSCWHWRHSMEGLRHHSPLMRNQKNRDSS

SEQ ID NO: 22799 - protein, 1058 aa, Homo sapiens
MASGSGDSVTRRSVASQFFTQEEGPGIDGMTTSERVVDLLNQAALITNDSKITVLKQVQELIINKDPTLLDNFLDEIIAFQADKSIEVRKFVIGFIEEACKRDIELLLKLIANLNMLLRDENVNVVKKAILTMTQLYKVALQWMVKSRVISELQEACWDMVSAMAGDIILLLDSDNDGIRTHAIKFVEGLIVTLSPRMADSEIPRRQEHDISLDRIPRDHPYIQYNVLWEEGKAALEQLLKFMVHPAISSINLTTALGSLANIARQRPMFMSEVIQAYETLHANLPPTLAKSQVSSVRKNLKLHLLSVLKHPASLEFQAQITTLLVDLGTPQAEIARNMPSSKDTRKRPRDDSDSTLKKMKLEPNLGEDDEDKDLEPGPSGTSKASAQISGQSDTDITAEFLQPLLTPDNVANLVLISMVYLPEAMPASFQAIYTPVESAGTEAQIKHLARLMATQMTAAGLGPGVEQTKQCKEEPKEEKVVKTESVLIKRRLSAQGQAISVVGSLSSMSPLEEEAPQAKRRPEPIIPVTQPRLAGAGGRKKIFRLSDVLKPLTDAQVEAMKLGAVKRILRAEKAVACSGAAQVRIKILASLVTQFNSGLKAEVLSFILEDVRARLDLAFAWLYQEYNAYLAAGASGSLDKYEDCLIRLLSGLQEKPDQKDGIFTKVVLEAPLITESALEVVRKYCEDESRTYLGMSTLRDLIFKRPSRQFQYLHVLLDLSSHEKDKVRSQALLFIKRMYEKEQLREYVEKFALNYLQLLVHPNPPSVLFGADKDTEVAAPWTEETVKQCLYLYLALLPQNHKLIHELAAVYTEAIADIKRTVLRVIEQPIRGMGMNSPELLLLVENCPKGAETLVTRCLHSLTDKVPPSPELVKRVRDLYHKRLPDVRFLIPVLNGLEKKEVIQALPKLIKLNPIVVKEVFNRLLGTQHGEGNSALSPLNPGELLIALHNIDSVKCDMKSIIKGEALPPHSSGLAPATPGQDLSHPHAPTGICQVKDCHSQPHLRALESHLPPSLLFLPPLPSLPPSLLLPSSQVLPFTTHLFLPLMYLLCPGTEWA

SEQ ID NO: 22800 - protein, 736 aa, Homo sapiens
MLRLLRPLLLLLLLPPPGSPEPPGLTQLSPGAPPQAPDLLYADGLRAYAAGAWAPAVALLREALRSQAALGRVRLDCGASCAADPGAALPAVLLGAPEPDSGPGPTQGSWERQLLRAALRRADCLTQCAARRLGPGGAARLRVGSALRDAFRRREPYNYLQRAYYQLKKLDLAAAAAHTFFVANPMHLQMREDMAKYRRMSGVRPQSFRDLETPPHWAAYDTGLELLGRQEAGLALPRLEEALQGSLAQMESCRADCEGPEEQQGAEEEEDGAASQGGLYEAIAGHWIQVLQCRQRCVGETATRPGRSFPVPDFLPNQLRRLHEAHAQVGNLSQAIENVLSVLLFYPEDEAAKRALNQYQAQLGEPRPGLGPREDIQRFILRSLGEKRQLYYAMEHLGTSFKDPDPWTPAALIPEALREKLREDQEKRPWDHEPVKPKPLTYWKDVLLLEGVTLTQDSRQLNGSERAVLDGLLTPAECGVLLQLAKDAAGAGARSGYRGRRSPHTPHERFEGLTVLKAAQLARAGTVGSQGAKLLLEVSERVRTLTQAYFSPERPLHLSFTHLVCRSAIEGEQEQRMDLSHPVHADNCVLDPDTGECWREPPAYTYRDYSGLLYLNDDFQGGDLFFTEPNALTVTARVRPRCGRLVAFSSGVENPHGVWAVTRGRRCALALWHTWAPEHREQEWIEAKELLQESQEEEEEEEEEMPSKDPSPEPPSRRHQRVQDKTGRAPRVREEL

SEQ ID NO: 22801 - protein, 797 aa, Homo sapiens
MKTRGFSFPRQRQVLFLFLFWGVSLAGSGFGRYSVTEETEKGSFVVNLAKDLGLAEGELAARGTRVVSDDNKQYLLLDSHTGNLLTNEKLDREKLCGPKEPCMLYFQILMDDPFQIYRAELRVRDINDHSPVFRHKEMVLKISENTAEGTAFRLERAQDPDEGHNSIQNYTISSNSFFHIKISGSDEGMIYPELVLDKALDREEQEELSLTLTALDGGSPSRSGTSTIRIVVLDVNDNVPQFAQALYETQAPENSPVGSLIVKVSAGDADSGVNAEVSYSFFDASEDILTTFQINPFSGEIFLRELLDYELVNSYKINIQAMDGGGLSARCTVLIKVLDSNDNPPELIISSLSNSVAENSPGIVLAVFKIKDRDSGENGKTICYVQDNLPFFLKPSVDNFYILMTEGALDRESKAEYNITITVTDLGTPRLKTEHSITLQVSDVNDNAPAFTQTSYTLFVRENNSPALHIGSVSATDRDSGTNAQVTYSLLPPQDPHLPLASLVSINADNGHLFALRSLDYEALQAFDFRVGASDRGSPALSSEALVRVLVLDANDNSPFVLYPLQNGSAPCTELVPRAAEPGYLVTKVVAVDGDSGQNAWLSYQLLKATEPGLFGVWAHNGEVRTARLLSERDAAKHRLVVLVKDNGEPPRSATATLHVLLVDGFSQPYLPLPEAAPAQAQADLLTVYLVVALASVSSLFLLSVLLFVAVRLCRRSRAASVGRCSVPEGPFPGHLVDVSGTGTLFQSYQYEVCLTGGSETGEFKFLKPITPHLPPHRGGKEIEENSTLPNSFGFNY

SEQ ID NO: 22802 - protein, 219 aa, Homo sapiens
WTGSRTAPYTPNLPHHQNGHLQHHPPMPPHPGHYWPVHNELAFQPPISNHPAPEYWCSIAYFEMDVQVGETFKVPSSCPIVTVDGYVDPSGGDRFCLGQLSNVHRTEAIERARLHIGKGVQLECKGEGDVWVRCLSDHAVFVQSYYLDREAGRAPGDAVHKIYPSAYIKVFDLRQCHRQMQQQAATAQAAAAAQAAAVAGNIPGPGSVGGIAPAIKLNS

SEQ ID NO: 22803 - protein, 406 aa, Homo sapiens
MAAVGAGGSTAAPGPGAVSAGALEPGTASAGETVCPSSRMGGGAHRRLKYISLAVLVVQNASLILSIRYARTLPGDRFFATTAVVMAEVLKGLTCLLLLFAQKRGNVKHLVLFLHEAVLVQYVDTLKLAVPSLIYTLQNNLQYVAISNLPAATFQVTYQLKILTTALFSVLMLNRSLSRLQWASLLLLFTGVAIVQAQQAGGGGPRPLDQNPGAGLAAVVASCLSSGFAGVYFEKILKGSSGSVWLRNLQLGLFGTALGLVGLWWAEGTAVATRGFFFGYTPAVWGVVLNQAFGGLLVAVVVKYADNILKGFATSLSIVLSTVASIRLFGFHVDPLFALGAGLVIGAVYLYSLPRGAAKAIASASASASGPCVHQQPPGQPPPPQLSSHRGDLITEPFLPKSVLVK

SEQ ID NO: 22804 - protein, 2352 aa, Homo sapiens
MIPDGSSEIQEVMKNSGKHLFSAQHRSLTRQSRRQICTSSLMERFLQDVLQHHPYHCQESSSTQDETHVNTGSSSEVVHLDDAFSEEEEEDEDKVEDEDATEERPSEVSEPIEELHSRPHKSQEGTQEVSVRPSVIQKLEKGQQQPLEFVHKIGASVRKCNLVDIGQATNNRSNLVRPPVICNAPASCLPESSNDRPVTANTTSLPPAAHLDSVSKCDPNKVEKYLEQPDGASRNPVPSSHVETTSFSYQKHKESNRKSLRMNSDKLVLWKDVKSQGKTLSAGLKFHERMGTKGSLRVKSPSKLAVNPNKTDMPSNKGIFEDTIAKNHEEFFSNMDCTQEEKHLVFNKTAFWEQKCSVSSEMKFDCISLQSASDQPQETAQDLSLWKEEQIDQEDNYESRGSEMSFDCSSSFHSLTDQSKVSAKEVNLSKEVRTDVQYKNNKSYVSKISSDCDDILHLVTNQSQMIVKEISLQNARHISLVDQSYESSSSETNFDCDASPQSTSDYPQQSVTEVNLPKEVHIGLVDKNYGSSSSEVSADSVFPLQSVVDRPPVAVTETKLRKKAHTSLVDNYGSSCSETSFDCDVSLESVVDHPQLTVKGRNLKGRQVHLKHKKRKPSSAKAHLDCDVSLGTVADESQRAVEKINLLKEKNADLMDMNCESHGPEMGFQADAQLADQSQVAEIERQKVDVDLENKSVQSSRSSLSSDSPASLYHSAHDEPQEALDEVNLKELNIDMEVRSYDCSSSELTFDSDPPLLSVTEQSHLDAEGKERHIDLEDESCESDSSEITFDSDIPLYSVIDQPEVAVYEEETVDLESKSNESCVSEITFDSDIPLHSGNDHPEVAVKEVIQKEEYIHLERKNDEPSGSEISSDSHAPLHSVTNSPEVAVKKLNPQKEEQVHLENKENEPIDSEVSLDYNIIFHSVTGRSEDPIKEISLHTKEHMYLENKSVFETSLDSDVPLQAATHKPEVIVKETWLQREKHAEFQGRSTEFSGSKTSLDSGVPHYSVTEPQVAVNKINRKKQYVLENKNDKCSGSEIILDSNVPPQSMTDQPQLAFLKEKHVNLKDKNSKSGDSKITFDSEQLQEAVKKIDQWKEEVIGLKNKINEPSTYKLIHHPDVSVQSVADQPKVAIKHVNLGNENHMYLEVKNSQYSCSEMNLDSGFLGQSIVNRPQITILEQEHIELEGKHNQCCGSEVSFDSDDPLQSVADRLRETVKEISLWKDEEVDTEDRRNEAKGFEIMYDSDVLQPVAGQPEEVVKEVSLWKEHVDLENKIVKPTDSRINFDSHEPLQSVTNKIPGANKEINLLREEHVCLDDKGYVPSDSEIIYVSNIPLQSVIKQPHILEEEHASLEDKSSNSYSPEESSDSNDSFQAAADELQKPVKEINLWKEDHIYLEDKSYKLGDFDVSYASHIPVQFVTDQSSVPVKEINLQKKDHNDLENKNCEVCGSEIKCHSCVHLQSEVDQPQVSYKEADLQKEEHVVMEEKTDQPSDSEMMYDSDVPFQIVVNQFPGSVKETHLPKVVLVDLVPGDSDYEVISDDIPLQLVTDPPQLTVKDISCINTECIDIEDKSCDFFGSEVRCNCKASTPSMTNQCKETFKIINRKKDYIILGEPSCQSCGSEMNFNVDASDQSMTYESQGPDEKMVKYIDSEDKSCGYNGSKGKFNLEDTSHRTTHRLQKAHKEASLRKDPRNAGLKGKSCQSSASAVDFGASSKSALHRRADKKKRSKLKHRDLEVSCEPDGFEMNFQCAPPLPSDTDQPQETVKKRHPCKKVSSDLKEKNHDSQSSSVLKVDSVRNLKKAKDVIEDNPDEPVLEALPHVPPSFVGKTWSQIMREDDIKINALVKEFREGRFHCYFDDDCETKKVSSKGKKKVTWADLQGKEDTAPTQAVSESDDIVCGISDIDDLSVALDKPCHRHPPAERPPKQKGRVASQCQTAKISHSTQTSCKNYPVMKRKIIRQEEDPPKSKCSRLQDDRKTKKKVKIGTVEFPASCTKVLKPMQPKALVCVLSSLNIKLKEGEGLPFPKMRHHSWDNDIRFICKYKRNIFDYYEPLIKQIVISPPLSVIVPEFERRNWVKIHFNRSNQNSSAGDNDADGQGSASAPLMAVPARYGFNSHQGTSDSSLFLEESKVLHARELPKKRNFQLTFLNHDVVKISPKSVRNKLLESQSKKKIHGKRVTTSSNKLGFPKKVYKPIILQQKPRKASEKQSIWIRTKPSDIIRKYISKYSVFLRHRYQSRSAFLGRYLKKKKSVVSRLKKAKRTAKVLLNSSVPPAGAEELSSAMANPPPKRPVRASCRVARRRKKTDESYHGRQKGPSTPVRAYDLRSSSCLQQRERMMTRLANKLRGNEVK

SEQ ID NO: 22805 - protein, 1433 aa, Homo sapiens
MASGAGGVGGGGGGKIRTRRCHQGPIKPYQQGRQQHQGILSRVTESVKNIVPGWLQRYFNKNEDVCSCSTDTSEVPRWPENKEDHLVYADEESSNITDGRITPEPAVSNTEEPSTTSTASNYPDVLTRPSLHRSHLNFSMLESPALHCQPSTSSAFPIGSSGFSLVKEIKDSTSQHDDDNISTTSGFSSRASDKDITVSKNTSLPPLWSPEAERSHSLSQHTATSSKKPAFNLSAFGTLSPSLGNSSILKTSQLGDSPFYPGKTTYGGAAAAVRQSKLRNTPYQAPVRRQMKAKQLSAQSYGVTSSTARRILQSLEKMSSPLADAKRIPSIVSSPLNSPLDRSGIDITDFQAKREKVDSQYPPVQRLMTPKPVSIATNRSVYFKPSLTPSGEFRKTNQRIDNKCSTGYEKNMTPGQNREQRESGFSYPNFSLPAANGLSSGVGGGGGKMRRERTRFVASKPLEEEEMEVPVLPKISLPITSSSLPTFNFSSPEITTSSPSPINSSQALTNKVQMTSPSSTGSPMFKFSSPIVKSTEANVLPPSSIGFTFSVPVAKTAELSGSSSTLEPIISSSGFASPKIDSVAAQPTATSPVVYTRPAISSFSSSGIGFGESLKAGSSWQCDTCLLQNKVTDNKCIACQAAKLSPRDTAKQTGIETPNKSGKTTLSASGTGFGDKFKPVIGTWDCDTCLVQNKPEAIKCVACETPKPGTCVKRALTLTVVSESAETMTASSSSCTVTTGTLGFGDKFKRPIGSWECSVCCVSNNAEDNKCVSCMSEKPGSSVPASSSSTVPVSLPSGGSLGLEKFKKPEGSWDCELCLVQNKADSTKCLACESAKPGTKSGFKGFDTSSSSSNSAASSSFKFGVSSSSSGPSQTLTSTGNFKFGDQGGFKIGVSSDSGSINPMSEGFKFSKPIGDFKFGVSSESKPEEVKKDSKNDNFKFGLSSGLSNPVSLTPFQFGVSNLGQEEKKEELPKSSSAGFSFGTGVINSTPAPANTIVTSENKSSFNLGTIETKSASVAPFTCKTSEAKKEEMPATKGGFSFGNVEPASLPSASVFVLGRTEEKQQEPVTSTSLVFGKKADNEEPKCQPVFSFGNSEQTKDENSSKSTFSFSMTKPSEKESEQPAKATFAFGAQTSTTADQGAAKPVFSFLNNSSSSSSTPATSAGGGIFGSSTSSSNPPVATFVFGQSSNPVSSSAFGNTAESSTSQSLLFSQDSKLATTSSTGTAVTPFVFGPGASSNNTTTSGFGFGATTTSSSAGSSFVFGTGPSAPSASPAFGANQTPTFGQSQGASQPNPPGFGSISSSTALFPTGSQPAPPTFGTVSSSSQPPVFGQQPSQSAFGSGTTPNSSSAFQFGSSTTNFNFTNNSPSGVFTFGANSSTPAASAQPSGSGGFPFNQSPAAFTVGSNGKNVFSSSGTSFSGRKIKTAVRRRK

SEQ ID NO: 22806 - protein, 884 aa, Homo sapiens
MEQAGTRPAATEHPRLRRPMPWLLLLPLLLLLLLLLPGPAASQLRYSVPEEQAPGALVGNVARALGLELRRLGPGCLRINHLGAPSPRYLELDLTSGALFVNERIDREALCEQRPRCLLSLEVLAHNPVAVSAVEVEILDINDNSPRFPRPNYQLQVSESVAPGARFHIESAQDPDVGANSVQTYELSPSEHFELDLKPLQENSKVLELVLRKGLDREQAALHHLVLTAVDGGIPARSGTAQISVRVLDTNDNSPAFDQSTYRVQLREDSPPGTLVVKLNASDPDEGSNGELRYSLSSYTSDRERQLFSIDASTGEVRVIGGLDYEEASSYQIYVQATDRGPVPMAGHCKVLVDIVDVNDNAPEVVLTDLYSPVPENATPNTIVAVLSVNDQDSGPNRKVSLGLEATLPFRLNGFGNSYTLVVSGPLDRERVAVYNITVTATDGGIPQLTSLRTLKVEISDINDNPPSFLEDSYSIYIQENNLPGVLLCTVQATDPDEKENAEVTYSLLEREIQGLPVTSYVSINSASGSLYAVNSFDYEKFREFFVTVEAQDKGSPPLSSTVTANVYVVDMNDHAPHILYPTSTNSSAAFEMVPRTAPAGYLVTKVIAMDSDSGQNAWLFYHLAQTSDLDLFKVELHTGEIRTTRKMGDESGSTFNLTVVVRDNGEPSLSASVAITVAVVDRVSKILPDTQRHVKSPRTYSEITLYLIIALSTVSFIFLLTIIILSIIKCYRYTAYGTACCGGFCGVRERSPAELYKQANNNIDARIPHGLKVQPHFIEVRGNGSLTKTYCYKACLTAGSGSDTFMFYNTGAQTGPGPSGAQAAVTDSRNLTGQSGQNAGNLIILKNEAVSQNEVRQWSGGLLQTHAFVTHPPISCDLALLSH

SEQ ID NO: 22807 - protein, 645 aa, Homo sapiens
MVLAMASQDVQNFFQPFSSWISRVYEALQQAGDMLSASLVNISKQDSKLSDKLDQDLDNIQIQETYFEDEEQDNDWSQEDANSLFLEVDHFSCCNSDLQDSAQNSSPSLSQHAKDSCSTMSQWPNWASDDRKLPHVLSSIAEEEHHLEKQRSGLQHGFDSQLPGTLETVNGKKQVNSFGDDEELSTSSDSDEEVIKQFEISVSRSQSFRSVTSEKGKQTGLEQKPKFSRSLLTHGEDGTEVSACEDLDGASQRRYSENLSYGEDDHIPAHSQSPCERGDAKHHGTSHQESSVVQSLRRQSTEGSLEMETAFNSRGFEDSYATDSSSMWSPEEQDRTNLQVPSGVSEPISKCGDLDVIFEYRAASQKLTVTIVRAQGLPDKDRSGVNSWQVHVVLLPGKKHRGRTNIQRGPNPVFREKVTFAKLEPRDVAACAVRFRLYAARKMTRERMMGEKLFYLSHLHPEGEMKVTLVLEPRSNISSGGSPLSPSAVSHSDSTSSTQSLSHGGAPELLVGLSYNATTGRLSVEMIKGSHFRNLAVNRAPDTYGKLFLLNSVGQEMSRCKTSIRRGQPNPVYKETFVFQVALFQLSDVTLMISVYNRRTMKRKEMIGWIALGQNSSGEEEQDHWEEMKETKGQQICRWHTLLES

SEQ ID NO: 22808 - protein, 405 aa, Homo sapiens
MQPAEEGPSVPKIYKQRSPYSVLKTFPSLELSAESRMILDAFAQQCSRVLSLLNCGGKLLDSNHSQSMISCVKQEGSSYNERQEHCHIGKGVHSQTSDNVDIEMQYMQRKQQTSAFLRVFTDSLQNYLLSGSFPTPNPSSASEYGHLADVDPLSTSPVHTLGGWTSPATSESHGHPSSSTLPEEEEEEDEEGYCPRCQELEQEVISLQQENEELRRKLESIPVPCQTVLDYLKMVLQHHNQLLIPQPADQPTEGSKQLLNNYPVYITSKQWDEAVNSSKKDGRRLLRYLIRFVFTTDELKYSCGLGKRKRSVQSGETGPERRPLDPVKVTCLREFIRMHCTSNPDWWMPSEEQINKVFSDAVGHARQGRAVGTFLHNGGSFYEGIDHQASQDEVFNKSSQDGSGD

SEQ ID NO: 22809 - protein, 746 aa, Homo sapiens
MGAKGNGLTSMKNMEKELLCPVCQEMYKQPLVLPCTHNVCQACAREVLGQQGYIGHGGDPSSEPTSPASTPSTRSPRLSRRTLPKPDRLDRLLKSGFGTYPGRKRGALHPQVIMFPCPACQGDVELGERGLAGLFRNLTLERVVERYRQSVSVGGAILCQLCKPPPLEATKGCTECRATFCNECFKLFHPWGTQKAQHEPTLPTLSFRPKGLMCPDHKEEVTHYCKTCQRLVCQLCRVRRTHSGHKITPVLSAYQALKDKLTKSLTYILGNQDTVQTQICELEEAVRHTEVSGQQAKEEVSQLVRGLGAVLEEKRASLLQAIEECQQERLARLSAQIQEHRSLLDGSGLVGYAQEVLKETDQPCFVQAAKQLHNRIARATEALQTFRPAASSSFRHCQLDVGREMKLLTELNFLRVPEAPVIDTQRTFAYDQIFLCWRLPPHSPPAWHYTVEFRRTDVPAQPGPTRWQRREEVRGTSALLENPDTGSVYVLRVRGCNKAGYGEYSEDVHLHTPPAPVLHFFLDSRWGASRERLAISKDQRAVRSVPGLPLLLAADRLLTGCHLSVDVVLGDVAVTQGRSYWACAVDPASYLVKVGVGLESKLQESFQGAPDVISPRYDPDSGHDSGAEDATVEASPPFAFLTIGMGKILLGSGASSNAGLTGRDGPTAGCTVPLPPRLGICLDYERGRVSFLDAVSFRGLLECPLDCSGPVCPAFCFIGGGAVQLQEPVGTKPERKVTIGGFAKLD

SEQ ID NO: 22810 - protein, 764 aa, Homo sapiens
MSDTRRRVKVYTLNEDRQWDDRGTGHVSSTYVEELKGMSLLVRAESDGSLLLESKINPNTAYQKQQDTLIVWSEAENYDLALSFQEKAGCDEIWEKICQVQGKDPSVEVTQDLIDESEEERFEEMPETSHLIDLPTCELNKLEEIADLVTSVLSSPIRREKLALALENEGYIKKLLQLFQACENLENTEGLHHLYEIIRGILFLNKATLFEVMFSDECIMDVVGCLEYDPALAQPKRHREFLTKTAKFKEVIPITDSELRQKIHQTYRVQYIQDIILPTPSVFEENFLSTLTSFIFFNKVEIVSMLQEDEKFLSEVFAQLTDEATDDDKRRELVNFFKEFCAFSQTLQPQNRDAFFKTLAKLGILPALEIVMGMDDLQVRSAATDIFSYLVEFSPSMVREFVMQEAQQSDDDILLINVVIEQMICDTDPELGGAVQLMGLLRTLIDPENMLATTNKTEKSEFLNFFYNHCMHVLTAPLLTNTSEDKCEKDNIVGSNKNNTICPGALRFMRRIIGLKDEFYNRYITKGNLFEPVINALLDNGTRYNLLNSAVIELFEFIRVEDIKSLTAHIVENFYKALESIEYVQTFKGLKTKYEQEKDRQNQKLNSVPSILRSNRFRRDAKALEEDEEMWFNEDEEEEGKAVVAPVEKPKPEDDFPDNYEKFMETKKAKESEDKENLPKRTSPGGFKFTFSHSASAANGTNSKSVVAQIPPATSNGSSSKTTNLPTSVTATKGSLVGLVDYPDDEEEDEEEESSPRKRPRLGS

SEQ ID NO: 22811 - protein, 698 aa, Homo sapiens
MSRKISKESKKVNISSSLESEDISLETTVPTDDISSSEEREGKVRITRQLIERKELLHNIQLLKIELSQKTMMIDNLKVDYLTKIEELEEKLNDALHQKQLLTLRLDNQLAFQQKDASKYQELMKQEMETILLRQKQLEETNLQLREKAGDVRRNLRDFELTEEQYIKLKAFPEDQLSIPEYVSVRFYELVNPLRKEICELQVKKNILAEELSTNKNQLKQLTETYEEDRKNYSEVQIRCQRLALELADTKQLIQQGDYRQENYDKVKSERDALEQEVIELRRKHEILEASHMIQTKERSELSKEVVTLEQTVTLLQKDKEYLNRQNMELSVRCAHEEDRLERLQAQLEESKKAREEMYEKYVASRDHYKTEYENKLHDELEQIRLKTNQEIDQLRNASREMYERENRNLREARDNAVAEKERAVMAEKDALEKHDQLLDRYRELQLSTESKVTEFLHQSKLKSFESERVQLLQEETARNLTQCQLECEKYQKKLEVLTKEFYSLQASSEKRITELQAQNSEHQARLDIYEKLEKELDEIIMQTAEIENEDEAERVLFSYGYGANVPTTAKRRLKQSVHLARRVLQLEKQNSLILKDLEHRKDQVTQLSQELDRANSLLNQTQQPYRYLIESVRQRDSKIDSLTESIAQLEKDVSNLNKEKSALLQTKNQMALDLEQLLNHREVFFLFCHNCNHFRLF

SEQ ID NO: 22812 - protein, 1847 aa, Homo sapiens
SSISGSRFLITSTGALYIKDVQNEDGLYNYRCITRHRYTGETRQSNSARLFVSDPANSAPSILDGFDHRKAMAGQRVELPCKALGHPEPDYRWLKDNMPLELSGRFQKTVTGLLIENIRPSDSGSYVCEVSNRYGTAKVIGRLYVKQPLKATISPRKVKSSVGSQVSLSCSVTGTEDQELSWYRNGEILNPGKNVRITGINHENLIMDHMVKSDGGAYQCFVRKDKLSAQDYVQVVLEDGTPKIISAFSEKVVSPAEPVSLMCNVKGTPLPTITWTLDDDPILKGGSHRISQMITSEGNVVSYLNISSSQVRDGGVYRCTANNSAGVVLYQARINVRGPASIRPMKNITAIAGRDTYIHCRVIGYPYYSIKWYKNSNLLPFNHRQVAFENNGTLKLSDVQKEVDEGEYTCNVLVQPQLSTSQSVHVTVKVPPFIQPFEFPRFSIGQRVFIPCVVVSGDLPITITWQKDGRPIPGSLGVTIDNIDFTSSLRISNLSLMHNGNYTCIARNEAAAVEHQSQLIVRVPPKFVVQPRDQDGIYGKAVILNCSAEGYPVPTIVWKFSKGAGVPQFQPIALNGRIQVLSNGSLLIKHVVEEDSGYYLCKVSNDVGADVSKSMYLTVKIPAMITSYPNTTLATQGQKKEMSCTAHGEKPIIVRWEKEDRIINPEMARYLVSTKEVGEEVISTLQILPTVREDSGFFSCHAINSYGEDRGIIQLTVQEPPDPPEIEIKDVKARTITLRWTMGFDGNSPITGYDIECKNKSDSWDSAQRTKDVSPQLNSATIIDIHPSSTYSIRMYAKNRIGKSEPSNELTITADEAAPDGPPQEVHLEPISSQSIRVTWKAPKKHLQNGIIRGYQIGYREYSTGGNFQFNIISVDTSGDSEVYTLDNLNKFTQYGLVVQACNRAGTGPSSQEIITTTLEDVPSYPPENVQAIATSPESISISWSTLSKEALNGILQGFRVIYWANLMDGELGEIKNITTTQPSLELDGLEKYTNYSIQVLAFTRAGDGVRSEQIFTRTKEDVPGPPAGVKAAAASASMVFVSWLPPLKLNGIIRKYTVFCSHPYPTVISEFEASPDSFSYRIPNLSRNRQYSVWVVAVTSAGRGNSSEIITVEPLAKAPARILTFSGTVTTPWMKDIVLPCKAVGDPSPAVKWMKDSNGTPSLVTIDGRRSIFSNGSFIIRTVKAEDSGYYSCIANNNWGSDEIILNLQVQVPPDQPRLTVSKTTSSSITLSWLPGDNGGSSIRGYILQYSEDNSEQWGSFPISPSERSYRLENLKCGTWYKFTLTAQNGVGPGRISEIIEAKTLGKEPQFSKEQELFASINTTRVRLNLIGWNDGGCPITSFTLEYRPFGTTVWTTAQRTSLSKSYILYDLQEATWYELQMRVCNSAGCAEKQANFATLNYDGSTIPPLIKSVVQNEEGLTTNEGLKMLVTISCILVGVLLLFVLLLVVRRRRREQRLKRLRDAKSLAEMLMSKNTRTSDTLSKQQQTLRMHIDIPRAQLLIEERDTMETIDDRSTVLLTDADFGEAAKQKSLTVTHTVHYQSVSQATGPLVDVSDARPGTNPTTRRNAKAGPTARNRYASQWTLNRPHPTISAHTLTTDWRLPTPRAAGSVDKESDSYSVSPSQDTDRARSSMVSTESASSTYEELARAYEHAKMEEQLRHAKFTITECFISDTSSEQLTAGTNEYTDSLTSSTPSESGICRFTASPPKPQDGGRVMNMAVPKAHRPGDLIHLPPYLRMDFLLNRGGPGTSRDLSLGQACLEPQKSRTLKRPTVLEPIPMEAASSASSTREGQSWQPGAVATLPQREGAELGQAAKMSSSQESLLDSRGHLKGNNPYAKSYTLV

SEQ ID NO: 22813 - protein, 399 aa, Homo sapiens
MLKAVILIGGPQKGTRFRPLSFEVPKPLFPVAGVPMIQHHIEACAQVPGMQEILLIGFYQPDEPLTQFLEAAQQEFNLPVRYLQEFAPLGTGGGLYHFRDQILAGSPEAFFVLNADVCSDFPLSAMLEAHRRQRHPFLLLGTTANRTQSLNYGCIVENPQTHEVLHYVEKPSTFISDIINCGIYLFSPEALKPLRDVFQRNQQDGQLEDSPGLWPGAGTIRLEQDVFSALAGQGQIYVHLTDGIWSQIKSAGSALYASRLYLSRYQDTHPERLAKHTPGGPWIRGNVYIHPTAKVAPSAVLGPNVSIGKGVTVGEGVRLRESIVLHGATLQEHTCVLHSIVGWGSTVGRWARVEVPPVTLTPTIPEPAWTVRASSRTGSCCLLSPSWAAESGSLPRCSS

SEQ ID NO: 22814 - protein, 516 aa, Homo sapiens
CFSEEVTSTELSSGDQSHKMGDNASERDTGESKAGIAASVSILENSSRETSRRQEQHRFSMDLKMPAFHPKQEVPVPGDGVEFPSSTGAEGQTGHPAEKLSDLHNKEHSGGGKRALAPDLMPLDLSARSTRDDPSNKETASSLQAALVVHPCPYCSHKTYYPEVLWMHKRIWHRVSCNSVAPPWIQPNGYKSIRSNLVFLSRSGRTGPPPALGGKECQPLLLARFTRTQVPGGMPGSKSGSSPLGVVTKAASMPKNKESHSGGPCALWAPGPDGYRQTKPCHGQEPHGAATQGPLAKPRQEASSKPVPAPGGGGFSRSATPTPTVIARAGAQPSANSKPVEKFGVPPAGAGFAPTNKHSAPDSLKAKFSAQPQGPPPAKGEGGAPPLPPREPPSKAAQELRTLATCAAGSRGDAALQAQPGVAGAPPVLHSIKQEPVAEGHEKRLDILNIFKTYIPKDFATLYQGWGVSGPGLEHRGTLRTQARPGEFVCIECGKSFHQPGHLRAHMRAHSGERPF

SEQ ID NO: 22815 - protein, 610 aa, Homo sapiens
MRGAARLGRPGRSCLPGARGLRAPPPPPLLLLLALLPLLPAPGAAAAPAPRPPELQSASAGPSVSLYLSEDEVRRLIGLDAELYYVRNDLISHYALSFSLLVPSETNFLHFTWHAKSKVEYKLGFQVDNVLAMDMPQVNISVQGEVPRTLSVFRVELSCTGKVDSEVMILMQLNLTVNSSKNFTVLNFKRRKMCYKKLEEVKTSALDKNTSRTIYDPVHAAPTTSTRVFYISVGVCCAVIFLVAIILAVLHLHSMKRIELDDSISASSSSQGLSQPSTQTTQYLRADTPNNATPITSSLGYPTLRIEKNDLRSVTLLEAKGKVKDIAISRERITLKDVLQEGTFGRIFHGILIDEKDPNKEKQAFVKTVKDQASEIQVTMMLTESCKLRGLHHRNLLPITHVCIEEGEKPMVILPYMNWGNLKLFLRQCKLVEANNPQAISQQDLVHMAIQIACGMSYLARREVIHKDLAARNCVIDDTLQVKITDNALSRDLFPMDYHCLGDNENRPVRWMALESLVNNEFSSASDVWAFGVTLWELMTLGQTPYVDIDPFEMAAYLKDGYRIAQPINCPDELFAVMACCWALDPEERPKFQQLVQCLTEFHAALGAYV

SEQ ID NO: 22816 - protein, 363 aa, Homo sapiens
MEVPPRLSHVPPPLFPSAPATLASRSLSHWRPRPPRQLAPLLPSLAPSSARQGARRAQRHVTAQQPSRLAGGAAIKGGRRRRPDLFRRHFKSSSIQRSAAAAAATRTARQHPPADSSVTMEDMNEYSNIEEFAEGSKINASKNQQDDGKMFIGGLSWDTSKKDLTEYLSRFGEVVDCTIKTDPVTGRSRGFGFVLFKDAASVDKVLELKEHKLDGKLIDPKRAKALKGKEPPKKVFVGGLSPDTSEEQIKEYFGAFGEIENIELPMDTKTNERRGFCFITYTDEEPVKKLLESRYHQIGSGKCEIKVAQPKEVYRQQQQQQKGGRGAAAGGRGGTRGRGRGQQSTYGKASRGGGNHQNNYQPY

SEQ ID NO: 22817 - protein, 361 aa, Homo sapiens
MGCDGRVSGLLRRNLQPTLTYWSVFFSFGLCIAFLGPTLLDLRCQTHSSLPQISWVFFSQQLCLLLGSALGGVFKRTLAQSLWALFTSSLAISLVFAVIPFCRDVKVLASVMALAGLAMGCIDTVANMQLVRMYQKDSAVFLQVLHFFVGFGALLSPLIADPFLSEANCLPANSTANTTSRGHLFHVSRVLGQHHVDAKPWSNQTFPGLTPKDGAGTRVSYAFWIMALINVGVVVTFLVLLIFSYNVVFLFVGTASLGLFLSSTFPSMLAYTEDSLQYKGCATTVLVTGAGVGEMVLQMLVGSIFQAQGSYSFLVCGVIFGCLAFTFYILLLFFHRMHPGLPSVPTQDRSIGMENSECYQR

SEQ ID NO: 22818 - protein, 125 aa, Homo sapiens
MALTSPLQDDSINQAPLEIVSKLLSENTNLTTQEHENIIVAIAPLLENNHPPPDLCEFFCKHCRERPRSMVVIEVFTPVVQRILKHNMVSHPAPTPRPQRPEHEAPRASLAFCVGTDLGNVVGPA

SEQ ID NO: 22819 - protein, 741 aa, Homo sapiens
LGPDCPPPPPPPPPNNNNNNNSKHTGHKSACVPNMTERRRDELSEEINNLREKVMKQSEENNNLQSQVQKLTEENTTLREQVEPTPEDEDDDIELRGAAAAAAPPPPIEEECPEDLPEKFDGNPDMLAPFMAQCQIFMEKSTRDFSVDRVRVCFVTSMMTGRAARWASAKLERSHYLMHNYPAFMMEMKHVFEDPQRREVAKRKIRRLRQGMGSVIDYSNAFQMIAQDLDWNEPALIDQYHEGLSDHIQEELSHLEVAKSLSALIGQCIHIERRLARAAAARKPRSPPRALVLPHIASHHQVDPTEPVGGARMRLTQEEKERRRKLNLCLYCGTGGHYADNCPAKASKSSPGKLPGPAVEGPSATGPEIIRSPQDDASSPHLQVMLQIHLPGRHTLFVRAMIDSGASGNFIDHEYVAQNGIPLRIKDWPILVEAIDGRPIASGPVVHETHDLIVDLGDHREVLSFDVTQSPFFPVVLGVRWLSTHDPNITWSTRSIVFDSEYCRYHCRMYSPIPPSLPPPAPQPPLYYPVDGYRVYQPVRYYYVQNVYTPVDEHVYPDHRLVDPHIEMIPGAHSIPSGHVYSLSEPEMAALRDFVARNVKDGLITPTIAPNGAQVLQVKRGWKLQVSYDCRAPNNFTIQNQYPRLSIPNLEDQAHLATYTEFVPQIPGYQTYPTYAAYPTYPVGFAWYPVGRDGQGRSLYVPVMITWNPHWYRQPPVPQYPPPQPPPPPPPPPPPPSYSTL

SEQ ID NO: 22820 - protein, 844 aa, Homo sapiens
MVSRCSCLGVQCLLLSLLLLAAWEVGSGQLHYSVYEEARHGTFVGRIAQDLGLELAELVQRLFRVASKRHGDLLEVNLQNGILFVNSRIDREELCGRSVECSIHLEVIVDRPLQVFHVDVEVKDINDNPPRFSVTEQKLSIPESRLLDSRFPLEGASDADVGENALLTYKLSPNEYFVLDIINKKDKDKFPVLVLRKLLDREENPQLKLLLTATDGGKPEFTGSVSLLILVLDANDNAPIFDRPVYEVKMYENQVNQTLVIRLNASDSDEGINKEMMYSFSSLVPPTIRRKFWINERTGEIKVNDAIDFEDSNTYEIHVDVTDKGNPPMVGHCTVLVELLDENDNSPEVIVTSLSLPVKEDAQVGTVIALISVSDHDSGANGQVTCSLTPHVPFKLVSTYKNYYSLVLDSALDRERVSAYELVVTARDGGSPPLWATASVSVEVADVNDNAPAFAQSEYTVFVKENNPPGCHIFTVSAWDADAQENALVSYSLVERRLGERSLSSYVSVHAESGKVYALQPLDHEELELLQFQVSARDGGVPPLGSNLTLQVFVLDENDNAPALLASPAGSAGGAVSELVLRSVVAGHVVAKVRAVDADSGYNAWLSYELQSAAVGARIPFRVGLYTGEISTTRALDETDSPRQRLLVLVKDHGEPSLTATATVLVSLVEGSQAPKASSRASVGVAPEVALVDVNVYLIIAICAVSSLLVLTLLLYTALRCSAAPTEGACGPVKPTLVCSSAVGSWSYSQQRRQRVCSGEGLPKADLMAFSPSLPPCPMVDVDGEDQSIGGDHSRKVGYYVFIFLLCFMNNIFSYRIFSNMYQNISFLSTFHLCLNISSDTFVI

SEQ ID NO: 22821 - protein, 233 aa, Homo sapiens
MATIKSELIKNFAEEEAIHHNKISIVGTGSVGVACAISILLKGLSDELVLVDVDEGKLKGETMDLQHGSPFMKMPNIVSSKDYLVTANSNLVIITAGARQKKGETRLDLVQRNVSIFKLMIPNITQYSPHCKLLIVTNPVDILTYVAWKLSGFPKNRVIGSGCNLDSARFRYFIGQRLGIHSESCHGLILGEHGDSSVPVWSGVNIAGVPLKDLNPDIGTDKDPEQWENVHKK

SEQ ID NO: 22822 - protein, 134 aa, Homo sapiens
MIARRNPEPLRFLPDEARSLPPPKLTDPRLLYIGFLGYCSGLIDNLIRRRPIATAGLHRQLLYITAFFFAGYYLVKREDYLYAVRDREMFGYMKLHPEDFPEEGGDIGLCCLSPGSLSDTPAVFAVGSSAATTH

SEQ ID NO: 22823 - protein, 422 aa, Homo sapiens
MPSPLGPPCLPVMDPETTLEEPETARLRFRGFCYQEVAGPREALARLRELCCQWLQPEAHSKEQMLEMLVLEQFLGTLPPEIQAWVRGQRPGSPEEAAALVEGLQHDPGQLLGWITAHVLKQEVLPAAQKTEEPLGSPHPSGTVESPGEGPQDTRIEGSVQLSCSVKEEPNVDGQEVAPSSPPLAAQSPEGNHGHQEPASTSFHPPRIQEEWGLLDRSQKELYWDAMLEKYGTVVSLGLPPHQPEAQAQSELGMLLTGTGVCRSLRSGNESEGPPGCPEAQPPQGPGPAAWEGLSGAATPAPTVRPGTPPVPTQPTPAETRLEPAATPRKPYTCEQCGRGFDWKSVFVIHHRTHTSGPGVQSPGLATGESTEKPPQGEVAFPHHPRRSLTGPRSYPCEECGCSFSWKSQLVIHRKSHRPEVP

SEQ ID NO: 22824 - protein, 1812 aa, Homo sapiens
MDRVGGGKGPGGSYYRVSSSAARSRKLCPGRVNRGLSAQSTAATATMGGKNKQRTKGNLRPSNSGRAAELLAKEQGTVPGFIGFGTSQSDLGYVPAIQGAEEIDSLVDSDFRMVLRKLSKKDVTTKLKAMQEFGTMCTERDTETVKGVLPYWPRIFCKISLDHDRRVREATQQAFEKLILKVKKQLAPYLKSLMGYWLMAQCDTYTPAAFAAKDAFEAAFPPSKQPEAIAFCKDEITSVLQDHLIKETPDTLSDPQTVPEEEREAKFYRVVTCSLLALKRLLCLLPDNELDSLEEKFKSLLSQNKFWKYGKHSVPQIRSAYFELVSALCQRIPQLMKEEASKVSPSVLLSIDDSDPIVCPALWEAVLYTLTTIEDCWLHVNAKKSVFPKLSTVIREGGRGLATVIYPYLLPFISKLPQSITNPKLDFFKNFLTSLVAGLSTERTKTSSLESSAVISAFFECLRFIMQQNLGEEEIEQMLVNDQLIPFIDAVLKDPGLQHGQLFNHLAETLSSWEAKADTEKDEKTAHNLENVLIHFWERLSEICVAKISEPEADVESVLGVSNLLQVLQKPKSSLKSSKKKNGKVRFADEILESNKENEKCVSSEGEKIEGWELTTEPSLTHNSSGLLSPLRKKPLEDLVCKLADISINYVNERKSEQHLRFLSTLLDSFSSSRVFKMLLGDEKQSIVQAKPLEIAKLVQKNPAVQFLYQKLIGWLNEDQRKDFGFLVDILYSALRCCDNDMERKKVLDDLTKVDLKWNSLLKIIEKACPSSDKHALVTPWLKGDILGEKLVNLADCLCNEDLESRVSSESHFSERWTLLSLVLSQHVKNDYLIGDVYVERIIVRLHETLFKTKKLSEAESSDSSVSFICDVAYNYFSSAKGCLLMPSSEDLLLTLFQLCAQSKEKTHLPDFLICKLKNTWLSGVNLLVHQTDSSYKESTFLHLSALWLKNQVQASSLDINSLQVLLSAVDDLLNTLLESEDSYLMGVYIGSVMPNDSEWEKMRQSLPMQWLHRPLLEGRLSLNYECFKTDFKEQDIKTLPSHLCTSALLSKMVLIALRKETVLENNELEKIIAELLYSLQWCEELDNPPIFLIGFCEILQKMNITYDNLRVLGNTSGLLQLLFNRSREHGTLWSLIIAKLILSRSISSDEVKPHYKRKESFFPLTEGNLHTIQSLCPFLSKEEKKEFSAQCIPALLGWTKKDLCSTNGGFGHLAIFNSCLQTKSIDDGELLHGILKIIISWKKEHEDIFLFSCNLSEASPEVLGVNIEIIRFLSLFLKYCSSPLAESEWDFIMCSMLAWLETTSENQALYSIPLVQLFACVSCDLACDLSAFFDSTTLDTIGNLPVNLISEWKEFFSQGIHSLLLPILVTVTGENKDVSETSFQNAMLKPMCETLTYISKEQLLSHKLPARLVADQKTNLPEYLQTLLNTLAPLLLFRARPVQIAVYHMLYKLMPELPQYDQDNLKSYGDEEEEPALSPPAALMSLLSIQEDLLENVLGCIPVGQIVTIKPLSEDFCYVLGYLLTWKLILTFFKAASSQLRALYSMYLRKTKSLNKLLYHLFRLMPENPTYAETAVEVPNKDPKTFFTEELQLSIRETTMLPYHIPHLACSVYHMTLKDLPAMVRLWWNSSEKRVFNIVDRFTSKYVSSVLSFQEISSVQTSTQLFNGMTVKARATTREVMATYTIEDIVIELIIQLPSNYPLGSIIVESGKRVGVAVQQWRNWMLQLSTYLTHQNGSIMEGLALWKNNVDKRFEGVEDCMICFSVIHGFNYSLPKKACRTCKKKFHSACLYKWFTSSNKSTCPLCRETFF

SEQ ID NO: 22825 - protein, 1002 aa, Homo sapiens
MWPQPRLPPRPAMSEETRQSKLAAAKKKLREYQQRNSPGVPTGAKKKKKIKNGSNPETTTSGGCHSPEDTPKDNAATLQPSDDTVLPGGVPSPGASLTSMAASQNHDADNVPNLMDETKTFSSTESLRQLSQQLNGLVCESATCVNGEGPASSANLKDLESRYQQLAVALDSSYVTNKQLNITIEKLKQQNQEITDQLEEEKKECHQKQGALREQLQVHIQTIGILVSEKAELQTALAHTQHAARQKEGESEDLASRLQYSRRRVGELERALSAVSTQQKKADRYNKELTKERDALRLELYKNTQSNEDLKQEKSELEEKLRVLVTEKAGMQLNLEELQKKLEMTELLLQQFSSRCEAPDANQQLQQAMEERAQLEAHLGQVMESVRQLQMERDKYAENLKGESAMWRQRMQQMSEQVHTLREEKECSMSRVQELETSLAELRNQMAEPPPPEPPAGPSEVEQQLQAEAEHLRKELEGLAGQLQAQVQDNEGLSRLNREQEERLLELERAAELWGEQAEARRQILETMQNDRTTISRALSQNRELKEQLAELQSGFVKLTNENMEITSALQSEQHVKRELGKKLGELQEKLSELKETVELKSQEAQSLQQQRDQYLGHLQQYVAAYQQLTSEKEVLHNQLLLQTQLVDQLQQQEAQGKAVAEMARQELQETQERLEAATQQNQQLRAQLSLMAHPGEGDGLDREEEEDEEEEEEEAVAVPQPMPSIPEDLESREAMVAFFNSAVASAEEEQARLRGQLKEQRVRCRRLAHLLASAQKEPEAAAPAPGTGGDSVCGETHRALQGAMEKLQSRFMELMQEKADLKERVEELEHRCIQLSGETDTIGEYIALYQSQRAVLKERHREKEEYISRLAQDKEEMKVKLLELQELVLRLVGDRNEWHGRFLAAAQNPADEPTSGAPAPQELGAANQQGDLCEVSLAGSVEPAQGEAREGSPRDNPTAQQIMQLLREMQNPRERPGLGSNPCIPFFYRADENDEVKITVI

SEQ ID NO: 22826 - protein, 534 aa, Homo sapiens
MSDPYMPSYYAPSIGFPYSLGEAAWSTAGDQPMPYLTTYGQMSNGEHHYIPDGVFSQPGALGNTPPFLGQHGFNFFPGNADFSTWGTSGSQGQSTQSSAYSSSYGYPPSSLGRAITDGQAGFGNDTLSKVPGISSIEQGMTGLKIGGDLTAAVTKTVGTALSSSGMTSIATNSVPPVSSAAPKPTSWAAIARKPAKPQPKLKPKGNVGIGGSAVPPPPIKHNMNIGTWDEKGSVVKAPPTQPVLPPQTIIQQPQPLIQPPPLVQSQLPQQQPQPPQPQQQQGPQPQAQPHQVQPQQQQLQNRWVAPRNRGAGFNQNNGAGSENFGLGVVPVSASPSSVEVHPVLEKLKAINNYNPKDFDWNLKNGRVFIIKSYSEDDIHRSIKYSIWCSTEHGNKRLDAAYRSLNGKGPLYLLFSVNGSGHFCGVAEMKSVVDYNAYAGVWSQDKWKGKFEVKWIFVKDVPNNQLRHIRLENNDNKPVTNSRDTQEVPLEKAKQVLKIIATFKHTTSIFDDFAHYEKRQEEEEAMRRERNRNKQ

SEQ ID NO: 22827 - protein, 549 aa, Homo sapiens
MHSMISSVDVKSEVPVGLEPISPLDLRTDLRMMMPVVDPVVREKQLQQELLLIQQQQQIQKQLLIAEFQKQHENLTRQHQAQLQEHIKLQQELLAIKQQQELLEKEQKLEQQRQEQEVERHRREQQLPPLRGKDRGRERAVASTEVKQKLQEFLLSKSATKDTPTNGKNHSVSRHPKLWYTAAHHTSLDQSSPPLSGTSPSYKYTLPGAQDAKDDFPLRKTESSVSSSSPGSGPSSPNNGPTGSVTENETSVLPPTPHAEQMVSQQRILIHEDSMNLLSLYTSPSLPNITLGLPAVPSQLNASNSLKEKQKCETQTLRQGVPLPGQYGGSIPASSSHPHVTLEGKPPNSSHQALLQHLLLKEQMRQQKLLVAGGVPLHPQSPLATKERISPGIRGTHKLPRHRPLNRTQSAPLPQSTLAQLVIQQQHQQFLEKQKQYQQQIHMNKLLSKSIEQLKQPGSHLEEAEEELQGDQAMQEDRAPSSGNSTRSDSSACVDDTLGQVGAVKVKEEPVDSDEDAQIQEMESGEQAAFMQQVIGKDLAPGFVIKVII

SEQ ID NO: 22828 - protein, 228 aa, Homo sapiens
MKPKMKYSTNKISTAKWKNTASKALCFKLGKSQQKAKEVCPMYFMKLRSGLMIKKEACYFRRETTKRPSLKTGISPITEYLASLSTYNDQSITFALEDESYEIYVEDLKKDEKKDKVLLSYYESQHPSNESGDGVDGKMLMVTLSPTKDFWLHANNKEHSVELHKCEKPLPDQAFFVLHNMHSNCVSFECKTDPGVFIGVKDNHLALIKVDSSENLCTENILFKLSET

SEQ ID NO: 22829 - protein, 416 aa, Homo sapiens
MLKLAPWCLSFVTTPMFLVAMRKELASRMEWSGKQPICIKACREPKISDLVRRRVLPMQVQSRETPLHQLYSAAFSKQKLQSAPTKKPALPFGDLPMGYQHLHTQLQYECISPFYRRLGSSRRTCLRTGKWSGRAPSCIPICGKIENITAPKTQGLRWPWQAAIYRRTSGVHDGSLHKGAWFLVCSGALVNERTVVVAAHCVTDLGKVTMIKTADLKVVLGKFYRDDDRDEKTIQSLQISAIILHPNYDPILLDADIAILKLLDKARISTRVQPICLAASRDLSTSFQESHITVAGWNVLADVRSPGFKNDTLRSGVVSVVDSLLCEEQHEDHGIPVSVTDNMFCASWEPTAPSDICTAETGGIAAVSFPGRASPEPRWHLMGLVSWSYDKTCSHRLSTAFTKVLPFKDWIERNMK

SEQ ID NO: 22830 - protein, 385 aa, Homo sapiens
MARENGESSSSWKKQAEDIKKIFEFKETLGTGAFSEVVLAEEKATGKLFAVKCIPKKALKGKESSIENEIAVLRKIKHENIVALEDIYESPNHLYLVMQLVSGGELFDRIVEKGFYTEKDASTLIRQVLDAVYYLHRMGIVHRDLKPENLLYYSQDEESKIMISDFGLSKMEGKGDVMSTACGTPGYVAPEVLAQKPYSKAVDCWSIGVIAYILLCGYPPFYDENDSKLFEQILKAEYEFDSPYWDDISDSAKDFIRNLMEKDPNKRYTCEQAARHPWIAGDTALNKNIHESVSAQIRKNFAKSKWRQAFNATAVVRHMRKLHLGSSLDSSNASVSSSLSLASQKDCLAPSTLCSFISSSSGVSGVGAERRPRPTTVTAVHSGSK

SEQ ID NO: 22831 - protein, 606 aa, Homo sapiens
MIQSDKGADPPDKKDMKLSTATNPQNGLSQILRLVLQELSLFYGRDVNGVCLLYDLLHSPWLQALLKIYDCLQEFKEKKLVPATPHAQVLSYEVVELLRETPTSPEIQELRQMLQAPHFKALLSAHDTIAQKDFEPLLPPLPDNIPESEEAMRIVCLVKNQQPLGATIKRHEMTGDILVARIIHGGLAERSGLLYAGDKLVEVNGVSVEGLDPEQVIHILAMSRGTIMFKVVPVSDPPVNSQQMVYVRAMTEYWPQEDPDIPCMDAGLPFQKGDILQIVDQNDALWWQARKISDPATCAGLVPSNHLLKRKQREFWWSQPYQPHTCLKSTLYKEEFVGYGQKFFIAGFRRSMRLCRRKSHLSPLHASVCCTGSCYSAVGAPYEEVVRYQRRPSDKYRLIVLMGPSGVGVNELRRQLIEFNPSHFQSAVPHTTRTKKSYEMNGREYHYVSKETFENLIYSHRMLEYGEYKGHLYGTSVDAVQTVLVEGKICVMDLEPQDIQGVRTHELKPYVIFIKPSNMRCMKQSRKNAKVITDYYVDMKFKDEDLQEMENLAQRMETQFGQFFDHVIVNDSLHDACAQLLSAIQKAQEEPQWVPATWISSDTESQ

SEQ ID NO: 22832 - protein, 454 aa, Homo sapiens
LDFFRVVENQQPPATMPLNVSFTNRNYDLDYDSVQPYFYCDEEENFYQQQQQSELQPPAPSEDIWKKFELLPTPPLSPSRRSGLCSPSYVAVTPFSLRGDNDGGGGSFSTADQLEMVTELLGGDMVNQSFICDPDDETFIKNIIIQDCMWSGFSAAAKLVSEKLASYQAARKDSGSPNPARGHSVCSTSSLYLQDLSAAASECIDPSVVFPYPLNDSSSPKSCASQDSSAFSPSSDSLLSSTESSPQGSPEPLVLHEETPPTTSSDSEEEQEDEEEIDVVSVEKRQAPGKRSESGSPSAGGHSKPPHSPLVLKRCHVSTHQHNYAAPPSTRKDYPAAKRVKLDSVRVLRQISNNRKCTSPRSSDTEENVKRRTHNVLERQRRNELKRSFFALRDQIPELENNEKAPKVVILKKATAYILSVQAEEQKLISEEDLLRKRREQLKHKLEQLRNSCA

SEQ ID NO: 22833 - protein, 355 aa, Homo sapiens
MGCRQSSEEKEAARRSRRIDRHLRSESQRQRREIKLLLLGTSNSGKSTIVKQMKIIHSGGFNLEACKEYKPLIIYNAIDSLTRIIRALAALRIDFHNPDRAYDAVQLFALTGPAESKGEITPELLGVMRRLWADPGAQACFSRSSEYHLEDNAAYYLNDLERIAAADYIPTVEDILRSRDMTTGIVENKFTFKELTFKMVDVGGQRSERKKWIHCFEGVTAIIFCVELSGYDLKLYEDNQTSRMAESLRLFDSICNNNWFINTSLILFLNKKDLLAEKIRRIPLTICFPEYKGQNTYEEAAVYIQRQFEDLNRNKETKEIYSHFTCATDTSNIQFVFDAVTDVIIQNNLKYIGLC

SEQ ID NO: 22834 - protein, 547 aa, Homo sapiens
MENDESAKEEKSDLKEKSTGSKKANRFHPYSKDKNSGAGEKKGPNRNRVFISNIPYDMKWQAIKDLMREKVGEVTYVELFKDAEGKSRVSGVVEFKDEEFVKKALETMNKYDLSGRPLNIKEDPDGENARRALQRTGGSFPGGHVPDMGSGLMNLPPSILNNPNIPPEVISNLQAGRLGSTIFVANLDFKVGWKKLKEVFSIAGTVKRADIKEDKDGKSRGMGTVTFEQAIEAVQAISMFNGQFLFDRPMHVKMDDKSVPHEEYRSHDGKTPQLPRGLGGIGMGLGPGGQPISASQLNIGGVMGNLGPGGMGMDGPGFGGMNRIGGGIGFGGLEAMNSMGGFGGVGRMGELYRGAMTSSMERDFGRGDIGINRGFGDSFGRLGSAMIGGFAGRIGSSNMGPVGSGISGGMGSMNSVTGGMGMGLDRMSSSFDRMGPGIGAILERSIDMDRGFLSGPMGSGMRERIGSKGNQIFVRNLPFDLTWQKLKEKFSQCGHVMFAEIKMENGKSKGCGTVRFDSPESAEKACRIMNGIKISGREIDVRLDRNA

SEQ ID NO: 22835 - protein, 810 aa, Homo sapiens
MQRAREAEMMKSQVLFPFLLSLFCGAISQQIRYTIPEELANGSRVGKLAKDLGLSVRELPTRKLRVSAEDYFNVSLESGDLLVNGRIDREKICGRKLECALEFETVAENPMNVFHVVVVIQDINDNAPRFVAKGIDLEICESALPGVKFSLDSAQDADVEGNSLKLYTINPNQYFSLSTKESPDGSKYPVLLLEKPLDREHQSSHRLILTAMDGGDPPLSGTTHIWIRVTDANDNAPVFSQEVYRVSLQENVPWGTSVLRVMATDQDEGINAEITYAFLNSPISTSLFNLNPNTGDITTNGTLDFEETSRYVLSVEAKDGGVHTAHCNVQIEIVDENDNAPEVTFMSFSNQIPEDSDLGTVIALIKVRDKDSGQNGMVTCYTQEEVPFKLESTSKNYYKLVIAGALNREQTADYNVTIIATDKGKPALSSRTSITLHISDINDNAPVFHQASYVVHVSENNPPGASIAQVSASDPDLGPNGRVSYSILASDLEPRELLSYVSVSPQSGVVFAQRAFDHEQLRAFELTLQARDQGSPALSANVSLRVLVGDLNDNAPRVLYPALGPDGSALFDMVPRAAEPGYLVTKVVAVDADSGHNAWLSYHVLQASEPGLFSLGLRTGEVRTARALGDRDAARQRLLVAVRDGGQPPLSATATLHLIFADSLQEVLPDLSDRPEPSDPQTELQFYLVVALALISVLFLLAVILAIALRLRRSSSLDTEGCFQTGLCSKSGPGVPPNHSEGTLPYSYNLCIASHSAKTEFNSLNLTPEMAPPQDLLCDDPSMVVCASNEDHKIAYDPSLSSHVSFCKSS

SEQ ID NO: 22836 - protein, 612 aa, Homo sapiens
MSHPSWLPPKSTGEPLGHVPARMETTHSFGNPSISVSTQQPPKKFAPVVAPKPKYNPYKQPGGEGDFLPPPPPPLDDSSALPSISGNFPPPPPLDEEAFKVQGNPGGKTLEERRSSLDAEIDSLTSILADLECSSPYKPRPPQSSTGSTASPPVSTPVTGHKRMVIPNQPPLTATKKSTLKPQPAPQAGPIPVAPIGTLKPQPQPVPASYTTASTSSRPTFNVQVKSAQPSPHYMAAPSSGQIYGSGPQGYNTQPVPVSGQCPPPSTRGGMDYAYIPPPGLQPEPGYGYAPNQGRYYEGYYAAGPGYGGRNDSDPTYGQQGHPNTWKREPGYTPPGAGNQNPPGMYPVTGPKKTYITDPVSAPCAPPLQPKGGHSGQLGPSSVAPSFRPEDELEHLTKKMLYDMENPPADEYFGRCARCGENVVGEGTGCTAMDQVFHVDCFTCIICNNKLRGQPFYAVEKKAYCEPCYINTLEQCNVCSKPIMERILRATGKAYHPHCFTCVMCHRSLDGIPFTVDAGGLIHCIEDFHKKFAPRCSVCKEPIMPAPGQEETVRIVALDRDFHVHCYRCEDCGGLLSEGDNQGCYPLDGHILCKTCNSARIRVLTAKASTDL

SEQ ID NO: 22837 - protein, 293 aa, Homo sapiens
MKPFQIHLPGPPGHIVYPKHQAGHTGKQADHLGSQAFYPGRQHDYLVPPAGTAGIPVQNQPGRPEGVPWMPAPPPPLNCPPGLEYLSQIDMILIHQQIELLEVLFSFESSNMYEIKNSFGQRIYFAAEDTNFCIRNCCGRSRPFTLRITDNVGREVITLERPLRCNCCCCPCCLQEIEIQAPPGVPVGYVTQTWHPCLTKFTIKNQKREDVLKISGPCIVCSCIAGVDFEITSLDEQIVVGRISKHWSGFLREAFTDADNFGIQFPRDLDVKMKAVMIGACFLIDYMFFERTR

SEQ ID NO: 22838 - protein, 1220 aa, Homo sapiens [sequence omitted]

SEQ ID NO: 22839 - protein, 477 aa, Homo sapiens
MGRAGGGGPGRGPPPLLLFLGAALVLASGAVPAREAGSAVEAEELVKGSPAWEPPANDTREEAGPPAAGEDEASWTAPGGELAGPEEVLQESAAVTGTAWLEADSPGLGGVTAEAGSGDAQALPATLQAPHEVLGQSIMPPAIPEATEASGPPSPTPGDKLSPASELPKESPLEVWLNLGGSTPDPQGPELTYPFQGTLEPQPASDIIDIDYFEGLDGEGRGADLGSFPGSPGTSENHPDTEGETPSWSLLDLYDDFTPFDESDFYPTTSFYDDLDEEEEEEEDDKDAVGGGDLEDENELLVPTGKPGLGPGTGQPTSRWHAVPPQHTLGSVPGSSIALRPRPGEPGRDLASSENGTECRSGFVRHNGSCRSVCDLFPSYCHNGGQCYLVENIGAFCRCNTQDYIWHKGMRCESIITDFQVMCVAVGSAALVLLLLFMMTVFFAKKLYLLKTENTKLRRTKMILVLPTKSRRFSSPA

SEQ ID NO: 22840 - protein, 508 aa, Homo sapiens
MDPGQQPPPQPAPQGQGQPPSQPPQGQGPPSGPGQPAPAATQAAPQAPPAGHQIVHVRGDSETDLEALFNAVMNPKTANVPQTVPMRLRKLPDSFFKPPEPKSHSRQASTDAGTAGALTPQHVRAHSSPASLQLGAVSPGTLTPTGVVSGPAATPTAQHLRQSSFEIPDDVPLPAGWEMAKTSSGQRYFLNHIDQTTTWQDPRKAMLSQMNVTAPTSPPVQQNMMNSASGPLPDGWEQAMTQDGEIYYINHKNKTTSWLDPRLDPRFAMNQRISQSAPVKQPPPLAPQSPQGGVMGGSNSNQQQQMRLQQLQMEKERLRLKQQELLRQVRPQAMRNINPSTANSPKCQELALRSQLPTLEQDGGTQNPVSSPGMSQELRTMTTNSSDPFLNSGTYHSRDESTDSGLSMSSYSVPRTPDDFLNSVDEMDTGDTINQSTLPSQQNRFPDYLEAIPGTNVDLGTLEGDGMNIEGEELMPSLQEALSSDILNDMESVLAATKLDKESFLTWL

SEQ ID NO: 22841 - protein, 479 aa, Homo sapiens
ESDEALGPTMMSWNAVEKLCAKSANAIETKGFNKKDLELALSPIHNSSALPTTGRSCVNLAKKCFSGEVSWEAVELDVNNINMDTDTSQLGFHQSNQWAVDSGGISEEHLGKRSLKRNFELVDSSPCKKIIQNKKTCVEYKHNEMTNCYTNQNTGLTVEVQDLKLSVHKSQQNDCANKENIVNSFTDKQQTPEKLPIPMIAKNLMCELDEDCEKNSKRDYLSSSFLCSDDDRASKNISMNSDSSFPGISIMESPLESQPLDSDRSIKESSFEESNIEDPLIVTPDCQEKTSPKGVENPAVQESNQKMLGPPLEVLKTLASKRNAVAFRSFNSHINASNNSEPSRMNMTSLDAMDISCAYSGSYPMAITPTQKRRSCMPHQQTPNQIKSGTPYRTPKSVRRGVAPVDDGRILGTPDYLAPELLLGRAHELKRHPLFSDVDWENLQHQTMPFIPQPDDETDTSYFEARNTAQHLTVSGFSL

SEQ ID NO: 22842 - protein, 490 aa, Homo sapiens
MDVAIEFSVEEWQCLDTAQQNLYRNVMLENYRNLVFLGIAVSKPDLITCLEQGKEPWNMERHEMVAKPPGMCCYFAQDLRPEQSIKASLQRIILRKYEKCGHHNLQLKKGYKSVDEYKVHKGSYNGFNQCLTTTQSKIFQCDKYVKDFHKFSNSNRHKTEKNPFKCKECGKSFCVLSHLTQHKRIHTTVNSYKLEECGKAFNVSSTLSQHKRIHTGQKHYKCEECGIAFNKSSHLNTHKIIHTGEKSYKREECGKAFNISSHLTTHKIIHTGENAYKCKECGKAFNQSSTLTRHKIIHAGEKPYICEHCGRAFNQSSNLTKHKRIHTGDKPYKCEECGKAFNVSSTLTQHKRIHTGEKPYKCEECGKAFNVSSTLTQHKRIHTGEKPYKCEECGKAFNTSSHLTTHKRIHTGEKPYKCEECGKAFNQFSQLTTHKIIHTGEKPYKCKECGKAFKRSSNLTEHRIIHTGEKPYKCEECGKAFNLSSHLTTH

SEQ ID NO: 22843 - protein, 522 aa, Homo sapiens
MEPEGRGSLFEDSDLLHAGNPKENDVTAVLLTPGSQELMIRDMAEALTQWRQLNSPQGDVPEKPRNLVLLGLPISTPDVISQLEHEEELEREVSKAASQKHWETIPESKELTPEKDISEEESAPGVLIVRFSKESSSECEDSLESQQENHEKHLIQEAVTEKSSRERSYQSDEFRRNCTQRSLLVQQQGERLHHCDSFKNNLKQNSDIIRHERICAGKKPWKCNECEKAFSYYSAFVLHQRIHTGEKPYECNECGKAFSQSIHLTLHQRIHTGEKPYECHECGKAFSHRSALIRHHIIHTGEKPYECNECGKAFNQSSYLTQHQRIHTGEKPYECNECGKAFSQSTFLTQHQVIHTGEKPYKCNECGKAFSDRSGLIQHQRTHTGERPYECNECGKAFGYCSALTQHQRTHTGEKPYKCNDCAKAFSDRSALIRHQRTHTGEKPYKCKDCGKAFSQSSSLTKHQKTHTGEKPYKCKECGKAFSQSSSLSQHQKTHAGVKTKKYVQALSEHLTFGQHKRIHTG

SEQ ID NO: 22844 - protein, 141 aa, Homo sapiens
MVRELIVPTEDPSGESLIISPEEFERIKWASHVLTREELEARDQAFKKEKEATMDAVMTRKKIMKQKEMVWNNNKKLSDLEEVAKERAQNLLQRANKLRMEQEEELKDMSKIILNAKCHAIRDAQILEKQQIQKELDTEEK

SEQ ID NO: 22845 - protein, 1141 aa, Homo sapiens [sequence omitted]

SEQ ID NO: 22846 - protein, 189 aa, Homo sapiens
MAAALFVLLGFALLGTHGASGAGPPRVKAVKSSEHINEGETAMLVCKSESVPPVTDWAWYKITDSEDKALMNGSESRFFVSSSQGRSELHIENLNMEADPGQYRCNGTSSKGSDQAIITLRVRSHLAALWPFLGIVAEVLVLVTIIFIYEKRRKPEDVLDDDDAGSAPLKSSGQHQNDKGKNVRQRNSS

SEQ ID NO: 22847 - protein, 130 aa, Homo sapiens
MKLAFLFLGPMALLLLAGYGCVLGASSGNLRTFVGCAVREFTFLAKKPGCRGLRITTDACWGRCETWEKPILEPPYIEAHHRVCTYNETKQVTVKLPNCAPGVDPFYTYPVAIRCDCGACSTATTECETI

SEQ ID NO: 22848 - protein, 646 aa, Homo sapiens
MVKQLIFSSIPETQIQDRCQNVSDKQNQAKLYDTAMKLINSLLKEFSDAQIKVFRPDKGNQFPGGKVSSVPKVPPRYKEPTTDEAPSSIKIKSADKMPPMHKMMRKPSSDKIPSIDKTLVNKVVHSSVCNILNDYGSQDSIWKNINSNGENLARRLTSAVINEIFQRQVNLIFCDEVSVSACLPLESKDVVKKVQKLAQTASKECQTSSPYTIILPHKFLENVISALFSKIFSTISSTKTKEPEDNLSTELNFLQMKLVSAVATEISQDKYMTIQYVETLQSDDDEIIQLVVQSVYNNLLPQFGSQEIIQNCVTSGCKILSENIVDLVLPKPSHADKLSYNIIEEIAVKFLSKLLSIFPKVHKERTKSLETDMQKITSKVLNSVQEFISKSKIKLVPPTKESPTVPVADNATIENIVNSIYTSVLKHSGSYTSVFKDLMGKSNVLSDTIGFLMVNAISNSEFQPQVEEEVSNSELVLEAVKIMEKVIKIIDELKSKEKSSSRKGLTLDAKLLEEVLALFLAKLIRLPSSSSKDEKNLSKTELNKIASQLSKLVTAEISRSSISLIASDPEEHCLNPENTERIYQVVDSVYSNILQQSGTNKEFYYDIKDTNTAFPKKVASLIIDGVSSFPLIQLTQQFQMLISLES

SEQ ID NO: 22849 - protein, 242 aa, Homo sapiens
SFPGMLVCIYFIILFICGNYILLNVFLAIAVDNLADAESLTSAQKEEEEEKERKKLARTASPEKKQELVEKPAVGESKEEKIELKSITADGESPPATKINMDDLQPNENEDKSPYPNPETTGEEDEEEPEMPVGPRPRPLSELHLKEKAVPMPEASAFFIFSSNNRFRLQCHRIVNDTIFTNLILFFILLSSISLAAEDPVQHTSFRNHVCIACVFCTPSPWGCARPTASVADIIVQSGAQF

SEQ ID NO: 22850 - protein, 336 aa, Homo sapiens
MDCVGWPPGRKWHLEKNTSCGGSSGICASYVTQMADDQGCIEEQGVEDSANEDSVDAKPDRSSFVPSLFSKKKKNVTMRSIKTTRDRVPTYQYNMNFEKLGKCIIINNKNFDKVTGMGVRNGTDKDAEALFKCFRSLGFDVIVYNDCSCAKMQDLLKKASEEDHTNAACFACILLSHGEENVIYGKDGVTPIKDLTAHFRGDRCKTLLEKPKLFFIQACRGTELDDGIQADSGPINDTDANPRYKIPVEADFLFAYSTVPGYYSWRSPGRGSWFVQALCSILEEHGKDLEIMQILTRVNDRVARHFESQSDDPHFHEKKQIPCVVSMLTKELYFSQ

SEQ ID NO: 22851 - protein, 572 aa, Homo sapiens
MEVQLGLGRVYPRPPSKTYRGAFQNLFQSVREVIQNPGPRHPEAASAAPPGASLLLLQQQQQQQQQQQQQQQQQQQQQQQETSPRQQQQQQGEDGSPQAHRRGPTGYLVLDEEQQPSQPQSALECHPERGCVPEPGAAVAASKGLPQQLPAPPDEDDSAAPSTLSLLGPTFPGLSSCSADLKDILSEASTMQLLQQQQQEAVSEGSSSGRAREASGAPTSSKDNYLGGTSTISDNAKELCKAVSVSMGLGVEALEHLSPGEQLRGDCMYAPLLGVPPAVRPTPCAPLAECKGSLLDDSAGKSTEDTAEYSPFKGGYTKGLEGESLGCSGSAAAGSSGTLELPSTLSLYKSGALDEAAAYQSRDYYNFPLALAGPPPPPPPPHPHARIKLENPLDYGSAWAAAAAQCRYGDLASLHGAGAAGPGSGSPSAAASSSWHTLFTAEEGQLYGPCGGGGGGGGGGGGGGGGGGGGGGGEAGAVAPYGYTRPPQGLAGQESDFTAPDVWYPGGMVSRVPYPSPTCVKSEMGPWMDSYSGPYGDMRNTRRKRLWKLIIRSINSCICSPRETEVPVRQQK

SEQ ID NO: 22852 - protein, 476 aa, Homo sapiens
MLEASQDMGRTLEWRPRTPALVRGCHLEGVAGHKEAHILRVLPGHSAGPRTVTVKVELSCAPGDLDAVLILQGPPYVSWLIDANHNMQIWTTGEYSFKIFPEKNIRGFKLPDTPQGLLGEARMLNASIVASFVELPLASIVSLHASSCGGRLQTSPAPIQTTPPKDTCSPELLMSLIQTKCADDAMTLVLKKELVAHLKCTITGLTFWDPSCEAEDRGDKFVLRSAYSSCGMQVSASMISNEAVVNILSSSSPQRKKVHCLNMDSLSFQLGLYLSPHFLQASNTIEPGQQSFVQVRVSPSVSEFLLQLDSCHLDLGPEGGTVELIQGRAAKGNCVSLLSPSPEGDPRFSFLLHFYTVPIPKTGTLSCTVALRPKTGSQDQEVHRTVFMRLNIISPDLSGCTSKGLVLPAVLGITFGAFLIGALLTAALWYIYSHTRSPSKREPVVAVAAPASSESSSTNHSIGSTQSTPCSTSSMA

SEQ ID NO: 22853 - protein, 520 aa, Homo sapiens
MSVSVLSPSRRLGGVSGILQVTSLLILLLLLIKAAQLYLHRQWLLKALQQFPCPPSHWLFGHIQEFQHDQELQRIQERVKTFPSACPYWIWGGKVRVQLYDPDYMKVILGRSDPKSHGSYKFLAPRIGYGLLLLNGQTWFQHRRMLTPAFHNDILKPYVGLMADSVRVMLDKWEELLGQDSPLEVFQHVSLMTLDTIMKSAFSHQGSIQVDRNSQSYIQAISDLNSLVFCCMRNAFHENDTIYSLTSAGRWTHRACQLAHQHTGDQVIQLRKAQLQKEGELEKIKRKRHLDFLDILLLAKMENGSILSDKDLRAEVDTFMFEGHDTTASGISWILYALATHPKHQERCREEIHGLLGDGASITWNHLDQMPYTTMCIKEALRLYPPVPGIGRELSTPVTFPDGRSLPKGIMVLLSIYGLHHNPKVWPNLEVFDPSRFAPGSAQHSHAFLPFSGGSRNCIGKQFAMNQLKVARALTLLRFELLPDPTRIPIPMARLVLKSKNGIHLRLRRLPNPCEDKDQL

SEQ ID NO: 22854 - protein, 536 aa, Homo sapiens
HMAVPFYIPTSNVWSDPVSQHPRQHLVLSVFFILAILNMVSSFRVSELQVLLGFAGRNKSGRKHDLLMRALHLLKSGCSPAVQIKIRELYRRRYPRTLEGLSDLSTIKSSVFSLDGGSSPVEPDLAVAGIHSLPSTSVTPHSPSSPVGSVLLQDTKPTFEMQQPSPPIPPVHPDVQLKNLPFYDVLDVLIKPTSLVQSSIQRFQEKFFIFALTPQQVREICISRDFLPGGRRDYTVQVQLRLCLAETSCPQEDNYPNSLCIKVNGKLFPLPGYAPPPKNGIEQKRPGRPLNITSLVRLSSAVPNQISISWASEIGKNYSMSVYLVRQLTSAMLLQRLKMKGIRNPDHSRALIKEKLTADPDSEIATTSLRVSLMCPLGKMRLTIPCRAVTCTHLQCFDAALYLQMNEKKPTWICPVCDKKAAYESLILDGLFMEILNDCSDVDEIKFQEDGSWCPMRPKKEAMKVSSQPCTKIESSSVLSKPCSVTVASEASKKKVDVIDLTIESSSDEEEDPPAKRKCIFMSETQSSPTKGFVNL

SEQ ID NO: 22855 - protein, 1538 aa, Homo sapiens
MQRTQPRPCYLNAPQQCPGAERPGRPTAGSHSFLLRPGPLAGSSPFALLDPLQAFEQFVWVRSQARAGLLRLRQGSHAVTRCRPLPVRREGRRDGSPWRSVVCRYCRCSRQTGASVTTVSLPSSSSSPGLDPRGPRQASVRSLRSEPVLLFLPFRTPYRDSEEGKREGLSRLRAVCRRAGPRGRGSFSPRDARASPRLHFLVAAVTTGAASRRQRGARVRQPSPSSSRRAKRLRECERRSLHAPPAMDASYDGTEVTVVMEEIEEAYCYTSPGPPKKKKKYKIHGEKTKKPRSAYLLYYYDIYLKVQQELPHLPQSEINKKISESWRLLSVAERSYYLEKAKLEKEGLDPNSKLSALTAVVPDIPGFRKILPRSDYIIIPKSSLQEDRSCPQLELCVAQNQMSPKGPPLVSNTAPETVPSHAGMAEQCLAVEALAEEVGALTQSGAVQEIATSEILSQDVLLEDASLEVGESHQPYQTSLVIEETLVNGSPDLPTGSLAVPHPQVGESVSVVTVMRDSSESSSSAPATQFIMLPLPAYSVVENPTSIKLTTTYTRRGHGTCTSPGCSFTYVTRHKPPKCPTCGNFLGGKWIPKEKPAKVKVELASGVSSKGSVVKRNQQPVTTEQNSSKENASKLTLENSEAVSQLLNVAPPREVGEESEWEEVIISDAHVLVKEAPGNCGTAVTKTPVVKSGVQPEVTLGTTDNDSPGADVPTPSEGTSTSSPLPAPKKPTGADLLTPGSRAPELKGRARGKPSLLAAARPMRAILPAPVNVGRGSSMGLPRARQAFSLSDKTPSVRTCGLKPSTLKQLGQPIQQPSGPGEVKLPSGPSNRTSQVKVVEVKPDMFPPYKYSCTVTLDLGLATSRGRGKCKNPSCSYVYTNRHKPRICPSCGVNLAKDRTEKTTKAIEVSSPLPDVLNATEPLSTAQREIQRQSTLQLLRKVLQIPENESELAEVFALIHELNSSRLILSNVSEETVTIEQTSWSNYYESPSTQCLLCSSPLFKGGQNSLAGPQECWLLTASRLQTVTAQVKMCLNPHCLALHSFIDIYTGLFNVGNKLLVSLDLLFAIRNQIKLGEDPRVSINVVLKSVQEQTEKTLTSEELSQLQELLCNGYWAFECLTVRDYNDMICGICGVAPKVEMAQRSEENVLALKSVEFTWPEFLGSNEVNVEDFWATMETEVIEQVAFPASIPITKFDASVIAPFFPPLMRGAVVVNTEKDKNLDVQPVPGSGSALVRLLQEGTCKLDEIGSYSEEKLQHLLRQCGIPFGAEDSKDQLCFSLLALYESVQNGARAIRPPRHFTGGKIYKVCPHQVVCGSKYLVRGESARDHVDLLASSRHWPPVYVVDMATSVALCADLCYPELTNQMWGRNQGCFSSPTEPPVSVSCPELLDQHYTVDMTETEHSIQHPVTKTATRRIVHAGLQPNPGDPSAGHHSLALCPELAPYATILASIVDSKPNGVRQRPIAFDNATHYYLYNRLMDFLTSREIVNRQIHDIVQSCQPGEVVIRDTLYRLGVAQIKTETEEEGEEEEVAAVAE

SEQ ID NO: 22856 - protein, 1642 aa, Homo sapiens
CPPHSHYEACSYGCPLSCGDLPVPEGCESACREGCVCDAGFVLSGDTCVPVGQCGCLHDDRYYPLGQTFYPGPGCDSLCRCREGGEVSCEPSSCGPHETCRPSGGSLGCVAVGSTTCQASGDPHYTTFDGHRFDFMGTCVYVLAQTCGTRPGLHRFAVLQENVAWGNGRVSVTRVITVQVANFTLRLEQRQWKVTVNGVDMKLPVVLANGQIRASQHGSDVVIETDFGLRVAYDLVYYVRVTVPGNYYQLMCGLCGNYNGDPKDDFQKPNGSQAGNANEFGNSWEEVVSDSPCLPPPTCPPGSEGCIPSEECPPELEKKYQKEEFCGLLSSPTGPLSSCHKLVDPQGPLKDCIFDLCLGGGNLSILCSNIHAYVSACQVAGGHVEPWRNETFCPMECPQNSHYELCADTCSLGCSALSAPLQCPDGCAEGCQCDSGFLYNGQACVPIQQCGCYHNGAYYEPEQTVLIDNCRQQCTCHAGKVVVCQEHSCKPGQVCQPSGGILSCVTKDPCHGVTCRPQETCKEQGGQGVCLPNYEATCWLWGDPHYHSFDGRKFDFQGTCNYVLATTGCPGVSTQGLTPFTVTTKNQNRGNPAVSYVRVVTVAALGTNISIHKDEIGKVRVNGVLTALPVSVADGRISVTQGASKALLVADFGLQVSYDWNWRVDVTLPSSYHGAVCGLCGNMDRNPNNDQVFPNGTLAPSIPIWGGSWRAPGWDPLCWDECRGSCPTCPEDRLEQYEGPGFCGPLAPGTGGPFTTCHAHVPPESFFKGCVLDVCMGGGDRDILCKALASYVAACQAAGVVIEDWRAQVGCEITCPENSHYEVCGPPCPASCPSPAPLTTPAVCEGPCVEGCQCDAGFVLSADRCVPLNNGCGCWANGTYHEAGSEFWADGTCSQWCRCGPGGGSLVCTPASCGLGEVCGLLPSGQHGCQPVSTAECQAWGDPHYVTLDGHRFDFQGTCEYLLSAPCHGPPLGAENFTVTVANEHRGSQAVSYTRSVTLQIYNHSLTLSARWPRKLQVDGVFVTLPFQLDSLLHAHLSGADVVVTTTSGLSLAFDGDSFVRLRVPAAYAGSLCGLCGNYNQDPADDLKAVGGKPAGWQVGGAQGCGECVSKPCPSPCTPEQQESFGGPDACGVISATDGPLAPCHGLVPPAQYFQGCLLDACQVQGHPGGLCPAVATYVAACQAAGAQLREWRRPDFCPFQCPAHSHYELCGDSCPGSCPSLSAPEGCESACREGCVCDAGFVLSGDTCVPVGQCGCLHDDRYYPLGQTFYPGPGCDSLCRCREGGEVSCEPSSCGPHETCRPSGGSLGCVAVGSTTCQASGDPHYTTFDGHRFDFMGTCVYVLAQTCGTRPGLHRFAVLQENVAWGNGRVSVTRVITVQVANFTLRLEQRQWKVTVNGVDMKLPVVLANGQIRASQHGSDVVIETDFGLRVAYDLVYYVRVTVPGNYYQLMCGLCGNYNGDPKDDFQKPNGSQAGNANEFGNSWEEVVPDSPCLPPPTCPPGSAGCIPSDKCPPELEKKYQKEEFCGLLSSPTGPLSSCHKLVDPQGPLKDCIFDLCLGGGNLSILCSNIHAYVSACQAAGGHVEPWRNETFCPMECPQNSHYELCADTCSLGCSALSAPLQCPDGCAEGCQCDSGFLYNG

SEQ ID NO: 22857 - protein, 2366 aa, Homo sapiens [sequence omitted]

SEQ ID NO: 22858 - protein, 1182 aa, Homo sapiens
MPENPATDKLQVLQVLDRLKMKLQEKGDTSQNEKLSMFYETLKSPLFNQILTLQQSIKQLKGQLNHIPSDCSANFDFSRKGLLVFTDGSITNGNVHRPSNNSTVSGLFPWTPKLGNEDFNSVIQQMAQGRQIEYIDIERPSTGGLGFSVVALRSQNLGKVDIFVKDVQPGSVADRDQRLKENDQILAINHTPLDQNISHQQAIALLQQTTGSLRLIVAREPVHTKSSTSSSLNDTTLPETVCWGHVEEVELINDGSGLGFGIVGGKTSGVVVRTIVPGGLADRDGRLQTGDHILKIGGTNVQGMTSEQVAQVLRNCGNSVRMLVARDPAGDISVTPPAPAALPVALPTVASKGPGSDSSLFETYNVELVRKDGQSLGIRIVGYVGTSHTGEASGIYVKSIIPGSAAYHNGHIQVNDKIVAVDGVNIQGFANHDVVEVLRNAGQVVHLTLVRRKTSSSTSPLEPPSDRGTVVEPLKPPALFLTGAVETETNVDGEDEEIKERIDTLKNDNIQALEKLEKVPDSPENELKSRWENLLGPDYEVMVATLDTQIADDAELQKYSKLLPIHTLRLGVEVDSFDGHHYISSIVSGGPVDTLGLLQPEDELLEVNGMQLYGKSRREAVSFLKEVPPPFTLVCCRRLFDDEASVDEPRRTETSLPETEVDHNMDVNTEEDDDGELALWSPEVKIVELVKDCKGLGFSILDYQDPLDPTRSVIVIRSLVADGVAERSGGLLPGDRLVSVNEYCLDNTSLAEAVEILKAVPPGLVHLGICKPLVEDNEEESCYILHSSSNEDKTEFSGTIHDINSSLILEAPKGFRDEPYFKEELVDEPFLDLGKSFHSQQKEIEQSKEAWEMHEFLTPRLQEMDEEREILVDEEYELYQDPSPSMELYPLSHIQEATPVPSVNELHFGTQWLHDNEPSESQEARTGRTVYSQEAQPYGYCPENVMKENFVMESLPSVPSTEGNSQQGRFDDLENLNSLAKTSLDLGMIPNDVQGPSLLIDLPVVAQRREQEDLPLYQHQATRVISKASAYTGMLSSRYATDTCELPEREEGEGEETPNFSHWGPPRIVEIFREPNVSLGISIVGGQTVIKRLKNGEELKGIFIKQVLEDSPAGKTNALKTGDKILEASGVDKELCNQFVSPAEGRKIATWEVCSEPSSCHSTPAWVTEQDSVSKKKKNHEG

SEQ ID NO: 22859 - protein, 418 aa, Homo sapiens
MNENKDTDSKKSEEYEDDFEKDLEWLINENEKSDASIIEMACEKEENINQDLKENETVMEHTKRHSDPDKSLQDEVSPRRNDIISVPGIQPLDPISDSDSENSFQESKLESQKDLEEEEDEEVRRYIMEKIVQANKLLQNQEPVNDKRERKLKFKDQLVDLEVPPLEDTTTFKNYFENERNMFGKLSQLCISNDFGQEDVLLSLTNGSCEENKDRTILVERDGKFELLNLQDIASQGFLPPINNANSTENDPQQLLPRSSNSSVSGTKKEDSTAKIHAVTHSSTGEPLAYIAQPPLNRKTCPSSAVNSDRSKGNGKSNHRTQSAHISPVTSTYCLSPRQKELQKQLEEKREKLKREEERRKIEEEKEKKRENDIVFKAWLQKKREQVLEMRRIQRAKEIEDMNSRVSKTSLKNKFIQI

SEQ ID NO: 22860 - protein, 888 aa, Homo sapiens
MLTEASLSIWGWGSLGIVLFLITFGPFVIFYLTFYILCFVGGGLVVTLLFGKTNSEKYLEQCEHSFLPPTSPGVPKCLEEMKREARTIKIDRRLTGANIIDEPLQQVIQFSLRDYVQYWYYTLSDDESFLLEIRQTLQNALIQFATRSKEIDWQPYFTTRIVDDFGTHLRVFRKAQQKITEKDDQVKGTAEDLVDTFFEVEVEMEKEVCRDLVCTSPKDEEGFLRDLCEVLLYLLLPPGDFQNKIMRYFVREILARGILLPLINQLSDPDYINQYVIWMIRDSNCNYEAFMNIIKLSDNIGELEAVRDKAAEELQYLRSLDTAGDDINTIKNQINSLLFVKKVCDSRIQRLQSGKEINTVKLAANFGKLCTVPLDSILVDNVALQFFMDYMQQTGGQAHLFFWMTVEGYRVTAQQQLEVLLSRQRDGKHQTNQTKGLLRAAAVGIYEQYLSEKASPRVTVDDYLVAKLADTLNHEDPTPEIFDDIQRKVYELMLRDERFYPSFRQNALYVRMLAELDMLKDPSFRGSDDGDGESFNGSPTGSINLSLDDLSNVSSDDSVQLHAYISDTVYADYDPYAVAGVCNDHGKTYALYAITVHRRNLNSEEMWKTYRRYSDFHDFHMRITEQFESLSSILKLPGKKTFNNMDRDFLEKRKKDLNAYLQLLLAPEMMKASPALAHYVYDFLENKAYSKGKGDFARKMDTFVNPLRNSMRNVSNAVKSLPDSLAEGMTKMSDNMGKMSERLGQDIKQSFFKVPPLIPKTDSDPEHRRVSAQLDDNVDDNIPLRVMLLLMDEVFDLKERNQWLRRNIKNLLQQLIRATYGDTINRKIVDHVDWMTSPEQVADSVKRFRDAFWPNGILAEAVPCRDKSIRMRTRVAGKTKLLAIMPGE

SEQ ID NO: 22861 - protein, 932 aa, Homo sapiens
RKAISRAGLQHLAPAHPLSLPVANGPAKEPRATLDWSENAVNGEHLWLETNVSGDLCYLGEENCQVRFAKSALRRKCAVCKIVVHTACIEQLEKINFRCKPTFREGGSRSPRENFVRHHWVHRRRQEGKCKQCGKGFQQKFSFHSKEIVAISCSWCKQAFHNKVTCFMLHHIEEPCSLGAHAAVIVPPTWIIKVKKPQNSLKASNRKKKRTSFKRKASKRGMEQENKGRPFVIKPISSPLMKPLLVFVNPKSGGNQGTKVLQMFMWYLNPRQVFDLSQEGPKDALELYRKVPNLRILACGGDGTVGWILSILDELQLSPQPPVGVLPLGTGNDLARTLNWGGGYTDEPVSKILCQVEDGTVVQLDRWNLHVERNPDLPPEELEDGVCKLPLNVFNNYFSLGFDAHVTLEFHESREANPEKFNSRFRNKMFYAGAAFSDFLQRSSRDLSKHVKVVCDGTDLTPKIQELKFQCIVFLNIPRYCAGTMPWGNPGDHHDFEPQRHDDGYIEVIGFTMASLAALQVGGHGERLHQCREVMLLTYKSIPMQVDGEPCRLAPAMIRISLRNQANMVQKSKRRTSMPLLNDPQSVPDRLRIRVNKISLQDYEGFHYDKEKLREASISDWLRTIAGELVQSFGAIPLGILVVRGDCDLETCRMYIDRLQEDLQSVSSGSQRVHYQDHETSFPRALSAQRLSPRWCFLDDRSQEHLHFVMEISQDEIFILDPDMVVSQPAGTPPGMPDLVVEQASGISDWWNPALRKRMLSDSGLGMIAPYYEDSDLKDLSHSRVLQSPVSSEDHAILQAVIAGDLMKLIESYKNGGSLLIQGPDHCSLLHYAAKTGNGEIVKYILDHGPSELLDMADSETGETALHKAACQRNRAVCQLLVDAGASLRKTDSKGKTPQERAQQAGDPDLAAYLESRQNYKVIGHEDLETAV

SEQ ID NO: 22862 - protein, 426 aa, Homo sapiens
MGKEKTHINIVVIGHVDSGKSTTTGHLIYKCGGIDKRTIEKFEKEAAEMGKGSFKYAWVLDKLKAERERGITIDISLWKFETSKYYVTIIDAPGHRDFIKNMITGTSQADCAVLIVAAGVGEFEAGISKNGQTREHALLAYTLGVKQLIVGVNKMDSTEPPYSQKRYEEIVKEVSTYIKKIGYNPDTVAFVPISGWNGDNMLEPSANMPWFKGWKVTRKDGNASGTTLLEALDCILPPTRPTDKPLRLPLQDVYKIGGIGTVPVPSGDWCSPGMVVTFAPVNVTTEVKSVEMHHEALSEALPGDNVGFNVKNVSVKDVRRGNVAGDSKNDPPMEAAGFTAQVIILNHPGQISAGYAPVLDCHTAHIACKFAELKEKIDRRSGKKLEDGPKFLKSGDAAIVDMVPGKPMCVESFSDYPPLGKSLCCS

SEQ ID NO: 22863 - protein, 258 aa, Homo sapiens
EKRYECNECGKAFNYGSELTLHQRIHTGEKPYECKECGKAFRQRSQLTQHQRLHTGEKPYECKQCGKAFIRGFQLTEHLRLHTGEKPYECKECGKTFRHRSHLTIHQRIHTGEKPYECRECGKAFSYHSSFSHHQKIHSGKKPYECHECGKAFCDGLQLTLHQRIHTGEKPYECKECGKTFRQCSHLKRHQRIHTGEKPHECMICGKAFRLHSHLIQHQRIHTGEKPYECKECGKAFSYHSSFSHHQRIHSDATTAIS

SEQ ID NO: 22864 - protein, 691 aa, Homo sapiens
MEPSTPDTPKESPIVQLVQEEEEEASPSTVTLLGSGEQEDESSPWFESETQIFCSELTTICCISSFSEYIYKWCSVRVALYRQRSRTALSKGKDYLVLAQPPLLLPAESVDVSVLQPLSGELENTNIEREAETVVLGDLSSSMHQDDLVNHTVDAVELEPSHSQTLSQSLLLDITPEINPLPKIEVSESVEYEAGHIPSPVIPQESSVEIDNETEQKSESFSSIEKPSITYETNKVNELMDNIIKEDVNSMQIFTKLSETIVPPINTATVPDNEDGEAKMNIADTAKQTLISVVDSSSLPEVKEEEQSPEDALLRGLQRTATDFYAELQNSTDLGYANGNLVHGSNQKESVFMRLNNRIKALEVNMSLSGRYLEELSQRYRKQMEEMQKAFNKTIVKLQNTSRIAEEQDQRQTEAIQLLQAQLTNMTQLVSNLSATVAELKREVSDRQSYLVISLVLCVVLGLMLCMQRCRNTSQFDGDYISKLPKSNQYPSPKRCFSSYDDMNLKRRTSFPLMRSKSLQLTGKEVDPNDLYIVEPLKFSPEKKKKRCKYKIEKIETIKPEEPLHPIANGDIKGRKPFTNQRDFSNMGEVYHSSYKGPPSEGSSETSSQSEESYFCGISACTSLCNGQSQKTKTEKRALKRRRSKVQDQGKLIKTLIQTKSGSLPSLHDIIKGNKEITVGTFGVTAVSGHI

SEQ ID NO: 22865 - protein, 1406 aa, Homo sapiens
MHQTLCLNPESLKMSACSDFVEHIWKPGSCKNCFCLRSDHQLVAGPPQPRAGSLPPPPRLPPRPENCRLEDEGVNSSPYSKPTIAVKPTMMSSEASDVWTEANLSAEVSQVIWRRAPGKLPLPKQEDAPVVYLGSFRGVQKPAGPSTSPDGNSRCPPAYTMVGLHNLEPRGERNIAFHPVSFPEEKAVHKEKPSFPYQDRPSTQESFRQKLAAFAGTTSGCHQGPGPLRESLPSEDDSDQRCSPSGDSEGGEYCSILDCCPGSPVAKAASQTAGSRGRHGGRDCSPTCWEQGKCSGPAEQEKRGPSFPKECCSQGPTAHPSCLGPKKLSLTSEAAISSDGLSCGSGSGSGSGASSPFVPHLESDYCSLMKEPAPEKQQDPGCPGVTPSRCLGLTGEPQPPAHPREATQPEPIYAESTKRKKAAPVPSKSQAKIEHAAAAQGQGQVCTGNAWAQKAASGWGRDSPDPTPQVSATITVMAAHPEEDHRTIYLSSPDSAVGVQWPRGPVSQNSEVGEEETSAGQGLSSRESHAHSASESKPKERPAIPPKLSKSSPVGSPVSPSAGGPPVSPLADLSDGSSGGSSIGPQPPSQGPADPAPSCRTNGVAISDPSRCPQPAASSASEQRRPRFQAGTWSRQCRIEEEEEVEQELLSHSWGRETKNGPTDHSNSTTWHRLHPTDGSSGQNSKVGTGMSKSASFAFEFPKDRSGIETFSPPPPPPKSRHLLKMNKSSSDLEKVSQGSAESLSPSFRGVHVSFTTGSTDSLASDSRTCSDGGPSSELAHSPTNSGKKLFAPVPFPSGSTEDVSPSGPQQPPPLPQKKIVSRAASSPDGFFWTQGSPKPGTASPKLNLSHSETNVHDESHFSYSLSPGNRHHPVFSSSDPLEKAFKGSGHWLPAAGLAGNRGGCGSPGLQCKGAPSASSSQLSVSSQASTGSTQLQLHGLLSNISSKEGTYAKLGGLYTQSLARLVAKCEDLFMGGQKKELHFNENNWSLFKLTCNKPCCDSGDAIYYCATCSEDPGSTYAVKICKAPEPKTVSYCSPSVPVHFNIQQDCGHFVASVPSSMLSSPDAPKDPVPALPTHPPAQEQDCVVVITREVPHQTASDFVRDSAASHQAEPEAYERRVCFLLLQLCNGLEHLKEHGIIHRDLCLENLLLVHCTLQAGPGPAPAPAPAPAPAAAAPPCSSAAPPAGGTLSPAAGPASPEGPREKQLPRLIISNFLKAKQKPGGTPNLQQKKSQARLAPEIVSASQYRKFDEFQTGILIYELLHQPNPFEVRAQLRERDYRQEDLPPLPALSLYSPGLQQLAHLLLEADPIKRIRIGEAKRVLQCLLWGPRRELVQQPGTSEEALCGTLHNWIDMKRALMMMKFAEKAVDRRRGVELEDWLCCQYLASAEPGALLQSLKLLQLL

SEQ ID NO: 22866 - protein, 970 aa, Homo sapiens
MPGEAVEYHSIQLIRDEFLMNVQKFASNIQRTMQQLEGEIKLEMPIISVEGEVSDLAADPETVDILEQCVINWLNQISTAVEAQLKKTPQGKGPLAEIEFWRERNATLSALHEQTKLPIVRKVLDVIKESDSMLVANLQPVFTELFKFHTEASDNVRFLSTVERYFKNITHGSGFHVVLDTIPAMMSALRMVWIISRHYNKDERMIPLMERIAWEIAERVCRVVNLRTLFKENRASAQSKTLEARNTLRLWKKAYFDTRAKIEASGREDRWEFDRKRLFERTDYMATICQDLSDVLQILEEFYNIFGPELKAVTGDPKRIDDVLCRVDGLVTPMENLTFDPFSIKSSQFWKYVMDEFKIEVLVIEKEAKHFIDESFKTLRSAEAAFDMLLKFKHIRSREAVNRQMMMKFNDILAQYCKEIDIINKIFVQNLENPPLYKNHPPVAGAIYWERSLFFRIKHTILRFQEVQEILDSDRGQEVKQKYLEVGRTMKEYEDRKYEQWMEVTEQVLPALMKKSLLTKSSIATEEPSTLERGAVFAINFSPALREIINETKYLEQLGFTVPELARNVALQEDKFLRYTAGIQRMLDHYHMLIGTLNDAESVLLKDHSQELLRVFRSGYKRLNWNSLGIGDYITGCKQAIGKFESLVHQIHKNADDISSRLTLIEAINLFKYPAAKSEEELPGVKEFFEHIERERASDVDHMVRWYLAIGPLLTKVEGLVVHTNTGKAPKLASYYKYWEKKIYEVLTKLILKNLQSFNSLILGNVPLFHTETILTAPEIILHPNTNEIDKMCFHCVRNCVEITKHFVRWMNGSCIECPPQKGEEEEVVIINFYNDISLNPQIIEQAVMIPQNVHRILINLMKYLQKWKRYRPLWKLDKAIVMEKFAAKKPPCVAYDEKLQFYSKIAYEVMRHPLIKDEHCIRLQLRHLANTVQENAKSWVISLGKLLNESAKEELYNLHEEMEVLNRCV

SEQ ID NO: 22867 - protein, 581 aa, Homo sapiens; identical to SEQ ID NO: 15828

SEQ ID NO: 22868 - protein, 519 aa, Homo sapiens
GLSKSLGLIEGYGGRGKGGLPATLSPAEEEKAKGPHEKYGYNSYLSEKISLDRSIPDYRPTKCKELKYSKDLPQISIIFIFVNEALSVILRSVHSAVNHTPTHLLKEIILVDDNSDEEELKVPLEEYVHKRYPGLVKVVRNQKREGLIRARIEGWKVATGQVTGFFDAHVEFTAGWAEPVLSRIQENRKRVILPSIDNIKQDNFEVQRYENSAHGYSWELWCMYISPPKDWWDAGDPSLPIRTPAMIGCSFVVNRKFFGEIGLLDPGMDVYGGENIELGIKVWLCGGSMEVLPCSRVAHIERKKKPYNSNIGFYTKRNALRVAEVWMDDYKSHVYIAWNLPLENPGIDIGDVSERRALRKSLKCKNFQWYLDHVYPEMRRYNNTVAYGELRNNKAKDVCLDQGPLENHTAILYPCHGWGPQLARYTKEGFLHLGALGTTTLLPDTRCLVDNSKSRLPQLLDCDKVKSSLYKRWNFIQNGAIMNKGTGRCLEVENRGLAGIDLILRSCTGQRWTIKNSIK

SEQ ID NO: 22869 - protein, 691 aa, Homo sapiens
MSEERSLSLLAKAVDPRHPNMMTDVVKLLSAVCIVGEESILEEVLEALTSAGEEKKIDRFFCIVEGLRHNSVQLQVACMQLINALVTSPDDLDFRLHIRNEFMRCGLKEILPNLKCIKNDGLDIQLKVFDEHKEEDLFELSHRLEDIRAELDEAYDVYNMVWSTVKETRAEGYFISILQHLLLIRNDYFIRQQYFKLIDECVSQIVLHRDGMDPDFTYRKRLDLDLTQFVDICIDQAKLEEFEEKASELYKKFEKEFTDHQETQAELQKKEAKINELQAELQAFKSQFGALPADCNIPLPPSKEGGTGHSALPPPPPLPSGGGVPPPPPPPPPPPLPGMRMPFSGPVPPPPPLGFLGGQNSPPLPILPFGLKPKKEFKPEISMRRLNWLKIRPHEMTENCFWIKVNENKYENVDLLCKLENTFCCQQKERREEEDIEEKKSIKKKIKELKFLDSKIAQNLSIFLSSFRVPYEEIRMMILEVDETRLAESMIQNLIKHLPDQEQLNSLSQFKSEYSNLCEPEQFVVVMSNVKRLRPRLSAILFKLQFEEQVNNIKPDIMAVSTACEEIKKSKSFSKLLELVLLMGNYMNAGSRNAQTFGFNLSSLCKLKDTKSADQKTTLLHFLVEICEEKYPDILNFVDDLEPLDKASKGLCLFKKHFMALIFSAKRLKIIPFICMYFPLSHSVFIPNISF

SEQ ID NO: 22870 - protein, 3859 aa, Homo sapiens
MEPEDLPWPGELEEEEEEEEEEEEEEEEAAAAAAANVDDVVVVEEVEEEAGRELDSDSHYGPQHLESIDDEEDEEAKAWLQAHPGRILPPLSPPQHRYSEGERTSLEKIVPLTCHVWQQIVYQGNSRTQISDTNVVCLETTAQRGSGDDQKTESWHCLPQEMDSSQTLDTSQTRFNVRTEDTEVTDFPSLEEGILTQSENQVKEPNRDLFCSPLLVIQDSFASPDLPLLTCLTQDQEFAPDSLFHQSELSFAPLRGIPDKSEDTEWSSRPSEVSEALFQATAEVASDLASSRFSVSQHPLIGSTAVGSQCPFLPSEQGNNEETISSVDELKIPKDCDRYDDLCSYMSWKTRKDTQWPENNLADKDQVSVATSFDITDENIATKRSDHFDAARSYGQYWTQEDSSKQAETYLTKGLQGKVESDVITLDGLNENAVVCSERVAELQRKPTRESEYHSSDLRMLRMSPDTVPKAPKHLKAGDTSKGGIAKVTQSNLKSGITTTPVDSDIGSHLSLSLEDLSQLAVSSPLETTTGQHTDTLNQKTLADTHLTEETLKVTAIPEPADQKTATPTVLSSSHSHRGKPSIFYQQGLPDSHLTEEALKVSAAPGLADQTTGMSTLTSTSYSHREKPGTFYQQELPESNLTEEPLEVSAAPGPVEQKTGIPTVSSTSHSHVEDLLFFYRQTLPDGHLTDQALKVSAVSGPADQKTGTATVLSTPHSHREKPGIFYQQEFADSHQTEETLTKVSATPGPADQKTEIPAVQSSSYSQREKPSILYPQDLADSHLPEEGLKVSAVAGPADQKTGLPTVPSSAYSHREKLLVFYQQALLDSHLPEEALKVSAVSGPADGKTGTPAVTSTSSASSSLGEKPSAFYQQTLPNSHLTEEALKVSIVPGPGDQKTGIPSAPSSFYSHREKPIIFSQQTLPDFLFPEEALKVSAVSVLAAQKTGTPTVSSNSHSHSEKSSVFYQQELPDSDLPRESLKMSAIPGLTDQKTVPTPTVPSGSFSHREKPSIFYQQEWPDSYATEKALKVSTGPGPADQKTEIPAVQSSSYPQREKPSVLYPQVLSDSHLPEESLKVSAFPGPADQMTDTPAVPSTFYSQREKPGIFYQQTLPESHLPKEALKISVAPGLADQKTGTPTVTSTSYSQHREKPSIFHQQALPGTHIPEEAQKVSAVTGPGNQKTWIPRVLSTFYSQREKPGIFYQQTLPGSHIPEEAQKVSPVLGPADQKTGTPTPTSASYSHTEKPGIFYQQVLPDNHPTEEALKISVASEPVDQTTGTPAVTSTSYSQYREKPSIFYQQSLPSSHLTEEAKNVSAVPGPADQKTVIPILPSTFYSHTEKPGVFYQQVLPHSHPTEEALKISVASEPVDQTTGTPTVTSTSYSQHTEKPSIFYQQSLPGSHLTEEAKNVSAVPGPGDRKTGIPTLPSTFYSHTEKPGSFYQQVLPHSHLPEEALEVSVAPGPVDQTIGTPTVTSPSSSFGEKPIVIYKQAFPEGHLPEESLKVSVAPGPVGQTTGAPTITSPSYSQHRAKSGSFYQLALLGSQIPEEALRVSSAPGPADQTTGIPTITSTSYSFGEKPIVNYKQAFPDGHLPEEALKVSIVSGPTEKKTDIPAGPLGSSALGEKPITFYRQALLDSPLNKEVVKVSAAPGPADQKTETLPVHSTSYSNRGKPVIFYQQTLSDSHLPEEALKVPPVPGPDAQKTETPSVSSSLYSYREKPIVFYQQALPDSELTQEALKVSAVPQPADQKTGLSTVTSSFYSHTEKPNISYQQELPDSHLTEEALKVSNVPGPADQKTGVSTVTSTSYSHREKPIVSYQRELPHFTEAGLKILRVPGPADQKTGINILPSNSYPQREHSVISYEQELPDLTEVTLKAIGVPGPADQKTGIQIASSSSYSNREKASIFHQQELPDVTEEALNVFVVPGQGDRKTEIPTVPLSYYSRREKPSVISQQELPDSHLTEEALKVSPVSIPAEQKTGIPIGLSSSYSHSHKEKLKISTVHIPDDQKTEFPAATLSSYSQIEKPKISTVIGPNDQKTPSQTAFHSSYSQTVKPNILFQQQLPDRDQSKGILKISAVPELTDVNTGKPVSLSSSYFHREKSNIFSPQELPGSHVTEDVLKVSTIPGPAGQKTVLPTALPSSFSHREKPDIFYQKDLPDRHLTEDALKISSALGQADQITGLQTVPSGTYSHGENHKLVSEHVQRLIDNLNSSDSSVSSNNVLLNSQADDRVVINKPESAGFRDVGSEEIQDAENSAKTLKEIRTLLMEAENMALKRCNFPAPLARFRDISDISFIQSKKVVCFKEPSSTGVSNGDLLHRQPFTEESPSSRCIQKDIGTQTNLKCRRGIENWEFISSTTVRSPLQEAESKVSMALEETLRQYQAAKSVMRSEPEGCSGTIGNKIIIPMMTVIKSDSSSDASDGNGSCSWDSNLPESLESVSDVLLNFFPYVSPKTSITDSREEEGVSESEDGGGSSVDSLAAHVKNLLQCESSLNHAKEILRNAEEEESRVRAHAWNMKFNLAHDCGYSISELNEDDRRKVEEIKAELFGHGRTTDLSKGLQSPRGMGCKPEAVCSHIIIESHEKGCFRTLTSEHPQLDRHPCAFRSAGPSEMTRGRQNPSSCRAKHVNLSASLDQNNSHFKVWNSLQLKSHSPFQNFIPDEFKISKGLRMPFDEKMDPWLSELVEPAFVPPKEVDFHSSSQMPSPEPMKKFTTSITFSSHRHSKCISNSSVVKVGVTEGSQCTGASVGVFNSHFTEEQNPPRDLKQKTSSPSSFKMHSNSQDKEVTILAEGRRQSQKLPVDFERSFQEEKPLERSDFTGSHSEPSTRANCSNFKEIQISDNHTLISMGRPSSTLGVNRSSSRLGVKEKNVTITPDLPSCIFLEQRELFEQSKAPRADDHVRKHHSPSPQHQDYVAPDLPSCIFLEQRELFEQCKAPYVDHQMRENHSPLPQGQDSIASDLPSPISLEQCQSKAPGVDDQMNKHHFPLPQGQDCVVEKNNQHKPKSHISNINVEAKFNTVVSQSAPNHCTLAASASTPPSNRKALSCVHITLCPKTSSKLDSGTLDERFHSLDAASKARMNSEFNFDLHTVSSRSLEPTSKLLTSKPVAQDQESLGFLGPKSSLDFQVVQPSLPDSNTITQDLKTIPSQNSQIVTSRQIQVNISDFEGHSNPEGTPVFADRLPEKMKTPLSAFSEKLSSDAVTQITTESPEKTLFSSEIFINAEDRGHEIIEPGNQKLRKAPVKFASSSSVQQVTFSRGTDGQPLLLPYKPSGSTKMYYVPQLRQIPPSPDSKSDTTVESSHSGSNDAIAPDFPAQVLGTRDDDLSATVNIKHKEGIYSKRVVTKASLPVGEKPLQNENADASVQVLITGDENLSDKKQQEIHSTRAVTEAAQAKEKESLQKDTADSSAAAAAEHSAQVGDPEMKNLPDTKAITQKEEIHRKKTVPEEAWPNNKESLQINIEESECHSEFENTTRSVFRSAKFYIHHPVHLPSDQDICHESLGKSVFMRHSWKDFFQHHPDKHREHMCLPLPYQNMDKTKTDYTRIKSLSINVNLGNKEVMDTTKSQVRDYPKHNGQISDPQRDQKVTPEQTTQHTVSLNELWNKYRERQRQQRQPELGDRKELSLVDRLDRLAKILQNPITHSLQVSESTHDDSRGERSVKEWSGRQQQRNKLQKKKRFKSLEKSHKNTGELKKSKVLSHHRAGRSNQIKIEQIKFDKYILSKQPGFNYISNTSSDCRPSEESELLTDTTTNILSGTTSTVESDILTQTDREVALHERSSSVSTIDTARLIQAFGHERVCLSPRRIKLYSSITNQQRRYLEKRSKHSKKVLNTGHPLVTSEHTRRRHIQVHGYRFHLAM

SEQ ID NO: 22871 - protein, 446 aa, Homo sapiens [sequence omitted]

SEQ ID NO: 22872 - protein, 103 aa, Homo sapiens [sequence omitted]

SEQ ID NO: 22873 - protein, 442 aa, Homo sapiens
MNASEFRRRGKEMVDYMANYMEGIEGRQVYPDVEPGYLRPLIPAAAPQEPDTFEDIINDVEKIIMPGAASPACTELETVMMDWLGKMLELPKAFLNEKAGEGGGVIQGSASEATLVALLAARTKVIHRLQAASPELTQAAIMEKLVAYSSDQAHSSVERAGLIGGVKLKAIPSDGNFAMRASALQEALERDKAAGLIPFFMVATLGTTTCCSFDNLLEVGPICNKEDIWLHVDAAYAGSAFICPEFRHLLNGVEFADSFNFNPHKWLLVNFDCSAMWVKKRTDLTGAFRLDPTYLKHSHQDSGLITDYRHWQIPLGRRFRSLKMWFVFRMYGVKGLQAYIRKHVQLSHEFESLVRQDPRFEICVEVILGLVCFRLKGSNKVNEALLQRINSAKKIHLVPCHLRDKFVLRFAICSRTVESAHVQRAWEHIKELAADVLRAERE

SEQ ID NO: 22874 - protein, 467 aa, Homo sapiens
MAPKLLLLLCLFSGLHARSRKVEEDEYEDSSSNQKWVLAPKSQDTDVTLILNKLLREYDKKLRPDIGIKPTVIDVDIYVNSIGPVSSINMEYQIDIFFAQTWTDSRLRFNSTMKILTLNSNMVGLIWIPDTIFRNSKTAEAHWITTPNQLLRIWNDGKILYTLRLTINAECQLQLHNFPMDEHSCPLIFSSYGYPKEEMIYRWRKNSVEAADQKSWRLYQFDFMGLRNTTEIVTTSAGDYVVMTIYFELSRRMGYFTIQTYIPCILTVVLSWVSFWIKKDATPARTALGITTVLTMTTLSTIARKSLPRVSYVTAMDLFVTVCFLFVFAALMEYATLNYYSSCRKPTTTKKTTSLLHPDSSRWIPERISLQAPSNYSLLDMRPPPTAMITLNNSVYWQEFEDTCVYECLDGKDCQSFFCCYEECKSGSWRKGRIHIDILELDSYSRVFFPTSFLLFNLVYWVGYLYL

SEQ ID NO: 22875 - protein, 568 aa, Homo sapiens [sequence omitted]

SEQ ID NO: 22876 - protein, 808 aa, Homo sapiens
MGGSCAQRRRAGPRQVLFPLLLPLFYPTLCEPIRYSIPEELAKGSVVGNLAKDLGLSVLDVSARELRVSAEKLHFSVDAQSGDLLVKDRIDREQICKERRRCELQLEAVVENPLNIFHVIVVIEDVNDHAPQFRKDEINLEISESVSLGMGTILESAEDPDISMNSLSKYQLSPNEYFSLVEKDNPDGGKYPELVLQKTLDRETQSAHHLVLTALDGGDPPRSGTAQIRILVIDANDNPPVFSQDVYRVSLREDVPPGTSILRVKATDQDEGINSEITYSFFGVADKAQHVFSLDYTTGNILTQQPLDFEEVERYTINIEAKDRGSLSTRCKVIVEVVDENDNSPEIIITSLSDQIMEDSPPGVVVALFKTRDQDSGENGEVRCSLSRGVPFKIHSSSNNYYKLVTDEALDREQTPEYNVTIAATDRGKPPLSSSKTITLHITDVNDNAPVFGQSAYLVHVPENNQPGASIAQVSASDPDFGLNGRVSYSLIASDLESRTLSSYVSVSAQSGVVFAQRAFDHEQLRTFELTLQARDQGSPALSANVSLRVLVGDRNDNAPRVLYPALGPDGSALFDTVPRAAQPGYLVTKVVAVDADSGHNAWLSYHVVQASEPGLFSLGLRTGEVRMVRALGDKDSVRQRLLVAVRDGGQPPLSATATLHLVFADSLQEVLPDFSDHPTPSDSQAEMQFYLVVALALISVLFLLAVILAIALRLRQSFSPTAGDCFESVLCSKSGPVGPPNYSEGTLPYAYNFCVPGDQMNPEFNFFTSVDHCPATQDNLNKDSMLLASILTPSVEADKKILKQVSI

SEQ ID NO: 22877 - protein, 1419 aa, Homo sapiens
MEGTHCTLQLHKPITELCYISFCLPKGEVRGFSYKGTVTLDRSNKGFHNCYQVREESDIISLSQEPDEHPGDIFFKQTPTKDILTELYKLTTERERLLTNLLSSDHILGITMGNQEGKLQELSVSLAPEDDCFQSAGDWQGELPVGPLNKRSTHGNKKPRRSSGRRESFGALPQKRTKRKGRGGRESAPLMGKDKICSSHSLPLSRTRPNLWVLEEKGNLLPNGALACSLQRRESCPPDIPKTPDTDLGFGSFETAFKDTGLGREVLPPDCSSTEAGGDGIRRPPSGLEHQQTGLSESHQDPEKHPEAEKDEMEKPAKRTCKQKPVSKVVAKVQDLSSQVQRVVKTHSKGKETIAIRPAAHAEFVPKADLLTLPGAEAGAHGSRRQGKERQGDRSSQSPAGETASISSVSASAEGAVNKVPLKVIESEKLDEAPEGKRLGFPVHTSVPHTRPETRNKRRAGLPLGGHKSLFLDLPHKVGPDSSQPRGDKKKPSPPAPAALGKVFNNSASQSSTHKQTSPVPSPLSPRLPSPQQHHRILRLPALPGEREAALNDSPCRKSRVFSGCVSADTLEPPSSAKVTETKGASPAFLRAGQPRLVPGETLEKSLGPGKTTAEPQHQSPPGISSEGFPWDGFNEQTPKDLPNRDGGAWVLGYRAGPACPFLLHEEREKSNRSELYLDLHPDHSLTEQDDRTPGRLQAVWPPPKTKDTEEKVGLKYTEAEYQAAILHLKREHKEEIENLQAQFELRAFHIRGEHAMITARLEETIENLKHELEHRWRGGCEERKDVCISTDDDCPPKTFRNVCVQTDRETFLKPCESESKTTRSNQLVPKKLNISSLSQLSPPNDHKDIHAALQPMEGMASNQQKALPPPPASIPPPPPLPSGLGSLSPAPPMPPVSAGPPLPPPPPPPPPLPPPSSAGPPPPPPPPPLPNSPAPPNPGGPPPAPPPPGLAPPPPPGLFFGLGSSSSQCPRKPAIEPSCPMKPLYWTRIQISDRSQNATPTLWDSLEEPDIRDPSEFEYLFSKDTTQQKKKPLSETYEKKNKVKKIIKLLDGKRSQTVGILISSLHLEMKDIQQAIFNVDDSVVDLETLAALYENRAQEDELVKIRKYYETSKEEELKLLDKPEQFLHELAQIPNFAERAQCIIFRSVFSEGITSLHRKVEIITRASKDLLHVKSVKDILALILAFGNYMNGGNRTRGQADGYSLEILPKLKDVKSRDNGINLVDYVVKYYLRYYDQEAGTEKSVFPLPEPQDFFLASQVKFEDLIKDLRKLKRQLEASEKQMVVVCKESPKEYLQPFKDKLEEFFQKAKKEHKMEESHLENAQKSFETTVRYFGMKPKSGEKEITPSYVFMVWYEFCSDFKTIWKRESKNISKERLKMAQESVSKLTSEKKVETKKINPTASLKERLRQKEASVTTN

SEQ ID NO: 22878 - protein, 820 aa, Homo sapiens
MGGSCAQRRRAGPRQVLFPLLLPLFYPTLSEPIRYSIPEELAKGSVVGNLAKDLGLSVLDVSARKLRVSAEKLHFSVDAESGDLLVKNRIDREQICKERRRCELQLEAVVENPLNIFHVIVVIEDVNDHAPQFDKKEIHLEIFESASAGTRLSLDPATDPDININSIKDYKINSNPYFSLMVRVNSDGGKYPELSLEKLLDREEQRSHSLILTALDGGDPPRSATAHIEISVKDTNDNPPVFSRDEYRISLSENLPPGSPVLQVTATDQDEGVNAEINYYFRSTAQSTKHMFSLDEKTGMIKNNQSFDFEDVERYTMEVEAKDGGGLSTQCKVIIEILDENDNSPEIIITSLSDQILENSPPGMVVALFKTRDLDFGGNGEVRCNIETDIPFKIYSSSNNYYKLVTDGALDREQTPEYNVTIVATDRGKPPLSSSRSITLYVADINDNAPVFDQTSYVVHVAENNPPGASIAQVSASDPDLGLNGHISYSIVASDLEPLAVSSYVSVSAQSGVVFAQRAFDHEQLRAFALTLQARDHGSPTLSANVSLRVLVGDRNDNAPRVLYPALGPDGSAFFDMVPRSAEPGYLVTKVVAVDADSGHNAWLSYHVLQASEPGLFSLGLRTGEVRTARALGDRDAARQRLLVAVRDGGQPPLSATATLHLVFADNLQEILPDLSDRPVLSDPQAELQFYLVVALALISVLFLLAVILAIALRLRRSLSPATWDCFHPGLCVKSGPVVPPNYSEGTLPYSYNLCIAHTGTKEFNFLKCSVPLHSNEDMVCSVSPGALIPPHGGEDLTSHPETLTSVSFSFLCVIYLIVY

SEQ ID NO: 22879 - protein, 254 aa, Homo sapiens [sequence omitted]

SEQ ID NO: 22880 - protein, 85 aa, Homo sapiens
MARRHCFSYWLLVCWLVVTVAEGQEEVFTPPGDSQNNADATDCQIFTLTPPPAPRSPVTRAQPITKTPRYFPRRRLQRGSSSEES

SEQ ID NO: 22881 - protein, 807 aa, Homo sapiens
MLSSWQGGPRPRQLLLWLLILAAWETGSGQLHYSVPEEAKHGTFVGRIAQDLGLELAELVPRLFRVASKRHGDLLEVNLQNGILFVNSRIDREELCGRSAECSIHLEVIVDRPLQVFHVEVKVRDINDNPPIFPESKKRIIIAESRPPETRFPLDGASDADIGVNSALTYRLDPNDYFTLDAQNSLEQMSSLSLVLRKTLDREEIQEHSLLLTASDGGKPELTGTVQLLITILDVNDNAPEFYQSVYKVTVLENAFNGTLVIKLNATDPDDGTNGDIVYSFRRPVWPAVVYAFTINPNNGEIRTKGKLDFEEKKLYEISVEAVDKGNIPMAGHCTLLVEVLDVNDNAPEVTITSLSLPIREDTQPSAIIALISVSDRDSGSNGQVTCTLTPHVPFKLVSTYKNYYSLVLDSALDRESVSAYELVVTARDGGSPSLWATASVSVGVADVNDNAPAFAQPEYTVFVKENNPPGCHIFTVSAQDADAQENALVSYSLVERRVGERALSSYVSVHAESGKVYALQPLDHEELELLQFQVSARDSGVPPLGSNVTLQVFVLDENDNAPALLTPGAGSAGGTVSELMPRSVGAGHVVAKVRAVDADSGYNAWLSYELQLAAVGARIPFRVGLYTGEISTTRPLDEVDAPHHRLLVLVKDHGEPALTATATVLLSLVESGQAPQASSRASAGAVGPEAALVDVNVYLIIAICAVSSLLVLTLLLYTALRCSAPPTEGACAPGKPTLVCSSAAGSWSYSQQRRPRVCSGEGPHKTDLMAFSPSLPPCLGSAEGTGQREEDSECLKEVSLYFKKLS

SEQ ID NO: 22882 - protein, 238 aa, Homo sapiens
MSKAAPAKKPVAVAPAPGCTLDINDPQVQSAAIRIQASYRGHRSRKELREKGPPRVLEPLKDVVLIEGSAAKLTCRISAFPDPFIRWSKDGKELRDGPKYRYVFEDPDVVALVVRDGELADLGQYSINVTNPFGQCSDSARILVEVPTKIQKGPDNTKARKGTTVTLTAEILGEPAPDVGWTKDGEDIEEDDRVFFEIGSTTTTLTIRRATPQDSGKYEVYVENSLGMDQSFARVDVA

SEQ ID NO: 22883 - protein, 767 aa, Homo sapiens
MDISTRSKDPGSAERTAQKRKFPSPPHSSNGHSPQDTSTSPIKKKKKPGLLNSNNKEQDGRNDFYCWVCHREGQVLCCELCPRVYHAKCLRLTSEPEGDWFCPECEKITVAECIETQSKAMTMLTIEQLSYLLKFAIQKMKQPGTDAFQKPVPLEQHPDYAEYIFHPMDLCTLEKNAKKKMYGCTEAFLADAKWILHNCIIYNGGNHKLTQIAKVVIKICEHEMNEIEVCPECYLAACQKRDNWFCEPCSNPHPLVWAKLKGFPFWPAKALRDKDGQVDARFFGQHDRAWVPINNCYLMSKEIPFSVKKTKSIFNSAMQEMEVYVENIRRKFGVFNYSPFRTPYTPNSQYQMLLDPTNPSAGTAKIDKQEKVKLNFDMTASPKILMSKPVLSGGTGRRISLSDMPRSPMSTNSSVHTGSDVEQDAEKKATSSHFSASEESMDFLDKSTASPASTKTGQAGSLSGSPKPFSPQLSAPITTKTDKTSTTGSILNLNLDRSKAEMDLKELSESVQQQSTPVPLISPKRQIRSRFQLNLDKTIESCKAQLGINEISEDVYTAVEHSDSEDSEKSDSSDSEYISDDEQKSKNEPEDTEDKEGCQMDKEPSAVKKKPKPTNPVEIKEELKSTSPASEKADPGAVKDKASPEPEKDFSEKAKPSPHPIKDKLKGKDETDSPTVHLGLDSDSESELTIPGVINPVGAAVMRRGDRHVPITTPVPARRASSRKSLGWTPSGTSSESGHKPPTPLGEKPRRQEKKKQQRQENSHFQT

SEQ ID NO: 22884 - protein, 143 aa, Homo sapiens
SQPRIFRIKLGNQWFSFPEPEALVGKLNRLSGNKAGQVWAPEGSTAFKCLLSARLCAALLSNISDCDETFNYWEPTHYLIYGEGFQTWEYSPAYAIRSYAYLLLHAWPAAFHARILQTNKILVFYFLRCLLAFVSCICELYFY

SEQ ID NO: 22885 - protein, 293 aa, Homo sapiens
MASNVTNKMDPHSVNSRVFIGNLNTLVVKKSDVEAIFSKYGKIAGCSVHKGFAFVQYDKEKNARAAVAGEDGRMIASQVAVINLAAEPKVNRGNAGVKRSAAEMYGSSFDLDYGFQRDYYDGMYSFPARVPPPPPIALAVVPSKRQRISGNTSRRGKSGFNSKSGKRGSSKSGKLKGDDLQAIKQELTQIKQKVDSLLENLEKIEKEQSKQEVEVKNAKSEEEQSSSSMKKDETHVKMESEGGAEDSAEEGDPLDDDDNEDQGDNQLHLIKNNEKDAEEGEDNRDSTNGQDDS

SEQ ID NO: 22886 - protein, 1251 aa, Homo sapiens [sequence omitted]

SEQ ID NO: 22887 - protein, 1082 aa, Homo sapiens
MSAAPAYSEDKGGSAGPGEPEYGHDPASGGIFSSDYKRHDDLKEMLDTNKDSLKLEAMKRIVAMIARGKNASDLFPAVVKNVACKNIEVKKLVYVYLVRYAEEQQDLALLSISTFQRGLKDPNQLIRASALRVLSSIRVPIIVPIMMLAIKEAASDMSPYVRKTAAHAIPKLYSLDSDQKDQLIEVIEKLLADKTTLVAGSVVMAFEEVCPERIDLIHKNYRKLCNLLIDVEEWGQVVIISMLTRYARTQFLSPTQNESLLEENAEKAFYGSEEDEAKGAGSEETAAAAAPSRKPYVMDPDHRLLLRNTKPLLQSRSAAVVMAVAQLYFHLAPKAEVGVIAKALVRLLRSHSEVQYVVLQNVATMSIKRRGMFEPYLKSFYIRSTDPTQIKILKLEVLTNLANETNIPTVLREFQTYIRSMDKDFVAATIQAIGRCATNIGRVRDTCLNGLVQLLSNRDELVVAESVVVIKKLLQMQPAQHGEIIKHLAKLTDNIQVPMARASILWLIGEYCEHVPRIAPDVLRKMAKSFTAEEDIVKLQVINLAAKLYLTNSKQTKLLTQYVLSLAKYDQNYDIRDRARFTRQLIVPSEQGGALSRHAKKLFLAPKPAPVLESSFKDRDHFQLGSLSHLLNAKATGYQELPDWPEEAPDPSVRNVEVPEWTKCSNREKRKEKEKPFYSDSEGESGPTESADSDPESESESDSKSSSESGSGESSSESDNEDQDEDEEKGRGSESEQSEEDGKRKTKKKVPERKGEASSSDEGSDSSSSSSESEMTSESEEEQLEPASWSRKTPPSSKSAPATKEISLLDLEDFTPPSVQPVSPPAIVSTSLAADLEGLTLTDSTLVPSLLSPVSGVGRQELLHRVAGEGLAVDYTFSRQPFSGDPHMVSVHIHFSNSSDTPIKGLHVGTPKLPAGISIQEFPEIESLAPGESATAVMGINFCDSTQAANFQLCTQTRQFYVSIQPPVGELMAPVFMSENEFKKEQGKLMGMNEITEKLMLPDTCRSDHIVVQKVTATANLGRVPCGTSDEYRFAGRTLTGGSLVLLTLDARPAGAAQLTVNSEKMVIGTMLVKDVIQALTQ

SEQ ID NO: 22888 - protein, 884 aa, Homo sapiens [sequence omitted]

SEQ ID NO: 22889 - protein, 820 aa, Homo sapiens
MSKKGRNKGEKPEALIVALQAANEDLRTKLTDIQIELHQEKSKVSKLEREKTQEAKRIRELEQRKHTVLVTELKAKLHEEKMKELQAVRENLIKQHEQEMSRTVKVRDGEIQRLKSALCALRDGSSDKVRTALTIEAREEARKLFDTERLKLLQEIADLKTAKKQVDEALSNMIQADKIKAGDLRSEHQSHQEAISKIKWESERDIRRLMDEIKAKDRIIFSLEKELETQTGYVQKLQLQKEALDEQLFLVKEAECNMSSPKREIPGRAGDGSEHCSSPDLRRNQKRIAELNATIRKLEDRNTLLGDERNELLKRVRETEKQCKPLLERNKCLAKRNDELMVSLQRMEEKLKAVTKENSEMREKITSHPPLKKLKSLNDLDQANEEQETEFLKLQVIEQQNIIDELTRDREKLIRRRKHRRSSKPIKRPVLDPFIGYDEDSMDSETSSMASFRTDRTPATPDDDLDESLAAEESELRFRQLTKEYQALQRAYALLQEQTGGIIDAEREAKAQEQLQAEVLRYKAKIEDLEATLAQKGQDSHWVEDKQLFIKRNQELLEKIEKQEAENHRLQQELQDARDQNELLEFRNLELEERERRSPPFNLQIHPFSDGVSALQIYCMKEGVKDVNIPDLIKQLDILGDNGNLRNEEQVAIIQASTVLSLAEKWIQQIEGAEAALHQKMMELESDMEQFCKIKGYLEEELDYRKQALDQAYMRIQELEATLYNALQQETVIKFGELLSEKQQEELRTAVEKLRRQMLRKSREYDCQILQERMELLQQAHQRIRDLEDKTDIQKRQIKDLEEKFLFLFLFFSLAFILWP

SEQ ID NO: 22890 - protein, 646 aa, Homo sapiens
MAEKALEAVGCGLGPGAVAMAVTLEDGAEPPVLTTHLKKVENHITEAQRFSHLPKRSAVDIEFVELSYSVREGPCWRKRGYKTLLKCLSGKFCRRELIGIMGPSGAGKSTFMNILAGYRESGMKGQILVNGRPRELRTFRKMSCYIMQDDMLLPHLTVLEAMMVSANLKLSEKQEVKKELVTEILTALGLMSCSHTRTALLSGGQRKRLAIALELVNNPPVMFFDEPTSGLDSASCFQVVSLMKSLAQGGRTIICTIHQPSAKLFEMFDKLYILSQGQCIFKGVVTNLIPYLKGLGLHCPTYHNPADFIIEVASGEYGDLNPMLFRAVQNGLCAMAEKKSSPEKNEVPAPCPPCPPEVDPIESHTFATSTLTQFCILFKRTFLSILRDTVLTHLRFMSHVVIGVLIGLLYLHIGDDASKVFNNTGCLFFSMLFLMFAALMPTVLTFPLEMAVFMREHLNYWYSLKAYYLAKTMADVPFQVVCPVVYCSIVYWMTGQPAETSRFLLFSALATATALVAQSLGLLIGAASNSLQVATFVGPVTAIPVLLFSGFFVSFKTIPTYLQWSSYLSYVRYGFEGVILTIYGMERGDLTCLEERCPFREPQSILRALDVEDAKLYMDFLVLGIFFLALRLLAYLVLRYRVKSER

SEQ ID NO: 22891 - protein, 322 aa, Homo sapiens
MCPVDKAHRNQCQACRLKKCLQAGMNQDAVQNERQPRSTAQVHLDSMESNTESRPESLVAPPAPAGRSPRGPTPMSAARALGHHFMASLITAETCAKLEPEDADENIDVTSNDPEFPSSPYSSSSPCGLDSIHETSARLLFMAVKWAKNLPVFSSLPFRDQVILLEEAWSELFLLGAIQWSLPLDSCPLLAPPEASAAGGAQGRLTLASMETRVLQETISRFRALAVDPTEFACMKALVLFKPETRGLKDPEHVEALQDQSQVMLSQHSKAHHPSQPVRFGKLLLLLPSLRFITAERIELLFFRKTIGNTPMEKLLCDMFKN

SEQ ID NO: 22892 - protein, 609 aa, Homo sapiens
MELGCWTQLGLTFLQLLLISSLPREYTVINEACPGAEWNIMCRECCEYDQIECVCPGKREVVGYTIPCCRNEENECDSCLIHPGCTIFENCKSCRNGSWGGTLDDFYVKGFYCAECRAGWYGGDCMPCSSSPCFHDGTCVLDKAGSYKCACLAGYTGQRCENLLEERNCSDPGGPVNGYQKITGGPGLINGRHAKIGTVVSFFCNNSYVLSGNEKRTCQQNGEWSGKQPICIKACREPKISDLVRRRVLPMQVQSRETPLHQLYSAAFSKQKLQSAPTKKPALPFGDLPMGYQHLHTQLQYECISPFYRRLGSSRRTCLRTGKWSGRAPSCIPICGKIENITAPKTQGLRWPWQAAIYRRTSGVHDGSLHKGAWFLVCSGALVNERTVVVAAHCVTDLGKVTMIKTADLKVVLGKFYRDDDRDEKTIQSLQISAIILHPNYDPILLDADIAILKLLDKARISTRVQPICLAASRDLSTSFQESHITVAGWNVLADVRSPGFKNDTLRSGVVSVVDSLLCEEQHEDHGIPVSVTDNMFCASWEPTAPSDICTAETGGIAAVSFPGRASPEPRWHLMGLVSWSYDKTCSHRLSTAFTKVLPFKDWIERNMK

SEQ ID NO: 22893 - protein, 1610 aa, Homo sapiens
MSLLCVRVKRAKFQGSPDKFNTYVTLKVQNVKSTTVAVRGDQPSWEQDFMFEISRLDLGLSVEVWNKGLIWDTMVGTVWIALKTIRQSDEEGPGEWSTLEAETLMKDDEICGTRNPTPHKILLDTRFELPFDIPEEEARYWTYKWEQINALGADNEYSSQEESQRKPLPTAAAQCSFEDPDSAVDDRDSDYRSETSNSFPPPYHTASQPNASVHQFPVPVRSPQQLLLQGSSRDSCNDSMQSYDLDYPERRAISPTSSSRYGSSCNVSQGSSQLSELDQYHEQDDDHRETDSIHSCHSSHSLSRDGQAGFGEQEKPLEVTGQAEKEAACEPKEMKEDATTHPPPDLVLQKDHFLGPQESFPEENASSPFTQARAHWIRAVTKVRLQLQEIPDDGDPSLPQWLPEGPAGGLYGIDSMPDLRRKKPLPLVSDLSLVQSRKAGITSAMATRTSLKDEELKSHVYKKTLQALIYPISCTTPHNFEVWTATTPTYCYECEGLLWGIARQGMRCSECGVKCHEKCQDLLNADCLQRAAEKSCKHGAEDRTQNIIMAMKDRMKIRERNKPEIFEVIRDVFTVNKAAHVQQMKTVKQSVLDGTSKWSAKITITVVCAQGLQAKDKTGSSDPYVTVQVSKTKKRTKTIFGNLNPVWEEKFHFECHNSSDRIKVRVWDEDDDIKSRVKQRLKRESDDFLGQTIIEVRTLSGEMDVWYNLEKRTDKSAVSGAIRLQISVEIKGEEKVAPYHVQYTCLHENLFHYLTDIQGSGGVRIPEARGDDAWKVYFDETAQEIVDEFAMRYGIESIYQAMTHFACLSSKYMCPGVPAVMSTLLANINAYYAHTTASTNVSASDRFAASNFGKERFVKLLDQLHNSLRIDLSTYRNNFPAGSPERLQDLKSTVDLLTSITFFRMKVQELQSPPRASQVVKDCVKACLNSTYEYIFNNCHDLYSRQYQLKQELPPEEQGPSIRNLDFWPKLITLIVSIIEEDKNSYTPVLNQFPQELNVGKVSAEVMWHLFAQDMKYALEEHEKDHLCKSADYMNLHFKVKWLHNEYVRDLPVLQGQVPEYPAWFEQFVLQWLDENEDVSLEFLRGALERDKKDGFQQTSEHALFSCSVVDVFTQLNQSFEIIRKLECPDPSILAHYMRRFAKTIGKVLMQYADILSKDFPAYCTKEKLPCILMNNVQQLRVQLEKMFEAMGGKELDLEAADSLKELQVKLNTVLDELSMVFGNSFQVRIDECVRQMADILGQVRGTGNASPDARASAAQDADSVLRPLMDFLDGNLTLFATVCEKTVLKRVLKELWRVVMNTMERMIVLPPLTDQTGTQLIFTAAKELSHLSKLKDHMVREETRNLTPKQCAVLDLALDTIKQYFHAGGNGLKKTFLEKSPDLQSLRYALSLYTQTTDTLIKTFVRSQTTQVHDGKGIRFTANEDIRPEKGSGVDDPVGEVSIQVDLFTHPGTGEHKVTVKVVAANDLKWQTAGMFRPFVEVTMVGPHQSDKKRKFTTKSKSNNWAPKYNETFHFLLGNEEGPESYELQICVKDYCFAREDRVLGLAVMPLRDVTAKGSCACWCPLGRKIHMDETGLTILRILSQRSNDEVAREFVKLKSESRSTEEGS

SEQ ID NO: 22894 - protein, 829 aa, Homo sapiens
MTNCLSFRNGRGLALLCALLGTLCETGSGQIRYSVSEELDKGSFVGNIANDLGLEPRELAERGVRIVSRGRTQLFSLNPQSGSLVTAERIDREELCAQIPLCLVKINILVEDKLKIFEVEIEIKDINDNAPNFPTEELEIKIGELTVPGTRFPIKTAFDPDVGINSLQNYKLSPNDYFSLAVNSVSEGAKYPELVLERALDREKKEIHQLVLVASDGGDPVHSGNLHIQVIVLDANDNPPMFTQPEYRVSVWENVPVGTRLLTVNATDPDEGFNAQVSYILDKMPGKIAEIFHLNSVSGEVSILKSLDYEDAMFYEIKIEAQDGPGLLSRAKILVTVLDVNDNAPEITITSLTSSVPEEGTVGREIALIDVHDRDSGQNGQVEVFVLGNLPFKLEKSIDQYYRLVTATSLDREQISEYNISLRASDGGSPPLSTETHITLHVIDINDNPPTFPHLSYSAYIPENNPRGASIFSVTAQDPDSNNNARITYALTEDTLQGAPLSSFVSINSNTGVLYALRSFDYEQFRDLKLLVTASDSGNPPLSSNVSLNLFVLDQNDNAPEILYPALPTDGSTGVELAPRSAEPGYLVTKVVAVDRDSGQNAWLSYRLLKASEPGLFSVGLHTGEVRTARALLDRDALKQSLVVAVQDHGQPPLSATVTLTVAVADRIPDILADLGSLEPSAKPNDSDLTLYLVVAVAAVSCVFLAFVIVLLALRLRRWHKSRLLQASGGGLASTPGSHFVGADGVRAFLQTYSHEVSLTADSRKSHLIFPQPNYADTLISQESCEKSEPLLITQDLLEMKGDSNLLQVSLFISLIIKNKYENVVIIKL

SEQ ID NO: 22895 - protein, 3680 aa, Homo sapiens
MSEVSSDEREDVQKKTFTKWVNAQFSKFGKQHIENLFSDLQDGRRLLDLLEGLTGQKLPKEKGSTRVHALNNVNKALRVLQNNNVDLVNIGSTDIVDGNHKLTLGLIWNIILHWQVKNVMKNIMAGLQQTNSEKILLSWVRQSTRNYPQVNVINFTTSWSDGLALNALIHSHRPDLFDWNSVVCQQSATQRLEHAFNIARYQLGIEKLLDPEDVDTTYPDKKSILMYITSLFQVLPQQVSIEAIQEVEMLPRPPKVTKEEHFQLHHQMHYSQQITVSLAQGYERTSSPKPRFKSYAYTQAAYVTTSDPTRSPFPSQHLEAPEDKSFGSSLMESEVNLDRYQTALEEVLSWLLSAEDTLQAQGEISNDVEVVKDQFHTHEGYMMDLTAHQGRVGNILQLGSKLIGTGKLSEDEETEVQEQMNLLNSRWECLRVASMEKQSNLHRVLMDLQNQKLKELNDWLTKTEERTRKMEEEPLGPDLEDLKRQVQQHKVLQEDLEQEQVRVNSLTHMVVVVDESSGDHATAALEEQLKVLGDRWANICRWTEDRWVLLQDILLKWQRLTEEQCLFSAWLSEKEDAVNKIHTTGFKDQNEMLSSLQKLAVLKADLEKKKQSMGKLYSLKQDLLSTLKNKSVTQKTEAWLDNFARCWDNLVQKLEKSTAQISQAVTTTQPSLTQTTVMETVTTVTTREQILVKHAQEELPPPPPQKKRQITVDSEIRKRLDVDITELHSWITRSEAVLQSPEFAIFRKEGNFSDLKEKVNAIEREKAEKFRKLQDASRSAQALVEQMVNEGVNADSIKQASEQLNSRWIEFCQLLSERLNWLEYQNNIIAFYNQLQQLEQMTTTAENWLKIQPTTPSEPTAIKSQLKICKDEVNRLSDLQPQIERLKIQSIALKEKGQGPMFLDADFVAFTNHFKQVFSDVQAREKELQTIFDTLPPMRYQETMSAIRTWVQQSETKLSIPQLSVTDYEIMEQRLGELQALQSSLQEQQSGLYYLSTTVKEMSKKAPSEISRKYQSEFEEIEGRWKKLSSQLVEHCQKLEEQMNKLRKIQNHIQTLKKWMAEVDVFLKEEWPALGDSEILKKQLKQCRLLVSDIQTIQPSLNSVNEGGQKIKNEAEPEFASRLETELKELNTQWDHMCQQVYARKEALKGGLEKTVSLQKDLSEMHEWMTQAEEEYLERDFEYKTPDELQKAVEEMKRAKEEAQQKEAKVKLLTESVNSVIAQAPPVAQEALKKELETLTTNYQWLCTRLNGKCKTLEEVWACWHELLSYLEKANKWLNEVEFKLKTTENIPGGAEEISEVLDSLENLMRHSEDNPNQIRILAQTLTDGGVMDELINEELETFNSRWRELHEEAVRRQKLLEQSIQSAQETEKSLHLIQESLTFIDKQLAAYIADKVDAAQMPQEAQKIQSDLTSHEISLEEMKKHNQGKEAAQRVLSQIDVAQKKLQDVSMKFRLFQKPANFEQRLQESKMILDEVKMHLPALETKSVEQEVVQSQLNHCVNLYKSLSEVKSEVEMVIKTGRQIVQKKQTENPKELDERVTALKLHYNELGAKVTERKQQLEKCLKLSRKMRKEMNVLTEWLAATDMELTKRSAVEGMPSNLDSEVAWGKATQKEIEKQKVHLKSITEVGEALKTVLGKKETLVEDKLSLLNSNWIAVTSRAEEWLNLLLEYQKHMETFDQNVDHITKWIIQADTLLDESEKKKPQQKEDVLKRLKAELNDIRPKVDSTRDQAANLMANRGDHCRKLVEPQISELNHRFAAISHRIKTGKASIPLKELEQFNSDIQKLLEPLEAEIQQGVNLKEEDFNKDMNEDNEGTVKELLQRGDNLQQRITDERKREEIKIKQQLLQTKHNALKDLRSQRRKKALEISHQWYQYKRQADDLLKCLDDIEKKLASLPEPRDERKIKEIDRELQKKKEELNAVRRQAEGLSEDGAAMAVEPTQIQLSKRWREIESKFAQFRRLNFAQIHTVREETMMVMTEDMPLEISYVPSTYLTEITHVSQALLEVEQLLNAPDLCAKDFEDLFKQEESLKNIKDSLQQSSGRIDIIHSKKTAALQSATPVERVKLQEALSQLDFQWEKVNKMYKDRQGRFDRSVEKWRRFHYDIKIFNQWLTEAEQFLRKTQIPENWEHAKYKWYLKVSLFVFSKHTFCLQRQKTGEEIIQQSSKTDASILQEKLGSLNLRWQEVCKQLSDRKKRLEEQKNILSEFQRDLNEFVLWLEEADNIASIPLEPGKEQQLKEKLEQVKLLVEELPLRQGILKQLNETGGPVLVSAPISPEEQDKLENKLKQTNLQWIKVSRALPEKQGEIEAQIKDLGQLEKKLEDLEEQLNHLLLWLSPIRNQLEIYNQPNQEGPFDVKETEIAVQAKQPDVEEILSKGQHLYKEKPATQPVKRKLEDLSSEWKAVNRLLQELRAKQPDLAPGLTTIGASPTQTVTLVTQPVVTKETAISKLEMPSSLMLEVPALADFNRAWTELTDWLSLLDQVIKSQRVMVGDLEDINEMIIKQKATMQDLEQRRPQLEELITAAQNLKNKTSNQEARTIITDRIERIQNQWDEVQEHLQNRRQQLNEMLKDSTQWLEAKEEAEQVLGQARAKLESWKEGPYTVDAIQKKITETKQLAKDLRQWQTNVDVANDLALKLLRDYSADDTRKVHMITENINASWRSIHKRVSEREAALEETHRLLQQFPLDLEKFLAWLTEAETTANVLQDATRKERLLEDSKGVKELMKQWQDLQGEIEAHTDVYHNLDENSQKILRSLEGSDDAVLLQRRLDNMNFKWSELRKKSLNIRSHLEASSDQWKRLHLSLQELLVWLQLKDDELSRQAPIGGDFPAVQKQNDVHRAFKRELKTKEPVIMSTLETVRIFLTEQPLEGLEKLYQEPRELPPEERAQNVTRLLRKQAEEVNTEWEKLNLHSADWQRKIDETLERLRELQEATDELDLKLRQAEVIKGSWQPVGDLLIDSLQDHLEKVKALRGEIAPLKENVSHVNDLARQLTTLGIQLSPYNLSTLEDLNTRWKLLQVAVEDRVRQLHEAHRDFGPASQHFLSTSVQGPWERAISPNKVPYYINHETQTTCWDHPKMTELYQSLADLNNVRFSAYRTAMKLRRLQKALCLDLLSLSAACDALDQHNLKQNDQPMDILQIINCLTTIYDRLEQEHNNLVNVPLCVDMCLNWLLNVYDTGRTGRIRVLSFKTGIISLCKAHLEDKYRYLFKQVASSTGFCDQRRLGLLLHDSIQIPRQLGEVASFGGSNIEPSVRSCFQFANNKPEIEAALFLDWMRLEPQSMVWLPVLHRVAAAETAKHQAKCNICKECPIIGFRYRSLKHFNYDICQSCFFSGRVAKGHKMHYPMVEYCTPTTSGEDVRDFAKVLKNKFRTKRYFAKHPRMGYLPVQTVLEGDNMETPVTLINFWPVDSAPASSPQLSHDDTHSRIEHYASRLAEMENSNGSYLNDSISPNESIDDEHLLIQHYCQSLNQDSPLSQPRSPAQILISLESEERGELERILADLEEENRNLQAEYDRLKQQHEHKGLSPLPSPPEMMPTSPQSPRDAELIAEAKLLRQHKGRLEARMQILEDHNKQLESQLHRLRQLLEQPQAEAKVNGTTVSSPSTSLQRSDSSQPMLLRVVGSQTSDSMGEEDLLSPPQDTSTGLEEVMEQLNNSFPSSRGRNTPGKPMREDTM

SEQ ID NO: 22896 - protein, 503 aa, Homo sapiens
MDLIPNLAVETWLLLAVSLILLYLYGTRTHGLFKKLGIPGPTPLPFLGNALSFRKGYWTFDMECYKKYRKVWGIYDCQQPMLAITDPDMIKTVLVKECYSVFTNRRPFGPVGFMKNAISIAEDEEWKRIRSLLSPTFTSGKLKEMVPIIAQYGDVLVRNLRREAETGKPVTLKHVFGAYSMDVITSTSFGVSIDSLNNPQDPFVENTKKLLRFNPLDPFVLSIKVFPFLTPILEALNITVFPRKVISFLTKSVKQIKEGRLKETQKHRVDFLQLMIDSQNSKDSETHKALSDLELMAQSIIFIFAGYETTSSVLSFIIYELATHPDVQQKVQKEIDTVLPNKAPPTYDTVLQLEYLDMVVNETLRLFPVAMRLERVCKKDVEINGMFIPKGVVVMIPSYVLHHDPKYWTEPEKFLPERFSKKNKDNIDPYIYTPFGSGPRNCIGMRFALVNMKLALVRVLQNFSFKPCKETQIPLKLRLGGLLQPEKPIVLKVESRDGTVSGT

SEQ ID NO: 22897 - protein, 585 aa, Homo sapiens
MGPLTFTDVAIEFSLEEWQCLDTAQQNLYRNVMLENYRNLVFLGIAVSKPDLITCLEKEKEPCKMKRHEMVDEPPVVCSHFAEDFWPEQDIKDSFQKVTLRRYDKRGHENLQLRKGYKTVGDCKLYKGGYNGLNQCLTLTQSKMYHCDIYVKVFYAFSNADRYKTRHTGKKPFQCKKCGKSFCMLSQLTQHKKIHIRENTYRCKEFGNAFNQSSALTNHKRIYVGEKHYRCEECGKAFNHYSTLTNHKRIHSGEKPYKCDECGKTFSISSTFTKHKIIHTEEKPYKCKECGKAFNRPQPLLAIIHTGEKPYKCEECAKPLTGLQLTKHKVIHTGEKPYKCEECGKAFNQSSRLTRHKKIHTGEEPYKFEKCGRVFTCSSTLTQDKKIHTGEKPYNCEECGKVFTYSSTLTRHKRIHTEEKPYKCNECGKAFNRSSHLTSHRRIHTGEKPYKCEECGKAFKQSSNLNSHKKIHSGEKPYKCEECGKAFILSSRLTQHKKIHTGEKPYKCEECGKAFNRSSRLTQHKKIHTGEKPYKCKQCDKAFTHSSNLSSHKKIHSGEKPYKCEECGKAFNRSSRLTQHKKENS

SEQ ID NO: 22898 - protein, 1127 aa, Homo sapiens [sequence omitted]

SEQ ID NO: 22899 - protein, 987 aa, Homo sapiens
PELGVGTLPEHDSQDAGPIVPKISGLERSQEKSQDCCKEPIFEPVVLKDPCPQVAQPIPQPQTEPQLRAPSPDPDLVQRTEAPPQPPPLSTQPPQGPPEAQLQPAPQPQVQRPPRPQSPTQLLHQNLPPVQAHPSAQSLSQPLSAYNSSSLSLNSLSSSRSSTPAKTQPAPPHISHHPSASPFPLSLPNHSPLHSFTPTLQPPAHSHHPNMFAPPTALPPPPPLTSGSLQVAGHPAGSTYSEQDILRQELNTRFLASQSADRGASLGPPPYLRTEFHQHQHQHQHTHQHTHQHTFTPFPHAIPPTAIMPTPAPPMFDKYPTKVDPFYRHSLFHSYPPAVSGIPPMIPPTGPFGSLQGAFQPKLTDPFRPMLRKPGKWCAMHVHIAWQIYHHQQKVKKQMQSDPHKLDFGLKPEFLSRPPGPSLFGAIHHPHDLARPSTLFSAAGAAHPTGTPFGPPPHHSNFLNPAAHLEPFNRPSTFTGLAAVGGNAFGGLGNPSVTPNSMFGHKDGPSVQNFSNPHEPWNRLHRTPPSFPTPPPWLKPGELERSASAAAHDRDRDVDKRDSSVSKDDKERESVEKRHSSHPSPAPVLPVNALGHTRSSTEQIRAHLNTEAREKDKPKERERDHSESRKDLAADEHKAKEGHLPEKDGHGHEGRAAGEEAKQLARVPSPYVRTPVVESARPNSTSSREAEPRKGEPAYENPKKSSEVKVKEERKEDHDLPPEAPQTHRASEPPPPNSSSSVHPGPLASMPMTVGVTGIHPMNSISSLDRTRMMTPFMGISPLPGGERFPYPSFHWDPIRDPLRDPYRELDIHRRDPLGRDFLLRNDPLHRLSTPRLYEADRSFRDREPHDYSHHHHHHHHPLSVDPRREHERGGHLDERERLHMLREDYEHTRLHSVHPASLDGHLPHPSLITPGLPSMHYPRISPTAGNQNGLLNKTPPTAALSAPPPLISTLGGRPVSPRRTTPLSAEIRERPPSHTLKDIEAR

SEQ ID NO: 22900 - protein, 730 aa, Homo sapiens [sequence omitted]

SEQ ID NO: 22901 - protein, 321 aa, Homo sapiens
GPDEDKPPSKSSSSEKTPDKTDQKSGAQFFTLEGRHPDRSVFPDTYFSYKVDEEFATPFKTVATKGLDFDPWSNNRGDDEVFDSKSREDETKPFGLAVEDRSPATTPDTTPARTPTDESTPTSEPNPFPFHEGKMFEMTRSGAIDMSKRDFVEERLQFFQIGPQSPCERTDIRMAIVADHLGLSWTELARELNFSVDEINQIRVENPNSLISQSFMLLKKWVTRDGKNATTDALTSVLTKINRIDIVTLLEGPIFDYGNISGTRSFADENNVFHDPVDGWQNETSSGNLESCAQARRVTGGLLDRLDDSPDQCRDSITSYL

SEQ ID NO: 22902 - protein, 444 aa, Homo sapiens
MGSSRLRVFDPHLERKDSAAALSDRELPLPTFDVPYFKYIDEEDEDDEWSSRSQSSTEDDSVDSLLSDRYVVVSGTPEKILEHLLNDLHLEEVQDKETETLLDDFLLTYTVFMTTDDLCQALLRHYSAKKYQGKEENSDVPRRKRKVLHLVSQWIALYKDWLPEDEHSKMFLKTIYRNVLDDVYEYPILEKELKEFQKILGMHRRHTVDEYSPQKKNKALFHQFSLKENWLQHRGTVTETEEIFCHVYITEHSYVSVKAKVSSIAQEILLCSQLGKRVQLVKKFIKIAAHCKAQRNLNSFFAIVMGLNTASVSRLSQTWEKIPGKFKKLFSELESLTDPSLNHKAYRDAFKKMKPPKIPFMPLLLKDVTFIHEGNKTFLDNLVNFEKLHMIADTVRTLRHCRTNQFGDLSPKEHQELKSYVNHLYVIDSQQALFELSHRIEPRV

SEQ ID NO: 22903 - protein, 1342 aa, Homo sapiens
MKPAAREARLPPRSPGLRWALPLLLLLLRLGQILCAGGTPSPIPDPSVATVATGENGITQISSTAESFHKQNGTGTPQVETNTSEDGESSGANDSLRTPEQGSNGTDGASQKTPSSTGPSPVFDIKAVSISPTNVILTWKSNDTAASEYKYVVKHKMENEKTITVVHQPWCNITGLRPATSYVFSITPGIGNETWGDPRVIKVITEPIPVSDLRVALTGVRKAALSWSNGNGTASCRVLLESIGSHEELTQDSRLQVNISGLKPGVQYNINPYLLQSNKTKGDPLGTEGGLDASNTERSRAGSPTAPVHDESLVGPVDPSSGQQSRDTEVLLVGLEPGTRYNATVYSQAANGTEGQPQAIEFRTNAIQVFDVTAVNISATSLTLIWKVSDNESSSNYTYKIHVAGETDSSNLNVSEPRAVIPGLRSSTFYNITVCPVLGDIEGTPGFLQVHTPPVPVSDFRVTVVSTTEIGLAWSSHDAESFQMHITQEGAGNSRVEITTNQSIIIGGLFPGTKYCFEIVPKGPNGTEGASRTVCNRTVPSAVFDIHVVYVTTTEMWLDWKSPDGASEYVYHLVIESKHGSNHTSTYDKAITLQGLIPGTLYNITISPEVDHVWGDPNSTAQYTRPSNVSNIDVSTNTTAATLSWQNFDDASPTYSYCLLIEKAGNSSNATQVVTDIGITDATVTELIPGSSYTVEIFAQVGDGIKSLEPGRKSFCTDPASMASFDCEVVPKEPALVLKWTCPPGANAGFELEVSSGAWNNATHLESCSSENGTEYRTEVTYLNFSTSYNISITTVSCGKMAAPTRNTCTTGITDPPPPDGSPNITSVSHNSVKVKFSGFEASHGPIKAYAVILTTGEAGHPSADVLKYTYEDFKKGASDTYVTYLIRTEEKGRSQSLSEVLKYEIDVGNESTTLGYYNGKLEPLGSYRCLLRACVAGFTNITFHPQNKGLIDGAESYVSFSRYSDAVSLPQDPGVICGAVFGCIFGALVIVTVGGFIFWRKKRKDAKNNEVSFSQIKSLKRSKLIRVENFEAYFKKQQADSNCGFAEEYEDLKLVGISQPKYAAELAENRGKNRYNNVLPYDISRVKLSVQTHSTDDYINANYMPGYHSKKDFIATQGPLPNTLKDFWRMVWEKNVYAIIMLTKCVEQGRTKCEEYWPSKQAQDYGDITVAMTSEIVLPEWTIRDFTVKNIQTSESHPLRQFHFTSWPDHGVPDTTDLLINFRYLVRDYMKQSPPESPILVHCSAGVGRTGTFIAIDRLIYQIENENTVDVYGIVYDLRMHRPLMVQTEDQYVFLNQCVLDIVRSQKDSKVDLIYQNTTAMTIYENLAPVTTFGKTNGYIA

SEQ ID NO: 22904 - protein, 1239 aa, Homo sapiens
MDEIEKYQEVEEDQDPSCPRLSRELLDEKEPEVLQDSLDRCYSTPSGYLELPDLGQPYSSAVYSLEEQYLGLALDVDRIKKDQEEEEDQGPPCPRLSRELLEVVEPEVLQDSLDRCYSTPSSCLEQPDSCQPYGSSFYALEEKHVGFSLDVGEIEKKGKGKKRRGRRSKKERRRGRKEGEEDQNPPCPRLSRELLDEKGPEVLQDSLDRCYSTPSGCLELTDSCQPYRSAFYVLEQQHVGLAVDMDEIEKYQEVEEDQDPSCPRLSRELLDEKEPEVLQDSLDRCYSTPSGYLELPDLGQPYSSAVYSLEEQYLGLALDVDRIKKDQEEEEDQGPPCPRLSRELLEVVEPEVLQDSLDRCYSTPSSCLEQPDSCQPYGSSFYALEEKHVGFSLDVGEIEKKGKGKKRRGRRSKKERRRGRKEGEEDQNPPCPRLSRELLDEKGPEVLQDSLDRCYSTPSGCLELTDSCQPYRSAFYVLEQQHVGLAVDMDEIEKYQEVEEDQDPSCPRLSRELLDEKEPEVLQDSLDRCYSTPSGYLELPDLGQPYSSAVYSLEEQYLGLALDVDRIKKDEEEEEDQDPPCPRLSRELLEVVEPEVLQDSLDRCYSTPSSCLEQPDSCQPYGSSFYALEEKHVGFSLDVGEIEKKGKGKKRRGRRSKKERRRGRKEGEEDQNPPCPRVSFDSLTSMSPGQFTRSLSLCLCLCLCLSFSFIVFYLALFCPNIKAIISGAVWFLIPPGLFFTFSHFSRLSRELLDEKGPEVLQDSLDRCYSTPSGYLELTDSCQPYRSAFYVLEQQHVGLAVDMDEIEKYQEVEEDQDPSCPRLSRELLDEKEPEVLQDSLDRCYSTPSGYLELPDLGQPYSSAVYSLEEQYLGLALDVDRIKKDQEEEEDQGPPCPRLSRELLEVVEPEVLQDSLDRCYSTPSSCLEQPDSCQPYGSSFYALEEKHVGFSLDVGEIEKKGKGKKRRGRRSKKERRRGRKEGEEDQNPPCPRLSRELLDEKGPEVLQDSLDRCYSTPSGCLELCDSCQPYRSAFYVLEQQRVGLAVDMDEIEKYQEVEEDQDPSCPRLSRELLDEKEPEVLQDSLDRCYSTPSGYLELPDLGQPYSSAVYSLEEQYLGLALDVDKIEKKGKGKKRRGRRSKKERRRGRKEGEEDQNPPCPRLNGVLMEVEEREVLQDSLDRCYSTPSMYFELPDSFQHYRSVFYSFEEQHISFALYVDNRFFTLTVTSLHLVFQMGVIFPQ

SEQ ID NO: 22905 - protein, 670 aa, Homo sapiens [sequence omitted]

SEQ ID NO: 22906 - protein, 360 aa, Homo sapiens
MELSGATMARGLAVLLVLFLHIKNLPAQAADTCPEVKVVGLEGSDKLTILRGCPGLPGAPGPKGEAGVIGERGERGLPGAPGKAGPVGPKGDRGEKGMRGEKGDAGQSQSCATGPRNCKDLLDRGYFLSGWHTIYLPDCRPLTVLCDMDTDGGGWTVFQRRMDGSVDFYRDWAAYKQGFGSQTHSHDAHSCPFAPSSVKPPHAHNLTRGRIMFLNMFTLGQKSFTSFNVCFLNTSGFDHFPVSVARQVFPWNLVSREESGPLFSRWHYRCSGRLSDFCEDFPPPVIDTGRSSPPPPSLPHPPMPHSQHFTLLEKGHFGVQKTLTKKGESLVGTFLLPTTAEFMLWAGWLLGRDKHLALTK

SEQ ID NO: 22907 - protein, 669 aa, Homo sapiens
MQRLMMLLATSGACLGLLAVAAVAAAGANPAQRDTHSLLPTHRRQKRDWIWNQMHIDEEKNTSLPHHVGKIKSSVSRKNAKYLLKGEYVGKVFRVDAETGDVFAIERLDRENISEYHLTAVIVDKDTGENLETPSSFTIKVHDVNDNWPVFTHRLFNASVPESSAVGTSVISVTAVDADDPTVGDHASVMYQILKGKEYFAIDNSGRIITITKSLDREKQARYEIVVEARDAQGLRGDSGTATVLVTLQDINDNFPFFTQTKYTFVVPEDTRVGTSVGSLFVEDPDEPQNRMTKYSILRGDYQDAFTIETNPAHNEGIIKPMKPLDYEYIQQYSFIVEATDPTIDLRYMSPPAGNRAQVIINITDVDEPPIFQQPFYHFQLVLQISAIDKDITPRNVKFKFILNTENNFTLTDNHDNTANITVKYGQFDREHTKVHFLPVVISDNGMPSRTGTSTLTVAVCKCNEQGEFTFCEDMAAQVGVSIQAVVAILLCILTITVITLLIFLRRRLRKQARAHGKSVPEIHEQLVTYDEEGGGEMDTTSYDVSVLNSVRRGGAKPPRPALDARPSLYAQVQKPPRHAPGAHGGPGEMAAMIEVKKDEADHDGDGPPYDTLHIYGYEGSESIAESLSSLGTDSSDSDVDYDFLNDWGPRFKMLAELYGSDPREELLY

SEQ ID NO: 22908 - protein, 713 aa, Homo sapiens
MQPRTPLVLCVLLSQVLLLTSAEDLDCTPGFQQKVFHINQPAEFIEDQSILNLTFSDCKGNDKLRYEVSSPYFKVNSDGGLVALRNITAVGKTLFVHARTPHAEDMAELVIVGGKDIQGSLQDIFKFARTSPVPRQKRSIVVSPILIPENQRQPFPRDVGKVVDSDRPERSKFRLTGKGVDQEPKGIFRINENTGSVSVTRTLDREVIAVYQLFVETTDVNGKTLEGPVPLEVIVIDQNDNRPIFREGPYIGHVMEGSPTGTTVMRMTAFDADDPATDNALLRYNIRQQTPDKPSPNMFYIDPEKGDIVTVVSPALLDRETLENPKYELIIEAQDMAGLDVGLTGTATATIMIDDKNDHSPKFTKKEFQATVEEGAVGVIVNLTVEDKDDPTTGAWRAAYTIINGNPGQSFEIHTNPQTNEGMLSVVKPLDYEISAFHTLLIKVENEDPLVPDVSYGPSSTATVHITVLDVNEGPVFYPDPMMVTRQEDLSVGSVLLTVNATDPDSLQHQTIRYSVYKDPAGWLNINPINGTVDTTAVLDRESPFVDNSVYTALFLAIDSGNPPATGTGTLLITLEDVNDNAPFIYPTVAEVCDDAKNLSVVILGASDKDLHPNTDPFKFEIHKQAVPDKVWKISKINNTHALVSLLQNLNKANYNLPIMVTDSGKPPMTNITDLRVQVCSCRNSKVDCNAAGALRFSLPSVLLLSLFSLACL

SEQ ID NO: 22909 - protein, 457 aa, Homo sapiens
MAGPAPPAADELPGPAARRLYSRMEASCLELALEGERLCKAGDFKTGVAFFEAAVQVGTEDLKTLSAIYSQLGNAYFYLKEHGRALEYHKHDLLLARTIGDRMGEAKASGNLGNTLKVLGRFDEAAVCCQRHLSIAQEQGDKVGEARALYNIGNVYHAKGKQLSWNAANATQDPGHLPPDVRETLCKASEFYERNLSLVKELGDRAAQGRAYGNLGNTHYLLGNFTEATTFHKERLAIAKEFGDKAAERRAYSNLGNAHVFLGRFDVAAEYYKKTLQLSRQLRDQAVEAQACYSLGNTYTLLQDYERAAEYHLRHLLIAQELADRVGEGRACWSLGNAYVSMGRPAQALTFAKKHLQISQEIGDRHGELTARMNVAQLQLVLGRLTSPAASEKPDLAGYEAQGEFQGCGGVLLPTGTDRIRSCGGVGSRPGQHGGGGSRQKMAPTSQFFLASGTAQA

SEQ ID NO: 22910 - protein, 1680 aa, Homo sapiens
MAESQGKLRTMMAQFPTAMNGGPNMWAITSEERTKHDRQFDNLKPSGGYITGDQARNFFLQSGLPAPVLAEIWALSDLNKDGKMDQQEFSIAMKLIKLKLQGQQLPVVLPPIMKQPPMFSPLISARFGMGSMPNLSIPQPLPPAAPITSLSSATSGTNLPPLMMPTPLVPSVSTSSLPNGTASLIQPLPIPYSSSTLPHGSSYSLMMGGFGGASIQKAQSLIDLGSSSSTSSTASLSGNSPKTGTSEWAVPQPTRLKYRQKFNTLDKSMSGYLSGFQARNALLQSNLSQTQLATIWTLADVDGDGQLKAEEFILAMHLTDMAKAGQPLPLTLPPELVPPSFRGGKQIDSINGTLPSYQKMQEEEPQKKLPVTFEDKRKANYERGNMELEKRRQALMEQQQREAERKAQKEKEEWERKQRELQEQEWKKQLELEKRLEKQRELERQREEERRKDIERREAAKQELERQRRLEWERIRRQELLNQKNREQEEIVRLNSKKKNLHLELEALNGKHQQISGRLQDVRLKKQTQKTELEVLDKQCDLEIMEIKQLQQELQEYQNKLIYLVPEKQLLNERIKNMQFSNTPDSGVSLLHKKSLEKEELCQRLKEQLDALEKETASKLSEMDSFNNQLKELRETYNTQQLALEQLYKIKRDKLKEIERKRLELMQKKKLEDEAARKAKQGKENLWKENLRKEEEEKQKRLQEEKTQEKIQEEERKAEEKQRKDKDTLKAEEKKRETASVLVNYRALYPFEARNHDEMSFNSGDIIQVDEKTVGEPGWLYGSFQGNFGWFPCNYVEKMPSSENEKAVSPKKALLPPTVSLSATSTSSEPLSSNQPASVTDYQNVSFSNLTVNTSWQKKSAFTRTVSPGSVSPIHGQGQVVENLKAQALCSWTAKKDNHLNFSKHDIITVLEQQENWWFGEVHGGRGWFPKSYVKIIPGSEVKREEPEALYAAVNKKPTSAAYSVGEEYIALYPYSSVEPGDLTFTEGEEILVTQKDGEWWTGSIGDRSGIFPSNYVKPKDQESFGSASKSGASNKKPEIAQVTSAYVASGSEQLSLAPGQLILILKKNTSGWWQGELQARGKKRQKGWFPASHVKLLGPSSERATPAFHPVCQVIAMYDYAANNEDELSFSKGQLINVMNKDDPDWWQGEINGVTGLFPSNYVKMTTDSDPSQQWCADLQTLDTMQPIERKRQGYIHELIQTEERYMADLQLVVEVFQKRMAESGFLTEGEMALIFVNWKELIMSNTKLLKALRVRKKTGGEKMPVQMIGDILAAELSHMQAYIRFCSCQLNGAALLQQKTDEDTDFKEFLKKLASDPRCKGMPLSSFLLKPMQRITRYPLLIRSILENTPESHADHSSLKLALERAEELCSQVNEGVREKENSDRLEWIQAHVQCEGLAEQLIFNSLTNCLGPRKLLHSGKLYKTKSNKELHGFLFNDFLLLTYMVKQFAVSSGSEKLFSSKSNAQFKMYKTPIFLNEVLVKLPTDPSSDEPVFHISHIDRVYTLRTDNINERTAWVQKIKAASEQYIDTEKKKREKAYQARSQKTSGIGRLMVHVIEATELKACKPNGKSNPYCEISMGSQSYTTRTIQDTLNPKWNFNCQFFIKDLYQDVLCLTLFDRDQFSPDDFLGRTEIPVAKIRTEQESKGPMTRRLLLHEVPTGEVWVRFDLQLFEQKTLL

SEQ ID NO: 22911 - protein, 2240 aa, Homo sapiens
MEQTWTRDYFAEDDGEMVPRTSHTAAFLSDTKDRGPPVQSQIWRSGEKVPFVQTYSLRAFEKPPQVQTQALRDFEKHLNDLKKENFSLKLRIYFLEERMQQKYEASREDIYKRNIELKVEVESLKRELQDKKQHLDKTWADVENLNSQNEAELRRQFEERQQETEHVYELLENKIQLLQEESRLAKNEAARMAALVEAEKECNLELSEKLKGVTKNWEDVPGDQVKPDQYTEALAQRDKRIEELNQSLAAQERLVEQLSREKQQLLHLLEEPTSMEVQPMTEELLKQQKLNSHETTITQQSVSDSHLAELQEKIQQTEATNKILQEKLNEMSYELKCAQESSQKQDGTIQNLKETLKSRERETEELYQVIEGQNDTMAKLREMLHQSQLGQLHSSEGTSPAQQQVALLDLQSALFCSQLEIQKLQRVVRQKERQLADAKQCVQFVEAAAHESEQQKEASWKHNQELRKALQQLQEELQNKSQQLRAWEAEKYNEIRTQEQNIQHLNHSLSHKEQLLQEFRELLQYRDNSDKTLEANEMLLEKLRQRIHDKAVALERAIDEKFSALEEKEKELRQLRLAVRERDHDLERLRDVLSSNEATMQSMESLLRAKGLEVEQLSTTCQNLQWLKEEMETKFSRWQKEQESIIQQLQTSLHDRNKEVEDLSATLLCKLGPGQSEIAEELCQRLQRKERMLQDLLSDRNKQVLEHEMEIQGLLQSVSTREQESQAAAEKLVQALMERNSELQALRQYLGGRDSLMSQAPISNQQAEVTPTGRLGKQTDQGSMQIPSRDDSTSLTAKEDVSIPRSTLGDLDTVAGLEKELSNAKEELELMAKKERESQMELSALQSMMAVQEEELQVQAADMESLTRNIQIKEDLIKDLQMQLVDPEDIPAMERLTQEVLLLREKVASVESQGQEISGNRRQQLLLMLEGLVDERSRLNEALQAERQLYSSLVKFHAHPESSERDRTLQVELEGAQVLRSRLEEVLGRSLERLNRLETLAAIGGAAAGDDTEDTSTEFTDSIEEEAAHHSHQQLVKVALEKSLATVETQNPSFSPPSPMGGDSNRCLQEEMLHLRAEFHQHLEEKRKAEEELKELKAQIEEAGFSSVSHIRNTMLSLCLENAELKEQMGEAMSDGWEIEEDKEKGELDNQSQPRDPGPQSAFSLPGSTQHLRSQLSQCKQRYQDLQEKLLLSEATVFAQANELEKYRVMLTGESLVKQDSKQIQVDLQDLGYETCGRSENEAEREETTSPECEEHNSLKEMVLMEGLCSEQGRRGSTLASSSERKPLENQLGKQEEFRVYGKSENILVLRKDIKDLKAQLQNANKVIQNLKSRVRSLSVTSDYSSSLERPRKLRAVGTLEGSSPHSVPDEDEGWLSDGTGAFYSPGLQAKKDLESLIQRVSQLEAQLPKNGLEEKLAEELRSASWPGKYDSLIQDQARELSYLRQKIREGRGICYLITRHAKDTVKSFEDLLRSNDIDYYLGQSFREQLAQGSQLTERLTSKLSTKDHKSEKDQAGLEPLALRLSRELQEKEKVIEVLQAKLDARSLTPSSSHALSDSHRSPSSTSFLSDELEACSDMDIVSEYTHYEEKKASPSHSDSIHHSSHSAVLSSKPSSTSASQGAKAESNSNPISLPTPQNTPKEANQAHSGASTVPPASTATLLSNDLEADSSYYLNSAQPHSPPRGTIELGRILEPGYLGSSGKWDVMRPQKGSVSGDLSSGSSVYQLNSKPTGADLLEEHLGEIRNLRQRLEESICINDRLREQLEHRLTSTARGRGSTSNFYSQGLESIPQLCNENRVLREDNRRLQAQLSHVSREHSQETESLREALLSSRSHLQELEKELEHQKVERQQLLEDLREKQQEVLHFREERLSLQENDSRLQHKLVLLQQQCEEKQQLFESLQSELQIYEALYGNSKKGLKAYSLDACHQIPLSSDLSHLVAEVRALRGQLEQSIQGNNCLRLQLQQQLESGAGKASLSPSSINQNFPASTDPGNKQLLLQDSAVSPPVRDVGMNSPALVFPSSASSTPGSETPIINRANGLGLDTSPVMKTPPKLEGDATDGSFANKHGRHVIGHIDDYSALRQQIAEGKLLVKKIVSLVRSACSFPGLEAQGTEVLGSKGIHELRSSTSALHHALEESASLLTMFWRAALPSTHIPVLPGKVGESTERELLELRTKVSKQERLLQSTTEHLKNANQQKESMEQFIVSQLTRTHDVLKKARTNLEVKSLRALPCTPAL

SEQ ID NO: 22912 - protein, 219 aa, Homo sapiens
MCDLRRPAAGGMMDLAYVCEWEKWSKSTHCPSVPLACAWSCRNLIAFTMDLRSDDQDLTRMIHILDTEHPWDLHSIPSEHHEAITCLEWDQSGSRLLSADADGQIKCWSMADHLANSWESSVGSLVEGDPIVALSWLHNGVKLALHVEKSGASSFGEKFSRVKFSPSLTLFGGKPMEGWIAVTVSGLVTVSLLKPSGQVLTSTESLCGGLWWRVPLSYP

SEQ ID NO: 22913 - protein, 324 aa, Homo sapiens
MMWTWALWMLPSLCKFSLAALPAKPENISCVYYYRKNLTCTWSPGKETSYTQYTVKRTYAFGEKHDNCTTNSSTSENRASCSFFLPRITIPDNYTIEVEAENGDGVIKSHMTYWRLENIAKTEPPKIFRVKPVLGIKRMIQIEWIKPELAPVSSDLKYTLRFRTVNSTSWMEVNFAKNRKDKNQTYNLTGLQPFTEYVIALRCAVKESKFWSDWSQEKMGMTEEEAPCGLELWRVLKPAEADGRRPVRLLWKKARGAPVLEKTLGYNIWYYPESNTNLTETMNTTNQQLELHLGGESFWVSMISYNSLGKSPVATLRIPAIQEK

SEQ ID NO: 22914 - protein, 533 aa, Homo sapiens
MPWVEPKPRPGPEQKPKLTKPDSATGPQWYQESQESESEGKQPPPGPLAPPKSPEPSGPLASEQDAPLPEGDDAPPRPSMLDDAPRLPLELDDAPLPEEETPEPTAICRHRHRCHTDCLEGLLSRTFQWLGWQVGAHPWIFLLAPLMLTAALGTGFLYLPKDEEEDLEEHYTPVGSPAKAERRFVQGHFTTNDSYRFSASRRSTEANFVSLLVVSYSDSLLDPATFAEVSKLDGAVQDLRVAREKGSQIQYQQVCARYRALCVPPNPILYAWQVNKTLNLSSISFPAYNHGRHPLYLTGFFGGYILGGSLGMGQLLLRAKAMRLLYYLKTEDPEYDVQSKQWLTHLLDQFTNIKNILALKKIEVVHFTSLSRQLEFEATSVTVIPVFHLAYILIILFAVTSCFRFDCIRNKMCVAAFGVISAFLAVVSGFGLLLHIGVPFVIIVANSPFLILGVGVDDMFIMISAWHKTNLADDIRERMSNVYSKAAVSITITTITNILALYTGIMSSFRASFRQQMFLPQPKRKYCYSNYDA

SEQ ID NO: 22915 - protein, 745 aa, Homo sapiens
MPCCSHRSCREDPGTSESREMMFQDPVAFEDVAVNFTQEEWTLLDISQKNLFREVMLETFRNLTSIGKKWSDQNIEYEYQNPRRSFRSLIEEKVNEIKEDSHCGETFTQVPDDRLNFQEKKASPEVKSCDSFVCAEVGIGNSSFNMSIRGDTGHKAYEYQEYGPKPYKCQQPKNKKAFRYRPSIRTQERDHTGEKPYACKVCGKTFIFHSSIRRHMVMHSGDGTYKCKFCGKAFHSFSLYLIHERTHTGEKPYECKQCGKSFTYSATLQIHERTHTGEKPYECSKCDKAFHSSSSYHRHERSHMGEKPYQCKECGKAFAYTSSLRRHERTHSGKKPYECKQYGEGLSYLISFQTHIRMNSGERPYKCKICGKGFYSAKSFQTHEKTHTGEKRYKCKQCGKAFNLSSSFRYHERIHTGEKPYECKQCGKAFRSASQLRVHGGTHTGEKPYECKECGKAFRSTSHLRVHGRTHTGEKPYECKECGKAFRYVKHLQIHERTEKHIRMPSGERPYKCSICEKGFYSAKSFQTHEKTHTGEKPYECNQCGKAFRCCNSLRYHERTHTGEKPYECKQCGKAFRSASHLRMHERTHTGEKPYECKQCGKAFSCASNLRKHGRTHTGEKPYECKQCGKAFRSASNLQMHERTHTGEKPYECKECEKAFCKFSSFQIHERKHRGEKPYECKHCGNGFTSAKILQIHARTHIGEKHYECKECGKAFNYFSSLHIHARTHMGEKPYECKDCGKAFS

SEQ ID NO: 22916 - protein, 940 aa, Homo sapiens
MATAATSPALKRLDLRDPAALFETHGAEEIRGLERQVRAEIEHKKEELRQMVGERYRDLIEAADTIGQMRRCAVGLVDAVKATDQYCARLRQAGSAAPRPPRAQQPQQPSQEKFYSMAAQIKLLLEIPEKIWSSMEASQCLHATQLYLLCCHLHSLLQLDSSSSRYSPVLSRFPILIRQVAAASHFRSTILHESKMLLKCQGVSDQAVAEALCSIMLLEESSPRQALTDFLLARKATIQKLLNQPHHGAGIKAQICSLVELLATTLKQAHALFYTLPEGLLPDPALPCGLLFSTLETITGQHPAGKGTGVLQEEMKLCSWFKHLPASIVEFQPTLRTLAHPISQEYLKDTLQKWIHMCNEDIKNGITNLLMYVKSMKGLAGIRDAMWELLTNESTNHSWDVLCRRLLEKPLLFWEDMMQQLFLDRLQTLTKEGFDSISSSSKELLVSALQELESSTSNSPSNKHIHFEYNMSLFLWSESPNDLPSDAAWVSVANRGQFASSGLSMKAQAISPCVQNFCSALDSKLKVKLDDLLAYLPSDDSSLPKDVSPTQAKSSAFDRYADAGTVQEMLRTQSVACIKHIVDCIRAELQSIEEGVQGQQDALNSAKLHSVLFMARLCQSLGELCPHLKQCILGKSESSEKPAREFRALRKQGKVKTQEIIPTQAKWQEVKEVLLQQSVMGYQVWSSAVVKVLIHGFTQSLLLDDAGSVLATATSWDELEIQEEAESGSSVTSKIRLPAQPSWYVQSFLFSLCQEINRVGGHALPKVTLQEMLKSCMVQVVAAYEKLSEEKQIKKEGAFPVTQNRALQLLYDLRYLNIVLTAKGDEVKSGRSKPDSRIEKVTDHLEALIDPFDLDVFTPHLNSNLHRLVQRTSVLFGLVTGTENQLAPRSSTFNSQEPHNILPLASSQIRFGLLPLSMTSTRKAKSTRNIETKAQYDANC

SEQ ID NO: 22917 - protein, 4365 aa, Homo sapiens
MKVDRTKLKKTPTEAPADCRALIDKLKVCNDEQLLLELQQIKTWNIGKCELYHWVDLLDRFDGILADAGQTVENMSWMLVCDRPEREQLKMLLLAVLNFTALLIEYSFSRHLYSSIEHLTTLLASSDMQVVLAVLNLLYVFSKRSNYITRLGSDKRTPLLTRLQHLAESWGGKENGFGLAECCRDLHMMKYPPSATTLHFEFYADPGAEVKIEKRTTSNTLHYIHIEQLDKISESPSEIMESLTKMYSIPKDKQMLLFTHIRLAHGFSNHRKRLQAVQARLHAISILVYSNALQESANSILYNGLIEELVDVLQITDKQLMEIKAASLRTLTSIVHLERTPKLSSIIDCTGTASYHGFLPVLVRNCIQAMIDPSMDPYPHQFATALFSFLYHLASYDAGGEALVSCGMMEALLKVIKFLGDEQDQITFVTRAVRVVDLITNLDMAAFQSHSGLSIFIYRLEHEVDLCRKECPFVIKPKIQRPNTTQEGEEMETDMDGVQCIPQRAALLKSMLNFLKKAIQDPAFSDGIRHVMDGSLPTSLKHIISNAEYYGPSLFLLATEVVTVFVFQEPSLLSSLQDNGLTDVMLHALLIKDVPATREVLGSLPNVFSALCLNARGLQSFVQCQPFERLFKVLLSPDYLPAMRRRRSSDPLGDTASNLGSAVDELMRHQPTLKTDATTAIIKLLEEICNLGRDPKYICQKPSIQKADGTATAPPPRSNHAAEEASSEDEEEEEVQAMQSFNSTQQNETEPNQQVVGTEERIPIPLMDYILNVMKFVESILSNNTTDDHCQEFVNQKGLLPLVTILGLPNLPIDFPTSAACQAVAGVCKSILTLSHEPKVLQEGLLQLDSILSSLEPLHRPIESPGGSVLLRELACAGNVADATLSAQATPLLHALTAAHAYIMMFVHTCRVGQSEIRSISVNQWGSQLGLSVLSKLSQLYCSLVWESTVLLSLCTPNSLPSGCEFGQADMQKLVPKDEKADGEQDGAAGSMDASTQGLLEGIGLDGDTLAPMETDEPTASDSKGKSKITPAMAARIKQIKPLLSASSRLGRALAELFGLLVKLCVGSPVRQRRSHHAASTTTAPTPAARSTASALTKLLTKGLSWQPPPYTPTPRFRLTFFICSVGFTSPMLFDERKYPYHLMLQKFLCSGGHNALFETFNWALSMGGKVPVSEGLEHSDLPDGTGEFLDAWLMLVEKMVNPTTVLESPHSLPAKLPGGVQNFPQFSALRFLVVTQKAAFTCIKNLWNRKPLKVYGGRMAESMLAILCHILRGEPVIRERLSKEKEGSRGEEDTGQEEGGSRREPQVNQQQLQQLMDMGFTREHAMEALLNTSTMEQATEYLLTHPPPIMGGVVRDLSMSEEDQMMRAIAMSLGQDIPMDQRAESPEEVACRKEEEERKAREKQEEEEAKCLEKFQDADPLEQDELHTFTDTMLPGCFHLLDELPDTVYRVCDLIMTAIKRNGADYRDMILKQVVNQVWEAADVLIKAALPLTTSDTKTVSEWISQMATLPQASNLATRILLLTLLFEELKLPCAWVVESSGILNVLIKLLEVVQPCLQAAKEQKEVQTPKWITPVLLLIDFYEKTAISSKRRAQMTKYLQSNSNNWRWFDDRSGRWCSYSASNNSTIDSAWKSGETSVRFTAGRRRYTVQFTTMVQVNEETGNRRPVMLTLLRVPRLNKNSKNSNGQELEKTLEESKEMDIKRKENKGNDTPLALESTNTEKETSLEETKIGEILIQGLTEDMVTVLIRACVSMLGVPVDPDTLHATLRLCLRLTRDHKYAMMFAELKSTRMILNLTQSSGFNGFTPLVTLLLRHIIEDPCTLRHTMEKVVRSAATSGAGSTTSGVVSGSLGSREINYILRVLGPAACRNPDIFTEVANCCIRIALPAPRGSGTASDDEFENLRIKGPNAVQLVKTTPLKPSPLPVIPDTIKEVIYDMLNALAAYHAPEEADKSDPKPGVMTQEVGQLLQDMGDDVYQQYRSLTRQSSDFDTQSGFSINSQVFAADGASTETSASGTSQGEASTPEESRDGKKDKEGDRASEEGKQKGKGSKPLMPTSTILRLLAELVRSYVGIATLIANYSYTVGQSELIKEDCSVLAFVLDHLLPHTQNAEDKDTPALARLFLASLAAAGSGTDAQVALVNEVKAALGRALAMAESTEKHARLQAVMCIISTIMESCPSTSSFYSSATAKTQHNGMNNIIRLFLKKGLVNDLARVPHSLDLSSPNMANTVNAALKPLETLSRIVNQPSSLFGSKSASSKNKSEQDAQGASQDSSSNQQDPGEPGEAEVQEEDHDVTQTEVADGDIMDGEAETDSVVIAGQPEVLSSQEMQVENELEDLIDELLERDGGSGNSTIIVSRSGEDESQEDVLMDEAPSNLSQASTLQANREDSMNILDPEDEEEHTQEEDSSGSNEDEDDSQDEEEEEEEDEEDDQEDDEGEEGDEDDDDDGSEMELDEDYPDMNASPLVRFERFDREDDLIIEFDNMFSSATDIPPSPGNIPTTHPLMVRHADHSSLTLGSGSSTTRLTQGIGRSQRTLRQLTANTGHTIHVHYPGNRQPNPPLILQRLLGPSAAADILQLSSSLPLQSRGRARLLVGNDDVHIIARSDDELLDDFFHDQSTATSQAGTLSSIPTALTRWTEECKVLDAESMHDCVSVVKVSIVNHLEFLRDEELEERREKRRKQLAEEETKITDKGKEDKENRDQSAQCTASKSNDSTEQNLSDGTPMPDSYPTTPSSTDAATSESKETLGTLQSSQQQPTLPTPPALGEVPQELQSPAGEGGSSTQLLMPVEPEELGPTRPSGEAETTQMELSPAPTITSLSPERAEDSDALTAVSSQLEGSPMDTSSLASCTLEEAVGDTSAAGSSEQPRAGSSTPGDAPPAVAEVQGRSDGSGESAQPPEDSSPPASSESSSTRDSAVAISGADSRGILEEPLPSTSSEEEDPLAGISLPEGVDPSFLAALPDDIRREVLQNQLGIRPPTRTAPSTNSSAPAVVGNPGVTEVSPEFLAALPPAIQEEVLAQQRAEQQRRELAQNASSDTPMDPVTFIQTLPSDLRRSVLEDMEDSVLAVMPPDIAAEAQALRREQEARQRQLMHERLFGHSSTSALSAILRSPAFTSRLSGNRGVQYTRLAVQRGGTFQMGGSSSHNRPSGSNVDTLLRLRGRLLLDHEALSCLLVLLFVDEPKLNTSRLHRVLRNLCYHAQTRHWVIRSLLSILQRSSESELCIETPKLTTSEEKGKKSSKSCGSSSHENRPLDLLHKMESKSSNQLSWLSVSMDAALGCRTNIFQIQRSGGRKHTEKHASGGSTVHIHPQAAPVVCRHVLDTLIQLAKVFPSHFTQQRTKETNCESDRERGNKACSPCSSQSSSSGICTDFWDLLVKLDNMNVSRKGKNSVKSVPVSAGGEGETSPYSLEASPLGQLMNMLSHPVIRRSSLLTEKLLRLLSLISIALPENKVSEAQANSGSGASSTTTATSTTSTTTTTAASTTPTPPTAPTPVTSAPALVAATAISTIVVAASTTVTTPTTATTTVSISPTTKGSKSPAKVSDGGSSSTDFKMVSSGLTENQLQLSVEVLTSHSCSEEGLEDAANVLLQLSRGDSGTRDTVLKLLLNGARHLGYTLCKQIGTLLAELREYNLEQQRRAQCETLSPDGLPEEQPQTTKLKGKMQSRFDMAENVVIVASQKRPLGGRELQLPSMSMLTSKTSTQKFFLRVLQVIIQLRDDTRRANKKAKQTGRLGSSGLGSASSIQAAVRQLEAEADAIIQMVREGQRARRQQQAATSESSQSEASVRREESPMDVDQPSPSAQDTQSIASDGTPQGEKEKEERPPELPLLSEQLSLDELWDMLGECLKELEESHDQHAVLVLQPAVEAFFLVHATERESKPPVRDTRESQLAHIKDEPPPLSPAPLTPATPSSLDPFFSREPSSMHISSSLPPDTQKFLRFAETHRTVLNQILRQSTTHLADGPFAVLVDYIRVLDFDVKRKYFRQELERLDEGLRKEDMAVHVRRDHVFEDSYRELHRKSPEEMKNRLYIVFEGEEGQDAGGLLREWYMIISREMFNPMYALFRTSPGDRVTYTINPSSHCNPNHLSYFKFVGRIVAKAVYDNRLLECYFTRSFYKHILGKSVRYTDMESEDYHFYQGLVYLLENDVSTLGYDLTFSTEVQEFGVCEVRDLKPNGANILVTEENKKEYVHLVCQMRMTGAIRKQLAAFLEGFYEIIPKRLISIFTEQELELLISGLPTIDIDDLKSNTEYHKYQSNSIQIQWFWRALRSFDQADRAKFLQFVTGTSKVPLQGFAALEGMNGIQKFQIHRDDRSTDRLPSAHTCFNQLDLPAYESFEKLRHMLLLAIQECSEGFGLA

SEQ ID NO: 22918 - protein, 599 aa, Homo sapiens
MENQAHNTMGTSPCEAELQELMEQIDIMVSNKKMDWERKMRALETRLDLRDQELANAQTCLDQKGQEVGLLRQKLDSLEKCNLAMTQNYEGQLQSLKAQFSKLTNNFEKLRLHQMKQNKVPRKELPHLKEEIPFELSNLNQKLEEFRAKSREWDKQEILYQTHLISLDAQQKLLSEKCNQFQKQAQSYQTQLNGKKQCLEDSSSEIPRLICDPDPNCEINERDEFIIEKLKSAVNEIALSRNKLQDENQKLLQELKMYQRQCQAMEAGLSEVKSELQSRDDLLRIIEMERLQLHRELLKIGECQNAQGNKTRLESSYLPSIKEPERKIKELFSVMQDQPNHEKELNKIRSQLQQVEEYHNSEQERMRNEISDLTEELHQKEITIATVTKKAALLEKQLKMELEIKEKMLAKQKVSDMKYKAVRTENTHLKGMMGDLDPGEYMSMDFTNREQSRHTSINKLQYENERLRNDLAKLHVNGKSTWTNQNTYEETGRYAYQSQIKVEQNEERLSHDCEPNRSTMPPLPPSTFQAKEMTSPLVSDDDVFPLSPPDMSFPASLAAQHFLLEEEKRAKELEKLLNTHIDELQRHTEFTLNKYSKLK

SEQ ID NO: 22919 - protein, 706 aa, Homo sapiens
MEENPTLESEAWGSSREWLAPREARGGPSLSSVLNELPSAATLRYRDPGVLPWGALEEEEEDGGRSRKAFTEVTQTELQDPHPSRELPWPMQARRAHRQRNASRDQVVYGSGTKTDRWARLLRRSKEKTKEGLRSLQPWAWTLKRIGGQFGAGTESYFSLLRFLLLLNVLASVLMACMTLLPTWLGGAPPGPPGPDISSPCGSYNPHSQGLVTFATQLFNLLSGEGYLEWSPLFYGFYPPRPRLAVTYLCWAFAVGLICLLLILHRSVSGLKQTLLAESEALTSYSHRVFSAWDFGLCGDVHVRLRQRIILYELKVELEETVVRRQAAVRTLGQQARVWLVRVLLNLLVVALLGAAFYGVYWATGCTVELQEMPLVQELPLLKLGVNYLPSIFIAGVNFVLPPVFKLIAPLEGYTRSRQIVFILLRTVFLRLASLVVLLFSLWNQITCGGDSEAEDCKTCGYNYKQLPCWETVLGQEMYKLLLFDLLTVLAVALLIQFPRKLLCGLCPGALGRLAGTQEFQVPDEVLGLIYAQTVVWVGSFFCPLLPLLNTVKFLLLFYLKKLTLFSTCSPAARTFRASAANFFFPLVLLLGLAISSVPLLYSIFLIPPSKLCGPFRGQSSIWAQIPESISSLPETTQNFLFFLGTQAFAVPLLLISSILMAYTVALANSYGRLISELKRQRETEAQNKVFLARRAVALTSTKPAL

SEQ ID NO: 22920 - protein, 818 aa, Homo sapiens
MAPPQRHPQRSEQVLLLTLLGTLWGAAAAQIRYSIPEELEKGSFVGNIVKDLGLEPQELAEHGVRIVSRGRMQLFSLNPRNGSLVTAGRIDREELCAQSPRCLVSFNILVEDKLNLYPVEVEIVDINDNTPRFLKEELEVKILENAAPSSRFPLMEVYDPDVGMNSLQGFKLSGNSHFSVDVQSEAHGPKYPELVLEGTLDREGEAVYRLVLTAMDGGDPVRSSVAQILVTVLDVNDNTPMFTQPVYRVSVPENLPVGTPVLAVTATDQDEGVHGEVTYSFVKITEKISQIFCLNVLTGEISTSANLDYEDSSFYELGVEARDGPGLRDRAKVLITILDVNDNVPEVVVTSGSRTIAESAPPGTVIALFQVFDRDSGLNGLVTCSIPRSLPFELEKSVGNYYRLVTNAALDREEVFLYNITVTATDKGTPPLSTETIISLNVADTNDNPPTFPHSSYSVYVLENNPRGASIFSVNALDPDVDQNAQVSYSLAEDTLQGAPLSSYVSINSDTGILYALRSFDYEQLRDLQLWVTASDSGDPPLSSNVSLSLFVLDQNDNAPEILYPALPTDGSTGVELAPRSAEPGYLVTKVVAVDRDSGQNAWLSYRLLKASEPGLFSVGLHTGEVRTARALLDRDALKQSLVVAVQDHGQPPLSATVTLTVAVADRIPDILADLGSLEPSAKPNDSDLTLYLVVAVAAVSCVFLAFVIVLLALRLQRWHKSRLLQASGGGLASMPGSHFVGVEGVRAFLQTYSHEVSLTADSRKSHLIFPQPNYADTLINQESYEKSEPLLITQDLLETKGEPRQLQVSFFPPKREE

SEQ ID NO: 22921 - protein, 60 aa, Homo sapiens
MRLTGPWKLWLWMSIFLLPASTSVTVRDKTGIQANSLPNHQMLFIAFKSLKQILLRLKRP

SEQ ID NO: 22922 - protein, 454 aa, Homo sapiens
MRHSKRTYCPDWDDKDWDYGKWRSSSSHKRRKRSHSSAQENKRCKYNHSKMCDSHYLESRSINEKDYHSRRYIDEYRNDYTQGCEPGHRQRDHESRYQNHSSKSSGRSGRSSYKSKHRIHHSTSHRRSHGDEIVDTLGEGAFGKVVECIDHKAGGRHVAVKIVKNVDRYCEAARSEIQVLEHLNTTDPNSTFRCVQMLEWFEHHGHICIVFELLGLSTYDFIKENGFLPFRLDHIRKMAYQICKSVNFLHSNKLTHTDLKPENILFVQSDYTEAYNPKIKRDERTLINPDIKVVDFGSATYDDEHHSTLVSTRHYRAPEVILALGWSQPCDVWSIGCILIEYYLGFTVFPTHDSKEHLAMMERILGPLPKHMIQKTRKRKYFHHDRLDWDEHSSAGRYVSRRCKPLKEFMLSQDVEHERLFDLIQKMLEYDPAKRITLREALKHPFFDLLKKSI

SEQ ID NO: 22923 - protein, 546 aa, Homo sapiens
MAAGSTTLHAVEKLQVRLATKTEPKKLEKYLQKLSALPMTADILAETGIRKTVKRLRKHQHVGDFARDLAARWKKLVLVDRNTRPGPQDPEESASRQRFGEALQDQEKAWGFPENATAPRSPSHSPEHRRTARRTPPGQQRPHPRSHSREPRAERKCPRIAPADSGRYRASPTRTAPLRMPEGPEPAAPGKQPGRGHTHAAQGGPLLCPGCQGQPQGKAVVSHSKGHKSSRQDSAKKLPPVQESQSERLQAAGADSAGPKTVPSHVFSELWDLSEAWMQANYDPLSDSDSMTSQAKPEALSSPKFREEAAFPGRRVNAKMPVYSGSRPACQLQVPTLRQQCAQVLRNNPDALSDVGEVPYWVLEPVLEGWRPDQLYRRKKDNHALVRETDELRRNHCFQDFKEEKPQENKTWREQYLRLPDAPEQRLRVMTTNIRSARGNNPNGREAKMICFKSVAKTPYDTSRRQEKSAGDADPENGEIKPASKPAGSSHTPSSQSSSGGGRDSSSSSSNEHAAPAAKTRKQAAKKVAPLMAKAIRDYKRRFSRR

SEQ ID NO: 22924 - protein, 956 aa, Homo sapiens
MPPRAPPAPGPRPPPRAAAATDTAAGAGGAGGAGGAGGPGFRPLAPRPWRWLLLLALPAACSAPPPRPVYTNHWAVQVLGGPAEADRVAAAHGYLNLGQIGNLEDYYHFYHSKTFKRSTLSSRGPHTFLRMDPQVKWLQQQEVKRRVKRQVRSDPQALYFNDPIWSNMWYLHCGDKNSRCRSEMNVQAAWKRGYTGKNVVVTILDDGIERNHPDLAPNYDSYASYDVNGNDYDPSPRYDASNENKHGTRCAGEVAASANNSYCIVGIAYNAKIGGIRMLDGDVTDVVEAKSLGIRPNYIDIYSASWGPDDDGKTVDGPGRLAKQAFEYGIKKGRQGLGSIFVWASGNGGREGDYCSCDGYTNSIYTISVSSATENGYKPWYLEECASTLATTYSSGAFYERKIVTTDLRQRCTDGHTGTSVSAPMVAGIIALALEANSQLTWRDVQHLLVKTSRPAHLKASDWKVNGAGHKVSHFYGFGLVDAEALVVEAKKWTAVPSQHMCVAASDKRPRSIPLVQVLRTTALTSACAEHSDQRVVYLEHVVVRTSISHPRRGDLQIYLVSPSGTKSQLLAKRLLDLSNEGFTNWEFMTVHCWGEKAEGQWTLEIQDLPSQVRNPEKQGKLKEWSLILYGTAEHPYHTFSAHQSRSRMLELSAPELEPPKAALSPSQVEVPEDEEDYTGVCHPECGDKGCDGPNADQCLNCVHFSLGSVKTSRKCVSVCPLGYFGDTAARRCRRCHKGCETCSSRAATQCLSCRRGFYHHQEMNTCVTLCPAGFYADESQKNCLKCHPSCKKCVDEPEKCTVCKEGFSLARGSCIPDCEPGTYFDSELIRCGECHHTCGTCVGPGREECIHCAKNFHFHDWKCVPACGEGFYPEEMPGLPHKVCRRCDENCLSCAGSSRNCSRCKTGFTQLGTSCITNHTCSNADETFCEMVKSNRLCERKLFIQFCCRTCLLAG

SEQ ID NO: 22925 - protein, 970 aa, Homo sapiens
MLQQVNGHNPGSDGQAREYLREDLQEFLGGEVLLYKLDDLTRVNPVTLETVLRCLQARYMADTFYTNAGCTLVALNPFKPVPQLYSPELMREYHAAPQPQKLKPHVFTVGEQTYRNVKSLIEPVNQSIVVSGESGAGKTWTSRCLMKFYAVVATSPASWESHKIAERIEQRILNSNPVMEAFGNACTLRNNNSSRFGKFIQLQLNRAQQMTGAAVQTYLLEKTRVACQASSERNFHIFYQICKGASEDERLQWHLPEGAAFSWLPNPERSLEEDCFEVTREAMLHLGIDTPTQNNIFKVLAGLLHLGNIQFAASEDEAQPCQPMDDAKYSVRTAASLLGLPEDVLLEMVQIRTIRAGRQQQVFRKPCARAECDTRRDCLAKLIYARLFDWLVSVINSSICADTDSWTTFIGLLDVYGFESFPDNSLEQLCINYANEKLQQHFVAHYLRAQQEEYAVEGLEWSFINYQDNQPCLDLIEGSPISICSLINEECRLNRPSSAAQLQTRIETALAGSPCLGHNKLSREPSFIVVHYAGPVRYHTAGLVEKNKDPIPPELTRLLQQSQDPLLMGLFPTNPKEKTQEEPPGQSRAPVLTVVSKFKASLEQLLQVLHSTTPHYIRCIKPNSQGQAQTFLQEEVLSQLEACGLVETIHISAAGFPIRVSHRNFVERYKLLRRLHPCTSSGPDSPYPAKGLPEWCPHSEEATLEPLIQDILHTLPVLTQAAAITGDSAEAMPAPMHCGRTKVFMTDSMLELLECGRARVLEQCARCIQGGWRRHRHREQERQWRAVMLIQAAIRSWLTRKHIQRLHAAATVIKRAWQKWRIRMACLAAKELDGVEEKHFSQAPCSLSTSPLQTRLLEAIIRLWPLGLVLANTAMGVGSFQRKLVVWACLQLPRGSPSSYTVQTAQDQAGVTSIRALPQGSIKFHCRKSPLRYADICPEPSPYSITGFNQILLERHRLIHVTSSAFTGLG

SEQ ID NO: 22926 - protein, 544 aa, Homo sapiens
MEELVVEVRGSNGAFYKAFVKDVHEDSITVAFENNWQPDRQIPFHDVRFPPPVGYNKDINESDEVEVYSRANEKEPCCWWLAKVRMIKGEFYVIEYAACDATYNEIVTIERLRSVNPNKPATKDTFHKIKLDVPEDLRQMCAKEAAHKDFKKAVGAFSVTYDPENYQLVILSINEVTSKRAHMLIDMHFRSLRTKLSLIMRNEEASKQLESSRQLASRFHEQFIVREDLMGLAIGTHGANIQQARKVPGVTAIDLDEDTCTFHIYGEDQDAVKKARSFLEFAEDVIQVPRNLVGKVIGKNGKLIQEIVDKSGVVRVRIEAENEKNVPQEEGMVPFVFVGTKDSIANATVLLDYHLNYLKEVDQLRLERLQIDEQLRQIGASSRPPPNRTDKEKSYVTDDGQGMGRGSRPYRNRGHGRRGPGYTSGTNSEASNASETESDHRDELSDWSLAPTEEERESFLRRGDGRRRGGGGRGQGGRGRGGGFKGNDDHSRTDNRPRNPREAKGRTTDGSLQIPPVKVVGCARVKIVTRRKRSQTAWMVSNHS

SEQ ID NO: 22927 - protein, 913 aa, Homo sapiens
MQSRRARPRREVIQNSKEVLSLLQEKNPAFKPVLAIIQAGDDNLMQEINQNLAEEAGLNITHICLPPDSSEAEIIDEILKINEDTRVHGLALQISENLFSNKVLNALKPEKDVDGVTDINLGKLVRGDAHECFVSPVAKAVIELLEKSVGVNLDGKKILVVGAHGSLEAALQCLFQRKGSMTMSIQWKTRQLQSKLHEADIVVLGSPKPEEIPLTWIQPGTTVLNCSHDFLSGKVGCGSPRIHFGGLIEEDDVILLAAALRIQNMVSSGRRWLREQQHRRWRLHCLKLQPLSPVPSDIEISRGQTPKAVDVLAKEIGLLADEIEIYGKSKAKVRLSVLERLKDQADGKYVLVAGITPTPLGEGKSTVTIGLVQALTAHLNVNSFACLRQPSQGPTFGVKGGAAGGGYAQVIPMEEFNLHLTGDIHAITAANNLLAAAIDTRILHENTQTDKALYNRLVPLVNGVREFSEIQLARLKKLGINKTDPSTLTEEEVSKFARLDIDPSTITWQRVLDTNDRFLRKITIGQGNTEKGHYRQAQFDIAVASEIMAVLALTDSLADMKARLGRMVVASDKSGQPVTADDLGVTGALTVLMKDAIKPNLMQTLEGTPVFVHAGPFANIAHGNSSVLADKIALKLVGEEGFVVTEAGFGADIGMEKFFNIKCRASGLVPNVVVLVATVRALKMHGGGPSVTAGVPLKKEYTEENIQLVADGCCNLQKQIQITQLFGVPVVVALNVFKTDTRAEIDLVCELAKRAGAFDAVPCYHWSVGGKGSVDLARAVREAASKRSRFQFLYDVQVPIVDKIRTIAQAVYGAKDIELSPEAQAKIDRYTQQGFGNLPICMAKTHLSLSHQPDKKGVPRDFILPISDVRASIGAGFIYPLVGTMSTMPGLPTRPCFYDIDLDTETEQVKGLF

SEQ ID NO: 22928 - protein, 673 aa, Homo sapiens
MSRTLASAVPLSSPDYYERLGQLQHGLRDSEKKRLDLEKKLYEYNQSDTCRVKLKYVKLKNYLKEICESEKKAHTRNQEYLKRFERVQAHVVHFTTNTEKLQKLKLEYETQIKKMLCSKDSLGLKEELTDEDREKVAVHEGINSGTAMSRGLYQPATIFMGRQMSAILSMRDFSTEHKSPQPTKNFSIPDPHSHRQTAQSSNVTDSCVVQTSNDTQCLNKSDNIDGKASLQIGEKMPVTASVLSEEEQTHCLEIGSNTRHGKSNLSEGKKSAELNSPLRERLSPENRTTDLKCDSSSGSEGEILTREHIEVEEKRASPPVSPIPVSEYCESENKWSQEKHSPWEGVSDHLAHREPKSQKPFRKMQEEEEESWSTSSDLTISISEDDLILESPEPQPNPGGKMEGEDGIEALKLIHAEQERVALSTEKNCILQTLSSPDSEKESSTNAPTREPGQTPDSDVPRAQVGQHVATLKEHDNSVKEEATALLRKALTEECGRRSAIHSSESSCSLPSILNDNSGIKEAKPAVWLNSVPTREQEVSSGCGDKSKKENVAADIPITETEAYQLLKKATLQDNTNQTENRFQKTDASVSHLSGLNIGSGAFETKTANKIASEASFSSSEGSPLSRHENKKKPVINLKSNALWDESDDSNSEIEAALRPRNHNTDDSDDFYD

SEQ ID NO: 22929 - protein, 142 aa, Homo sapiens; identical to SEQ ID NO: 7490

SEQ ID NO: 22930 - protein, 148 aa, Homo sapiens
LEGASLETVKVGKTYELLNCDKHKSILLKNGRDPGEARPDITHQSLLMLMDSPLNRAGLLQVYIHTQKNVLIEVNPQTRIPRTFDRFCGLMVQLLHKLSVRAADGPQKLLKVSVEYTEKMVSISNYPLSAALTCAKLTTAFEEVWGVI

SEQ ID NO: 22931 - protein, 408 aa, Homo sapiens
MDVTSQARGVGLEMYPGTAQPAAPNTTSPELNLSHPLLGTALANGTGELSEHQQYVIGLFLSCLYTIFLFPIGFVGNILILVVNISFREKMTIPDLYFINLAVADLILVADSLIEVFNLHERYYDIAVLCTFMSLFLQVNMYSSVFFLTWMSFDRYIALARAMRCSLFRTKHHARLSCGLIWMASVSATLVPFTAVHLQHTDEACFCFADVREVQWLEVTLGFIVPFAIIGLCYSLIVRVLVRAHRHRGLRPRRQKALRMILAVVLVFFVCWLPENVFISVHLLQRTQPGAAPCKQSFRHAHPLTHGHVMSLNCGQMWLLAPRGLARVTLAWSPWGCLGNLTTGHLALLTQNCYNPKALAPQGPKASGDQPVTQLLPANPACRCTCLPLQETFLTPSTRKATRRGHCG

SEQ ID NO: 22932 - protein, 214 aa, Homo sapiens
MAEQVLPQALYLSNMRKAVKIRERTPEDIFKPTNGIIHHFKTMHRYTLEMFRTCQFCPQFREIIHKALIDRNIQATLESQKKLNWCREVRKLVALKTNGDGNCLMHATSQYMWGVQDTDLVLRKALFSTLKETDTRNFKFRWQLESLKSQEFVETGLCYDTRNWNDEWDNLIKWLPQTHPWPEVDFSTTHWKKYTYLSFATSSEGQSLSFQTKC

SEQ ID NO: 22933 - protein, 4590 aa, Homo sapiens
MGRHLALLLLLLLLFQHFGDSDGSQRLEQTPLQFTHLEYNVTVQENSAAKTYVGHPVKMGVYITHPAWEVRYKIVSGDSENLFKAEEYILGDFCFLRIRTKGGNTAILNREVKDHYTLIVKALEKNTNVEARTKVRVQVLDTNDLRPLFSPTSYSVSLPENTAIRTSIARVSATDADIGTNGEFYYSFKDRTDMFAIHPTSGVIVLTGRLDYLETKLYEMEILAADRGMKLYGSSGISSMAKLTVHIEQANECAPVITAVTLSPSELDRDPAYAIVTVDDCDQGANGDIASLSIVAGDLLQQFRTVRSFPGSKEYKVKAIGGIDWDSHPFGYNLTLQAKDKGTPPQFSSVKVIHVTSPQFKAGPVKFEKDVYRAEISEFAPPNTPVVMVKAIPAYSHLRYVFKSTPGKAKFSLNYNTGLISILEPVKRQQAAHFELEVTTSDRKASTKVLVKVLGANSNPPEFTQTAYKAAFDENVPIGTTVMSLSAVDPDEGENGYVTYSIANLNHVPFAIDHFTGAVSTSENLDYELMPRVYTLRIRASDWGLPYRREVEVLATITLNNLNDNTPLFEKINCEGTIPRDLGVGEQITTVSAIDADELQLVQYQIEAGNELDFFSLNPNSGVLSLKRSLMDGLGAKVSFHSLRITATDGENFATPLYINITVAASHKLVNLQCEETGVAKMLAEKLLQANKLHNQGEVEDIFFDSHSVNAHIPQFRSTLPTGIQVKENQPVGSSVIFMNSTDLDTGFNGKLVYAVSGGNEDSCFMIDMETGMLKILSPLDRETTDKYTLNITVYDLGIPQKAAWRLLHVVVVDANDNPPEFLQESYFVEVSEDKEVHSEIIQVEATDKDLGPNGHVTYSIVTDTDTFSIDSVTGVVNIARPLDRELQHEHSLKIEARDQAREEPQLFSTVVVKVSLEDVNDNPPTFIPPNYRVKVREDLPEGTVIMWLEAHDPDLGQSGQVRYSLLDHGEGNFDVDKLSGAVRIVQQLDFEKKQVYNLTVRAKDKGKPVSLSSTCYVEVEVVDVNENLHPPVFSSFVEKGTVKEDAPVGSLVMTVSAHDEDARRDGEIRYSIRDGSGVGVFKIGEETGVIETSDRLDRESTSHYWLTVFATDQGVVPLSSFIEIYIEVEDVNDNAPQTSEPVYYPEIMENSPKDVSVVQIEAFDPDSSSNDKLMYKITSGNPQGFFSIHPKTGLITTTSRKLDREQQDEHILEVTVTDNGSPPKSTIARVIVKILDENDNKPQFLQKFYKIRLPEREKPDRERNARREPLYHVIATDKDEGPNAEISYSIEDGNEHGKFFIEPKTGVVSSKRFSAAGEYDILSIKAVDNGRPQKSSTTRLHIEWISKPKPSLEPISFEESFFTFTVMESDPVAHMIGVISVEPPGIPLWFDITGGNYDSHFDVDKGTGTIIVAKPLDAEQKSNYNLTVEATDGTTTILTQVFIKVIDTNDHRPQFSTSKYEVVIPEDTAPETEILQISAVDQDEKNKLIYTLQSSRDPLSLKKFRLDPATGSLYTSEKLDHEAVPAHLTVMVRDQDVPVKRNFARIVVNVSDTNDHAPWFTASSYKGRVYESAAVGSVVLQVTALDKDKGKNAEVLYSIESGTFGNIGNSFMIDPVLGSIKTAKELDRSNQAEYDLMVKATDKGSPPMSEITSVRIFVTIADNASPKFTSKEYSVELSETVSIGSFVGMVTAHSQSSVVYEIKDGNTGDAFDINPHSGTIITQKALDFETLPIYTLIIQGTNMAGLSTNTTVLVHLQDENDNAPVFMQAEYTGLISESASINSVVLTDRNVPLVIRAADADKDSNALLVYHIVEPSVHTYFAIDSSTGAIHTVLSLDYEETSIFHFTVQVHDMGTPRLFAEYAANVTVHVIDINDCPPVFAKPLYEASLLLPTYKGVKVITVNATDADSSAFSQLIYSITEGNIGEKFSMDYKTGALTVQNTTQLRSRYELTVRASDGRFAGLTSVKINVKESKESHLKFTQDVYSAVVKENSTEAETLAVITAIGNPINEPLFYHILNPDRRFKISRTSGVLSTTGTPFDREQQEAFDVVVEVTEEHKPSAVAHVVVKVIVEDQNDNAPVFVNLPYYAVVKVDTEVGHVIRYVTAVDRDSGRNGEVHYYLKEHHEHFQIGPLGEISLKKQFELDTLNKEYLVTVVAKDGGNPAFSAEVIVPITVMNKAMPVFEKPFYSAEIAESIQVHSPVVHVQANSPEGLKVFYSITDGDPFSQFTINFNTGVINVIAPLDFEAHPAYKLSIRATDSLTGAHAEVFVDIIVDDINDNPPVFAQQSYAVTLSEASVIGTSVVQVRATDSDSEPNRGISYQMFGNHSKSHDHFHVDSSTGLISLLRTLDYEQSRQHTIFVRAVDGGMPTLSSDVIVTVDVTDLNDNPPLFEQQIYEARISEHAPHGHFVTCVKAYDADSSDIDKLQYSILSGNDHKHFVIDSATGIITLSNLHRHALKPFYSLNLSVSDGVFRSSTQVHVTVIGGNLHSPAFLQNEYEVELAENAPLHTLVMEVKTTDGDSGIYGHVTYHIVNDFAKDRFYINERGQIFTLEKLDRETPAEKVISVRLMAKDAGGKVAFCTVNVILTDDNDNAPQFRATKYEVNIGSSAAKGTSVVKVLASDADEGSNADITYAIEADSESVKENLEINKLSGVITTKESLIGLENEFFTFFVRAVDNGSPSKESVVLVYVKILPPEMQLPKFSEPFYTFTVSEDVPIGTEIDLIRAEHSGTVLYSLVKGNTPESNRDESFVIDRQSGRLKLEKSLDHETTKWYQFSILARCTQDDHEMVASVDVSIQVKDANDNSPVFESSPYEAFIVENLPGGSRVIQIRASDADSGTNGQVMYSLDQSQSVEVIESFAINMETGWITTLKELDHEKRDNYQIKVVASDHGEKIQLSSTAIVDVTVTDVNDSPPRFTAEIYKGTVSEDDPQGGVIAILSTTDADSEEINRQVTYFITGGDPLGQFAVETIQNEWKVYVKKPLDREKRDNYLLTITATDGTFSSKAIVEVKVLDANDNSPVCEKTLYSDTIPEDVLPGKLIMQISATDADIRSNAEITYTLLGSGAEKFKLNPDTGELKTSTPLDREEQAVYHLLVRATDGGGRFCQASIVLTLEDVNDNAPEFSADPYAITVFENTEPGTLLTRVQATDADAGLNRKILYSLIDSADGQFSINELSGIIQLEKPLDRELQAVYTLSLKAVDQGLPRRLTATGTVIVSVLDINDNPPVFEYREYGATVSEDILVGTEVLQVYAASRDIEANAEITYSIISGNEHGKFSIDSKTGAVFIIENLDYESSHEYYLTVEATDGGTPSLSDVATVNVNVTDINDNTPVFSQDTYTTVISEDAVLEQSVITVMADDADGPSNSHIHYSIIDGNQGSSFTIDPVRGEVKVTKLLDRETISGYTLTVQASDNGSPPRVNTTTVNIDVSDVNDNAPVFSRGNYSVIIQENKPVGFSVLQLVVTDEDSSHNGPPFFFTIVTGNDEKAFEVNPQGVLLTSSAIKRKEKDHYLLQVKVADNGKPQLSSLTYIDIRVIEESIYPPAILPLEIFITSSGEEYSGGVIGKIHATDQDVYDTLTYSLDPQMDNLFSVSSTGGKLIAHKKLDIGQYLLNVSVTDGKFTTVADITVHIRQVTQEMLNHTIAIRFANLTPEEFVGDYWRNFQRALRNILGVRRNDIQIVSLQSSEPHPHLDVLLFVEKPGSAQISTKQLLHKINSSVTDIEEIIGVRILNVFQKLCAGLDCPWKFCDEKVSVDESVMSTHSTARLSFVTPRHHRAAVCLCKEGRCPPVHHGCEDDPCPEGSECVSDPWEEKHTCVCPSGRFGQCPGSSSMTLTGNSYVKYRLTENENKLEMKLTMRLRTYSTHAVVMYARGTDYSILEIHHGRLQYKFDCGSGPGIVSVQSIQVNDGQWHAVALEVNGNYARLVLDQVHTASGTAPGTLKTLNLDNYVFFGGHIRQQGTRHGRSPQVGNGFRGCMDSIYLNGQELPLNSKPRSYAHIEESVDVSPGCFLTATEDCASNPCQNGGVCNPSPAGGYYCKCSALYIGTHCEISVNPCSSKPCLYGGTCVVDNGGFVCQCRGLYTGQRCQLSPYCKDEPCKNGGTCFDSLDGAVCQCDSGFRGERCQSDIDECSGNPCLHGALCENTHGSYHCNCSHEYRGRHCEDAAPNQYVSTPWNIGLAEGIGIVVFVAGIFLLVVVFVLCRKMISRKKKHQAEPKDKHLGPATAFLQRPYFDSKLNKNIYSDIPPQVPVRPISYTPSIPSDSRNNLDRNSFEGSAIPEHPEFSTFNPESVHGHRKAVAVCSVAPNLPPPPPSNSPSDSDSIQKPSWDFDYDTKVVDLDPCLSKKPLEEKPSQPYSARESLSEVQSLSSFQSESCDDNGYHWDTSDWMPSVPLPDIQEFPNYEVIDEQTPLYSADPNAIDTDYYPGGYDIESDFPPPPEDFPAADELPPLPPEFSNQFESIHPPRDMPAAGSLGSSSRNRQRFNLNQYLPNFYPLDMSEPQTKGTGENSTCREPHAPYPPGYQRHFEAPAVESMPMSVYASTASCSDVSACCEVESEVMMSDYESGDDGHFEEVTIPPLDSQQHTEV

SEQ ID NO: 22934 - protein, 971 aa, Homo sapiens
MGGMGTPGDLHAACPSTTRRDALCLGPEFEFDLRHSAGCPGDLGFFPLDPDTEAGGSGCLPTWLPLRRLARGRLEVTADLAERRRIRSAIRELQRQELEREEEALASKRFRAERQDNKENWLHSQQREAEQRAALARLAGQLESMNDVEELTALLRSAGEYEERKLIRAAIRRVRAQEIEAATLAGRLYSGRPNSGSREDSKGLAAHRLEQCEVPEREEQEQQAEVSKPTPTPEGTSQDVTTVTLLLRAPPGSTSSSPASPSSSPTPASPEPPLEPAEAQCLTAEVPGSPEPPPSPPKTTSPEPQESPTLPSTEGQVVNKLLSGPKETPAAQSPTRGPSDTKRADVAGPRPCQRSLSVLSPRQPAQNRESTPLASGPSSFQRAGSVRDRVHKFTSDSPMAARLQDGTPQAALSPLTPARLLGPSLTSTTPASSSSGSSSRGPSDTSSRFSKEQRGVAQPLAQLRSCPQEEGPRGRGLAARPLENRAGGPVARSEEPGAPLPVAVGTAEPGGSMKTTFTIEIKDGRGQASTGRVLLPTGNQRAELTLGLRAPPTLLSTSSGGKSTITRVNSPGTLARLGSVTHVTSFSHAPPSSRGGCSIKMEAEPAEPLAAAVEAANGAEQTRVNKAPEGRSPLSAEELMTIEDEGVLDKMLDQSTDFEERKLIRAALRELRQRKRDQRDKERERRLQEARGRPGEGRGNTATETTTRHSQRAADGSAVSTVTKTERLVHSNDGTRTARTTTVESSFVRRSENGSGSTMMQTKTFSSSSSSKKMGSIFDREDQASPRAGSLAALEKRQAEKKKELMKAQSLPKTSASQARKAMIEKLEKEGAAGSPGGPRAAVQRSTSFGVPNANSIKQMLLDWCRAKTRGYEHVDIQNFSSSWSDGMAFCALVHNFFPEAFDYGQLSPQNRRQNFEVAFSSAETHADCPQLLDTEDMVRLREPDWKCVYTYIQEFYRCLVQKGLVKTKKS

SEQ ID NO: 22935 - protein, 362 aa, Homo sapiens
MEEEEYEQIPQENPPEELSQDPVLELSGGSALALGENVQPHLQGCGPRMVAQRWFQGRCWSFTICPCSLGVHPEAPGDDKMGYMGPYPSSLCFLWIFLGLREKEQKTPRRLRLILMGKTGSGKSATGNSILGRDVFESKLSTRPVTKTSQRRSREWAGKELEVIDTPNILSPQVSPEVADAICQAIVLSAPGPHAVLLVTQLGRFTDEDQQVVRRLQEVFGVGVLGHTILVFTRKEDLAGGSLEDYVRETNNQALAWLDVTLARRHCGFNNRAQGEEQEAQLRELMEKVEAIMWENEGDYYSNKAYQYTQQNFRLKELQERQVSQGQGSEDVPGEESWLEGLSQIQKESEEAHRCLLGKADL

SEQ ID NO: 22936 - protein, 223 aa, Homo sapiens
MSRLGLPEEPVRNSLLDDAKARLRKYDIGGKYSHLPYNKYSVLLPLVAKEGKLHLLFTVRSEKPCEVLAPPLPSAMIVSFLRSPQKPSRRQHHAPCTACETTDTLITPFVGLIDHNFQAQPNPAEVKDVFLVPLAYFLHPQVHDQHYVTRLGHRFINHIFEYTNPEDGVTYQIKGMTANLAVLVAFIILEKKPTFEVQFNLNDVLASSEELFLKVHKKATSRL

SEQ ID NO: 22937 - protein, 563 aa, Homo sapiens
LTHELVMFRDVAIDVSQEEWECLNPAQRNLYKEVMLENYSNLVSLGLSVSKPAVISSLEQGKEPWMVVREETGRWCPGTWKTWGFHNNFLDNNEATDINADLASRDEPQKLSPKRDIYETELSQWVNMEEFKSHSPERSIFSAIWEGNCHFEQHQGQEEGYFRQLMINHENMPIFSQHTLLTQEFYDREKISECKKCRKIFSYHLFFSHHKRTHSKELSECKECTEIVNTPCLFKQQTIQNGDKCNECKECWKAFVHCSQLKHLRIHNGEKRYECNECGKAFNYGSELTLHQRIHTGEKPYECKECGKAFRQRSQLTQHQRLHTGEKPYECKQCGKAFIRGFQLTEHLRLHTGEKPYECKECGKTFRHRSHLTIHQRIHTGEKPYECRECGKAFSYHSSFSHHQKIHSGKKPYECHECGKAFCDGLQLTLHQRIHTGEKPYECKECGKTFRQCSHLKRHQRIHTGEKPHECMICGKAFRLHSHLIQHQRIHTGEKPYECKECGKAFSYHSSFSHHQRIHSGKKPYQCGKAFNHRLQLNLHQTLHTGEKPVRFPLLPPHPSLAS

SEQ ID NO: 22938 - protein, 1679 aa, Homo sapiens
MAQILPIRFQEHLQLQNLGINPANIGFSTLTMESDKFICIREKVGEQAQVVIIDMNDPSNPIRRPISADSAIMNPASKVIALKGIKESGKTLQIFNIEMKSKMKAHTMTDDVTFWKWISLNTVALVTDNAVYHWSMEGESQPVKMFDRHSSLAGCQIINYRTDAKQKWLLLTGISAQQNRVVGAMQLYSVDRKVSQPIEGHAASFAQFKMEGNAEESTLFCFAVRGQAGGKLHIIEVGTPPTGNQPFPKKAVDVFFPPEAQNDFPVAMQISEKHDVVFLITKYGYIHLYDLETGTCIYMNRISGETIFVTAPHEATAGIIGVNRKGQVLSVCVEEENIIPYITNVLQNPDLALRMAVRNNLAGAEELFARKFNALFAQGNYSEAAKVAANAPKGILRTPDTIRRFQSVPAQPGQTSPLLQYFGILLDQGQLNKYESLELCRPVLQQGRKQLLEKWLKEDKLECSEELGDLVKSVDPTLALSVYLRANVPNKVIQCFAETGQVQKIVLYAKKVGYTPDWIFLLRNVMRISPDQGQQFAQMLVQDEEPLADITQIVDVFMEYNLIQQCTAFLLDALKNNRPSEGPLQTRLLEMNLMHAPQVADAILGNQMFTHYDRAHIAQLCEKAGLLQRALEHFTDLYDIKRAVVHTHLLNPEWLVNYFGSLSVEDSLECLRAMLSANIRQNLQICVQVASKYHEQLSTQSLIELFESFKSFEGLFYFLGSIVNFSQDPDVHFKYIQAACKTGQIKEVERICRESNCYDPERVKNFLKEAKLTDQLPLIIVCDRFDFVHDLVLYLYRNNLQKYIEIYVQKVNPSRLPVVIGGLLDVDCSEDVIKNLILVVRGQFSTDELVAEVEKRNRLKLLLPWLEARIHEGCEEPATHNALAKIYIDSNNNPERFLRENPYYDSRVVGKYCEKRDPHLACVAYERGQCDLELINVCNENSLFKSLSRYLVRRKDPELWGSVLLESNPYRRPLIDQVVQTALSETQDPEEVSVTVKAFMTADLPNELIELLEKIVLDNSVFSEHRNLQNLLILTAIKADRTRVMEYINRLDNYDAPDIANIAISNELFEEAFAIFRKFDVNTSAVQVLIEHIGNLDRAYEFAERCNEPAVWSQLAKAQLQKGMVKEAIDSYIKADDPSSYMEVVQAANTSGNWEELVKYLQMARKKARESYVETELIFALAKTNRLAELEEFINGPNNAHIQQVGDRCYDEKMYDAAKLLYNNVSNFGRLASTLVHLGEYQAAVDGARKANSTRTWKEVCFACVDGKEFRLAQMCGLHIVVHADELEELINYYQDRGYFEELITMLEAALGLERAHMGMFTELAILYSKFKPQKMREHLELFWSRVNIPKVLRAAEQAHLWAELVFLYDKYEEYDNAIITMMNHPTDAWKEGQFKDIITKVANVELYYRAIQFYLEFKPLLLNDLLMVLSPRLDHTRAVNYFSKVKQLPLVKPYLRSVQNHNNKSVNESLNNLFITEEDYQALRTSIDAYDNFDNISLAQRLEKHELIEFRRIAAYLFKGNNRWKQSVELCKKDSLYKDAMQYASESKDTELAEELLQWFLQEEKRECFGACLFTCYDLLRPDVVLETAWRHNIMDFAMPYFIQVMKEYLTKVDKLDASESLRKEEEQATETQPIVYGQPQLMLTAGPSVAVPPQAPFGYGYTAPPYGQPQPGFGYSM

SEQ ID NO: 22939 - protein, 441 aa, Homo sapiens
MGKEKTHINIVVIGHVDSGKSTTTGHLIYKCGGIDKRTIEKFEKEAAEMGKGSFKYAWVLDKLKAERERGITIDISLWKFETSKYYVTIIDAPGHRDFIKNMITGTSQADCAVLIVAAGVGEFEAGISKNGQTREHALLAYTQKRYEEIVKEVSTYIKKIGYNPDTVAFVPISGWNGDNMLEPSANMPWFKGWKVTRKDGNASGTTLLEALDCILPPTRPTDKPLRLPLQDVYKIGGIGTVPVGRVETGVLKPGMVVTFAPVNVTTEVKSVEMHHEALSEALPGDNVGFNVKNVSVKDVRRGNVAGDSKNDPPMEAAGFTAQVIILNHPGQISAGYAPVLDCHTAHIACKFAELKEKIDRRSGKKLEDGPKFLKSGDAAIVDMVPGKPMCVESFSDYPPLGRFAVRDMRQTVAVGVIKAVDKKAAGAGKVTKSAQKAQKAK

SEQ ID NO: 22940 - protein, 564 aa, Homo sapiens
MPECLWTQGVLQEVLNSYFCGSIILSTLPWEVPGGHASRICLLLLATGENKQVECYQLSPGLSSLPDFQDSEETVTSRMLFPTSAQESSRGLPDANDLCLGLQSLSLTGWDRPWSTQDSDSSAQSSTHSVLSMLHNPLGNVLGKPPLSFLPLDPLGSDLVDKFPAPSVRGSRLDTRPILDSRSSSPSDSDTSGFSSGSDHLSDLISSLRISPPLPFLSLSGGGPRDPLKMGVGSRMDQEQAALAAVTPSPTSASKRWPGASVWPSWDLLEAPKDPFSIEREARLHRQAAAVNEATCTWSGQLPPRNYKNPIYSCKVFLGGVPWDITEAGLVNTFRVFGSLSVEWPGKDGKHPRCPPKGYVYLVFELEKSVRSLLQACSHDPLSPDGLSEYYFKMSSRRMRCKEVQVIPWVLADSNFVRSPSQRLDPSRTVFVGALHGMLNAEALAAILNDLFGGVVYAGIDTDKHKYPIGSGRVTFNNQRSYLKAVSAAFVEIKTTKFTKKVQIDPYLEDSLCHICSSQPGPFFCRDQVCFKYFCRSCWHWRHSMEGLRHHSPLMRNQKNRDSS

SEQ ID NO: 22941 - protein, 789 aa, Homo sapiens
MLCGRWRRCRRPPEEPPVAAQVAAQVAAPVALPSPPTPSDGGTKRPGLRALKKMGLTEDEDVRAMLRGSRLRKIRSRTWHKERLYRLQEDGLSVWFQRRIPRAPSQHIFFVQHIEAVREGHQSEGLRRFGGAFAPARCLTIAFKGRRKNLDLAAPTAEEAQRWVRGLTKLRARLDAMSQRERLDHWIHSYLHRADSNQDSKMSFKEIKSLLRMVNVDMNDMYAYLLFKECDHSNNDRLEGAEIEEFLRRLLKRPELEEIFHQYSGEDRVLSAPELLEFLEDQGEEGATLARAQQLIQTYELNETAKQHELMTLDGFMMYLLSPEGAALDNTHTCVFQDMNQPLAHYFISSSHNTYLTDSQIGGPSSTEAYVRAFAQGCRCVELDCWEGPGGEPVIYHGHTLTSKILFRDVVQAVRDHAFTLSPYPVILSLENHCGLEQQAAMARHLCTILGDMLVTQALDSPNPEELPSPEQLKGRVLVKGKKLPAARSEDGRALSDREEEEEDDEEEEEEVEAAAQRRLAKQISPELSALAVYCHATRLRTLHPAPNAPQPCQVSSLSERKAKKLIREAGNSFVRHNARQLTRVYPLGLRMNSANYSPQEMWNSGCQLVALNFQTPGYEMDLNAGRFLVNGQCGYVLKPACLRQPDSTFDPEYPGPPRTTLSIQVLTAQQLPKLNAEKPHSIVDPLVRIEIHGVPADCARQETDYVLNNGFNPRWGQTLQFQLRAPELALVRFVVEDYDATSPNDFVGQFTLPLSSLKQGYRHIHLLSKDGASLSPATLFIQIRIQRS

SEQ ID NO: 22942 - protein, 721 aa, Homo sapiens
LAAPGLEVALTDLQSSRNNVRHHTEEITVDHLLVRRGQAFNLTLYFRNRSFQPGLDNIIFVVETGPLPDLALGTRAVFSLARHHSPSPWIAWLETNGATSTEVSLCAPPTAAVGRYLLKIHIDSFQGSVTAYQLGEFILLFNPWCPEDAVYLDSEPQRQEYVMNDYGFIYQGSKNWIRPCPWNYGQFEDKIIDICLKLLDKSLHFQTDPATDCALRGSPVYVSRVVCAMINSNDDNGVLNGNWSENYTDGANPAEWTGSVAILKQWNATGCQPVRYGQCWVFAAVMCTVMRCLGIPTRVITNFDSGHDTDGNLIIDEYYDNTGRILGNKKKDTIWNFHVWNECWMARKDLPPAYGGWQVLDATPQEMSNGVYCCGPASVRAIKEGEVDLNYDTPFVFSMVNADCMSWLVQGGKEQKLHQDTSSVGNFISTKSIQSDERDDITENYKYEEGSLQERQVFLKALQKLKARSFHGSQRGAELQPSRPTSLSQDSPRSLHTPSLRPSDVVQVSLKFKLLDPPNMGQDICFVLLALNMSSQFKDLKVNLSAQSLLHDGSPLSPFWQDTAFITLSPKEAKTYPCKISYSQYSQYLSTDKLIRISALGEEKSSPEKILVNKIITLSYPSITINVLGAAVVNQPLSIQVIFSNPLSEQVEDCVLTVEGSGLFKKQQKVFLGVLKPQHQASIILETVPFKSGQRQIQANMRSNKFKDIKGYRNVYVDFAL

SEQ ID NO: 22943 - protein, 495 aa, Homo sapiens
MSDLVKHQRTHTGEKPYKCGVCGKGFGDSSARIKHQRTHSGEKPYRARPPAQGPPKIPRSRIPAGERPTICGECGKSFRQSSDLVKHQRTHTGEKPYKCGICGKGFGDSSARIKHQRTHRGEQPPRPVVPRRQPSRAATAATQGPKAQDKPYICTDCGKRFVLSCSLLSHQRSHLGPKPFGCDVCGKEFARGSDLVKHLRVHTGEKPYLCPECGKGFADSSARVKHLRTHSGERPHACPECDRTFSLSSTLLRHRLTHMEPQDFSFPGYPLPALIPSPPPPPLGTSPPLTPRSPSHSGEPFGLPGLEPEPGGPQAGEPPPPLAGDKPHKCPECGKGFRRSSDLVKHHRVHTGEKPYLCPECGKGFADSSARVKHLRTHRGERARPPPPSTLLRPHNPPGPVPMAPRPRVRAQPSGPSQPHVCGFCGKEFPRSSDLVKHRRTHTGEKPYKCAECGKGFGDSSARIKHQRGHLVLTPFGIGDGRARPLKQEAATGLE

SEQ ID NO: 22944 - protein, 361 aa, Homo sapiens
AVPSDGQAREKLALYVYEYLLHVGAQKSAQTFLSEIRWEKNITLGEPPGFLHSWWCVFWDLYCAAPERRDTCEHSSEAKAFHDYSAAAAPSPVLGNIPPNDGMPGGPIPPGFFQPFMSPRYAGGPRPPIRMGNQPPGGVPGTQPLLPNSMDPTRQQGHPNMGGSMQRMNPPRGMGPMGPGPQNYGSGMRPPPNSLGPAMPGINMGPGAGRPWPNPNSANSIPYSSSSPGTYVGPPGGGGPPGTPIMPSPADSTNSSDNIYTMINPVPPGGSRSNFPMGPGSDGPMGGMGGMEPHHMNGSLGSGDIDGLPKNSPNNISGISNPPGTPRDDGELGGNFLHSFQNDNYSPSMTMSVSPLLRDAE

SEQ ID NO: 22945 - protein, 1628 aa, Homo sapiens
MAGVGAAALSLLLHLGALALAAGAEGGAVPREPPGQQTTAHSSVLAGNSQEQWHPLREWLGRLEAAVMELREQNKDLQTRVRQLESCECHPASPQCWGLGRAWPEGARWEPDACTACVCQDGAAHCGPQAHLPHCRGCSQNGQTYGNGETFSPDACTTCRCLEGTITCNQKPCPRGPCPEPGACCPHCKPGCDYEGQLYEEGVTFLSSSNPCLQCTCLRSRVRCMALKCPPSPCPEPVLRPGHCCPTCQGCTEGGSHWEHGQEWTTPGDPCRICRCLEGHIQCRQRECASLCPYPARPLPGTCCPVCDGCFLNGREHRSGEPVGSGDPCSHCRCANGSVQCEPLPCPPVPCRHPGKIPGQCCPVCDGCEYQGHQYQSQETFRLQERGLCVRCSCQAGEVSCEEQECPVTPCALPASGRQLCPACELDGEEFAEGVQWEPDGRPCTACVCQDGVPKCGAVLCPPAPCQHPTQPPGACCPSCDSCTYHSQVYANGQNFTDADSPCHACHCQDGTVTCSLVDCPPTTCARPQSGPGQCCPRCPDCILEEEVFVDGESFSHPRDPCQECRCQEGHAHCQPRPCPRAPCAHPLPGTCCPNDCSGCAFGGKEYPSGADFPHPSDPCRLCRCLSGNVQCLARRCVPLPCPEPVLLPGECCPQCPAAPAPAGCPRPGAAHARHQEYFSPPGDPCRRCLCLDGSVSCQRLPCPPAPCAHPRQGPCCPSCDGCLYQGKEFASGERFPSPTAACHLCLCWEGSVSCEPKACAPALCPFPARGDCCPDCDGCEYLGESYLSNQEFPDPREPCNLCTCLGGFVTCGRRPCEPPGCSHPLIPSGHCCPTCQGCRYHGVTTASGETLPDPLDPTCSLCTCQEGSMRCQKKPCPPALCPHPSPGPCFCPVCHSCLSQGREHQDGEEFEGPAGSCEWCRCQAGQVSCVRLQCPPLPCKLQVTERGSCCPRCRGCLAHGEEHPEGSRWVPPDSACSSCVCHEGVVTCARIQCISSCAQPRQGPHDCCPQCSDCEHEGRKYEPGESFQPGADPCEVCICEPQPEGPPSLRCHRRQCPSLVGCPPSQLLPPGPQHCCPTCAEALSNCSEGLLGSELAPPDPCYTCQCQDLTWLCIHQACPELSCPLSERHTPPGSCCPVCRECVVEAEGRRVADGESWRDPSNACIACTCHRGHVECHLEECQALSCPHGWAKVPQADSCCERCQAPTQSCVHQGREVASGERWTVDTCTSCSCMAGTVRCQSQRCSPLSCGPDKAPALSPGSCCPRCLPRPASCMAFGDPHYRTFDGRLLHFQGSCSYVLAKDCHSGDFSVHVTNDDRGRSGVAWTQEVAVLLGDMAVRLLQDGAVTVDGHPVALPFLQEPLLYVELRGHTVILHAQPGLQVLWDGQSQVEVSVPGSYQGRTCGLCGNFNGFAQDDLQGPEGLLLPSEAAFGNSWQVSEGLWPGRPCSAGREVDPCRAAGYRARREANARCGVLKSSPFSRCHAVVPPEPFFAACVYDLCACGPGSSADACLCDALEAYASHCRQAGVTPTWRGPTLCVVGCPLERGFVFDECGPPCPRTCFNQHIPLGELAAHCVRPCVPGCQCPAGLVEHEAHCIPPEACPQVLLTGDQPLGARPSPSREPQETP

SEQ ID NO: 22946 - protein, 484 aa, Homo sapiens
MKRYGKILMHHIPEQTTQLLKGLCTDYRPSLEGRSDREAPGCRANSEEFIPIFANNPRELKAFLEHMSEVQPDSPQGIYDTLLELRLQNWAHEKDPQVKEKLHAEAISLLKSGRFCDVFDKALVLCQMHDFQDGVLYLYEQGKLFQQIMHYHMQHEQYRQVISVCERHGEQDPSLWEQALSYFARKEEDCKEYVAAVLKHIENKNLMPPLLVVQTLAHNSTATLSVIRDYLVQKLQKQSQQIAQDELRVRRYREETTRIRQEIQELKASPKIFQKTKCSICNSALELPSVHFLCGHSFHQHCFESYSESDADCPTCLPENRKVMDMIRAQEQKRDLHDQFQHQLKCSNDSFSVIADYFGRGVFNKLTLLTDPPTARLTSAWRLGCNATYSCTPGGALKQPGGRCGQQWRTKRTDTMGPGRALHRRLADMPRAPLSSNVTALRTKADFLSLPSYLVSLPSLLFTSSVDHSRSVGEGTSATSECGQ

SEQ ID NO: 22947 - protein, 1483 aa, Homo sapiens
MPSEQKQLFCDEKQTTLKKDYDVKNEIVDRSAPKPKISGSIHYALKNVKIDLPKINIPNEVLLKHEVDKYRKLFQSKQQTARKSISIKTVSCVEECTLLHKSERAEEEGVKMSAKILNFSCLKCRDNTRYSPNDLQKHFQMWHHGELPSYPCEMCNFSANDFQVFKQHRRTHRSTLVKCDICNNESVYTLLNLTKHFTSTHCVNGNFQCEKCKFSTQDVGTFVQHIHRHNEIHYKCGKCHHVCFTKGELQKHLHIHSGTFPFTCQYCSYGATRREHLVRHVITLHKEHLYAKEKLEKDKYEKRMAKTSAGLKLILKRYKIGASRKTFWKRKKINSGSDRSIEKNTQVLKKMNKTQTKSEDQSHVVQEHLSEEKDERLHCENNDKAPESESEKPTPLSTGQGNRAEEGPNASSGFMKTAVLGPTLKNVMMKNNKLAVSPNYNATFMGFKMMDGKQHIVLKLVPIKQNVCSPGSQSGAAKDGTANLQPQTLDTNGFLTGVTTELNDTVYMKAATPFSCSSSILSGKASSEKEMTLISQRNNMLQTMDYEKSVSSLSATSELVTASVNLTTKFETRDNVDFWGNHLTQSHPEVLGTTIKSPDKVNCVAKPNAYNSGDMHNYCINYGNCELPVESSNQGSLPFHNYSKVNNSNKRRRFSGTAVYENPQRESSSSKTVVQQPISESFLSLVRQESSKPDSLLASISLLNDKDGTLKAKSEIEEQYVLEKGQNIDGQNLYSNENQNLECATEKSKWEDFSNVDSPMMPRITSVFSLQSQQASEFLPPEVNQLLQDVLKIKPDVKQDSSNTPNKGLPLHCDQSFQKHEREGKIVESSKDFKVQGIFPVPPGSVGINVPTNDLNLKFGKEKQVSSIPQDVRDSEKMPRISGFGTLLKTQSDAIITQQLVKDKLRATTQNLGSFYMQSPLLNSEQKKTIIVQTSKGFLIPLNITNKPGLPVIPGNALPLVNSQGIPASLFVNKKPGMVLTLNNGKLEGVSAVKTEGAPARGTVTKEPCKTPILKVEPNNNCLTPGLCSSIGSCLSMKSSSENTLPLKGPYILKPTSSVKAVLIPNMLSEQQSTKLNISDSVKQQNEIFPKPPLYTFLPDGKQAVFLKCVMPNKTELLKPKLVQNSTYQNIQPKKPEGTPQRILLKIFNPVLNVTAANNLSVSNSASSLQKDNVPSNQIIGGEQKEPESRDALPFLLDDLMPANEIVITSTATCPESSEEPICVSDCSESRVLRCKTNCRIERNFNRKKTSKKIFSKTKTHGSKDSETAFVSRNRNCKRKCRDSYQEPPRRKATLHRKCKEKAKPEDVRETFGFSRPRLSKDSIRTLRLFPFSSKQLVKCPRRNQPVVVLNHPDADAPEVVSVMKTIAKFNGHVLKVSLSKRTINALLKPVCYNPPKTTYDDFSKRHKTFKPVSSVKERFVLKLTLKKTSKNNYQIVKTTSENILKAKFNCWFCGRVFDNQDTWAGHGQRHLMEATRDWNMLE

SEQ ID NO: 22948 - protein, 305 aa, Homo sapiens
YNTPSASYLEVTPDSENDFGNYNCTAVNRIGQESLEFILVQADTPSSPSIDQVEPYSSTAQVQFDEPEATGGVPILKYKAEWRAVGEEVWHSKWYDAKEASMEGIVTIVGLKPETTYAVRLAALNGKGLGEISAASEFKTQPVHSPPPPASASSSTPVPLSPPDTTWPLPALATTEPAREPSAPKLEGQMGEDGNSIKVNLIKQDDGGSPIRHYLVRYRALSSEWKPEIRLPSGSDHVMLKSLDWNAEYEVYVVAENQQGKSKAAHFVFRTSAQPTAIPATLGGNSASYTFVSLLFSAVTLLLLC

SEQ ID NO: 22949 - protein, 367 aa, Homo sapiens
MYLPPHDPHVDDPMRFKPLFRIHLMERKAATVECMYGHKGPHHGHIQIVKKDEFSTKCNQTDHHRMSGGRQEEFRTWLREEWGRTLEDIFHEHMQELILMKFIYTSQYDNCLTYRRIYLPPSRPDDLIKPGLFKGTYGSHGLEIVMLSFHGRRARGTKITGDPNIPAGQQTVEIDLRHRIQLPDLENQRNFNELSRIVLEVRERVRQEQQEGGHEAGEGRGRQGPRESQPSPAQPRAEAPSKGPDGTPGEDGGEPGDAVAAAEQPAQCGQGQPFVLPVGVSSRNEDYPRTCRMCFYGTGLIAGHGFTSPERTPGVFILFDEDRFGFVWLELKSFSLYSRVQATFRNADAPSPQAFDEMLKNIQSLTS

SEQ ID NO: 22950 - protein, 1278 aa, Homo sapiens
MTTHVTLEDALSNVDLLEELPLPDQQPCIEPPPSSIMYQANFDTNFEDRNAFVTGIARYIEQATVHSSMNEMLEEGHEYAVMLYTWRSCSRAIPQVKCNEQPNRVEIYEKTVEVLEPEVTKLMKFMYFQRKAIERFCSEVKRLCHAERRKDFVSEAYLLTLGKFINMFAVLDELKNMKCSVKNDHSAYKRAAQFLRKMADPQSIQESQNLSMFLANHNRITQCLHQQLEVIPGYEELLADIVNICVDYYENKMYLTPSEKHMLLKVMGFGLYLMDGNVSNIYKLDAKKRINLSKIDKFFKQLQVVPLFGDMQIELARYIKTSAHYEENKSKWTCTQSSISPQYNICEQMVQIRDDHIRFISELARYSNSEVVTGSGLDSQKSDEEYRELFDLALRGLQLLSKWSAHVMEVYSWKLVHPTDKFCNKDCPGTAEEYERATRYNYTSEEKFAFVEVIAMIKGLQVLMGRMESVFNQAIRNTIYAALQDFAQVTLREPLRQAVRKKKNVLISVLQAIRKTICDWEGGREPPNDPCLRGEKDPKGGFDIKVPRRAVGPSSTQACQWSPRALFHPTGGTQGRRGCRSLLYMVRTMLESLIADKSGSKKTLRSSLDGPIVLAIEDFHKQSFFFTHLLNISEALQQCCDLSQLWFREFFLELTMGRRIQFPIEMSMPWILTDHILETKEPSMMEYVLYPLDLYNDSAYYALTKFKKQFLYDEIEAEVNLCFDQFVYKLADQIFAYYKAMAGSVLLDKRFRAECKNYGVIIPYPPSNRYETLLKQRHVQLLGRSIDLNRLITQRISAAMYKSLDQAISRFESEDLTSIVELEWLLEINRLTHRLLCKHMTLDSFDAMFREANHNVSAPYGRITLHVFWELNFDFLPNYCYNGSTNRFVRTAIPFTQEPQRDKPANVQPYYLYGSKPLNIAYSHIYSSYRNFVGPPHFKTICRLLGYQGIAVVMEELLKIVKSLLQGTILQYVKTLIEVMPKICRLPRHEYGSPGILEFFHHQLKDIIEYAELKTDVFQSLREVGNAILFCLLIEQALSQEEVCDLLHAAPFQNILPRVYIKEGERLEVRMKRLEAKYAPLHLVPLIERLGTPQQIAIAREGDLLTKERLCCGLSMFEVILTRIRSYLQDPIWRGPPPTNGVMHVDECVEFHRLWSAMQFVYCIPVGTNEFTAEQCFGDGLNWAGCSIIVLLGQQRRFDLFDFCYHLLKVQRQDGKDEIIKNVPLKKMADRIRKYQILNNEVFAILNKYMKSVETDSSTVEHVRCFQPPIHQSLATTC

SEQ ID NO: 22951 - protein, 1059 aa, Homo sapiens
MFTGAGSCLETLEKGKPLVVVINEKLMNNHQLELAKQLHKEGHLFYCTCRVLTCPGQAKSIASAPGKCQDSAALTSTAFSGLDFGLLSGYLHKQALVTATHPTCTLLFPSCHAFFPLPLTPTLYKMHKGWKNYCSQKSLNEASMDEYLGSLGLFRKLTAKDASCLFRAISEQLFCSQVHHLEIRKACVSYMRENQQTFESYVEGSFEKYLERLGDPKESAGQLEIRALSLIYNRDFILYRFPGKPPTYVTDNGYEDKILLCYSSSGHYDSVYSKQFQSSAAVCQAVLYEILYKDVFVVDEEELKTAIKLFRSGSKKNRNNAVTGSEDAHTDYKSSNQNRMEEWGACYNAENIPEGYNKGTEETKSPENPSKMPFPYKVLKALDPEIYRNVEFDVWLDSRKELQKSDYMEYAGRQYYLGDKCQVCLESEGRYYNAHIQEVGNENNSVTVFIEELAEKHVVPLANLKPVTQVMSVPAWNAMPSRKGRGYQKMPGGYVPEIVISEMDIKQQKKMFKKIRGKEVYMTMAYGKGDPLLPPRLQHSMHYGHDPPMHYSQTAGNVMSNEHFHPQHPSPRQGRGYGMPRNSSRFINRHNMPGPKVDFYPGPGKRCCQSYDNFSYRSRSFRRSHRQMSCVNKESQYGFTPGNGQMPRGLEETITFYEVEEGDETAYPTLPNHGGPSTMVPATSGYCVGRRGHSSGKQTLNLEEGNGQSENGRYHEEYLYRAEPDYETSGVYSTTASTANLSLQDRKSCSMSPQDTVTSYNYPQKMMGNIAAVAASCANNVPAPVLSNGAAANQAISTTSVSSQNAIQPLFVSPPTHGRPVIASPSYPCHSAIPHAGASLPPPPPPPPPPPPPPPPPPPPPPPPPPPALDVGETSNLQPPPPLPPPPYSCDPSGSDLPQDTKVLQYYFNLGLQCYYHSYWHSMVYVPQMQQQLHVENYPVYTEPPLVDQTVPQCYSEVRREDGIQAEASANDTFPNADSSSVPHGAVYYPVMSDPYGQPPLPGFDSCLPVVPDYSCVPPWHPVGTAYGGSSQIHGAINPGPIGCIAPSPPASHYVPQGM

SEQ ID NO: 22952 - protein, 719 aa, Homo sapiens
AQGLEVALTDLQSSRNNVRHHTEEITVDHLLVRRGQAFNLTLYFRNRSFQPGLDNIIFVVETGPLPDLALGTRAVFSLARHHSPSPWIAWLETNGATSTEVSLCAPPTAAVGRYLLKIHIDSFQGSVTAYQLGEFILLFNPWCPEDAVYLDSEPQRQEYVMNDYGFIYQGSKNWIRPCPWNYGQFEDKIIDICLKLLDKSLHFQTDPATDCALRGSPVYVSRVVCAMINSNDDNGVLNGNWSENYTDGANPAEWTGSVAILKQWNATGCQPVRYGQCWVFAAVMCTVMRCLGIPTRVITNFDSGHDTDGNLIIDEYYDNTGRILGNKKKDTIWNFHVWNECWMARKDLPPAYGGWQVLDATPQEMSNGVYCCGPASVRAIKEGEVDLNYDTPFVFSMVNADCMSWLVQGGKEQKLHQDTSSVGNFISTKSIQSDERDDITENYKYEEGSLQERQVFLKALQKLKARSFHGSQRGAELQPSRPTSLSQDSPRSLHTPSLRPSDVVQVSLKFKLLDPPNMGQDICFVLLALNMSSQFKDLKVNLSAQSLLHDGSPLSPFWQDTAFITLSPKEAKTYPCKISYSQYSQYLSTDKLIRISALGEEKSSPEKILVNKIITLSYPSITINVLGAAVVNQPLSIQVIFSNPLSEQVEDCVLTVEGSGLFKKQQKVFLGVLKPQHQASIILETVPFKSGQRQIQANMRSNKFKDIKGYRNVYVDFAL

SEQ ID NO: 22953 - protein, 662 aa, Homo sapiens
MKPLEKFLKKQTSQLAGRTVAGGPGGGLGSCGGPGGGGGPGGGGGPAGGQRSLQRRQSVSRLLLPAFLREPPAEPGLEPPPEEEGGEPAGVAEEPGSGGPCWLQLEEVPGPGPLGGGGPLRSPSSYSSDELSPGEPLTSPPWAPLGAPERPEHLLNRVLERLAGGATRDSAASDILLDDIVLTHSLFLPTEKFLQELHQYFVRAGGMEGPEGLGRKQACLAMLLHFLDTYQGLLQEEEGAGHIIKDLYLLIMKDESLYQGLREDTLRLHQLVETVELKIPEENQPPSKQVKPLFRHFRRIDSCLQTRVAFRGSDEIFCRVYMPDHSYVTIRSRLSASVQDILGSVTEKLQYSEEPAGREDSLILVAVSSSGEKVLLQPTEDCVFTALGINSHLFACTRDSYEALVPLPEEIQVSPGDTEIHRVEPEDVANHLTAFHWELFRCVHELEFVDYVFHGERGRRETANLELLLQRCSEVTHWVATEVLLCEAPGKRAQLLKKFIKIAALCKQNQDLLSFYAVVMGLDNAAVSRLRLTWEKLPGKFKNLFRKFENLTDPCRNHKSYREVISKMKPPVIPFVPLILKDLTFLHEGSKTLVDGLVNIEKLHSVAEKVRTIRKYRSRPLCLDMEASPNHLQTKAYVRQFQVIDNQNLLFELSYKLEANSQ

SEQ ID NO: 22954 - protein, 182 aa, Homo sapiens
MCTPVRVSIVCVMGAVGAVWTAPLPLPWAPTPSIHLREEGAAFPFCRVCVLRPRRSKWRSWDVNLGPRRRGLLGCGPCPSGKPRVHLQRTRSGAGAEAGGLPTRGSMRGCPFLGSSAAKCSLLLRPPSRGEASPWLPEFMTHPVHHQQLACVSGWLGTSLLEATCLGPHGGSWWGHHPGSRE

SEQ ID NO: 22955 - protein, 484 aa, Homo sapiens
MLFPISMSATEFLLASVIFCLVFWVIRASRPQVPKGLKNPPGPWGWPLIGHMLTLGKNPHLALSRMSQQYGDVLQIRIGSTPVVVLSGLDTIRQALVRQGDDFKGRPDLYTFTLISNGQSMSFSPDSGPVWAARRRLAQNGLKSFSIASDPASSTSCYLEEHVSKEAEVLISTLQELMAGPGHFNPYRYVVVSVTNVICAICFGRRYDHNHQELLSLVNLNAFKDLNEKFYSFMQKMVKEHYKTFEKGHIRDITDSLIEHCQEKQLDENANVQLSDEKIINIVLDLFGAGFDTVTTAISWSLMYLVMNPRVQRKIQEELDTVIGRSRRPRLSDRSHLPYMEAFILETFRHSSFVPFTIPHSTTRDTSLKGFYIPKGRCVFVNQWQINHDQKLWVNPSEFLPERFLTPDGAIDKVLSEKVIIFGMGKRKCIGETIARWEVFLFLAILLQRVEFSVPLGVKVDMTPIYGLTMKHACCEHFQMQLRS

SEQ ID NO: 22956 - protein, 603 aa, Homo sapiens
MLLAVLLLLPLPSSWFAHGHPLYTRLPPSALQVLSAQGTQALQAAQRSAQWAINRVAMEIQHRSHECRGSGRPRPQALLQDPPEPGPCGERRPSTANVTRAHGRIVGGSAAPPGAWPWLVRLQLGGQPLCGGVLVAASWVLTAAHCFVGAPNELLWTVTLAEGSRGEQAEEVPVNRILPHPKFDPRTFHNDLALVQLWTPVSPGGSARPVCLPQEPQEPPAGTACAIAGWGALFEDGPEAEAVREARVPLLSTDTCRRALGPGLRPSTMLCAGYLAGGVDSCQGDSGGPLTCSEPGPRPREVLFGVTSWGDGCGEPGKPGVYTRVAVFKDWLQEQMSASSSREPSCRELLAWDPPQELQADAARLCAFYARLCPGSQGACARLAHQQCLQRRRRCELRSLAHTLLGLLRNAQELLGPRPGLRRLAPALALPAPALRESPLHPARELRLHSGSRAAGTRFPKRRPEPRGEANGCPGLEPLRQKLAALQGAHAWILQVPSEHLAMNFHEVLADLGSKTLTGLFRAWVRAGLGGRHVAFSGLVGLEPATLARSLPRLLVQALQAFRVAALAEGEPEGPWMDVGQGPGLERKGHHPLNPQVPPARQP

SEQ ID NO: 22957 - protein, 581 aa, Homo sapiens
MQCCGLVHRRRVRVSYGSADSYTSRPSDSDVSLEEDREAVRREAERQAQAQLEKAKTKPVAFAVRTNVSYSAAHEDDVPVPGMAISFEAKDFLHVKEKFNNDWWIGRLVKEGCEIGFIPSPVKLENMRLQHEQRAKQGKFYSSKSGGNSSSSLGDIVPSSRKSTPPSSGAKSADEQDQWKTAGLFWRFTTEHTPPYDVVPSMRPVVLVGPSLKGYEVTDMMQKALFDFLKHRFEGRISITRVTADISLAKRSVLNNPSKHAIIERSNTRSSLAEVQSEIERIFELARTLQLVVLDADTINHPAQLSKTSLAPIIVYVKISSPKVLQRLIKSRGKSQAKHLNVQMVAADKLAQCPPELFDVILDENQLEDACEHLADYLEAYWKATHPPSSSLPNPLLSRTLATSSLPLSPTLASNSQGSQGDQRTDRSAPIRSASQAEEEPSVEPVKKSQHRSSSSAPHHNHRSGTSRGLSRQETFDSETQESRDSAYVEPKEDYSHDHVDHYASHRDHNHRDETHGSSDHRHRESRHRSRDVDREQDHNECNKQRSRHKSKDRYCEKDGEVISKKRNEAGEWNRDVYIRQ

SEQ ID NO: 22958 - protein, 1283 aa, Homo sapiens
MSAVVAQTLHVFGLRSHVANNIFYFDEQIIIFPSGNHCVKYNVDQKWQKFIPGSEKSQGMLALSISPNRRYLAISETVQEKPAITIYELSSIPCRKRKVLNNFDFQVQKFISMAFSPDSKYLLAQTSPPESNLVYWLWEKQKVMAIVRIDTQNNPVYQVSFSPQDNTQVCVTGNGMFKLLRFAEGTLKQTSFQRGEPQNYLAHTWVADDKIVVGTDTGKLFLFESGDQRWETSIMVKEPTNGSKSLDVIQESESLIEFPPVSSPLPSYEQMVAASSHSQMSMPQVFAIAAYSKGFACSAGPGRVLLFEKMEEKDFYRESREIRIPVDPQSNDPSQSDKQDVLCLCFSPSEETLVASTSKNQLYSITMSLTEISKGEPAHFEYLMYPLHSAPITGLATCIRKPLIATCSLDRSIRLWNYETNTLELFKEYQEEAYSISLHPSGHFIVVGFADKLRLMNLLIDDIRSFKEYSVRGCGECSFSNGGHLFAAVNGNVIHVYTTTSLENISSLKGHTGKIRSIVWNADDSKLISGGTDGAVYEWNLSTGKRETECVLKSCSYNCVTVSPDAKIIFAVGSDHTLKEIADSLILREISAFDVTYTAIVISHSGRMMFVGTSVGTIRAMKYPLPLQKEFNEYQAHAGPITKMLLTFDDQFLLTAAEDGCLFTWKVFDKDGRGIKREREVGFAEEVLVTKTDMEEKAQVMLELKTRVEELKMENEYQLRLKDMNYSEKIKELTDKFIQEMESLKTKNQVLRTEKEKQDVYHHEHIEDLLDKQSRELQDMECCNNQKLLLEYEKYQELQLKSQRMQEEYEKQLRDNDETKSQALEELTEFYEAKLQEKTTLLEEAQEDVRQQLREFEETKKQIEEDEDREIQDIKTKYEKKLRDEKESNLRLKGETGIMRKKFSSLQKEIEERTNDIETLKGEQMKLQGVIKSLEKDIQGLKREIQERDETIQDKEKRIYDLKKKNQELGKFKFVLDYKIKELKKQIEPRENEIRVMKEQIQENDPILKWPQRVEIHLYNFRKQVRKVLLWGTLPQMEAELENFHKQNTQLELNITELWQKLRATDQEMRRERQKERDLEALVKRFKTDLHNCVAYIQEPRLLKEKVRGLFEKYVQRADMVEIAGLNTDLQQEYTRQREHLERNLATLKKKVVKEGELHRTDYVRIMQENVSLIKEINELRRELKFTRSQVYDLEAALKLTKKVRPQEVSETEPSRDMLSTAPTARLNEQEETGRIIEMQRLEIQRLRDQIQEQEQVTGFHTLAGVRLPSLSNSEVDLEVKTN

SEQ ID NO: 22959 - protein, 373 aa, Homo sapiens
MRHSKRTHCPDWDSRESWGHESYRGSHKRKRRSHSSTQENRHCKPHHQFKESDCHYLEARSLNERDYRDRRYVDEYRNDYCEGYVPRHYHRDIESGYRIHCSKSSVRSRRSSPKRKRNRHCSSHQSRSKSHRRKRSRSIEDDEEGHLICQSGDVLRARYEIVDTLGEGAFGKVVECIDHGMDGMHVAVKIVKNVGRYREAARSEIQVLEHLNSTDPNSVFRCVQMLEWFDHHGHVCIVFELLGLSTYDFIKENSFLPFQIDHIRQMAYQICQSINFLHHNKLTHTDLKPENILFVKSDYVVKYNSKMKRDEHSSAGRYVRRRCKPLKEFMLCHDEEHEKLFDLVRRMLEYDPTQRITLDEALQHPFFDLLKKK

SEQ ID NO: 22960 - protein, 1136 aa, Homo sapiens
MHPQSLAEEEIKTEQEVVEGMDISTRSKDPGSAERTAQKRKFPSPPHSSNGHSPQDTSTSPIKKKKKPGLLNSNNKEQDGRNDFYCWVCHREGQVLCCELCPRVYHAKCLRLTSEPEGDWFCPECEKITVAECIETQSKAMTMLTIEQLSYLLKFAIQKMKQPGTDAFQKPVPLEQHPDYAEYIFHPMDLCTLEKNAKKKMYGCTEAFLADAKWILHNCIIYNGGNHKLTQIAKVVIKICEHEMNEIEVCPECYLAACQKRDNWFCEPCSNPHPLVWAKLKGFPFWPAKALRDKDGQVDARFFGQHDRAWVPINNCYLMSKEIPFSVKKTKSIFNSAMQEMEVYVENIRRKFGVFNYSPFRTPYTPNSQYQMLLDPTNPSAGTAKIDKQEKVKLNFDMTASPKILMSKPVLSGGTGRRISLSDMPRSPMSTNSSVHTGSDVEQDAEKKATSSHFSASEESMDFLDKSTASPASTKTGQAGSLSGSPKPFSPQLSAPITTKTDKTSTTGSILNLNLDRSKAEMDLKELSESVQQQSTPVPLISPKRQIRSRFQLNLDKTIESCKAQLGINEISEDVYTAVEHSDSEDSEKSDSSDSEYISDDEQKSKNEPEDTEDKEGCQMDKEPSAVKKKPKPTNPVEIKEELKSTSPASEKADPGAVKDKASPEPEKDFSEKAKPSPHPIKDKLKGKDETDSPTVHLGLDSDSESELVIDLGEDHSGREGRKNKKEPKEPSPKQDVVGKTPPSTTVGSHSPPETPVLTRSSAQTSAAGATATTSTSSTVTVTAPAPAATGSPVKKQRPLLPKETAPAVQRVVWNSSTVQQKEITQSPSTSTITLVTSTQSSPLVTSSGSMSTLVSSVNADLPIATASADVAADIAKYTSKIRRLRIEIEKLQWLHQQELSEMKHNLELTMAEMRQSLEQERDRLIAEVKKQLELEKQQAVDETKKKQWCANCKKEAIFYCCWNTSYCDYPCQQAHWPEHMKSCTQSATAPQQEADAEVNTETLNKSSQGSSSSTQSAPSETASASKEKETSAEKSKESGSTLDLSGSRETPSSILLGSNQGSVSKRCDKQPAYAPTTTDHQPHPNYPAQKYHSRSNKSSWSSSDEKRGSTRSDHNTSTSTKSLLPKESRLDTFWD

SEQ ID NO: 22961 - protein, 819 aa, Homo sapiens
METLTSRHEKRALHSQASAISQDREEKIMSQEPLSFKDVAVVFTEEELELLDSTQRQLYQDVMQENFRNLLSVGDKNGKDTEYIQDEELRFFSHKELSSCKIWEEVAGELPGSQDCRVNLQGKDFQFSEDAAPHQGWEGASTPCFPIENFLDSLQGDGLIGLENQQFPAWRAIRPIPIQGSWAKAFVNQLGDVQERCKNLDTEDTVYKCNWDDDSFCWISCHVDHRFPEIDKPCGCNKCRKDCIKNSVLHRINPGENGLKSNEYRNGFRDDADLPPHPRVPLKEKLCQYDEFSEGLRHSAHLNRHQRVPTGEKSVKSLERGRGVRQNTHIRNHPRAPVGDMPYRCDVCGKGFRYKSVLLIHQGVHTGRRPYKCEECGKAFGRSSNLLVHQRVHTGEKPYKCSECGKGFSYSSVLQVHQRLHTGEKPYTCSECGKGFCAKSALHKHQHIHPGEKPYSCGECGKGFSCSSHLSSHQKTHTGERPYQCDKCGKGFSHNSYLQAHQRVHMGQHLYKCNVCGKSFSYSSGLLMHQRLHTGEKPYKCECGKSFGRSSDLHIHQRVHTGEKPYKCSECGKGFRRNSDLHSHQRVHTGERPYVCDVCGKGFIYSSDLLIHQRVHTGEKPYKCAECGKGFSYSSGLLIHQRVHTGEKPYRCQECGKGFRCTSSLHKHQRVHTGKKPYTCDQCGKGFSYGSNLRTHQRLHTGEKPYTCCECGKGFRYGSGLLSHKRVHTGEKPYRCHVCGKGYSQSSHLQGHQRVHTGEKPYKCEECGKGFGRNSCLHVHQRVHTGEKPYTCGVCGKGFSYTSGLRNHQRVHLGENPYK

SEQ ID NO: 22962 - protein, 1308 aa, Homo sapiens
MGSVTGAVLKTLLLLSTQNWNRVEAGNSYDCDDPLVSALPQASFSSSSELSSSHGPGFARLNRRDGAGGWSPLVSNKYQWLQIDLGERMEVTAVATQGGYGSSNWVTSYLLMFSDSGWNWKQYRQEDSIWGFSGNANADSVVYYRLQPSIKARFLRFIPLEWNPKGRIGMRIEVFGCAYRSEVVDLDGKSSLLYRFDQKSLSPIKDIISLKFKTMQSDGILLHREGPNGDHITLQLRRARLFLLINSGEAKLPSTSTLVNLTLGSLLDDQHWHSVLIQRLGKQVNFTVDEHRHHFHARGEFNLMNLDYEISFGGIPAPGKSVSFPHRNFHGCLENLYYNGVDIIDLAKQQKPQIIAMGNVSFSCSQPQSMPVTFLSSRSYLALPDFSGEEEVSATFQFRTWNKAGLLLFSELQLISGGILLFLSDGKLKSNLYQPGKLPSDITAGVELNDGQWHSVSLSAKKNHLSVAVDGQMASAAPLLGPEQIYSGGTYYFGGCPDKSFGSKCKSPLGGFQGCMRLISISGKVVDLISVQQGSLGNFSDLQIDSCGISDRCLPNYCEHGGECSQSWSTFHCNCTNTGYRGATCHNSIYEQSCEAYKHRGNTSGFYYIDSDGSGPLEPFLLYCNMTETAWTIIQHNGSDLTRVRNTNPENPYAGFFEYVASMEQLQATINRAEHCEQEFTYYCKKSRLVNKQDGTPLSWWVGRTNETQTYWGGSSPDLQKCTCGLEGNCIDSQYYCNCDADRNEWTNDTGLLAYKEHLPVTKIVITDTGRLHSEAAYKLGPLLCQGDRSFWNSASFDTEASYLHFPTFHGELSADVSFFFKTTASSGVFLENLGIADFIRIELRSPTVVTFSFDVGNGPFEISVQSPTHFNDNQWHHVRVERNMKEASLQVDQLTPKTQPAPADGHVLLQLNSQLFVGGTATRQRGFLGCIRSLQLNGMTLDLEERAQVTPEVQPGCRGHCSSYGKLCRNGGKCRERPIGFFCDCTFSAYTGPFCSNEISAYFGSGSSVIYNFQENYLLSKNSSSHAASFHGDMKLSREMIKFSFRTTRTPSLLLFVSSFYKEYLSVIIAKNGSLQIRYKLNKYQEPDVVNFDFKNMADGQLHHIMINREEGVVFIEIDDNRRRQVHLSSGTEFSAVKSLVLGRILEHSDVDQDTALAGAQGFTGCLSAVQLSHVAPLKAALHPSHPDPVTVTGHVTESSCMAQPGTDATSRERTHSFADHSGTIDDREPLANAIKSDSAVIGGLIAVVIFILLCITAIAVRIYQQKRLYKRSEAKRSENVDSAEAVLKSELNIQNAVNENQKEYFF

SEQ ID NO: 22963 - protein, 775 aa, Homo sapiens
MDCRTKANPDRTFDLVLKVKCHASENEDPVVLWKFPEDFGDQEILQSVPKFCFPFDVERVSQNQVGQHFTFVLTDIESKQRFGFCRLTSGGTICLCILSYLPWFEVYYKLLNTLADYLAKELENDLNETLRSLYNHPVPKANTPVNLSVNQEIFIACEQVLKDQPALVPHSYFIAPDVTGLPTIPESRNLTEYFVAVDVNNMLQLYASMLHERRIVIISSKLSTLTACIHGSAALLYPMYWQHIYIPVLPPHLLDYCCAPMPYLIGIHSSLIERVKNKSLEDVVMLNVDTNTLESPFSDLNNLPSDVVSALKNKLKKQSTATGDGVARAFLRAQAALFGSYRDALRYKPGEPITFCEESFVKHRSSVMKQFLETAINLQLFKQFIDGRLAKLNAGRGFSDVFEEEITSGGFCGGNPRSYQQWVHTVKKGGALFNTAMTKATPAVRTAYKFAKNHAKLGLKEVKSKLKHKENEEDYGTCSSSVQYTPVYKLHNEKGGNSEKRKLAQARLKRPLKSLDGALYDDEDDDDIERASKLSSEDGEEASAYLYESDDSVETRVKTPYSGEMDLLGEILDTLSTHSSDQGKLAAAKSLDFFRSMDDIDYKPTNKSNAPSENNLAFLCGGSGDQAEWNLGQDDSALHGKHLPPSPRKRVSSSGLTDSLFILKEENSNKHLGADNVSDPTSGLDFQLTSPEVSQTDKGKTEKRETLSQISDDLLIPGLGRHSSTFVPWEKEGKEAKETSEDIGLLHEVVSLCHMTSDFQQSLNISDKNTNGNQT

SEQ ID NO: 22964 - protein, 471 aa, Homo sapiens
MASRWNQQRKRTGRDEEAKSTKEEAILKKLKSIERTTEDIIRSVKVEREERAEESIEDIYANIPDLPKSYIPSRLRKEINEEKEDDEQNRKALYAMEIKVEKDLKTGESTVLSSIPLPSDDFKGTGIKVYDDGQKSVYAVSSNHSAAYNGTDGLAPVEVEELLRQASERNSKSPTEYHEPVYANPFYRPTTPQRETVTPGPNFQERIKIKTNGLGIGVNESIHNMGNGLSEERGNNFNHISPIPPVPHPRSVIQQAEEKLHTPQKRLMTPWEESNVMQDKDAPSPKPRLSPRETIFGKSEHQNSSPTCQEDEEDVRYNIVHSLPPDINDTEPVTMIFMGYQQAEDSEEDKKFLTGYDGIIHAELVVIDDEEEEDEGEAEKPSYHPIAPHSQVYQPAKPTPLPRKRSEASPHENTNHKSPHKNSISLKEQEESLGSPVHHSPFDAQTTGDGTEDPSLTALRMRMAKLGKKVI

SEQ ID NO: 22965 - protein, 2354 aa, Homo sapiens
AYFRQGVALQYLGRHADALAAFASGLAQDPKSLQLLVGMVEAAMKSPMRDSLEPTYQQLQKMKLDKSPFVVVSVVGQELLTAGHHGASVVVLEAALKIGTCSLKLRGSVFSALSSAYWSLGNTEKSTGYMQQDLDVAKTLGDQTGECRAHGNLGSAFFSKGNYREALTNHRHQLVLAMKLKDREAASSALSSLGHVYTAIGDYPNALASHKQCVLLAKQSKDELSEARELGNMGAVYIAMGDFENAVQCHEQHLKIAKDLGNKREEARAYSNLGSAYHYRRNFDKAMSYHNYVLELAQELMEKAIEMRAYAGLGHAARCMQDLERAKQYHEQQLGIAEDLKDRAAEGRASSNLGIIHQMKGDYDTALKLHKTHLCIAQELSDYAAQGRAYGNMGNAYNALGMYDQAVKYHRQELQISMEVNDRASQASTHGNLAVAYQALGAHDRALQHYQNHLNIARELRDIQSEARALSNLGNFHCSRGEYVQAAPYYEQYLRLAPDLQDMEGEGKVCHNLGYAHYCLGNYQEAVKYYEQDLALAKDLHDKLSQAKAYCNLGLAFKALLNFSKAEECQKYLLSLAQSLNNSQAKFRALGNLGDIFICKKDINGAIKFYEQQLGLAHQVKDRRLEASAYAALGTAYRMIQKYDKALGYHTQELEVYQELSDLPGECRAHGHLAAVYMALGKYTMAFKCYEEQLDLGQKLKDPSLEAQVYGNMGITKMNMNVMEEAIGYFEQQLAMLQQLSGNESVLDRGRAYGNLGDCYEALGDYEEAIKYYEQYLSVAQSLNRMQDQAKAYRGLGNGHRAMGSLQQALVCFEKRLVVAHELGEAFNKAQAYGELGSLHSQLGNYEQAISCLERQLNIARDMKDRALESDAACGLGGVYQQMGEYDTALQYHQLDLQIAEETNNPTCQGRAYGNLGLTYESLGTFERAVVYQEQHLSIAAQMNDLAAKTVSYSSLGRTHHALQNYSQAVMYLQEGLRLAEQLGRREDEAKIRHGLGLSLWASGNLEEAQHQLYRASALFETIRHEAQLSTDYKLSLFDLQTSSYQALQRVLVSLGHHDEALAVAERGRTRAFADLLVERQTGQQDSDPYSPVTIDQILEMVNGQRGLVLYYSLAAGYLYSWLLAPGAGIVKFHEHYLGENTVENSSDFQASSSVTLPTATGSALEQHIASVREALGVESHYSRACASSETESEAGDIMDQQFEEMNNKLNSVTDPTGFLRMVRRNNLFNRSCQSMTSLFSNTVSPTQDGTSSLPRRQSSFAKPPLRALYDLLIAPMEGGLMHSSGPVGRHRQLILVLEGELYLIPFALLKGSSSNEYLYERFGLLAVPSIRSLSVQSKSHLRKNPPTYSSSTSMAAVIGNPKLPSAVMDRWLWGPMPSAEEEAYMVSELLGCQPLVGSVATKERVMSALTQAECVHFATHISWKLSALVLTPSMDGNPASSKSSFGHPYTIPESLRVQDDASDGESISDCPPLQELLLTAADVLDLQLPVKLVVLGSSQESNSKVTADGVIALTRAFLAAGAQCVLVSLWPVPVAASKMFIHAFYSSLLNGLKASAALGEAMKVVQSSKAFSHPSNWAGFMLIGSDVKLNSPSSLIGQALTEILQHPERARDALRVLLHLVEKSLQRIQNGQRNAMYTSQQSVENKVGGIPGWQALLTAVGFRLDPPTSGLPAAVFFPTSDPGDRLQQCSSTLQSLLGLPNPALQALCKLITASETGEQLISRAVKNMVGMLHQVLVQLQAGEKEQDLASAPIQVSISVQLWRLPGCHEFLAALGFDLCEVGQEEVILKTGKQANRRTVHFALQSLLSLFDSTELPKRLSLDSSSSLESLASAQSVSNALPLGYQQPPFSPTGADSIASDAISVYSLSSIASSMSFVSKPEGGSEGGGPGGRQDHDRSKNAYLQRSTLPRSQLPPQTRPAGNKDEEEYEGFSIISNEPLATYQENRNTCFSPDHKQPQPGTAGGMRVSVSSKGSISTPNSPVKMTLIPSPNSPFQKVGKLASSDTGESDQSSTETDSTVKSQEESNPKLDPQELAQKILEETQSHLIAVERLQRSGGQVSKSNNPEDGVQAPSSTAVFRASETSAFSRPVLSHQKSQPSPVTVKPKPPARSSSLPKVSSGYSSPTTSEMSIKDSPSQHSGRPSPGCDSQTSQLDQPLFKLKYPSSPYSAHISKSPRNMSPSSGHQSPAGSAPSPALSYSSAGSARSSPADAPDIDKLKMAAIDEKVQAVHNLKMFWQSTPQHSTGPMKIFRGAPGTMTSKRDVLSLLNLSPRHNKKEEGVDKLELKELSLQQHDGAPPKAPPNGHWRTETTSLGSLPLPAGPPATAPARPLRLPSGNGYKFLSPGRFFPSSKC

SEQ ID NO: 22966 - protein, 144 aa, Homo sapiens
MALLLTTVIALTCLGGFASPGPVPPSTALRELIEELVNITQNQKAPLCNGSMVWSINLTAGMYCAALESLINVSGCSAIEKTQRMLSGFCPHKVSAGQFSSLHVRDTKIEVAQFVKDLLLHLKKLFREGQFNNFESIIICRDRT

SEQ ID NO: 22967 - protein, 331 aa, Homo sapiens
MAPRRARGCRTLGLPALLLLLLLRPPATRDARDRLAVLAGRSRISESFNHEVQTHEACVRLRTMENCPQCHHHRTSRQQAGITCPPPMSVEHADIWVKSYSLYSRERYICNSGFKRKAGTSSLTECVLNKATNVAHWTTPSLKCIRDPALVHQRPAPPSTVTTAGVTPQPESLSPSGKEPAASSPSSNNTAATTAAIVPGSQLMPSKSPSTGTTEISSHESSHGTPSQTTAKNWELTASASHQPPGVYPQGHSDTTVAISTSTVLLCGLSAVSLLACYLKSRWLAKRSLPGDAEAPNMSRGGRNAWEQLSRAPATSLLRTPVESALSASRP

SEQ ID NO: 22968 - protein, 673 aa, Homo sapiens; identical to SEQ ID NO: 21785

SEQ ID NO: 22969 - protein, 172 aa, Homo sapiens
MGDQPNLPYVLAFLYEAMRFSSFVPVTIPHATTANTSVLGYHIPKDTVVFVNQWSVNHDPLKWPNPENFDPARFLDKDGLINKDLTSRVMIFSVGKRRCIGEELSKMQLFLFISILAHQCDFRANPNEPAKMNFSYGLTIKPKSFKVNVTLRESMELLDSAVQNLQAKETCQ

SEQ ID NO: 22970 - protein, 825 aa, Homo sapiens
METLTSRHEKRALHSQASAISQDREEKIMSQEPLSFKDVAVVFTEEELELLDSTQRQLYQDVMQENFRNLLSVGERNPLGDKNGKDTEYIQDEELRFFSHKELSSCKIWEEVAGELPGSQDCRVNLQGKDFQFSEDAAPHQGWEGASTPCFPIENFLDSLQGDGLIGLENQQFPAWRAIRPIPIQGSWAKAFVNQLGDVQERCKNLDTEDTVYKCNWDDDSFCWISCHVDHRFPEIDKPCGCNKCRKDCIKNSVLHRINPGENGLKSNEYRNGFRDDADLPPHPRVPLKEKLCQYDEFSEGLRHSAHLNRHQRVPTGEKSVKSLERGRGVRQNTHIRNHPRAPVGDMPYRCDVCGKGFRYKSVLLIHQGVHTGRRPYKCEECGKAFGRSSNLLVHQRVHTGEKPYKCSECGKGFSYSSVLQVHQRLHTGEKPYTCSECGKGFCAKSALHKHQHIHPGEKPYSCGECGKGFSCSSHLSSHQKTHTGERPYQCDKCGKGFSHNSYLQAHQRVHMGQHLYKCNVCGKSFSYSSGLLMHQRLHTGEKPYKCECGKSFGRSSDLHIHQRVHTGEKPYKCSECGKGFRRNSDLHSHQRVHTGERPYVCDVCGKGFIYSSDLLIHQRVHTGEKPYKCAECGKGFSYSSGLLIHQRVHTGEKPYRCQECGKGFRCTSSLHKHQRVHTGKKPYTCDQCGKGFSYGSNLRTHQRLHTGEKPYTCCECGKGFRYGSGLLSHKRVHTGEKPYRCHVCGKGYSQSSHLQGHQRVHTGEKPYKCEECGKGFGRNSCLHVHQRVHTGEKPYTCGVCGKGFSYTSGLRNHQRVHLGENPYK

SEQ ID NO: 22971 - protein, 576 aa, Homo sapiens; identical to SEQ ID NO: 3098

SEQ ID NO: 22972 - protein, 394 aa, Homo sapiens
MNIMDFNVKKLAADAGTFLSRAVQFTEEKLGQAEKTELDAHLENLLSKAECTKIWTEKIMKQTEVLLQPNPNARIEEFVYEKLDRKAPSRINNPELLGQYMIDAGTEFGPGTAYGNALIKCGETQKRIGTADRELIQTSALNFLTPLRNFIEGDYKTIAKERKLLQNKRLDLDAAKTRLKKAKAAETRNSQLNSARLEGDNIMVNFSYMLNFLHVKWLKSEQELRITQSEFDRQAEITRLLLEGISSTHAHHLRCLNDFVEAQMTYYAQCYQYMLDLQKQLGSFPSNYLSNNNQTSVTPVPSVLPNAIGSSAMASTSGLVITSPSNLSDLKECSGSRKARVLYDYDAANSTELSLLADEVITVFSVVGMDSDWLMGERGNQKGKVPITYLELLN

SEQ ID NO: 22973 - protein, 670 aa, Homo sapiens [sequence omitted]

SEQ ID NO: 22974 - protein, 747 aa, Homo sapiens
MGVWLNKDDYIRDLKRIILCFLIVYMAILVGTDQDFYSLLGVSKTASSREIRQAFKKLALKLHPDKNPNNPNAHGDFLKINRAYEVLKDEDLRKKYDKYGEKGLEDNQGGQYESWNYYRYDFGIYDDDPEIITLERREFDAAVNSGELWFVNFYSPGCSHCHDLAPTWRDFAKEVDGLLRIGAVNCGDDRMLCRMKGVNSYPSLFIFRSGMAPVKYHGDRSKESLVSFAMQHVRSTVTELWTGNFVNSIQTAFAAGIGWLITFCSKGGDCLTSQTRLRLSGMLFLNSLDAKEIYLEVIHNLPDFELLSANTLEDRLAHHRWLLFFHFGKNENSNDPELKKLKTLLKNDHIQVGRFDCSSAPDICSNLYVFQPSLAVFKGQGTKEYEIHHGKKILYDILAFAKESVNSHVTTLGPQNFPANDKEPWLVDFFAPWCPPCRALLPELRRASNLLYGQLKFGTLDCTVHEGLCNMYNIQAYPTTVVFNQSNIHEYEGHHSAEQILEFIEDLMNPSVVSLTPTTFNELVTQRKHNEVWMVDFYSPWCHPCQVLMPEWKRMARTLTGLINVGSIDCQQYHSFCAQENVQRYPEIRFFPPKSNKAYHYHSYNGWNRDAYSLRIWGLGFLPQVSTDLTPQTFSEKVLQGKNHWVIDFYAPWCGPCQNFAPEFELLARMIKGKVKAGKVDCQAYAQTCQKAGIRAYPTVKFYFYERAKRNFQEEQINTRDAKAIAALISEKLETLRNQGKRNKDEL

SEQ ID NO: 22975 - protein, 1253 aa, Homo sapiens
MTTHVTLEDALSNVDLLEELPLPDQQPCIEPPPSSIMYQANFDTNFEDRNAFVTGIARYIEQATVHSSMNEMLEEGHEYAVMLYTWRSCSRAIPQVKCNEQPNRVEIYEKTVEVLEPEVTKLMKFMYFQRKAIERFCSEVKRLCHAERRKDFVSEAYLLTLGKFINMFAVLDELKNMKCSVKNDHSAYKRAAQFLRKMADPQSIQESQNLSMFLANHNRITQCLHQQLEVIPGYEELLADIVNICVDYYENKMYLTPSEKHMLLKVMGFGLYLMDGNVSNIYKLDAKKRINLSKIDKFFKQLQVVPLFGDMQIELARYIKTSAHYEENKSKWTCTQSSISPQYNICEQMVQIRDDHIRFISELARYSNSEVVTGSGLDSQKSDEEYRELFDLALRGLQLLSKWSAHVMEVYSWKLVHPTDKFCNKDCPGTAEEYERATRYNYTSEEKFAFVEVIAMIKGLQVLMGRMESVFNQAIRNTIYAALQDFAQVTLREPLRQAVRKKKNVLISVLQAIRKTICDWEGGREPPNDPCLRGEKDPKGGFDIKVPRRAVGPSSTQLYMVRTMLESLIADKSGSKKTLRSSLDGPIVLAIEDFHKQSFFFTHLLNISEALQQCCDLSQLWFREFFLELTMGRRIQFPIEMSMPWILTDHILETKEPSMMEYVLYPLDLYNDSAYYALTKFKKQFLYDEIEAEVNLCFDQFVYKLADQIFAYYKAMAGSVLLDKRFRAECKNYGVIIPYPPSNRYETLLKQRHVQLLGRSIDLNRLITQRISAAMYKSLDQAISRFESEDLTSIVELEWLLEINRLTHRLLCKHMTLDSFDAMFREANHNVSAPYGRITLHVFWELNFDFLPNYCYNGSTNRFVRTAIPFTQEPQRDKPANVQPYYLYGSKPLNIAYSHIYSSYRNFVGPPHFKTICRLLGYQGIAVVMEELLKIVKSLLQGTILQYVKTLIEVMPKICRLPRHEYGSPGILEFFHHQLKDIIEYAELKTDVFQSLREVGNAILFCLLIEQALSQEEVCDLLHAAPFQNILPRVYIKEGERLEVRMKRLEAKYAPLHLVPLIERLGTPQQIAIAREGDLLTKERLCCGLSMFEVILTRIRSYLQDPIWRGPPPTNGVMHVDECVEFHRLWSAMQFVYCIPVGTNEFTAEQCFGDGLNWAGCSIIVLLGQQRRFDLFDFCYHLLKVQRQDGKDEIIKNVPLKKMADRIRKYQILNNEVFAILNKYMKSVETDSSTVEHVRCFQPPIHQSLATTC

SEQ ID NO: 22976 - protein, 832 aa, Homo sapiens
MGAARSPPSAVPGPLLGLLLLLLGVLAPGGASLRLLDHRALVCSQPGLNCTVKNSTCLDDSWIHPRNLTPSSPKDLQIQLHFAHTQQGDLFPVAHIEWTLQTDASILYLEGAELSVLQLNTNERLCVRFEFLSKLRHHHRRWRFTFSHFVVDPDQEYEVTVHHLPKPIPDGDPNHQSKNFLVPDCEHARMKVTTPCMSSGSLWDPNITVETLEAHQLRVSFTLWNESTHYQILLTSFPHMENHSCFEHMHHIPAPRPEEFHQRSNVTLTLRNLKGCCRHQVQIQPFFSSCLNDCLRHSATVSCPEMPDTPEPIPGPGSEKYSDDTKYTDGLPAADLIPPPLKPRKVWIIYSADHPLYVDVVLKFAQFLLTACGTEVALDLLEEQAISEAGVMTWVGRQKQEMVESNSKIIVLCSRGTRAKWQALLGRGAPVRLRCDHGKPVGDLFTAAMNMILPDFKRPACFGTYVVCYFSEVSCDGDVPDLFGAAPRYPLMDRFEEVYFRIQDLEMFQPGRMHRVGELSGDNYLRSPGGRQLRAALDRFRDWQVRCPDWFECENLYSADDQDAPSLDEEVFEEPLLPPGTGIVKRAPLVREPGSQACLAIDPLVGEEGGAAVAKLEPHLQPRGQPAPQPLHTLVLAAEEGALVAAVEPGPLADGAAVRLALAGEGEACPLLGSPGAGRNSVLFLPVDPEDSPLGSSTPMASPDLLPEDVREHLEGLMLSLFEQSLSCQAQGGCSRPAMVLTDPHTPYEEEQRQSVQSDQGYISRSSPQPPEGLTEMEEEEEEEQDPGKPALPLSPEDLESLRSLQRQLLFRQLQKNSGWDTMGSESEGPSA

SEQ ID NO: 22977 - protein, 396 aa, Homo sapiens
MAGYEYVSPEQLAGFDKYKYSAVDTNPLSLYVMHPFWNTIVKVFPTWLAPNLITFSGFLLVVFNFLLMAYFDPDFYASAPGHKHVPDWVWIVVGILNFVAYTLDGVDGKQARRTNSSTPLGELFDHGLDSWSCVYFVVTVYSIFGRGSTGVSVFVLYLLLWVVLFSFILSHWEKYNTGILFLPWGYDISQVTISFVYIVTAVVGVEAWYEPFLFNFLYRDLFTAMIIGCALCVTLPMSLLNFFRSYKNNTLKLNSVYEAMVPLFSPCLLFILSTAWILWSPSDILELHPRVFYFMVGTAFANSTCQLIVCQMSSTRCPTLNWLLVPLFLVVLVVNLGVASYVESILLYTLTTAFTLAHIHYGVRVVKQLSSHFQIYPFSLRKPNSDLGMEEKNIGL

SEQ ID NO: 22978 - protein, 2512 aa, Homo sapiens
MARFGDEMPARYGGGGSGAAAGVVVGSGGGRGAGGSRQGGQPGAQRMYKQSMAQRARTMALYNPIPVRQNCLTVNRSLFLFSEDNVVRKYAKKITEWPPFEYMILATIIANCIVLALEQHLPDDDKTPMSERLDDTEPYFIGIFCFEAGIKIIALGFAFHKGSYLRNGWNVMDFVVVLTGILATVGTEFDLRTLRAVRVLRPLKLVSGIPSLQVVLKSIMKAMIPLLQIGLLLFFAILIFAIIGLEFYMGKFHTTCFEEGTDDIQGESPAPCGTEEPARTCPNGTKCQPYWEGPNNGITQFDNILFAVLTVFQCITMEGWTDLLYNSNDASGNTWNWLYFIPLIIIGSFFMLNLVLGVLSGEFAKERERVENRRAFLKLRRQQQIERELNGYMEWISKAEEVILAEDETDGEQRHPFDGALRRTTIKKSKTDLLNPEEAEDQLADIASVGSPFARASIKSAKLENSTFFHKKERRMRFYIRRMVKTQAFYWTVLSLVALNTLCVAIVHYNQPEWLSDFLYYAEFIFLGLFMSEMFIKMYGLGTRPYFHSSFNCFDCGVIIGSIFEVIWAVIKPGTSFGISVLRALRLLRIFKVTKYWASLRNLVVSLLNSMKSIISLLFLLFLFIVVFALLGMQLFGGQFNFDEGTPPTNFDTFPAAIMTVFQILTGEDWNEVMYDGIKSQGGVQGGMVFSIYFIVLTLFGNYTLLNVFLAIAVDNLANAQELTKVEADEQEEEEAANQKLALQKAKEVAEVSPLSAANMSIAVKEQQKNQKPAKSVWEQRTSEMRKQNLLASREALYNEMDPDERWKAAYTRHLRPDMKTHLDRPLVVDPQENRNNNTNKSRAAEPTVDQRLGQQRAEDFLRKQARYHDRARDPSGSAGLDARRPWAGSQEAELSREGPYGRESDHHAREGSLEQPGFWEGEAERGKAGDPHRRHVHRQGGSRESRSGSPRTGADGEHRRHRAHRRPGEEGPEDKAERRARHREGSRPARGGEGEGEGPDGGERRRRHRHGAPATYEGDARREDKERRHRRRKENQGSGVPVSGPNLSTTRPIQQDLGRQDPPLAEDIDNMKNNKLATAESAAPHGSLGHAGLPQSPAKMGNSTDPGPMLAIPAMATNPQNAASRRTPNNPGNPSNPGPPKTPENSLIVTNPSGTQTNSAKTARKPDHTTVDIPPACPPPLNHTVVQVNKNANPDPLPKKEEEKKEEEEDDRGEDGPKPMPPYSSMFILSTTNPLRRLCHYILNLRYFEMCILMVIAMSSIALAAEDPVQPNAPRNNVLRYFDYVFTGVFTFEMVIKMIDLGLVLHQGAYFRDLWNILDFIVVSGALVAFAFTGNSKGKDINTIKSLRVLRVLRPLKTIKRLPKLKAVFDCVVNSLKNVFNILIVYMLFMFIFAVVAVQLFKGKFFHCTDESKEFEKDCRGKYLLYEKNEVKARDREWKKYEFHYDNVLWALLTLFTVSTGEGWPQVLKHSVDATFENQGPSPGYRMEMSIFYVVYFVVFPFFFVNIFVALIIITFQEQGDKMMEEYSLEKNERACIDFAISAKPLTRHMPQNKQSFQYRMWQFVVSPPFEYTIMAMIALNTIVLMMKFYGASVAYENALRVFNIVFTSLFSLECVLKVMAFGILNYFRDAWNIFDFVTVLGSITDILVTEFGNPNNFINLSFLRLFRAARLIKLLRQGYTIRILLWTFVQSFKALPYVCLLIAMLFFIYAIIGMQVFGNIGIDVEDEDSDEDEFQITEHNNFRTFFQALMLLFRSATGEAWHNIMLSCLSGKPCDKNSGILTRECGNEFAYFYFVSFIFLCSFLMLNLFVAVIMDNFEYLTRDSSILGPHHLDEYVRVWAEYDPAAWGRMPYLDMYQMLRHMSPPLGLGKKCPARVAYKRLLRMDLPVADDNTVHFNSTLMALIRTALDIKIAKGGADKQQMDAELRKEMMAIWPNLSQKTLDLLVTPHKSTDLTVGKIYAAMMIMEYYRQSKAKKLQAMREEQDRTPLMFQRMEPPSPTQEGGPGQNALPSTQLDPGGALMAHESGLKESPSWVTQRAQEMFQKTGTWSPEQGPPTDMPNSQPNSQSVEMREMGRDGYSDSEHYLPMEGQGRAASMPRLPAENQRRRGRPRGNNLSTISDTSPMKRSASVLGPKARRLDDYSLERVPPEENQRHHQRRRDRSHRASERSLGRYTDVDTGLGTDLSMTTQSGDLPSKERDQERGRPKDRKHRQHHHHHHHHHHPPPPDKDRYAQERPDHGRARARDQRWSRSPSEGREHMAHRQGSSSVSGSPAPSTSGTSTPRRGRRQLPQTPSTPRPHVSYSPVIRKAGGSGPPQQQQQQQQQQQQQAVARPGRAATSGPRRYPGPTAEPLAGDRPPTGGHSSGRSPRMERRVPGPARSESPRACRHGGARWPASGPHVSEGPPGPRHHGYYRGSDYDEADGPGSGGGEEAMAGAYDAPPPVRHASSGATGRSPRTPRASGPACASPSRHGRRLPNGYYPAHGLARPRGPGSRKGLHEPYSESDDDWC

SEQ ID NO: 22979 - protein, 1649 aa, Homo sapiens
MESVEKDWGWGLWRNLRCLGHAHQGKCCTEGGISSTTKTSSENGSCCFEKAARKDHVCRFIGCGRNDRFNYVVMQLQGRNLADLRRSQSRGTFTISTTLRLGRQILESIESIHSVGFLHRDIKPSNFAMGRFPSTCRKCYMLDFGLARQFTNSCGDVRPPRAVAGFRGTVRYASINAHRNREMGRHDDLWSLFYMLVEFVVGQLPWRKIKDKEQVGSIKERYDHRLMLKHLPPEFSIFLDHISSLDYFTKPDYQMSIRVTRKSYKVSTSGPQAFNSLSYTSGPGACISSSSFSRMGSSSFRGGLGAGYGGASGGITTITVNQSLLSPLNLEVDPNIQAVRTQEEKQIKTLNNKFFSFIDKVRFLEQQNKMLETKWSLVQQQKMARSNMDNMFESYINNLKWQLETLGQEKLKLEAELGNMHGLVEDFRNKYEVEISKCTEMENEFVLIKEYVDEAYMNKMELESSLKELTAKISFLRQLYEEEIGSCSPRSRIHLWCCSWTTAASWTWTASSLRSRPEGFPGGCHADTEQRGELAIKDANAKLSELEAALQLASQDMARQLREYQELMNVKLALDIKIATYRKLLEGEESWLESGMQNMSIHMKTTSSYAGGQSLAYGGLTSPGLSYGLGSSFGSGMGSSSFSHTSSSRAVVMKKIETRDGKLVSESSNVLPNLRITATLLTSVFDNSIKTFGVIESDPFDWEKTGNDGSLTTTTTSTTPQLHTRLTPAAIGIANATPIPGDLLRENTDEVFPDEQLSDGENGIPVGVSPDKLPGSLGHPRPQEKDVWEEMDANKNKIKLGICKAATEEENSHGQANGLLNAPSLGSPIRVRSEITQPDRDIPLVRKLRSIHSFELEKRLTLEPKPDTDKFLETCLEKMQKDTSAGKESILPALLHKPCVPAVSRTDHIWHYDEEYLPDASKPASANTPEQADGGGSNGFIAVNLSSCKQEIDSKEWVIVDKEQDLQDFRTNEAVGHKTTGSPSDEEPEVLQVLEASPQDEKLQLGPWAENDHLKKETSGVVLALSAEGPPTAASEQYTDRLELQPGAASQFIAATPTSLMEAQAEGPLTAITIPRPSVASTQSTSGSFHCGQQPEKKDLQPMEPTVELYSPRENFSGLVVTEGEPPSGGSRTDLGLQIDHIGHDMLPNIRESNKSQDLGPKELPDHNRLVVREFENLPGETEEKSILLESDNEDEKLSRGQHCIEISSLPGDLVIVEKDHSATTEPLDVTKTQTFSVVPNQDKNNEIMKLLTVGTSEISSRDIDPHVEGQIGQVAEMQKNKISKDDDIMSEDLPGHQGDLSTFLHQEGKREKITPRNGELFHCVSENEHGAPTRKDMVRSSFVTRHSRIPVLAQEIDSTLESSSPVSAKEKLLQKKAYQPDLVKLLVEKRQFKSFLGDLSSASDKLLEEKLATVPAPFCEEEVLTPFSRLTVDSHLSRSAEDSFLSPIISQSRKSKIPRPVSWVNTDQVNSSTSSQFFPRPPPGKPPTRPGVEARLRRYKVLGSSNSDSDLFSRLAQILQNGSQKPRSTTQCKSPGSPHNPKTPPKSPVVPRRSPSASPRSSSLPRTSSSSPSRAGRPHHDQRSSSPHLGRSKSPPSHSGSSSSRRSCQQEHCKPSKNGLKGSGSLHHHSASTKTPQGKSKPASKLSR

SEQ ID NO: 22980 - protein, 713 aa, Homo sapiens
MALLAMHSWRWAAAAAAFEKRRHSAILIRPLVSVSGSGPQWRPHQLGALGTARAYQQIPESLKSITWQRLGKGNSGQFLDAAKALQVWPLIEKRTCWHGHAGGGLHTDPKEGAMNIVVPFMFKYAVDSLNQMSGNMLNLSDAPNTVATMATAVLIGYGVSRAGAAFFNEVRNAVFGKVAQNSIRRIAKNVFLHLHNLDLGFHLSRQTGALSKAIDRGTRGISFVLSALVFNLLPIMFEVMLVSGVLYYKCGAQFALVTLGTLGTYTAFTVAVTRWRTRFRIEMNKADNDAGNAAIDSLLNYETVKYFNNERYEAQRYDGFLKTYETASLKSTSTLAMLNFGQSAIFSVGLTAIMVLASQGIVAGTLTVGDLVMVNGLLFQLSLPLNFLGTVYRETRQALIDMNTLFTLLKVDTQIKDKVMASPLQITPQTATVAFDNVHFEYIEGQKVLSGISFEVPAGKKVAIVGGSGSGKSTIVRLLFRFYEPQKGSIYLAGQNIQDVSLESLRRAVGVVPQDAVLFHNTIYYNLLYGNISASPEEVYAVAKLAGLHDAILRMPHGYDTQVGERGLKLSGGEKQRVAIARAILKDPPVILYDEATSSLDSITEETILGAMKDVVKHRTSIFIAHRLSTVVDADEIIVLDQGKVAERGTHHGLLANPHSIYSEMWHTQSSRVQNHDNPKWEAKKENISKEEERKKLQEEIVNSVKGCGNCSC

SEQ ID NO: 22981 - protein, 953 aa, Homo sapiens [sequence omitted]

SEQ ID NO: 22982 - protein, 425 aa, Homo sapiens
MALPKPGGAHSLALVTVPSMGYAPVPPPTSLQPLLPQQPVFVVQETDGSVTLDNGIIRVKLDPTGRLTSLVLVASGREAIAEGAVGNQFVLFDDVPLYWDAWDVMDYHLETRKPVLGQAGTLAVGTEGGLRGSAWFLLQISPNSRLSQEVVLDVGCPYVRFHTEVHWHEAHKFLKVEFPARVRSSQATYEIQFGHLQRPTHYNTSWDWARFEVWAHRWMDLSEHGFGLALLNDCKYGASVRGSILSLSLLRAPKAPDATADTGRHEFTYALMPHKGSFQDAGVIQAAYSLNFPLLALPAPSPAPATSWSAFSVSSPAVVLETVKQAESSPQRRSLVLRLYEAHGSHVDCWLHLSLPVQEAILCDLLERPDPAGHLTSGQPPEAHLFSLPSAVPVARASASATLSPWGWGFVCRRLWGLLISASPA

SEQ ID NO: 22983 - protein, 228 aa, Homo sapiens [sequence omitted]

SEQ ID NO: 22984 - protein, 1093 aa, Homo sapiens [sequence omitted]

SEQ ID NO: 22985 - protein, 657 aa, Homo sapiens
MGTWMGLLNNKVGTFKFIYVDVLSEDEEKPKRPTRRRRKGRPPQPKSVEDLLDRINLKEHMPTFLFNGYEDLDTFKLLEEEDLDELNIRDPEHRAVLLTAVELLQEYDSNSDQSGSQEKLLVDSQGLSGCSPRDSGCYESSENLENGKTRKASLLSAKSSTEPSLKSFSRNQLGNYPTLPLMKSGDALKQGQEEGRLGGGLAPDTSKSCDPPGVTGLNKNRRSLPVSICRSCETLEGPQTVDTWPRSHSLDDLQVEPGAEQDVPTEVTEPPPQIVPEVPQKTTASSTKAQPLEQDSAVDNALLLTQSKRFSEPQKLTTKKLEGSIAASGRGLSPPQCLPRNYDAQPPGAKHGLARTPLEGHRKGHEFEGTHHPLGTKEGVDAEQRMQPKIPSQPPPVPAKKSRERLANGLHPVPMGPSGALPSPDAPCLPVKRGSPASPTSPSDCPPALAPRPLSGQAPGSPPSTRPPPWLSELPENTSLQEHGVKLGPALTRKVSCARGVDLETLTENKLHAEGIDLTEEPYSDKHGRCGIPEALVQRYAEDLDQPERDVAANMDQIRVKQLRKQHRMAIPSGGLTEICRKPVSPGCISSVSDWLISIGLPMYAGTLSTAGFSTLSQVPSLSHTCLQEAGITEERHIRKLLSAARLFKLPPGPEAM

SEQ ID NO: 22986 - protein, 1056 aa, Homo sapiens
MMKFRFRRQGADPQREKLKQELFAFNKTVEHGFPNQPSALAFDPELRIMAIGTRSGAVKIYGAPGVEFTGLHRDAATVTQMHFLTGQGRLLSLLDDSSLHLWEIVHHNGCAHLEEALSFQLPSRPGFDGASAPLSLTRVTVVLLVAASDIAALGTEGSSVFFLDVTTLTLLEGQTLAPGEVLRSVPDDYRCGKALGPVESLQGHLRDPTKILIGYSRGLLVIWNQASQCVDHIFLGNQQLESLCWGRDSSTVVSSHSDGSYAVWSVDAGSFPTLQPTVATTPYGPFPCKAINKILWRNCESGGHFIIFSGGMPRASYGDRHCVSVLRAETLVTLDFTSRIIDFFTVHSTRPEDEFDDPQALAVLLEEELVVLDLQTPGWPAVPAPYLAPLHSSAITCSAHVASVPAKLWARIVSAGEQQSPQPVSSALSWPITGGRNLAQEPSQRGLLLTGHEDGTVRFWDASGVALRPLYKLSTAGLFQTDCEHADSLAQAAEDDWPPFRKVGCFDPYSDDPRLGVQKVALCKYTAQMVVAGTAGQVLVLELSDVPVEQAVSVAIIDLLQDREGFTWKGHERLSPRTGPLPWPAGFQPRVLVQCLPPAAVTAVTLHTEWSLVAFGTSHGFGLLDPVFPRCTLHPNDSLAMEGPLSRVKSLKKSLRQSFRRIRKSRVSGKKRAANASSKLQEANAQLAEQACPHDVEMTPVQRRIEPRSADDSLSGVVRCLYFADTFLRDGAHHGPTMWAGTNSGSVFAYALEVPAAAVGGEKRPEQAVEAVLGKEVQLMHRAPVVAIAVLDGRGRPLPEPYEASRDLAQAPDMQGGHAVLIASEEQFKVFTLPKVSAKTKFKLTAHEGCRVRKVALATFASVACEDYAETCLACLTNLGDVHVFSVPGLRPQVHYSCIRKEDISGIASCVFTRHGQGFYLISPSEFERFSLSARNITEPLCSLDINWPRDATQASYRIRESPKLSQANGTPSILLAPQSLDGSPDPAHSMGPDTPEPPEAALSPMSIDSATSADTTLDTTGDVTVEDVKDFLGSSEESEKNLRNLAEDEAHACAI

SEQ ID NO: 22987 - protein, 880 aa, Homo sapiens
MELTGLEVALVLILQKVENGDLSNKILKITDFGLAREWHRTTKMSAAGTYAWMAPEVIRASMFSKGSDVWSYGVLLWELLTGEVPFRGIDGLAVAYGVAMNKLALPIPSTCPEPFAKLMEDCWNPDPHSRPSFTNILDQLTTIEESGFFEMPKDSFHCLQDNWKHEIQEMFDQLRAKEKELRTWEEELTRAALQQKNQEELLRRREQELAEREIDILERELNIIIHQLCQEKPRVKKRKGKFRKSRLKLKDGNRISLPSDFQHKFTVQASPTMDKRKSLINSRSSPPASPTIIPRLRAIQCETVSQISWGQNTQGHLSPALSSHRLVQACSIHNFCHLSSTMCIYMHILTPGESSKTWGRSSVVPKEEGEEEEKRAPKKKGRTWGPGTLGQKELASGDEGLKSLVDGYKQWSSSAPNLVKGPRSSPALPGFTSLMEMALLAASWVVPIDIEEDEDSEGPGSGESRLQHSPSQSYLCIPFPRGEDGDGPSSDGIHEEPTPVNSATSTPQLTPTNSLKRGGAHHRRCEVALLGCGAVLAATGLGFDLLEAGKCQLLPLEEPEPPAREEKKRREGLFQRSSRPRRSTSPPSRKLFKKEEPMLLLGDPSASLTLLSLSSISECNSTRSLLRSDSDEIVVYEMPVSPVEAPPLSPCTHNPLVNVRVERFKRDPNQSLTPTHVTLTTPSQPSSHRRTPSDGALKPETLLASRSPSSNGLSPSPGAGMLKTPSPSRDPGEFPRLPDPNVVFPPTPRRWNTQQDSTLERPKTLEFLPRPRPSANRQRLDPWWFVSPSHARSTSPANSSSTETPSNLDSCFASSSSTVEERPGLPALLPFQAGPLPPTERTLLDLDAEGQSQDSTVPLCRAELNTHRPAPYEIQQEFWS

SEQ ID NO: 22988 - protein, 80 aa, Homo sapiens
MASSSTVPLGFHYETKYVVLSYLGLLSQEKLQEQHLSSPQGVQLDIASQSLDQEILLKVKTEIEEELKSLDKEISEGHCV

SEQ ID NO: 22989 - protein, 837 aa, Homo sapiens
PATSPSLRAQLEQALRLEPGELETQEPRGLVRQSVELRRQLQEEQASYRRKLQAYQEGQQRQAQLVQRLQGKILQYKKRCSELEQQLLERSGELEQQRLRDTEHSQDLESALIRLEEEQQRSASLAQVNAMLREQLDQAGSANQALSEDIRKVTNDWTRCRKELEHREAAWRREEESFNAYFSNEHSRLLLLWRQVVGFRRLVSEVKMFTERDLLQLGGELARTSRAVQEAGLGLSTGLRLAESRAEAALEKQALLQAQLEEQLRDKVLREKDLAQQQMQSDLDKADLSARVTELGLAVKRLEKQNLEKDQVNKDLTEKLEALESLRLQEQAALETEDGEGLQQTLRDLAQAVLSDSESGVQLSGSERTADASNGSLRGLSGQRTPSPPRRSSPGRGRSPRRGPSPACSDSSTLALIHSALHKRQLQVQDMRGRYEASQDLLGTLRKQLSDSESERRALEEQLQRLRDKTDGAMQAHEDAQREVQRLRSANELLSREKSNLAHSLQVAQQQAEELRQEREKLQAAQEELRRQRDRLEEEQEDAVQDGARVRRELERSHRQLEQLEGKRSVLAKELVEVREALSRATLQRDMLQAEKAEVAEALTKAEAGRVELELSMTKLRAEEASLQDSLSKLSALNESLAQDKLDLNRLVAQLEEEKSALQGRQRQAEQEATVAREEQERLEELRLEQEVARQGLEGSLRVAEQAQEALEQQLPTLRHERSQLQEQLAQEAAWRELEAERAQLQSQLQREQEELLARLEAEKEELSEEIAALQQERDEGLLLAESEKQQALSLKESEKTALSEKLMGTRHSLATISLEMERQKRDAQSRQEQDRV

SEQ ID NO: 22990 - protein, 419 aa, Homo sapiens
MHLLGFFSVACSLLAAALLPGPREAPAAAAAFESGLDLSDAEPDAGEATAYASKDLEEQLRSVSSVDELMTVLYPEYWKMYKCQLRKGGWQHNREQANLNSRTEETIKFAAAHYNTEILKSIDNEWRKTQCMPREVCIDVGKEFGVATNTFFKPPCVSVYRCGGCCNSEGLQCMNTSTSYLSKTLFEITVPLSQGPKPVTISFANHTSCRCMSKLDVYRQVHSIIRRSLPATLPQCQAANKTCPTNYMWNNHICRCLAQEDFMFSSDAGDDSTDGFHDICGPNKELDEETCQCVCRAGLRPASCGPHKELDRNSCQCVCKNKLFPSQCGANREFDENTCQCVCKRTCPRNQPLNPGKCACECTESPQKCLLKGKKFHHQTCSCYRRPCTNRQKACEPGFSYSEEVCRCVPSYWKRPQMS

SEQ ID NO: 22991 - protein, 1797 aa, Homo sapiens
MSGASVKVAVRVRPFNSRETSKESKCIIQMQGNSTSIINPKNPKEAPKSFSFDYSYWSHTSPEDPCFASQNRVYNDIGKEMLLHAFEGYNVCIFAYGQTGAGKSYTMMGKQEESQAGIIPQLCEELFEKINDNCNEEMSYSVEVSYMEIYCERVRDLLNPKNKGNLRVREHPLLGPYVEDLSKLAVTSYTDIADLMDAGNKARTVAATNMNETSSRSHAVFTIVFTQKKHDNETNLSTEKVSKISLVDLAGSERADSTGAKGTRLKEGANINKSLTTLGKVISALAEVDNCTSKSKKKKKTDFIPYRDSVLTWLLRENLGGNSRTAMVAALSPADINYDETLSTLRYADRAKQIKCNAVINEDPNAKLVRELKEEVTRLKDLLRAQGLGDIIDIDPLIDDYSGSGSKSSMGSLTSSPSSCSLSSQVGLTSVTSIQERIMSTPGGEEAIERLKESEKIIAELNETWEEKLRKTEAIRMEREALLAEMGVAIREDGGTLGVFSPKKTPHLVNLNEDPLMSECLLYYIKDGITRVGQADAERRQDIVLSGAHIKEEHCIFRSERSNSGEVIVTLEPCERSETYVNGKRVSQPVQLRSGNRIIMGKNHVFRFNHPEQARAEREKTPSAETPSEPVDWTFAQRELLEKQGIDMKQEMEKRLQEMEILYKKEKEEADLLLEQQRLDYESKLQALQKQVETRSLAAETTEEEEEEEEVPWTQHEFELAQWAFRKWKSHQFTSLRDLLWGNAVYLKEANAISVELKKKVQFQFVLLTDTLYSPLPPELLPTEMEKTHEDRPFPRTVVAVEVQDLKNGATHYWSLEKLKQRLDLMREMYDRAGEMASSAQDESETTVTGSDPFYDRFHWFKLVGSSPIFHGCVNERLADRTPSPTFSTADSDITELADEQQDEMEDFDDEAFVDDAGSDAGTEEGSDLFSDGHDPFYDRSPWFILVGRAFVYLSNLLYPVPLIHRVAIVSEKGEVRGFLRVAVQAIAADEEAPDYGSGIRQSGTAKISFDNEYFNQSDFSSVAMTRSGLSLEELRIVEGQGQSSEVITPPEEISRINDLDLKSSTLLDGKMVMEGFSEEIGNHLKLGSAFTFRVTVLQASGILPEYADIFCQFNFLHRHDEAFSTEPLKNNGRGSPLAFYHVQNIAVEITESFVDYIKTKPIVFEVFGHYQQHPLHLQGQELNSPPQPCRRFFPPPMPLSKPVPATKLNTMSKTSLGQSMSKYDLLVWFEISELEPTGEYIPAVVDHTAGLPCQGTFLLHQGIQRRITVTIIHEKGSELHWKDVRELVVGRIRNKPEVDEAAVDAILSLNIISAKYLKSSHNSSRTFYRFEAVWDSSLHNSLLLNRVTPYGEKIYMTLSAYLELDHCIQPAVITKDVCMVFYSRDAKISPPRSLRSLFGSGYSKSPDSNRVTGIYELSLCKMSDTGSPGMQRRRRKILDTSVAYVRGEENLAGWRPRGDSLILEHQWELEKLELLHEVEKTRHFLLLRERLGDSIPKSLSDSLSPSLSSGTLSTSTSISSQISTTTFESAITPSESSGYDSGDIESLVDREKELATKCLQLLTHTFNREFSQVHGSVSDCKLSDISPIGRDPSESSFSSATLTPSSTCPSLVDSRSNSLDQKTPEANSRASSPCPEFEQFQIVPAVETPYLARAGKNEFLNLVPDIEEIRPSSVVSKKGYLHFKEPLYSNWAKHFVVVRRPYVFIYNSDKDPVERGIINLSTAQVEYSEDQQAMVKTPNTFAVCTKHRGVLLQALNDKDMNDWLYAFNPLLAGTIRPGHLASEIIREDKSVSFSCQ

SEQ ID NO: 22992 - protein, 313 aa, Homo sapiens
MNIDIASIDMVSEVNMDYTLTMYFQQAWRDKRLSYNVIPLNLTLDNRVADQLWVPDTYFLNDKKSFVHGVTVKNRMIRLHPDGTVLYGLRITTTAACMMDLRRYPLDEQNCTLEIESYGYTTDDIEFYWRGDDNAVTGVTKIELPQFSIVDYKLITKKVVFSTGSYPRLSLSFKLKRNIGYFILQTYMPSILITILSWVSFWINYDASAARVALGITTVLTMTTINTHLRETLPKIPYVKAIDMYLMGCFVFVFMALLEYALVNYIFFGRGPQRQKKAAEKAASANNEKMRLDVNKVNSEGKPSLLLKLMEEC

SEQ ID NO: 22993 - protein, 1545 aa, Homo sapiens
MMPAQYALTSSLVLLVLLSTARAGPFSSRSNVTLPAPRPPPQPGGHTVGAGVGSPSSQLYEHTVEGGEKQVVFTHRINLPPSTGCGCPPGTEPPVLASEVQALRVRLEILEELVKGLKEQCTGGCCPASAQAGTGQTDVRTLCSLHGVFDLSRCTCSCEPGWGGPTCSDPTDAEIPPSSPPSASGSCPDDCNDQGRCVRGRCVCFPGYTGPSCGWPSCPGDCQGRGRCVQGVCVCRAGFSGPDCSQRSCPRGCSQRGRCEGGRCVCDPGYTGDDCGMRSCPRGCSQRGRCENGRCVCNPGYTGEDCGVRSCPRGCSQRGRCKDGRCVCDPGYTGEDCGTRSCPWDCGEGGRCVDGRCVCWPGYTGEDCSTRTCPRDCRGRGRCEDGECICDTGYSGDDCGVRSCPGDCNQRGRCEDGRCVCWPGYTGTDCGSRACPRDCRGRGRCENGVCVCNAGYSGEDCGVRSCPGDCRGRGRCESGRCMCWPGYTGRDCGTRACPGDCRGRGRCVDGRCVCNPGFTGEDCGSRRCPGDCRGHGLCEDGVCVCDAGYSGEDCSTRSCPGGCRGRGQCLDGRCVCEDGYSGEDCGVRQCPNDCSQHGVCQDGVCICWEGYVSEDCSIRTCPSNCHGRGRCEEGRCLCDPGYTGPTCATRMCPADCRGRGRCVQGVCLCHVGYGGEDCGQEEPPASACPGGCGPRELCRAGQCVCVEGFRGPDCAIQTCPGDCRGRGECHDGSCVCKDGYAGEDCGEARVPSSASAYDQRGLAPGQEYQVTVRALRGTSWGLPASKTITTMIDGPQDLRVVAVTPTTLELGWLRPQAEVDRFVVSYVSAGNQRVRLEVPPEADGTLLTDLMPGVEYVVTVTAERGRAVSYPASVRANTEEREEESPPRPSLSQPPRRPWGNLTAELSRFRGTVQDLERHLRAHGYPLRANQTYTSVARHIHEYLQRQVLGSSADGALLVSLDGLRGQFERVVLRWRPQPPAEGPGGELTVPGTTRTVSLPDLRPGTTYHVEVHGVRAGQTSKSYAFITTTGPSTTQGAQAPLLQQRPQELGELRVLGRDETGRLRVVWTAQPDTFAYFQLRMRVPEGPGAHEEVLPGDVRQALVPPPPPGTPYELSLHGVPPGGKPSDPIIYQGIMDKDEEKPGKSSGPPRLGELTVTDRTSDSLLLRWTVPEGEFDSFVIQYKDRDGQPQVVPVEGPQRSAVITSLDPGRKYKFVLYGFVGKKRHGPLVAEAKILPQSDPSPGTPPHLGNLWVTDPTPDSLHLSWTVPEGQFDTFMVQYRDRDGRPQVVPVEGPERSFVVSSLDPDHKYRFTLFGIANKKRYGPLTADGTTAPERKEEPPRPEFLEQPLLGELTVTGVTPDSLRLSWTVAQGPFDSFMVQYKDAQGQPQAVPVAGDENEVTVPGLDPDRKYKMNLYGLRGRQRVGPESVVAKTAPQEDVDETPSPTELGTEAPESPEEPLLGELTVTGSSPDSLSLFWTVPQGSFDSFTVQYKDRDGRPRAVRVGGKESEVTVGGLEPGHKYKMHLYGLHEGQRVGPVSAVGVT

SEQ ID NO: 22994 - protein, 650 aa, Homo sapiens; identical to SEQ ID NO: 5435

SEQ ID NO: 22995 - protein, 444 aa, Homo sapiens
MAETKIIYHMDEEETPYLVKLPVAPERVTLADFKNVLSNRPVHAYKFFFKSMDQDFGVVKEEIFDDNAKLPCFNGRVVSWLVLAEGAHSDAGSQGTDSHTDLPPPLERTGGIGDSRPPSFHPNVASSRDGMDNETGTESMVSHRRERARRRNREEAARTNGHPRGDRRRDVGLPPDSASTALSSELESSSFVDSDEDGSTSRLSSSTEQSTSSRLIRKYASSLLKHGFLRHTVNKITFSEQCYYVFGDLCSNLATLNLNSGSSGTSDQDTLAPLPHPAAPWPLGQGYPYQYPGPPPCFPPAYQDPGFSYGSGSTGSQQSEGSKSSGSTRSSRRAPGREKERRAAGAGGSGSESDHTAPSGVGSSWRERPAGQLSRGSSPRSQASATAPGLPPPHPTTKAYTVVGGPPGGPPVRELAAVPPELTGSRQSFQKAMGNPCEFFVDIM

SEQ ID NO: 22996 - protein, 1732 aa, Homo sapiens
MFFKGGSWLWLYIRTSIILGSELNSPAPHGQNNCYQLNRFQCSFEEAQHYCHVQRGFLAHIWNKEVQDLIRDYLEEGKKWWIGQNVMPLKKHQDNKYPADVAANGPPKPLSCTYLSRNFIRISSKGDKCLLKYYFICQTGDFLDGDAHYERNGNNSHLYQRHKKTKRGVAIARDKMPPGPGHLPTTCHYPLPAHLSKTLCHPISQFPSVLSSITSQVTSAASEPSSQPLPVITQLTMPVSVTHAGQSLAETTSSPKEEGHPNTFTSYLQVSLQKASGQVIDEIAGNFSRAVHGLQALNKLQEACEFLQKLTALTPRFSKPAQVNLINSLIYLSEELLRIPFQNNNSLGFKVPPTVCPFHSLNNVTKAGEGSWLESKRHTEPVEDILEMSLVEFGNIGEAFLEQNQSPESSVTLTSANATLLLSRQNISTLPLSSYTLGHPAPVRLGFPSALALKELLNKHPGVNVQITGLAFNPFKDLDNRNIVGSIGSVLLSANRKLLQVHDLMEDIEIMLWRNVSLETHPTSLNMSTHQLTITVNVTSLEKSLIVSIDPDSPLLMTLYLGFQYQPNCTHFHLNITLPKDKVWQKDEEYTWVLNPEHLQHGIGTYYITAVLSERQEGAQQTPSLVSVITAVTQCYYWEIHNQTWSSAGCQVGPQSTILRTQCLCNHLTFFASDFFVVPRTVNVEDTIKLFLRVTNNPVGVSLLASLLGFYVITVVWARKKDQADMQKVKVTVLADNDPSAQFHYLIQVYTGYRRSAATTAKVVITLYGSEGRSEPHHLCDPQKTVFERGGLDVFLLTTWTSLGNLHSLRLWHDNSGVSPSWYVSQVIVCDMAVKRKWHFLCNCWLAVDLGDCELDRVFIPVSKRELFSFRHLFSSMIVEKFTQDYLWLSIATRHPWNQFTRVQRLSCCMTLLLCNMVINVMFWKINSTTAKRDEQMRPFAVAWSELLVSIHTAVILFPINLVIGRLFPLIEPQETLPLFPPIQASCLSDASVEPLSATMVVEELKETVRFLLRRNTYLLSKCEQPPWSSWDITKLVKLLSSLVSSHLEGQGCHQQGERHWARVVPENHHHFCCYLHRVLQRLKSHLGTLGLTQGHQSCDFLDAASQLQKLQELLETHILPTEQEPSREVTSFAILSSEEGKKPISNGLSKWLTSVCWLLLGFTSLASAFFTALYSLELSKDQATSWMISIILSVLQNIFISQPVKVVFFTFLYSLMMSRMPRLNKENEQQTKRILALLAKCSSSVPGSRDKNNPVYVAPAINSPTKHPERTLKKKKLFKLTGDILVQILFLTLLMTAIYSAKNSNRFYLHQAIWKTFSHQFSEIKLLQDFYPWANHILLPSLYGDYRGKNAVLEPSHCKCGVQLIFQIPRTKTYEKVDEGQLAFCDNGHTCGRPKSLFPGLHLRRFSYICSPRPMVLIPTDELHERLTSKNENGFSYIMRGAFFTSLRLESFTSLQMSKKGCVWSIISQVIYYLLVCYYAFIQGCQLKQQKWRFFTGKRNILDTSIILISFILLGLDMKSISLHKKNMARYRDDQDRFISFYEAVKVNSAATHLVGFPVLLATVQLWNLLRHSPRLRVISRTLSRAWDEVVGFLLIILILLTGYAIAFNLLFGCSISDYRTFFSSAVTVVGLLMGISHQEEVFALDPVLGTFLILTSVILMVLVVINLFVSAILMAFGKERKSLKKEAALIDTLLQKLSNLLGISWPQKTSSEQAATTAVGSDTEVLDELP

SEQ ID NO: 22997 - protein, 1471 aa, Homo sapiens
MDNALFLAAVSNLDIESKLSVYYRAPWHQQRNIFLPATRPPCVEELHRHARQSLQALRREHRSRSDRREQRAAAPLSIAAPPLPAYPPAHSQRRREFKDRHFLTFNSTRSPSPTECCHMTPWSRKSHPPEDEDTDVMLGQRPKNPIHNIPSTLDKQTNWSKALPLPTPEEKMKQDAQVISSCIIPINVTGVGFDREASIRCSLVHSQSVLQRRRKLRRRKTISGIPRRVQQEIDSDESPVARERNVIVHTNPDPSNTVNRISGTRDSECQTEDILIAAPSRRRIRAQRGQSIAASLSHSAGNISALADKGDTMFTPAVSSRTRSRSLPREGNRGGDAEPKVGAKPSAYEEGESFVGDHERTPNDFSEAPSSPSAQDHQPTLGLACSQHLHSPQHKLSERGRSRLSRMAADSGSCDISSNSDTFGSPIHCISTAGVLLSSHMDQKDDHQSSSGNWSGSSSTCPSQTSETIPPAASPPLTGSSHCDSELSLNTAPHANEDASVFVTEQYNDHLDKVRGHRANSFTSTVADLLDDPNNSNTSDSEWNYLHHHHDASCRQDFSPERPKADSLGCPSFTSMATYDSFLEKSPSDKADTSSHFSVDTEGYYTSMHFDCGLKGNKSYVCHYAALGPENGQGVGASPGLPDCAWQDYLDHKRQGRPSISFRKPKAKPTPPKRSSSLRKSDGNADISEKKEPKISSGQHLPHSSREMKLPLDFANTPSRMENANLPTKQEPSWINQSEQGIKEPQLDASDIPPFKDEVAESTHYADLWLLNDLKTNDPYRSLSNSSTATGTTVIECIKSPESSESQTSQSESRATTPSLPSVDNEFKLASPEKLAGLASPSSGYSSQSETPTSSFPTAFFSGPLSPGGSKRKPKVPERKSSLQQPSLKDGTISLSKDLELPIIPPTHLDLSALHNVLNKPFHHRHPLHVFTHNKQNTVGETLRSNPPPSLAITPTILKSVNLRSINKSEEVKQKEENNTDLPYLEESTLTTAALSPSKIRPHTANKSVSRQYSTEDTILSFLDSSAVEMGPDKLHLEKNSTFDVKNRCDPETITSAGSSLLDSNVTKDQVRTETEPIPENTPTKNCAFPTEGFQRVSAARPNDLDGKIIQYGPGPDETLEQVQKAPSAGLEEVAQPESVDVITSQSDSPTRATDVSNQFKHQFVMSRHHDKVPGTISYESEITSVNSFPEKCSKQENIASGISAKSASDNSKAEETQGNVDEASLKESSPSDDSIISPLSEDSQAEAEGVFVSPNKPRTTEDLFAVIHRSKRKVLGRKDSGDMSVRSKSRAPLSSSSSSASSITSPSSNVTTPNSQRSPGLIYRNAKKSNTSNEEFKLLLLKKGSRSDSSYRMSATEILKSPILPKPPGELTAESPQSTDDAHQGSQGAEALSPLSPCSPRVNAEGFSSKSFATSASARVGRSRAPPAASSSRYSVRCRLYNTPMQAISEGETENSDGSPHDDRSSQSST

SEQ ID NO: 22998 - protein, 884 aa, Homo sapiens
MLQTKDLIWTLFFLGTAVSLQVDIVPSQGEISVGESKFFLCQVAGDAKDKDISWFSPNGEKLTPNQQRISVVWNDDSSSTLTIYNANIDDAGIYKCVVTGEDGSESEATVNVKIFQKLMFKNAPTPQEFREGEDAVIVCDVVSSLPPTIIWKHKGRDVILKKDVRFIVLSNNYLQIRGIKKTDEGTYRCEGRILARGEINFKDIQVIVNVPPTIQARQNIVNATANLGQSVTLVCDAEGFPEPTMSWTKDGEQIEQEEDDEKYIFSDDSSQLTIKKVDKNDEAEYICIAENKAGEQDATIHLKVFAKPKITYVENQTAMELEEQVTLTCEASGDPIPSITWRTSTRNISSEEKASWTRPEKQEVHAPWNWQVGRQKGQAGSAGFPGSHETLDGHMVVRSHARVSSLTLKSIQYTDAGEYICTASNTIGQDSQSMYLEVQYAPKLQGPVAVYTWEGNQVNITCEVFAYPSATISWFRDGQLLPSSNYSNIKIYNTPSASYLEVTPDSENDFGNYNCTAVNRIGQESLEFILVQADTPSSPSIDQVEPYSSTAQVQFDEPEATGGVPILKYKAEWRAVGEEVWHSKWYDAKEASMEGIVTIVGLKPETTYAVRLAALNGKGLGEISAASEFKTQPVQGEPSAPKLEGQMGEDGNSIKVNLIKQDDGGSPIRHYLVRYRALSSEWKPEIRLPSGSDHVMLKSLDWNAEYEVYVVAENQQGKSKAAHFVFRTSAQPTAIPANGSPTSGLSTGAIVGILIVIFVLLLVVVDITCYFLNKCGLFMCIAVNLCGKAGPGAKGKDMEEGKAAFSKDESKEPIVEVRTEEERTPNHDGGKHTEPNETTPLTEPEKGPVEAKPECQETETKPAPAEVKTVPNDATQTKENESKA

SEQ ID NO: 22999 - protein, 313 aa, Homo sapiens
GSFMMVNSSGRASGQKAHLLLPTLKENDTHCIDFHYYFSSRDRSSPGALNVYVKVNGGPQGNPVWNVSGVVTEGWVKAELAISTFWPHFYQVIFESVSLKGHPGYIAVDEVRVLAHPCRKAPHFLRLQNVEVNVGQNATFQCIAGGKWSQHDKLWLQQWNGRDTALMVTRVVNHRRFSATVSVADTAQRSVSKYRCVIRSDGGSGVSNYAELIVKEPPTPIAPPELLAVGATYLWIKPNANSIIGDGPIILKEVEYRTTTGTWAETHIVDSPNYKLWHLDPDVEYEIRVLLTRPGEGGTGPPGPPLTTRTKCA

SEQ ID NO: 23000 - protein, 164 aa, Homo sapiens
DNAPEFNSSEYSVAITELAQVGFALPLFIQVVDKDEGLNSMFEVYLVGNNSHHFIISPTSVQGKADIRIRVAIPLDYETVDRYDFDLFANESVPDHVGYAKVKITLINENDNRPIFSQPLYNISLYENVTVGTSVLTVLWEKFFCSNSSRFSSAQLVVSSWNQL

SEQ ID NO: 23001 - protein, 307 aa, Homo sapiens
MVAGKVLMAKQEIVECVASAAMISPGKLPGETHSQRIAEEALGGLDNSKKQKGNAAGNKISQLPSQDRHFSLATFNRRIPTEHSVLESHESEGSFSMNSNDITQQSVDTREKLYECFDCGKAFCQSSKLIRHQRIHTGERPYACKECGKAFSLSSDLVRHQRIHSGEKPYECCECGKAFRGSSELIRHRRIHTGEKPYECGECGKAFSRSSALIQHKKIHTGDKSYECIACGKAFGRSSILIEHQRIHTGEKPYECNECGKSFNQSSALTQHQRIHTGEKPYECSECRKTFRHRSGLMQHQRTHTRV

SEQ ID NO: 23002 - protein, 754 aa, Homo sapiens
MESSDVELDLQRSVQAVLRELSTQAPALQSNQGMWRWSLHKKVERDPGKSPVLVRILLRELEKAESQDLRHVIIPLLHTVMYVLTKATGITEELYQRIYAFCTRLLTLPTPYCTVALDCAIRLKTEMAVPGTLYQRMVIAEQNLTNELYPYQERVFLFVDPELVSASVCSALLLEIEAAQAQQTPETCMRHVVSHALQAALGEACHAGALHRKLQASPRRTLEHYFHAVVAALEQMASEASPSREGHVERLEEIYCSLLGPAAGRCGGDLVQERPPSIPLPSPYITFHLWTGEEQLWKELVLFLRPRSQLRLSADLEVLDLQGLRPDRELARVSVLSTDSGIERDLPTGADELPAPGSPEMERAGLQRKGGIKKRAWPLDFLMPGSWDGPPGLHRRTGRPSGDGEMLPGVSRLHTARVLVLGDDRMLGRLAQAYHRLRKRETQKFCLTPRLSLQLYYIPVLAPEKPAASRQPELGELATFLGRVDPWYQSNVNTLCPAIHKLAEMPPSLDTSRTVDPFILDVITYYIRMGTQPIYFQIYTVKIFFSDLSQDPTEDIFLIELKVKIQDSKFPKDGFSPRRRGVAEGPGAELSLCYQKALLSHRPREVTVSLRATGLILKAIPASDTEVSGSSHCPLPAAPVTDHTCLNVNVTEVVKSSNLAGKSFSTVTNTFRTNNIQIQSRDQRLLTLSLDKDDQRTFRDVVRFEVAPCPEPCSGAQKSKAPWLNLHGQQEVEAIKAKPKPLLMPINTFSGIVQ

SEQ ID NO: 23003 - protein, 60 aa, Homo sapiens
SQEEDFRLQNSTLMAEFSKPCRNAMGKKPGSSQLSVRARGIPQGAWPPPSWPPCRWQRWS

SEQ ID NO: 23004 - protein, 228 aa, Homo sapiens
MNIKGSPWKAGSLLLLLVSNLLLCQSVAPLPICPGGAARCQVTLRDLFDRAVVLSHYIHNLSSEMFSEFDKRYTHGRGFITKAINSCHTSSLATPEDKEQAQQMNQKDFLSLIVSILRSWNEPLYHLVTEVRGMQEAPEAILSKAVEIEEQTKRLLEGMELIVSQVHPETKENEIYPVWSGLPSLQMADEESRLSAYYNLLHCLRRDSHKIDNYLKLLKCRIIHNNNC

SEQ ID NO: 23005 - protein, 361 aa, Homo sapiens
MSEARKGPDEAEESQYDSGIESLRSLRSLPESTSAPASGPSDGSPQPCTHPPGPVKEPQEKEDADGERADSTYGSSSLTYTLSLLGGPEAEDPAPRLPLPHVGALSPQQLEALTYISEDGDTLVHLAVIHEAPAVLLCCLALLPQEVLDIQNNLYQTALHLAVHLDQPGAVRALVLKGASRALQDRHGDTALHVACQRQHLACARCLLEGRPEPGRGTSHSLDLQLQNWQGLACLHIATLQKNQPLMELLLRNGADIDVQEGTSGKTALHLAVETQERGLVQFLLQAGAQVDARMLNGCTPLHLAAGRGLMGISSTLCKAGADSLLRNVEDETPQDLTEESLVLLPFDDLKISGKLLLCTD

SEQ ID NO: 23006 - protein, 746 aa, Homo sapiens
MAFSQGLLTFRDVAIEFSQEEWKCLDPAQRTLYRDVMLENYRNLVSLDISSKCTMKEFLSTAQGNREVFHAGTLQIHESHHNGDFCYQDVDKDIHDYEFQWQEDERNGHEAPMTKIKKLTGITERYDQSHARNKPIKDQLGSSFHSHLPEMHIFQTEEKIDNQVVKSVHDASLVSTAQRISCRPKTHISNNHGNNFWNSSLLTQKQEVHMREKSFQCNESGKAFNYSSLLRKHQIIHLADKYKCDVCGKLFNQKRNLACHRRCHTGENPYKCNECGKTFSQTSSLTCHRRLHTGEKPYKCEECDKAFHFKSILERHRIIHTEEKPYKCNECGKTFRQKSILTRHHRLHTGEKPYKCNECGKTFSHKSSLTCHHRLHTGEKPYKCNECGKTFSHKSSLTCHRRLHTGEKPYKCEECDKAYSFRSNFEIHRKIHTEDNAYKCNECGKTFSRTSSLTCHRRRHTGEQPYKCEECDKAFRFKSNLERHRRIHTGEKPYKCNECGKTFSRKSYLTCHHRLHTGEKAYKCNECGKTFSWKSSLTCHRRLHSGEKPYKCKECGKTFNQQLTLKRHRRLHSGENPYKCEDSDKAYSFKSNLEIHQKIHTEENPYKCNECGKTFSRTSSLTCHRRLHTGEKPYKCEECDKAFRVKSNLEGHRRIHTGEKPYKCNECGKTFSRKSYFICHHRLHTGEKPYKCNECGKNFSQKSSLICHHRLHTGEKPYKCNECGKTFSQKSNLTCHRRLHTGEKQV

SEQ ID NO: 23007 - protein, 1508 aa, Homo sapiens
MCKASGNHLNPEPNQPAPSVDLDFLEDDILGSPATGGGGGGSGGADQPCDILQQSLQEANITEQTLEAEAELDLGPFQLPTLQPADGGAGPTGAGGAAAVAAGPQALFPGSTDLLGLQGPPTVLTHQALVPPQDVVNKALSVQPFLQPVGLGNVTLQPIPGLQGLPNGSPGGATAATLGLAPIQVVGQPVMALNTPTSQLLAKQVPVSGYLASAAGPSEPVTLASAGVSPQGAGLVIQKNLSAAVATTLNGNSVFGGAGAASAPTGTPSGQPLAVAPGLGSSPLVPAPNVILHRTPTPIQPKPAGVLPPKLYQLTPKPFAPAGATLTIQGEPGALPQQPKAPQNLTFMAAGKAGQNVVLSGFPAPALQANVFKQPPATTTGAAPPQPPGALSKPMSVHLLNQGSSIVIPAQHMLPGQNQFLLPGAPAVQLPQQLSALPANVGGQILAAAAPHTGGQLIANPILTNQNLAGPLSLGPVLAPHSGAHSAHILSAAPIQVGQPALFQMPVSLAAGSLPTQSQPAPAGPAATTVLQGVTLPPSAVAMLNTPDGLVQPATPAAATGEAAPVLTVQPAPQAPPAVSTPLPLGLQQPQAQQPPQAPTPQAAAPPQATTPQPSPGLASSPEKIVLGQPPSATPTAILTQDSLQMFLPQERSQQPLSAEGPHLSVPASVIVSAPPPAQDPAPATPVAKGAGLGPQAPDSQASPAPAPQIPAAAPLKGPGPSSSPSLPHQAPLGDSPHLPSPHPTRPPSRPPSRPQSVSRPPSEPPLHPCPPPQAPPTLPGIFVIQNQLGVPPPASNPAPTAPGPPQPPLRPQSQPPEGPLPPAPHLPPSSTSSAVASSSETSSRLPAPTPSDFQLQFPPSQGPHKSPTPPPTLHLVPEPAAPPPPPPRTFQMVTTPFPALPQPKALLERFHQVPSGIILQNKAGGAPAAPQTSTSLGPLTSPAASVLVSGQAPSGTPTAPSHAPAPAPMAATGLPPLLPAENKAFASNLPTLNVAKAASSGPGKPSGLQYESKLSGLKKPPTLQPSKEACFLEHLHKHQGSVLHPDYKTAFPSFEDALHRLLPYHVYQGALPSPSDYHKVDEEFETVSTQLLKRTQAMLNKYRLLLLEESRRVSPSAEMVMIDRMFIQEEKTTLALDKQLAKEKPDEYVSSSRSLGLPIAASSEGHRLPGHGPLSSSAPGASTQPPPHLPTKLVIRHGGAGGSPSVTWARASSSLSSSSSSSSAASSLDADEDGPMPSRNRPPIKTYEARSRIGLKLKIKQEAGLSKVVHNTALDPVHQPPPPPATLKVAEPPPRPPPPPPPTGQMNGTVDHPPPAAPERKPLGTAPHCPRLPLRKTYRENVGGPGAPEGTPAGRARGGSPAPLPAKVDEATSGLIRELAAVEDELYQRMLKGPPPEPAASAAQGTGDPDWEAPGLPPAKRRKSESPDVDQASFSSDSPQDDTLTEHLQSAIDSILNLQQAPGRTPAPSYPHAASAGTPASPPPLHRPEAYPPSSHNGGLGARTLTR

SEQ ID NO: 23008 - protein, 238 aa, Homo sapiens
MRPAALRGALLGCLCLALLCLGGADKRLRDNHEWKKLIMVQHWPETVCEKIQNDCRDPPDYWTIHGLWPDKSEGCNRSWPFNLEEIKKNWMEITDSSLPSPSMGPAPPRWMRSTPRRSTLAEAWNSTGSWTSTGGCALPPAALPSGDLCCRPSLTAGSRGVGVDLTALQQLLHVHYSATGIIPEECSEPTKPFQIILHHDHTEWVQSIGMPIWTISSSESAIGKTRTQPACAVLSHDS

SEQ ID NO: 23009 - protein, 377 aa, Homo sapiens
MKPAQRNLYRDVMLENYSNLVTVGCQVTKPDVIFKLEQEEEPWVMEEEMFGRHCPEVWEVDEQIKKQQETLVRKVTSISKKILIKEKVIECKKVAKIFPLSSDIVTSRQSFYDCDSLDKGLEHNLDLLRYEKGCVREKQSNEFGKPFYHCASYVVTPFKCNQCGQDFSHKFDLIRHERIHAGEKPYECKECGKAFSRKENLITHQKIHTGEKPYKCNECGKAFIQMSNLIRHHRIHTGEKPYACKDCWKAFSQKSNLIEHERIHTGEKPYECKECGKSFSQKQNLIEHEKIHTGEKPYACNECGRAFSRMSSVTLHMRSHTGEKPYKCNKCGKAFSQCSVFIIHMRSHTGEKPYVCSECGKAFSQSSSLTVHAKSYS

SEQ ID NO: 23010 - protein, 1067 aa, Homo sapiens
MSRQSTLYSFFPKSPALSDANKASARASREGGRARCPRGLSFPRRGCGLERGWAWARPLARSASPPKAKNLNGGLRRSVAPAAPTSCDFSPGDLVWAKMEGYPWWPCLVYNHPFDGTFIREKGKSVRVHVQFFDDSPTRGWVSKRLLKPYTGSKSKEAQKGGHFYSAKPEILRAMQRADEALNKDKIKRLELAVCDEPSEPEEEEEMEVGTTYVTDKSEEDNEIESEEEVQPKTQGSRRSSRQIKKRRVISDSESDIGGSDVEFKPDTKEEGSSDEISSGVGDSESEGLNSPVKVARKRKRMVTGNGSLKRKSSRKETPSATKQATSISSETKNTLRAFSAPQNSESQAHVSGGGDDSSRPTVWYHETLEWLKEEKRRDEHRRRPDHPDFDASTLYVPEDFLNSCTPGMRKWWQIKSQNFDLVICYKVGKFYELYHMDALIGVSELGLVFMKGNWAHSGFPEIAFGRYSDSLVQKGYKVARVEQTETPEMMEARCRKMAHISKYDRVVRREICRIITKGTQTYSVLEGDPSENYSKYLLSLKEKEEDSSGHTRAYGVCFVDTSLGKFFIGQFSDDRHCSRFRTLVAHYPPVQVLFEKGNLSKETKTILKSSLSCSLQEGLIPGSQFWDASKTLRTLLEEEYFREKLSDGIGVMLPQVLKGMTSESDSIGLTPGEKSELALSALGGCVFYLKKCLIDQELLSMANFEEYIPLDSDTVSTTRSGAIFTKAYQRMVLDAVTLNNLEIFLNGTNGSTEGTLLERVDTCHTPFGKRLLKQWLCAPLCNHYAINDRLDAIEDLMVVPDKISEVVELLKKLPDLERLLSKIHNVGSPLKSQNHPDSRAIMYEETTYSKKKIIDFLSALEGFKVMCKIIGIMEEVADGFKSKILKQVISLQTKNPEGRFPDLTVELNRWDTAFDHEKARKTGLITPKAGFDSDYDQALADIRENEQSLLEYLEKQRNRIGCRTIVYWGIGRNRYQLEIPENFTTRNLPEEYELKSTKKGCKRYWTKTIEKKLANLINAEERRDVSLKDCMRRLFYNFDKNYKDWQSAVECIAVLGKTLNKLVLRL

SEQ ID NO: 23011 - protein, 480 aa, Homo sapiens
MTKDKEPIVKSFHFVCLMIIIVGTRIQFSDGNEFAVDKSKRGLIHVPKDLPLKTKVLDMSQNYIAELQVSDMSFLSELTVLRLSHNRIQLLDLSVFKFNQDLEYLDLSHNQLQKISCHPIVSFRHLDLSFNDFKALPICKEFGNLSQLNFLGLSAMKLQKLDLLPIAHLHLSYILLDLRNYYIKENETESLQILNAKTLHLVFHPTSLFAIQVNISVNTLGCLQLTNIKLNDDNCQVFIKFLSELTRGSTLLNFTLNHIETTWKCLVRVFQFLWPKPVEYLNIYNLTIIESIREEDFTYSKTTLKALTIEHITNQVFLFSQTALYTVFSEMNIMMLTISDTPFIHMLCPHAPSTFKFLNFTQNVFTDSIFEKCSTLVKLETLIFVLSPNFVQSEWCHYELYFAHHNLFHEGSNNLILILLEPIPQNSIPNKYHKLKALMTQRTYLQWPKEKSKRGLFWANIRAAFNMKLTLVTENNDVKS

SEQ ID NO: 23012 - protein, 371 aa, Homo sapiens
TPSSPSIDQVEPYSSTAQVQFDEPEATGGVPILKYKAEWRAVGEEVWHSKWYDAKEASMEGIVTIVGLKPETTYAVRLAALNGKGLGEISAASEFKTQPVHSPPPPASASSSTPVPLSPPDKGEPSAPKLEGQMGEDGNSIKVNLIKQDDGGSPIRHYLVRYRALSSEWKPEIRLPSGSDHVMLKSLDWNAEYEVYVVAENQQGKSKAAHFVFRTSAQPTAIPANGSPTSGLSTGAIVGILIVIFVLLLVVVDITCYFLNKCGLFMCIAVNLCGKAGPGAKGKDMEEGKAAFSKDESKEPIVEVRTEEERTPNHDGGKHTEPNETTPLTEPEKGPVEAKPECQETETKPAPAEVKTVPNDATQTKENESKA

SEQ ID NO: 23013 - protein, 334 aa, Homo sapiens
MDEKLLSTVLTTSYSVIFIVGLVGNIIALYVFLGIHRKRNSIQIYLLNVAIADLLLIFCLPFRIMYHINQNKWTLGVILCKVVGTLFYMNMYISIILLGFISLDRYIKINRSIQQRKAITTKQSIYVCCIVWMLALGGFLTMIILTLKKGGHNSTMCFHYRDKHNAKGEAIFNFILVVMFWLIFLLIILSYIKIGKNLLRISKRRSKFPNSGKYATTARNSFIVLIIFTICFVPYHAFRFIYISSQLNVSSCYWKEIVHKTNEIMLVLSSFNSCLDPVMYFLMSSNIRKIMCQLLFRRFQGEPSRSESTSEFKPGYSLHDTSVAVKIQSSSKST

SEQ ID NO: 23014 - protein, 1114 aa, Homo sapiens
MACRRRYFVEGEAPSSETGTSLDSPSAYPQGPLVPGSSLSPDHYEHTSVGAYGLYSGPPGQQQRTRRPKLQHSTSILRKQAEEEAIKRSRSLSESYELSSDLQDKQVEMLERKYGGRLVTRHAARTIQTAFRQYQMNKNFERLRSSMSENRMSRRIVLSNMRMQFSFEGPEKVHSSYFEGKQVSVTNDGSQLGALVSPECGDLSEPTTLKSPAPSSDFADAITELEDAFSRQVKSLAESIDDALNCRSLHTEEAPALDAARARDTEPQTALHGMDHRKLDEMTASYSDVTLYIDEEELSPPLPLSQAGDRPSSTESDLRLRAGGAAPDYWALAHKEDKADTDTSCRSTPSLERQEQRLRVEHLPLLTIEPPSDSSVDLSDRSERGSLKRQSAYERSLGGQQGSPKHGPHSGAPKSLPREEPELRPRPPRPLDSHLAINGSANRQSKSESDYSDGDNDSINSTSNSNDTINCSSESSSRDSLREQTLSKQTYHKEARNSWDSPAFSNDVIRKRHYRIGLNLFNKKPEKGVQYLIERGFVPDTPVGVAHFLLQRKGLSRQMIGEFLGNRQKQFNRDVLDCVVDEMDFSTMELDEALRKFQAHIRVQGEAQKVERLIEAFSQRYCICNPGVVRQFRNPDTIFILAFAIILLNTDMYSPNVKPERKMKLEDFIKNLRGVDDGEDIPREMLMGIYERIRKRELKTNEDHVSQVQKVEKLIVGKKPIGSLHPGLGCVLSLPHRRLVCYCRLFEVPDPNKPQKLGLHQREIFLFNDLLVVTKIFQKKKNSVTYSFRQSFSLYGMQVLLFENQYYPNGIRLTSSVPGADIKVLINFNAPNPQDRKKFTDDLRESIAEVQEMEKHRIESELEKQKGVVRPSMSQCSSLKKESGNGTLSRACLDDSYASGEGLKRSALSSSLRDLSEAGKRGRRSSAGSLESNVEGSIISSPHMRRRATSTRECPSRPHQTMPNSSSLLGSLFGSKRGKPPPQAHLPSAPALPPPHPPVVLPHLQHSVAGHHLGPPEGLPQAAMHGHHTQYCHMQNPPPYHHHHHHHPPQHIQHAHQYHHGPHGGHPAYGAHAHGHPPLPSAHVGHTVHHHGQPPAPPPPTSSKAKPSGISTIV

SEQ ID NO: 23015 - protein, 920 aa, Homo sapiens
MERPEPPPGTAAGQEEQELRERAFFSWAEFSRFFDAWCQQRLALFFVKSSMHLARCRWASAPPLYTLIDVLKYSYVRLVCKDVRAPSRPAVGPPQPGCPAFIIVKLSPLRDRLVVTECQLTHSHPACPLEFAYYFRPGHLLANACLPVRTTNKISKQFVAPADVRRLLSYCKGRDHGVLDALHVLEGLFRTDPEAKVKLVFVEDQAVVETVFFLTSRTRALLRRFPRMLLVDRLPGLQGALDLLAVLCVDGSGRARQAACCVARPGTPSLLRFALASLLQSAPDVKGRVRCLTAGPEVAAQLPAVRQLLPCARVQICRAQGLETLFSKAQELGGAGREDPGLWSRLCRLAGASSPAAYDEALAELHAHGPAAFVDYFERNWEPRRDMWVRFRAFEAARDLDACALVRGHRRRLLRRLSPSRGVAQCLRDLVAMQWADAAGEAVPEGPDGGGPWLEDEPGRGAQGENERVRGLETGDWGGAPKEGSIWRGAQMEKEWARALETRDWGGAQFEGEKGRALQIRDWRGGRLENQKPRGLEGGVLRGSKLEKGHLRGPEIRDWRGPQLEGEKDWGLEGYVWRGSQLEDQALRGLEGYTWRVAQLEDRRSTTDLRGTQFDYERVRSLEGSPWRGAQLHDERAGGLRTAEWKGPQSEVEKGRGLEVRNLRGIPLEKSLELAPENGDQRGPQWEDERRRGPEIAEERGARVGVKRRRGLEDIVLVQLGDTRVTGMENGDGGGARSVGPKSRAGRGMEWGDAGGRCLGLGNGVVSGTPVGTVLEGSPEWAAARSEHLAAGDGLQEGGEDGPREPKRLCRPPGEEEVDWEPLAKFRAACGPELADLVAEELAFARQHGTRGFHWTGAGFALKDGTSDFFLDGALTRCSCSIHAARRLPCRHLFAARLLTGAALFHMDLLRDCWGRAPEP

SEQ ID NO: 23016 - protein, 506 aa, Homo sapiens
MDDYMVLRMIGEGSFGRALLVQHESSNQMFAMKEIRLPKSFSNTQNSRKEAVLLAKMKHPNIVAFKESFEAEGHLYIVMEYCDGGDLMQKIKQQKGKLFPEDMILNWFTQMCLGVNHIHKKRVLHRDIKSKNIFLTQNGKVKLGDFGSARLLSNPMAFACTYVGTPYYVPPEIWENLPYNNKSDIWSLGCILYELCTLKHPFQANSWKNLILKVCQGCISPLPSHYSYELQFLVKQMFKRNPSHRPSATTLLSRGIVARLVQKCLPPEIIMEYGEEVLEEIKNSKHNTPRKKTNPSRIRIALGNEASTVQEEEQDRKGSHTDLESINENLVESALRRVNREEKGNKSVHLRKASSPNLHRRQWEKNVPNTALTALENASILTSSLTAEDDRGGSVIKYSKNTTRKQWLKETPDTLLNILKNADLSLAFQTYTIYRPGSEGFLKGPLSEETEASDSVDGGHDSVILDPERLEPGLDEEDTDFEEEDDNPDWVSELKKRAGWQGLCDR

SEQ ID NO: 23017 - protein, 552 aa, Homo sapiens
MGFDVLLDQVGGMGRFQICLIAFFCITNILLFPNIVLENFTAFTPSHRCWVPLLDNDTVSDNDTGTLSKDDLLRISIPLDSNLRPQKCQRFIHPQWQLLHLNGTFPNTNEPDTEPCVDGWVYDRSSFLSTIVTEWDLVCESQSLKSMVQSLFMAGSLLGGLIYGHLSDRVGRKIICKLCFLQLAISNTCAAFAPTFLVYCILRFLAGFSTMTILGNTFILSLEWTLPRSRSMTIMVLLCSYSVGQMLLGGLAFAIQDWHILQLTVSTPIIVLFLSSWKMVESARWLIINNQLDEGLKELRRVAHINGKKNTEETLTTELVRSTMKKELDAVRIKTSIFSLFRAPKLRMRVFGLCFVRFAITVPFYGLILNLQHLGSNVSLFQILCGAVTFTARCVSLLTLNHMGRRISQILFTFPVGLFILVNTFLPQEMQILRVVLATLGIGSVSAASNSASVHHNELVPTILRSTVAGINAVSGRTGAALAPLLMTLMAYSPHLPWISYGVFPILAVPVILLLPETRDLPLPNTIQDVENDRKDSRNIKQEDTCMKVTQF

SEQ ID NO: 23018 - protein, 813 aa, Homo sapiens
MASPPRGWGCGELLLPFMLLGTLCEPGSGQIRYSMPEELDKGSFVGNIAKDLGLEPQELAERGVRIVSRGRTQLFALNPRSGSLVTAGRIDREELCAQSPLCVVNFNILVENKMKIYGVEVEIIDINDNFPRFRDEELKVKVNENAAAGTRLVLPFARDADVGVNSLRSYQLSSNLHFSLDVVSGTDGQKYPELVLEQPLDREKETVHDLLLTALDGGDPVLSGTTHIRVTVLDANDNAPLFTPSEYSVSVPENIPVGTRLLMLTATDPDEGINGKLTYSFRNEEEKISETFQLDSNLGEISTLQSLDYEESRFYLMEVVAQDGGALVASAKVVVTVQDVNDNAPEVILTSLTSSISEDCLPGTVIALFSVHDGDSGENGEIACSIPRNLPFKLEKSVDNYYHLLTTRDLDREETSDYNITLTVMDHGTPPLSTESHIPLKVADVNDNPPNFPQASYSTSVTENNPRGVSIFSVTAHDPDSGDNARVTYSLAEDTFQGAPLSSYVSINSDTGVLYALRSFDYEQLRDLQLWVTASDSGNPPLSSNVSLSLFVLDQNDNTPEILYPALPTDGSTGVELAPRSAEPGYLVTKVVAVDKDSGQNAWLSYRLLKASEPGLFAVGLHTGEVRTARALLDRDALKQSLVVAVEDHGQPPLSATFTVTVAVADRIPDILADLGSIKTPIDPEDLDLTLYLVVAVAAVSCVFLAFVIVLLVLRLRRWHKSRLLQAEGSRLAGVPASHFVGVDGVRAFLQTYSHEVSLTADSRKSHLIFPQPNYADTLLSEESCEKSEPLLMSDKVDANKEERRVQVSFLFR

SEQ ID NO: 23019 - protein, 317 aa, Homo sapiens; identical to SEQ ID NO: 15235

SEQ ID NO: 23020 - protein, 348 aa, Homo sapiens
MPHIDNDVKLDFKDVLLRPKRSTLKSRSEVDLTRSFSFRNSKQTYSGVPIIAANMDTVGTFEMAKVLCKFSLFTAVHKHYSLVQWQEFAGQNPDCLESIWLPAQAQALLTLSSWNRSWKLFPRKYICLDVANGYSEHFVEFVKDVRKRFPQHTIMAGNVVTGEMVEELILSGADIIKVGIGPGSVCTTRKKTGVGYPQLSAVMECADAAHGLKGHIISDGGCSCPGDVAKAFGAGADFVMLGGMLAGHSESGGELIERDGKKYKLFYGMSSEMAMKKYAGGVAEYRASEGKTVEVPFKGDVEHTIRDILGGIRSTCTYVGAAKLKELSRRTTFIRVTQQVNPIFSEAC

SEQ ID NO: 23021 - protein, 1250 aa, Homo sapiens [sequence omitted]

SEQ ID NO: 23022 - protein, 217 aa, Homo sapiens
SCTLSEILRLHILASGADVTSANAKYRYQKRGGFDATDDACMELRLSNPSLVKKLSSTSVYDLTPGEKMKILHALCGKLLTLVSTRDFIEDYVDILRQAKQEFRELKAEQHRKEREEAAARIRKRKEEKLKEQEQKMKEKQEKLKEDEQRNSTADISIGEEEREDFDTSIESKDTEQKELDQDMVTEDEDDPGSHKRGRRGNTEISLGHSCVFVFNQ

SEQ ID NO: 23023 - protein, 356 aa, Homo sapiens
LRYGALCNTNDSQNEDGGMVKEMESKDEQWKRAMDYLNVVNELNYMTQIVIMLYEDPNKDLSSEERFHVELHFSPGAKGCEEDKNLPSGYGYRPASRENEGRRPFKIDNDDEPHTSKRDEVDRAVILFKPMVSEPIHIHRKSPLPRSRKTATNDEESPLSVSSPEGTGTWLHYTSGVGTGRRRRRSGEQITSSPVSPKSLAFTSSIFGSWQQVVSENANYLRTPRTLVEQKQNPTVGFELYSMVPSICPLETLHNALSLKQVDEFLASIASPSSDVPRKTAEISSTALRSSPIMRKKVSLNTYTPAKILPTPPATLKSTKASSKPATSGPSSAVVPNTSSRKKNITSKTETHEHKK

SEQ ID NO: 23024 - protein, 933 aa, Homo sapiens
MKGKERSPVKAKRSRGGEDSTSRGERSKKLGGSGGSNGSSSGKTDSGGGSRRSLHLDKSSSRGGSREYDTGGGSSSSRLHSYSSPSTKNSSGGGESRSSSRGGGGESRSSGAASSAPGGGDGAEYKTLKISELGSQLSDEAVEDGLFHEFKRFGDVSVKISHLSGSGSGDERVAFVNFRRPEDARAAKHARGRLVLYDRPLKIEAVYVSRRRSRSPLDKDTYPPSASVVGASVGGHRHPPGGGGGQRSLSPGGAALGYRDYRLQQLALGRLPPPPPPPLPRDLERERDYPFYERVRPAYSLEPRVGAGAGAAPFREVDEISPEDDQRANRTLFLGNLDITVTESDLRRAFDRFGVITEVDIKRPSRGQTSTYGFLKFENLDMSHRAKLAMSGKIIIRNPIKIGYGKATPTTRLWVGGLGPWVPLAALAREFDRFGTIRTIDYRKGDSWAYIQYESLDAAHAAWTHMRGFPLGGPDRRLRVDFADTEHRYQQQYLQPLPLTHYELVTDAFGHRAPDPLRGARDRTPPLLYRDRDRDLYPDSDWVPPPPPVRERSTRTAATSVPAYEPLDSLDRRRDGWSLDRDRGDRDLPSSRDQPRKRRLPEESGGRHLDRSPESDRPRKRHCAPSPDRSPELSSSRDRYNSDNDRSSRLLLERPSPIRDRRGSLEKSQGDKRDRKNSASAERDRKHRTTAPTEGKSPLKKEDRSDGSAPSTSTASSKLKSPSQKQDGGTAPVASASPKLCLAWQGMLLLKNSNFPSNMHLLQGDLQVASSLLVEGSTGGKVAQLKITQRLRLDQPKLDEVTRRIKVAGPNGYAILLAVPGSSDSRSSSSSAASDTATSTQRPLRNLVSYLKQKQAAGVISLPVGGNKDKENTGVLHAFPPCEFSQQFLDSPAKALAKSEEDYLVMIIVRGFGFQIGVRYENKKRENLALTLL

SEQ ID NO: 23025 - protein, 563 aa, Homo sapiens; identical to SEQ ID NO: 16215

SEQ ID NO: 23026 - protein, 754 aa, Homo sapiens
MAAQVGAVRVVRAVAAQEEPDKEGKEKPHAGVSPRGVKRQRRSSSGGSQEKRGRPSQEPPLAPPHRRRRSRQHPGPLPPTNAAPTVPGPVEPLLLPPPPPPSLAPAGPAVAAPLPAPSTSALFTFSPLTVSAAGPKHKGHKERHKHHHHRGPDGDPSSCGTDLKHKDKQENGERTGGVPLIKAPKRETPDENGKTQRADDFVLKKIKKKKKKKHREDMRGRRLKMYNKEVQTVCAGLTRISKEILTQGQINSTSGLNKESFRYLKDEQLCRLNLGMQEYRVPQGVQTPFMTHQEHSIRRNFLKTGTKFSNFIHEEHQSNGGALVLHAYMDELSFLSPMEMERFSEEFLALTFSENEKNAAYYALAIVHGAAAYLPDFLDYFAFNFPNTPVKMEILGKKDIETTTISNFHTQVNRTYCCGTYRAGPMRQISLVGAVDEEVGDYFPEFLDMLEESPFLKMTLPWGTLSSLRLQCRSQSDDGPIMWVRPGEQMIPTADMPKSPFKRRRSMNEIKNLQYLPRTSEPREVLFEDRTRAHADHVGQGFDWQSTAAVGVLKAVQFGEWSDQPRITKDVICFHAEDFTDVVQRLQLDLHEPPVSQCVQWVDEAKLNQMRREGIRYARIQLCDNDIYFIPRNVIHQFKTVSAVCSLAWHIRLKQYHPVVEATQNTESNSNMDCGLTGKRELEVDSQCVRIKTESEEACTEIQLLTTASSSFPPASELNLQQDQKTQPIPVLKVESRLDSDQQHNLQEHSTTSV

SEQ ID NO: 23027 - protein, 151 aa, Homo sapiens
MSRRKQSNPRQIKRSLGDMEAREEVQLVGASHMEQKATAPEAPSPPSADVNSPPPLPPPTSPGGPKELEGQEPEPRPTEEEPGSPWSGPDELEPVVQDGQRRIRARLSLATGLSWGPFHGSVQTRASSPRQAEPRGAISALAPSVQTHRTR

SEQ ID NO: 23028 - protein, 876 aa, Homo sapiens
MGDSDDEYDRRRRDKFRRERSDYDRSRERDERRRGDDWNDREWDRGRERRSRGEYRDYDRNRRERFSPPRHELSPPQKRMRRDWDEHSSDPYHSGYEMPYAGGGGGPTYGPPQPWGHPDVHIMQHHVLPIQARLGSIAEIDLGVPPPVMKTFKEFLLSLDDSVDETEAVKRYNDYKLDFRRQQMQDFFLAHKDEEWFRSKYHPDEVGKRRQEARGALQNRLRVFLSLMETGWFDNLLLDIDKADAIVKMLDAAVIKMEGGTENDLRILEQEEEEEQAGKPGEPSKKEEGRAGAGLGDGERKTNDKDEKKEDGKQAENDSSNDDKTKKSEGDGDKEEKKEDSEKEAKKSSKKRNRKHSGDDSFDEGSVSESESESESGQAEEEKEEAEEALKEKEKPKEEEWEKPKDAAGLECKPRPLHKTCSLFMRNIAPNISRAEIISLCKRYPGFMRVALSEPQPERRFFRRGWVTFDRSVNIKEICWNLQNIRLRECELSPGVNRDLTRRVRNINGITQHKQIVRNDIKLAAKLIHTLDDRTQLWASEPGTPPLPTSLPSQNPILKNITDYLIEEVSAEEEELLGSSGGAPPEEPPKEGNPAEINVERDEKLIKVLDKLLLYLRIVHSLDYYNTCEYPNEDEMPNRCGIIHVRGPMPPNRISHGEVLEWQKTFEEKLTPLLSVRESLSEEEAQKMGRKDPEQEVEKFVTSNTQELGKDKWLCPLSGKKFKGPEFVRKHIFNKHAEKIEEVKKEVAFFNNFLTDAKRPALPEIKPAQPPGPAQILPPGLTPGLPYPHQTPQGLMPYGQPRPPILGYGAGAVRPAVPTGGPPYPHAPYGAGRGNYDAFRGQGGYPGKPRNRMVRGDPRAIVEYRDLDAPDDVDFF

SEQ ID NO: 23029 - protein, 575 aa, Homo sapiens
MEKIIQVAKTSAAQHIQSIMAAAGVPVVEGYHGEDQSDQCLKEHARRIGYPVMIKAVRGGGGKGMRIVRSEQEFQEQLESARREAKKSFNDDAMLIEKFVDTPRHVEVQVFGDHHGNAVYLFERDCSVQRRHQKIIEEAPAPGIKSEVRKKLGEAAVRAAKAVNYVGAGTVEFIMDSKHNFCFMEMNTRLQVEHPVTEMITGTDLVEWQLRIAAGEKIPLSQEEITLQGHAFEARIYAEDPSNNFMPVAGPLVHLSTPRADPSTRIETGVRQGDEVSVHYDPMIAKLVVWAADRQAALTKLRYSLRQYNIVGLHTNIDFLLNLSGHPEFEAGNVHTDFIPQHHKQLLLSRKAAAKESLCQAALGLILKEKAMTDTFTLQAHDQFSPFSSSSGRRLNISYTRNMTLKDGKNNVAIAVTYNHDGSYSMQIEDKTFQVLGNLYSEGDCTYLKCSVNGVASKAKLIILENTIYLFSKEGSIEIDIPVPKYLSSVSSQETQGGPLAPMTGTIEKVFVKAGDKVKAGDSLMVMIAMKMEHTIKSPKDGTVKKVFYREGAQANRHTPLVEFEEEESDKRESE

SEQ ID NO: 23030 - protein, 669 aa, Homo sapiens
MVISHAAPHGPEDSAPQFSKLYPNASQHITPSYNYAPNMDKHWIMQYTGPMLPIHMEFTNILQRKRLQTLMSVDDSVERLYNMLVETGELENTYIIYTADHGYHIGQFGLVKGKSMPYDFDIRVPFFIRGPSVEPGSIVPQIVLNIDLAPTILDIAGLDTPPDVDGKSVLKLLDPEKPGNRFRTNKKAKIWRDTFLVERGKFLRKKEESSKNIQQSNHLPKYERVKELCQQARYQTACEQPGQKWQCIEDTSGKLRIHKCKGPSDLLTVRQSTRNLYARGFHDKDKECSCRESGYRASRSQRKSQRQFLRNQGTPKYKPRFVHTRQTRSLSVEFEGEIYDINLEEEEELQVLQPRNIAKRHDEGHKGPRDLQASSGGNRGRMLADSSNAVGPPTTVRVTHKCFILPNDSIHCERELYQSARAWKDHKAYIDKEIEALQDKIKNLREVRGHLKRRKPEECSCSKQSYYNKEKGVKKQEKLKSHLHPFKEAAQEVDSKLQLFKENNRRRKKERKEKRRQRKGEECSLPGLTCFTHDNNHWQTAPFWNLGSFCACTSSNNNTYWCLRTVNETHNFLFCEFATGFLEYFDMNTDPYQLTNTVHTVERGILNQLHVQLMELRSCQGYKQCNPRPKNLDVGNKDGGSYDLHRMLLFLVPCSAPLTSRAMVSDASF

SEQ ID NO: 23031 - protein, 657 aa, Homo sapiens
MSPTPPLFSLPEARTRFTKSTREALNNKNIKPLLSTFSQVPGSENEKKCTLDQAFRGILEEEIINHSSCENVLAIISLAIGGVTEGICTASTPFVLLGDVLDCLPLDQCDTIFTFVEKNVATWKSNTFYSAGKNYLLRMCNDLLRRLSKSQNTVFCGRIQLFLARLFPLSEKSGLNLQSQFNLENVTVFNTNEQESTLGQKHTEDREEGMDVEEGEMGDEEAPTTCSIPIDYNLYRKFWSLQDYFRNPVQCYEKISWKTFLKYSEEVLAVFKSYKLDDTQASRKKMEELKTGGEHVYFAKFLTSEKLMDLQLSDSNFRRHILLQYLILFQYLKGQVKFKSSNYVLTDEQSLWIEDTTKSVYQLLSENPPDGERFSKMVEHILNTEENWNSWKNEGCPSFVKDRTSDTKPTRIIRKRTAPEDFLGKGPTKKILMGNEELTRLWNLCPDNMEACKSETREHMPTLEEFFEEAIEQADPENMVENEYKAVNNSNYGWRALRLLARRSPHFFQPTNQQFKSLPEYLENMVIKLAKELPPPSEEIKTGEDEDEEDNDALLKENESPDVRRDKPVTGEQIEVFANKLGEQWKILAPYLEMKDSEIRQIECDSEDMKMRAKQLLVAWQDQEGVHATPENLINALNKSGLSDLAESLTNDNETNS

SEQ ID NO: 23032 - protein, 774 aa, Homo sapiens
MAWIRSTCILFFTLLFAHIAAVPVSRVLLFGYLEILILVYIIHFLYIYFFQIKYLPEENVHDADFGEQKDISEINLAAGLDLFQGDILLQKSRNGLRDPNTRWTFPIPYILADNLGLNAKGAILYAFEMFRLKSCVDFKPYEGESSYIIFQQFDGCWSEVGDQHVGQNISIGQGCAYKAIIEHEILHALGFYHEQSRTDRDDYVNIWWDQILSGYQHNFDTYDDSLITDLNTPYDYESLMHYQPFSFNKNASVPTITAKIPEFNSIIGQRLDFSAIDLERLNRMYNCTTTHTLLDHCTFEKANICGMIQGTRDDTDWAHQDSAQAGEVDHTLLGQCTGAGYFMQFSTSSGSAEEAALLESRILYPKRKQQCLQFFYKMTGSPSDRLVVWVRRDDSTGNVRKLVKVQTFQGDDDHNWKIAHVVLKEEQKFRYLFQGTKGDPQNSTGGIYLDDITLTETPCPTGVWTVRNFSQVLENTSKGDKLQSPRFYNSEGYGFGVTLYPNSRESSGYLRLAFHVCSGENDAILEWPVENRQVIITILDQEPDVRNRMSSSMVFTTSKSHTSPAINDTVIWDRPSRVGTYHTDCNCFRSIDLGWSGFISHQMLKRRSFLKNDDLIIFVDFEDITHLSQTEVPTKGKRLSPQGLILQGQEQQVSEEGSGKAMLEEALPVSLSQGQPSRQKRSVENTGPLEDHNWPQYFRDPCDPNPCQNDGICVNVKGMASCRCISGHAFFYTGERCQAVQVHGSVLGMVIGGTAGVIFLTFSIIAILSQRPRK

SEQ ID NO: 23033 - protein, 758 aa, Homo sapiens
MPDNRQPRNRQPRIRSGNEPRSAPAMEPDGRGAWAHSRAALDRLEKLLRCSRCNCVSDCIGTGCPVCYTPAWIQDLKINRQLDSMIQLCSKLRNLLHDNELSDLKEDKPRKSLFNDAGNKKNSIKMWFSPRSKKVRYVVSKASVQTQPAIKKDASAQQDSYEFVSPSPPADVSERAKKASARSGKKQKKKTLAEINQKWNLEAEKEDGEFDSKEESKQKLVSFCSQPSVISSPQINGEIDLLASGSLTESECFGSLTEVSLPLAEQIESPDTKSRNEVVTPEKVCKNYLTSKKSLPLENNGKRGHHNRLSSPISKRCRTSILSTSGDFVKQTVPSENIPLPECSSPPSCKRKVGGTSGRKNSNMSDEFISLSPGTPPSTLSSSSYRRVMSSPSAMKLLPNMAVKRNHRGETLLHIASIKGDIPSVEYLLQNGSDPNVKDHAGWTPLHEACNHGHLKVVELLLQHKALVNTTGYQNDSPLHDAAKNGHVDIVKLLLSYGASRNAVNIFGLRPVDYTDDESMKSLLLLPEKNESSSASHCSVMNTGQRRDGPLVLIGSGLSSEQQKMLSELAVILKAKKYTEFDSTVTHVVVPGDAVQSTLKCMLGILNGCWILKFEWVKACLRRKVCEQEEKYEIPEGPRRSRLNREQLLPKLFDGCYFYLWGTFKHHPKDNLIKLVTAGGGQILSRKPKPDSDVTQTINTVAYHARPDSDQRFCTQYIIYEDLCNYHPERVRQGKVWKAPSSWFIDCVMSFELLPLDS

SEQ ID NO: 23034 - protein, 1142 aa, Homo sapiens
MRLTGPWKLWLWMSIFLLPASTSVTVRDKTEESCPILRIEGHQLTYDNINKLEVSGFDLGDSFSLRRAFCESDKTCFKLGSALLIRDTIKIFPKGLPEEYSVAAMFRVRRNAKKERWFLWQVLNQQNIPQISIVVDGGKKVVEFMFQATEGDVLNYIFRNRELRPLFDRQWHKLGISIQSQVISLYMDCNLIARRQTDEKDTVDFHGRTVIATRASDGKPVDIELHQLKIYCSANLIAQETCCEISDTKCPEQDGFGNIASSWVTAHASKMSSYLPAKQELKDQCQCIPNKGEAGLPGAPGSPGQKGHKGEPGENGLHGAPGFPGQKGEQGFEGSKGETGEKGEQGEKGDPALAGLNGENGLKGDLGPHGPPGPKGEKGDTGPPGPPALPGSLGIQGPQGPPGKEGQRGRRGKTGPPGKPGPPGPPGPPGIQGIHQTLGGYYNKDNKGNDEHEAGGLKGDKGETGLPGFPGSVGPKGQKGEPGEPFTKGEKGDRGEPGVIGSQGVKGEPGDPGPPGLIGSPGLKGQQGSAGSMGPRGPPGDVGLPGEHGIPGKQGIKGEKGDPGGIIGPPGLPGPKGEAGPPGKSLPGEPGLDGNPGAPGPRGPKGERGLPGVHGSPGDIGPQGIGIPGRTGAQGPAGEPGIQGPRGLPGLPGTPGTPGNDGVPGRDGKPGLPGPPGDPIALPLLGDIGALLKNFCGNCQASVPGLKSNKGEEGGAGEPGKYDSMARKGDIGPRGPPGIPGREGPKGSKGERGYPGIPGEKGDEGLQGIPGIPGAPGPTGPPGLMGRTGHPGPTGAKGEKGSDGPPGKPGPPGPPGIPFNERNGMSSLYKIKGGVNVPSYPGPPGPPGPKGDPGPVGEPGAMGLPGLEGFPGVKGDRGPAGPPGIAGMSGKPGAPGPPGVPGEPGERGPVGDIGFPGPEGPSGKPGINGKDGIPGAQGIMGKPGDRGPKGERGDQGIPGDRGSQGERGKPGLTGMKGAIGPMGPPGNKGSMGSPGHQGPPGSPGIPGIPADAVSFEEIKKYINQEVLRIFEERMAVFLSQLKLPAAMLAAQAYGRPGPPGKDGLPGPPGDPGPQGYRGQKGERGEPGIGLPGSPGLPGTSALGLPGSPGAPGPQGPPGPSGRCNPEDCLYPVSHAHQRTGGN

SEQ ID NO: 23035 - protein, 1288 aa, Homo sapiens
MGSPEGRFHFAIDRGGTFTDVFAQCPGGHVRVLKLLSEDPANYADAPTEGIRRILEQEAGMLLPRDQPLDSSHIASIRMGTTVATNALLERKGERVALLVTRGFRDLLHIGTQARGDLFDLAVPMPEVLYEEVLEVDERVVLHRGEAGTGTPVKGRTGDLLEVQQPVDLGALRGKLEGLLSRGIRSLAVVLMHSYTWAQHEQQVGVLARELGFTHVSLSSEAMPMVRIVPRGHTACADAYLTPAIQRYVQGFCRGFQGQLKDVQVLFMRSDGGLAPMDTFSGSSAVLSGPAGGVVGYSATTYQQEGGQPVIGFDMGGTSTDVSRYAGEFEHVFEASTAGVTLQAPQLDINTVAAGGGSRLFFRSGLFVVGPESAGAHPGPACYRKGGPVTVTDANLVLGRLLPASFPCIFGPGENQPLSPEASRKALEAVATEVNSFLTNGPCPASPLSLEEVAMGFVRVANEAMCRPIRALTQARGHDPSAHVLACFGGAGGQHACAIARALGMDTVHIHRHSGLLSALGLALADVVHEAQEPCSLLYAPETFVQLDQRLSRLEEQCVDALQAQGFPRSQISTESFLHLRYQGTDCALMVSAHQHPATARSPRAGDFGAAFVERYMREFGFVIPERPVVVDDVRVRGTGRSGLRLEDAPKAQTGPPRVDKMTQCYFEGGYQETPVYLLAELGYGHKLHGPCLIIDSNSTILVEPGCQAEVTKTGDICISVGAEVPGTVGPQLDPIQLSIFSHRFMSIAEQMGRILQRTAISTNIKERLDFSCALFGPDGGLVSNAPHIPVHLGAMQETVQFQIQHLGADLHPGDVLLSNHPSAGGSHLPDLTVITPVFWPGQTRPVFYVASRGHHADIGGITPGSMPPHSTMLQQEGAVFLSFKLVQGGVFQEEAVTEALRAPGKVPNCSGTRNLHDNLSDLRAQVAANQKGIQLVGELIGQYGLDVVQAYMGHIQANAELAVRDMLRAFGTSRQARGLPLEVSSEDHMDDGSPIRLRVQISLSQGSAVFDFSGTGPEVFGNLNAPRAVTLSALIYCLRCLVGRDIPLNQGCLAPVRVVIPRGSILDPSPEAAVVGGNVLTSQRVVDVILGAFGACAASQGCMNNVTLGNAHMGYYETVAGGAGAGPSWHGRSGVHSHMTNTRITDPEILESRYPVILRRFELRRGSGGRGRFRGGDGVTRELLFREEALLSVLTERRAFRPYGLHGGEPGARGLNLLIRKNGRTVNLGGKTSVTVYPGDVFCLHTPGGGGYGDPEDPAPPPGSPPQALAFPEHGSVYEYRRAQEAV

SEQ ID NO: 23036 - protein, 629 aa, Homo sapiens [sequence omitted]

SEQ ID NO: 23037 - protein, 414 aa, Homo sapiens
MIPENEFHHKDPPPRNAVASVQNGPGGGPSSSSIGSASKSDESSTEETDKSRERSQCGVKAVNKASSTTPKGNSSNGNSGSNSNKAVKENDKEKGKEKEKEKKEKTPATTPEARVLGKDGKEKPKEERPNKDEKARETKERTPKSDKEKEKFKKEEKAKDEKFKTTVPNAESKSTQEREREKEPSRERDIAKEMKSKENVKGGEKTPVSGSLKSPVPRSDIPEPEREQKRRKIDTHPSPSHSSTVKDSLIELKESSAKLYINHTPPPLSKSKEREMDKKDLDKSRERSREREKKDEKDRKERKRDHSNNDREVPPDLTKRRKEENGTMGVSKHKSESPCESPYPNEKDKEKNKSKSSGKEKGSDSFKSEKMDKISSGGKKESRHDKEKIEKKEKRDSSGGKEEKKHHKSSDKHR

SEQ ID NO: 23038 - protein, 396 aa, Homo sapiens
MKWVTFISLLFLFSSAYSRGVFRRDAHKSEVAHRFKDLGEENFKALVLIAFAQYLQQCPFEDHVKLVNEVTEFAKTCVADESAENCDKSLHTLFGDKLCTVATLRETYGEMADCCAKQEPERNECFLQHKDDNPNLPRLVRPEVDVMCTAFHDNEETFLKKYTYETTLEKCCAAADPHECYAKVFDEFKPLVEEPQNLIKQNCELFEQLGEYKFQNALLVRYTKKVPQVSTPTLVEVSRNLGKVGSKCCKHPEAKRMPCAEDYLSVVLNQLCVLHEKTPVSDRVTKCCTESLVNRRPCFSALEVDETYVPKEFNAETFTFHADICTLSEKERQIKKQTALVELVKHKPKATKEQLKAVMDDFAAFVEKCCKADDKETCFAEEGKKLVAASQAALGL

SEQ ID NO: 23039 - protein, 1541 aa, Homo sapiens; identical to SEQ ID NO: 9923

SEQ ID NO: 23040 - protein, 1033 aa, Homo sapiens
MAQGFAVGFDPLGLGDLSSGSLSSLSSRGHLGSDSGSTATRYLLRKQQRLLNGPPRGIRASSPMGRVILINSPIEANSDESDIIHSVRVEKSPAGRLGFSVRGGSEHGLGIFVSKVEEGSSAERAGLCVGDKITEVNGLSLESTTMGSAVKVLTSSSRLHMMVRRMGRVPGIKFSKEKTTWVDVVNRRLVVEKCGSTPSDTSSEDGVRRIVHLYTTSDDFCLGFNIRGGKEFGLGIYVSKVDHGGLAEENGIKVGDQVLAANGVRFDDISHSQAVEVLKGQTHIMLTIKETGRYPAYKEMVSEYCWLDRLSNGVLQQLSPASESSSSVSSCASSAPYSSGSLPSDRMDICLGQEEPGSRGPGWGRADTAMQTEPDAGGRVETWCSVRPTVILRDTAIRSDGPHPGRRLDSALSESPKTALLLALSRPRPPITRSQSYLTLWEEKQQRKKEKSGSPGEKGALQRSKTLMNLFFKGGRQGRLARDGRREAWTLDSGSLAKTYPRLDIEKAGGVGPVQKFVTWRLRRDQERGRALLSARSGSPSSQLPNVDEQVQAWESRRPLIQDLAQRLLTDDEVLAVTRHCSRYVHEGGIEDLVRPLLAILDRPEKLLLLQDIRSVVAPTDLGRFDSMVMLVELEAFEALKSRAVRPPALRPARQDTPPKRHLITPVPDSRGGFYLLPVNGFPEEEDNGELRERLGALKVSPSASAPRHPHKGIPPLQDVPVDAFTPLRIACTPPPQLPPVAPRPLRPNWLLTEPLSREHPPQSQIRGRAQSRSRSRSRSRSRSSRGQGKSPGRRSPSPVPTPAPSMTNGRYHKPRKARPPLPRPLDGEAAKVGAKQGPSESGTEGTAKEAAMKNPSGELKTVTLSKMKQSLGISISGGIESKVQPMVKIEKIFPGGAAFLSGALQAGFELVAVDGENLEQVTHQRAVDTIRRAYRNKAREPMELVVRVPGPSPRPSPSDSSALTDGGLPADHLPAHQPLDAAPVPAHWLPEPPTNPQTPPTDARLLQPTPSPAPSPALQTPDSKPAPSPRIP

SEQ ID NO: 23041 - protein, 393 aa, Homo sapiens
MHRLAQGRSQDQPSSPATEEPANLSRRLCWGLSVPASRMEEGERSPLLSQETAGQKPLSVHRPPTSGCLGPVPREDQAEAWGCSCCPPETKHQALSGTPKKGPAPSLSPGSSCVKYLIFLSNFPFSLLGLLALAIGLWGLAVKGSLGSDLGGPLPADPMLGLALGGLVVSAVSLAGYLGALCENTCLLRGFSGGILAFLVLEAVAGALVVALWGPLQDSLEHTLRVAIAHYQDDPDLRFLLDQVQLGLRCCGAASYQDWQQNLYFNCSSPGVQACSLPASCCIDPREDGASVNDQCGFGVLRLDADAAQRVVYLEGCGPPLRRWLRANLAASGGYAIAVVLLQGAELLLAARLLGALAARRGAAYGPGARGEDRAGPQSPSPGAPPAAKPARG

SEQ ID NO: 23042 - protein, 584 aa, Homo sapiens
MVGLSGPVQYRTEKHSTMPDSPVDVKTQSRLTPPTMPPPPTTQGAPRTSSFTPTTLTNGTSHSPTALNGAPSPPNGFSNGPSSSSSSSLANQQLPPACGARQLSKLKRFLTTLQQFGNDISPEIGERVRTLVLGLVNSTLTIEEFHSKLQEATNFPLRPFVIPFLKANLPLLQRELLHCARLAKQNPAQYLAQHEQLLLDASTTSPVDSSELLLDVNENGKRRTPDRTKENGFDREPLHSEHPSKRPCTISPGQRYSPNNGLSYQPNGLPHPTPPPPQHYRLDDMAIAHHYRDSYRHPSHRDLRDRNRPMGLHGTRQEEMIDHRLTDREWAEEWKHLDHLLNCIMDMVEKTRRSLTVLRRCQEADREELNYWIRRYSDAEDLKKGGGSSSSHSRQQSPVNPDPVALDAHREFLHRPASGYVPEEIWKKAEEAVNEVKRQAMTELQKAVSEAERKAHDMITTERAKMERTVAEAKRQAAEDALAVINQQEDSSESCWNCGRKASETCSGCNTARYCGSFCQHKDWEKHHHICGQTLQAQQQGDTPAVSSSVTPNSGAGSPMDTPPAATPRSTTPGTPSTIETTPR

SEQ ID NO: 23043 - protein, 896 aa, Homo sapiens
MIVLLLFALLWMVEGVFSQLHYTVQEEQEHGTFVGNIAEDLGLDITKLSARGFQTVPNSRTPYLDLNLETGVLYVNEKIDREQICKQSPSCVLHLEVFLENPLELFQVEIEVLDINDNPPSFPEPDLTVEISESATPGTRFPLESAFDPDVGTNSLRDYEITPNSYFSLDVQTQGDGNRFAELVLEKPLDREQQAVHRYVLTAVDGGGGGGVGEGGGGGGGAGLPPQQQRTGTALLTIRVLDSNDNVPAFDQPVYTVSLPENSPPGTLVIQLNATDPDEGQNGEVVYSFSSHISPRARELFGLSPRTGRLEVSGELDYEESPVYQVYVQAKDLGPNAVPAHCKVLVRVLDANDNAPEISFSTVKEAVSEGAAPGTVVALFSVTDRDSEENGQVQCELLGDVPFRLKSSFKNYYTIVTEAPLDREAGDSYTLTVVARDRGEPALSTSKSIQVQVSDVNDNAPRFSQPVYDVYVTENNVPGAYIYAVSATDRDEGANAQLAYSILECQIQGMSVFTYVSINSENGYLYALRSFDYEQLKDFSFQVEARDAGSPQALAGNATVNILIVDQNDNAPAIVAPLPGRNGTPAREVLPRSAEPGYLLTRVAAVDADDGENARLTYSIVRGNEMNLFRMDWRTGELRTARRVPAKRDPQRPYELVIEVRDHGQPPLSSTATLVVQLVDGAVEPQGGGGSGGGGSGEHQRPSRSGGGETSLDLTLILIIALGSVSFIFLLAMIVLAVRCQKEKKLNIYTCLASDCCLCCCCCGGGGSTCCGRQARARKKKLSKSDIMLVQSSNVPSNPAQVPIEESGGFGSHHHNQNYCYQVCLTPESAKTDLMFLKPCSPSRSTDTEHNPCGAIVTGYTDQQPDIISNGSILSNEVRLKRKDHHLSSPPSESLL

SEQ ID NO: 23044 - protein, 626 aa, Homo sapiens
MSLQWNLIRKLPPDCFKNYHDLQKLYLQNNKITSISIYAFRGLNSLTKLYLSHNRITFLKPGVFEDLHRLEWLIIEDNHLSRISPPTFYGLNSLILLVLMNNVLTRLPDKPLCQHMPRLHWLDLEGNHIHNLRNLTFISCSNLTVLVMRKNKINHLNENTFAPLQKLDELDLGSNKIENLPPLIFKDLKELSQLNLSYNPIQKIQANQFDYLVKLKSLLEGIEISNIQQRMFRPLMNLSHIYFKKFQYCGYAPHVRSCKPNTDGISSLENLLASIIQRVFVWVVSAVTCFGNIFVICMRPYIRSENKLYAMSIISLCCADCLMGIYLFVIGGFDLKFRGEYNKHAQLWMESTHCQLVGSLAILSTEVSVLLLTFLTLEKYICIVYPFRCVRPGKCRTITVLILIWITGFIVAFIPLSNKEFFKNYYGTNGVCFPLHSEDTESIGAQIYSVAIFLGINLAAFIIIVFSYGSMFYSVHQSAITATEIRNQVKKEMILAKRFFFIVFTDALCWIPIFVVKFLSLLQVEIPGTITSWVVIFILPINSALNPILYTLTTRPFKEMIHRFWYNYRQRKSMDSKGQKTYAPSFIWVEMWPLQEMPPELMKPDLFTYPCEMSLISQSTRLNSYS

SEQ ID NO: 23045 - protein, 949 aa, Homo sapiens
MAQVAVSTLPVEEESSSETRMVVTFLVSALESMCKELAKSKAEVACIAVYETDVFVVGTERGCAFVNARTDFQKDFAKYCVAEGLCEVKPPCPVNGMQVHSGETEILRKAVEDYFCFCYGKALGTTVMVPVPYEKMLRDQSAVVVQGLPEGVAFQHPENYDLATLKWILENKAGISFIINRPFLGPESQLGGPGMVTDAERSIVSPSESCGPINVKTEPMEDSGISLKAEAVSVKKESEDPNYYQYNMQGSHPSSTSNEVIEMELPMEDSTPLVPSEEPNEDPEAEVKIEGNTNSSSVTNSAAGVEDLNIVQVTVPDNEKERLSSIEKIKQLREQVNDLFSRKFGEAIGVDFPVKVPYRKITFNPGCVVIDGMPPGVVFKAPGYLEISSMRRILEAAEFIKFTVIRPLPGLELSNVGKRKIDQEGRVFQEKWERAYFFVEVQNIPTCLICKQSMSVSKEYNLRRHYQTNHSKHYDQYTERMRDEKLHELKKGLRKYLLGSSDTECPEQKQVFANPSPTQKSPVQPVEDLAGNLWEKLREKIRSFVAYSIAIDEITDINNTTQLAIFIRGVDENFDVSEELLDTVPMTGTKSGNEIFLRVEKSLKKFCINWSRLVSVASTGTPAMVDANNGLVTKLKSRVATFCKGAELKSICCIIHPESLCAQKLKMDHVMDVVVKSVNWICSRGLNHSEFTTLLYELDSQYGSLLYYTEIKWLSRGLVLKRFFESLEEIDSFMSSRGKPLPQLSSIDWIRDLAFLVDMTMHLNALNISLQGHSQIVTQMYDLIRAFLAKLCLWETHLTRNNLAHFPTLKLVSRNESDGLNYIPKIAELKTEFQKRLSDFKLYESELTLFSSPFSTKIDSVHEELQMEVIDLQCNTVLKTKYDKVGIPEFYKYLWGSYPKYKHHCAKILSMFGSTYICEQLFSIMKLSKTKYCSQLKDSQWDSVLHIAT

SEQ ID NO: 23046 - protein, 703 aa, Homo sapiens
MIPASAKAPHKQPHKQSISIGRGTRKRDEDSGTEVGEGTDEWAQSKATVRPPDQLELTDAELKEEFTRILTANNPHAPQNIVRYSFKEGTYKPIGFVNQLAVHYTQVGNLIPKDSDEGRRQHYRDELVAVSYQGSQESVKVISETGNLEEDEEPKELETEPGSQTDVPAAGAAEKVTEEELMTPKQPKERKLTNQFNFSERASQTYNNPVRDRECQTEPPPRTNFSATANQWEIYDAYVEELEKQEKTKEKEKAKTPVAKKSGKMAMRKLTSMESQTDDLIKLSQAAKIMERMVNQNTYDDIAQDFKYYDDAADEYRDQVGTLLPLWKFQNDKAKRLSVTALCWNPKYRDLFAVGYGSYDFMKQSRGMLLLYSLKNPSFPEYMFSSNSGVMCLDIHVDHPYLVAVGHYDGNVAIYNLKKPHSQPSFCSSAKSGKHSDPVWQVKWQKDDMDQNLNFFSVSSDGRIVSWTLVKRKLVHIDVIKLKVEGSTTEVPEGLQLHPVGCGTAFDFHKEIDYMFLVGTEEGKIYKCSKSYSSQFLDTYDAHNMSVDTVSWNPYHTKVFMSCSSDWTVKIWDHTIKTPMFIYDLNSAVGDVAWAPYSSTVFAAVTTDGKAHIFDLAINKYEAICNQPVAAKKNRLTHVQFNLIHPIIIVGDDRGHIISLKLSPNLRKMPKEKKGQEVQKGPAVEIAKLDKLLNLVREVKIKT

SEQ ID NO: 23047 - protein, 478 aa, Homo sapiens
MELLTFKDVAIEFSPEEWKCLDTSQQNLYRDVMLENYRNLVSLGVSISNPDLVTSLEQRKEPYNLKIHETAARPPAVCSHFTQNLWTVQGIEDSFHKLIPKGHEKRGHENLRKTCKSINECKVQKGGYNRINQCLLTTQKKTIQSNICVKVFHKFSNSNKDKIRYTGDKTFKCKECGKSFHVLSRLTQHKRIHTGENPYTCEECGKAFNWSSILTKHKRIHAREKFYKCEECGKGFTRSSHLTKHKRIHTGEKPYICEKCGKAFNQSSTLNLHKRIHSAQKYYKCEECGKAFKWSSSLNEHKRIHAGEKPFSCEECGNVFTTSSDFAKHKRIHTGEKPYKCEECGKSFNRSTTLTTHKRIHTGEKPYTCEECGKAFNWSSTLNVHKRIHSGKNPYKCEDCGKAFKVFANLHNHKKIHTGEKPYICKQCGKAFKQSSHLNKHKKIHTVDKPYKCKECGKAFKQYSNLPQHKRTHTGGKF

SEQ ID NO: 23048 - protein, 1365 aa, Homo sapiens
MEEVVGHTQGPLDGSLYAKVKKKDSLHGSTGAVNATRPTLSATPNHVEHTLSVSSDSGNSTASTKTDKTDEPVPGASSATAALSPQEKRELDRLLSGFGLEREKQGAMYHTQHLRSRPAGGSAVPSSGRHVVPAQVHVNGGALASERETDILDDELPNQDGHSAGSMGTLSSLDGVTNTSEGGYPEALSPLTNGLDKSYPMEPMVNGGGYPYESASRAGPAHAGHTAPMRPSYSAQEGLAGYQREGPHPAWPQPVTTSHYAHDPSGMFRSQSFSEAEPQLPPAPVRGGSSREAVQRGLNSWQQQQQQQQQPRPPPRQQERAHLESLVASRPSPQPLAETPIPSLPEFPRAASQQEIEQSIETLNMLMLDLEPASAAAPLHKSQSVPGAWPGASPLSSQPLSGSSRQSHPLTQSRSGYIPSGHSLGTPEPAPRASLESVPPGRSYSPYDYQPCLAGPNQDFHSKSPASSSLPAFLPTTHSPPGPQQPPASLPGLTAQPLLSPKEATSDPSRTPEEEPLNLEGLVAHRVAGVQAREKQPAEPPAPLRRRAASDGQYENQSPEATSPRSPGVRSPVQCVSPELALTIALNPGGRPKEPHLHSYKEAFEEMEGTSPSSPPPSGVRSPPGLAKTPLSALGLKPHNPADILLHPTGEPRSYVESVARTAVAGPRAQDSEPKSFSAPATQAYGHEIPLRNGTLGGSFVSPSPLSTSSPILSADSTSVGSFPSGESSDQGPRTPTQPLLESGFRSGSLGQPSPSAQRNYQSSSPLPTVGSSYSSPDYSLQHFSSSPESQARAQFSVAGVHTVPGSPQARHRTVGTNTPPSPGFGWRAINPSMAAPSSPSLSHHQMMGPPGTGFHGSTVSSPQSSAATTPGSPSLCRHPAGVYQVSGLHNKVATTPGSPSLGRHPGAHQGNLASGLHSNAIASPGSPSLGRHLGGSGSVVPGSPCLDRHVAYGGYSTPEDRRPTLSRQSSASGYQAPSTPSFPVSPAYYPGLSSPATSPSPDSAAFRQGSPTPALPEKRRMSVGDRAGSLPNYATINGKVSSPVASGMSSPSGGSTVSFSHTLPDFSKYSMPDNSPETRAKVKFVQDTSKYWYKPEISREQAIALLKDQEPGAFIIRDSHSFRGAYGLAMKVSSPPPTIMQQNKKGDMTHELVRHFLIETGPRGVKLKGCPNEPNFGSLSALVYQHSIIPLALPCKLVIPNRDPTDESKDSSGPANSTADLLKQGAACNVLFVNSVDMESLTGPQAISKATSETLAADPTPAATIVHFKVSAQGITLTDNQRKLFFRRHYPLNTVTFCDLDPQERKWMKTEGGAPAKLFGFVARKQGSTTDNACHLFAELDPNQPASAIVNFVSKVMLNAGQKR

SEQ ID NO: 23049 - protein, 2170 aa, Homo sapiens
MIRIAALNASSTIEDDHEGSFKSHKTQTKEAQEAEAFALYHKALDLQKHDRFEESAKAYHELLEASLLREAVSSGDEKEGLKHPGLILKYSTYKNLAQLAAQREDLETAMEFYLEAVMLDSTDVNLWYKIGHVALRLIRIPLARHAFEEGLRCNPDHWPCLDNLITVLYTLSDYTTCLYFICKALEKDCRYSKGLVLKEKIFEEQPCLRKDSLRMFLKCWKCLGESLLAMYNHLTTCEPPRPSLGKRIDLSDYQDPSQPLESSMVVTPVNVIQPSTVSTNPAVAVAEPVVSYTSVATTSFPLHSPGLLETGAPVGDISGGDKSKKGVKRKKISEESGETAKRRSARVRNTKCKKEEKVDFQELLMKFLPSRLRKLDPEEEDDSFNNYEVQSEAKLESFPSIGPQRLSFDSATFMESEKQDVHEFLLENLTNGGILELMMRYLKAMGHKFLVRWPPGLAEVVLSVYHSWRRHSTSLPNPLLRDCSNKHIKDMMLMSLSCMELQLDQWLLTKGRSSAVSPRNCPAGMVNGRFGPDFPGTHCLGDLLQLSFASSQRDLFEDGWLEFVVRVYWLKARFLALQGDMEQALENYDICTEMLQSSTAIQVEAGAERRDIVIRLPNLHNDSVVSLEEIDKNLKSLERCQSLEEIQRLYEAGDYKAVVHLLRPTLCTSGFDRAKHLEFMTSIPERPAQLLLLQDSLLRLKDYRQCFECSDVALNEAVQQMVNSGEAAAKEEWVATVTQLLMGIEQALSADSSGSILKVSSSTTGLVRLTNNLIQVIDCSMAVQEEAKEPHVSSVLPWIILHRIIWQEEDTFHSLCHQQQLQNPAEEGMSETPMLPSSLMLLNTAHEYLGRRSWCCNSDGALLRFYVRVLQKELAASTSEDTHPYKEELETALEQCFYCLYSFPSKKSKARYLEEHSAQQVDLIWEDALFMFEYFKPKTLPEFDSYKTSTVSADLANLLKRIATIVPRTERPALSLDKVSAYIEGTSTEVPCLPEGADPSPPVVNELYYLLADYHFKNKEQSKAIKFYMHDICICPNRFDSWAGMALARASRIQDKLNSNELKSDGPIWKHATPVLNCFRRALEIDSSNLSLWIEYGTMSYALHSFASRQLKQWRGELPPELVQQMEGRRDSMLETAKHCFTSAARCEGDGDEEEWLIHYMLGKVAEKQQQPPTVYLLHYRQAGHYLHEEAARYPKKIHYHNPPELAMEALEVYFRLHASILKLLGKPDSGVGAEVLVNFMKEAAEGPFARGEEKNTPKASEKEKACLVDEDSHSSAGTLPGPGASLPSSSGPGLTSPPYTATPIDHDYVKCKKPHQQATPDDRSQDSTAVALSDSSSTQDFFNEPTSLLEGSRKSYTEKRLPILSSQAGATGKDLQGATEERGKNEESLESTEGFRAAEQGVQKPAAETPASACIPGKPSASTPTLWDGKKRGDLPGEPVAFPQGLPAGAEEQRQFLTEQCIASFRLCLSRFPQHYKSLYRLAFLYTYSKTHRNLQWARDVLLGSSIPWQQLQHMPAQGLFCERNKTNFFNGIWRIPVDEIDRPGSFAWHMNRSIVLLLKVLAQLRDHSTLLKVSSMLQRTPDQGKKYLRDADRQVLAQRAFILTVKVLEDTLSELAEGSERPGPKVCGLPGARMTTDVSHKASPEDGQEGLPQPKKPPLADGSGPGPEPGGKVGLLNHRPVAMDAGDSADQSGERKDKESPRAGPTEPMDTSEATVCHSDLERTPPLLPGRPARDRGPESRPTELSLEELSISARQQPTPLTPAQPAPAPAPATTTGTRAGGHPEEPLSRLSRKRKLLEDTESGKTLLLDAYRVWQQGQKGVAYDLGRVERIMSETYMLIKQVDEEAALEQAVKFCQVHLGAAAQRQASGDTPTTPKHPKDSRENFFPVTVVPTAPDPVPADSVQRPSDAHTKPRPALAAATTIITCPPSASASTLDQSKDPGPPRPHRPEATPSMASLGPEGEELARVAEGTSFPPQEPRHSPQVKMAPTSSPAEPHCWPAEAALGTGAEPTCSQEGKLRPEPRRDGEAQEAASETQPLSSPPTAASSKAPSSGSAQPPEGHPGKPEPSRAKSRPLPNMPKLVIPSAATKFPPEITVTPPTPTLLSPKGSISEETKQKLKSAILSAQSAANVRKESLCQPALEVLETSSQESSLESETDEDDDYMDI

SEQ ID NO: 23050 - protein, 535 aa, Homo sapiens
MDLIPNLAVETWLLLAVSLILLYLYGTRTHGLFKKLGIPGPTPLPFLGNALSFRKGYWTFDMECYKKYRKVWGIYDCQQPMLAITDPDMIKTVLVKECYSVFTNRRPFGPVGFMKNAISIAEDEEWKRIRSLLSPTFTSGKLKEMVPIIAQYGDVLVRNLRREAETGKPVTLKHVFGAYSMDVITSTSFGVSIDSLNNPQDPFVENTKKLLRFNPLDPFVLSIKVFPFLTPILEALNITVFPRKVISFLTKSVKQIKEGRLKETQKHRVDFLQLMIDSQNSKDSETHKALSDLELMAQSIIFIFAGYETTSSVLSFIIYELATHPDVQQKVQKEIDTVLPNKAPPTYDTVLQLEYLDMVVNETLRLFPVAMRLERVCKKDVEINGMFIPKGVVVMIPSYVLHHDPKYWTEPEKFLPERFSKKNKDNIDPYIYTPFGSGPRNCIGMRFALVNMKLALVRVLQNFSFKPCKETQIPLKLRFGGLLLTEKPIVLKAESRDETFVDMEPIHMDFLRSLAFQGPHLCFFWELLCPTIRSR

SEQ ID NO: 23051 - protein, 450 aa, Homo sapiens
MDHQDPYSVQATAAIAAAITFLILFTIFGNALVILAVLTSRSLRAPQNLFLVSLAAADILVATLIIPFSLANELLGYWYFRRTWCEVYLALDVLFCTSSIVHLCAISLDRYWAVSRALEYNSKRTPRRIKCIILTVWLIAAVISLPPLIYKGDQGPQPRGRPQCKLNQEAWYILASSIGSFFAPCLIMILVYLRIYLIAKRSNRRGPRAKGGPGQGESKQPRPDHGGALASAKLPALASVASAREVNGHSKSTGEKEEGETPEDTGTRALPPSWAALPNSGQGQKEGVCGASPEDEAEEEEEEEEEEEECEPQAVPVSPASACSPPLQQPQGSRVLATLRGQVLLGRGVGAIGGQWWRRRAQLTREKRFTFVLAVVIGVFVLCWFPFFFSYSLGAICPKHCKVPHGLFQFFFWIGYCNSSLNPVIYTIFNQDFRRAFRRILCRPWTQTAW

SEQ ID NO: 23052 - protein, 327 aa, Homo sapiens
MLHTNNTQFHPSTFLVVGVPGLEDVHVWIGFPFFAVYLTALLGNIIILFVIQTEQSLHQPMFYFLAMLAGTDLGLSTATIPKMLGIFWFNLGEIAFGACITQMYTIHICTGLESVVLTVTGIDRYIAICNPLRYSMILTNKVIAILGIVIIVRTLVFVTPFTFLILRLPFCGVRIIPHTYCEHMGLAKLACASINVIYGLIAFSVGYIDISVIGFSYVQILRAVFHLPAWDARPKALSTCGSHVCVMLAFYLPALFSFMTHRFGHNIPHYIHILLANLYVVFPPALNSVIYGVKTKQIREQVLRILNPKSFWHFDPKRIFHNNSVRQ

SEQ ID NO: 23053 - protein, 2315 aa, Homo sapiens
MPATEKDLAEDAPWKKIQQNTFTRWCNEHLKCVSKRIANLQTDLSDGLRLIALLEVLSQKKMHRKHNQRPTFRQMQLENVSVALEFLDRESIKLVSIDSKAIVDGNLKLILGLIWTLILHYSISMPMWDEEEDEEAKKQTPKQRLLGWIQNKLPQLPITNFSRDWQSGRALGALVDSCAPGLCPDWDSWDASKPVTNAREAMQQADDWLGIPQVITPEEIVDPNVDEHSVMTYLSQFPKAKLKPGAPLRPKLNPKKARAYGPGIEPTGNMVKKRAEFTVETRSAGQGEVLVYVEDPAGHQEEAKVTANNDKNRTFSVWYVPEVTGTHKVTVLFAGQHIAKSPFEVYVDKSQGDASKVTAQGPGLEPSGNIANKTTYFEIFTAGAGTGEVEVVIQDPMGQKGTVEPQLEARGDSTYRCSYQPTMEGVHTVHVTFAGVPIPRSPYTVTVGQACNPSACRAVGRGLQPKGVRVKETADFKVYTKGAGSGELKVTVKGPKGEERVKQKDLGDGVYGFEYYPMVPGTYIVTITWGGQNIGRSPFEVKVGTECGNQKVRAWGPGLEGGVVGKSADFVVEAIGDDVGTLGFSVEGPSQAKIECDDKGDGSCDVRYWPQEAGEYAVHVLCNSEDIRLSPFMADIRDAPQDFHPDRVKARGPGLEKTGVAVNKPAEFTVDAKHGGKAPLRVQVQDNEGCPVEALVKDNGNGTYSCSYVPRKPVKHTAMVSWGGVSIPNSPFRVNVGAGSHPNKVKVYGPGVAKTGLKAHEPTYFTVDCAEAGQGDVSIGIKCAPGVVGPAEADIDFDIIRNDNDTFTVKYTPRGAGSYTIMVLFADQATPTSPIRVKVEPSHDASKVKAEGPGLSRTGVELGKPTHFTVNAKAAGKGKLDVQFSGLTKGDAVRDVDIIDHHDNTYTVKYTPVQQGPVGVNVTYGGDPIPKSPFSVAVSPSLDLSKIKVSGLGEKVDVGKDQEFTVKSKGAGGQGKVASKIVGPSGAAVPCKVEPGLGADNSVVRFLPREEGPYEVEVTYDGVPVPGSPFPLEAVAPTKPSKVKAFGPGLQGGSAGSPARFTIDTKGAGTGGLGLTVEGPCEAQLECLDNGDGTCSVSYVPTEPGDYNINILFADTHIPGSPFKAHVVPCFDASKVKCSGPGLERATAGEVGQFQVDCSSAGSAELTIEICSEAGLPAEVYIQDHGDGTHTITYIPLCPGAYTVTIKYGGQPVPNFPSKLQVEPAVDTSGVQCYGPGIEGQGVFREATTEFSVDARALTQTGGPHVKARVANPSGNLTETYVQDRGDGMYKVEYTPYEEGLHSVDVTYDGSPVPSSPFQVPVTEGCDPSRVRVHGPGIQSGTTNKPNKFTVETRGAGTGGLGLAVEGPSEAKMSCMDNKDGSCSVEYIPYEAGTYSLNVTYGGHQVPGSPFKVPVHDVTDASKVKCSGPGLSPGMVRANLPQSFQVDTSKAGVAPLQVKVQGPKGLVEPVDVVDNADGTQTVNYVPSREGPYSISVLYGDEEVPRSPFKVKVLPTHDASKVKASGPGLNTTGVPASLPVEFTIDAKDAGEGLLAVQITDPEGKPKKTHIQDNHDGTYTVAYVPDVTGRYTILIKYGGDEIPFSPYRVRAVPTGDASKCTVTVSIGGHGLGAGIGPTIQIGEETVITVDTKAAGKGKVTCTVCTPDGSEVDVDVVENEDGTFDIFYTAPQPGKYVICVRFGGEHVPNSPFQVTALAGDQPSVQPPLRSQQLAPQYTYAQGGQQTWAPERPLVGVNGLDVTSLRPFDLVIPFTIKKGEITGEVRMPSGKVAQPTITDNKDGTVTVRYAPSEAGLHEMDIRYDNMHIPGSPLQFYVDYVNCGHVTAYGPGLTHGVVNKPATFTVNTKDAGEGGLSLAIEGPSKAEISCTDNQDGTCSVSYLPVLPGDYSILVKYNEQHVPGSPFTARVTGDDSMRMSHLKVGSAADIPINIAEISFEDRKDGSCGVAYVVQEPGDYEVSVKFNEEHIPDSPFVVPVASPSGDARRLTVSSLQESGLKVNQPASFAVSLNGAKGAIDAKVHSPSGALEECYVTEIDQDKYAVRFIPRENGVYLIDVKFNGTHIPGSPFKIRVGEPGHGGDPGLVSAYGAGLEGGVTGNPAEFVVNTSNAGAGALSVTIDGPSKVKMDCQECPEGYRVTYTPMAPGSYLISIKYGGPYHIGGSPFKAKVTGPRLVSNHSLHETSSVFVDSLTKATCAPQHGAPGPGPADASKVVAKGLGLSKAYVGQKSSFTVDCSKAGNNMLLVGVHGPRTPCEEILVKHVGSRLYSVSYLLKDKGEYTLVVKWGDEHIPGSPYRVVVP

SEQ ID NO: 23054 - protein, 913 aa, Homo sapiens
MIRHAGAPARGDPTGPVPVVGKGEEEEEEDGMRLCLPANPKNCLPHRRGISILEKLIKTCPVWLQLSLGQAEVARILHRVVAGMFLVRRDSSSKQLVLCVHFPSLNESSAEVLEYTIKEEKSILYLEGSALVFEDIFRLIAFYCVSRDLLPFTLRLPQAILEASSFTDLETIANLGLGFWDSSLNPPQERGKPAEPPRDRAPGFPLVSSLRPTAHDANCACEIELSVGNDRLWFVNPIFIEDCSSALPTDQPPLGNCPARPLPPTSDATSPTSRWAPRRPPPPPPVLPLQPCSPAQPPVPAPPLPAKKNLPTAPPRRRVSERVSLEDQSPGMAAEGDQLSLPPQGTSDGPEDTPRESTEQGQDTEVKASDPHSMPELPRTAKQPPVPPPRKKRISRQLASTLPAPLENAELCTQAMALETPTPGPPREGQSPASQAGTQHPPAQATAHSQSSPEFKGSLASLSDSLGVSVMATDQDSYSTSSTEEELEQFSSPSVKKKPSMILGKARHRLSFASFSSMFHAFLSNNRKLYKKVVELAQDKGSYFGSLVQDYKVYSLEMMARQTSSTEMLQEIRTMMTQLKSYLLQSTELKALVDPALHSEEELEAIVESALYKCVLKPLKEAINSCLHQIHSKDGSLQQLKENQLVILATTTTDLGVTTSVPEVPMMEKILQKFTSMHKAYSPEKKISILLKTCKLIYDSMALGNPGKPYGADDFLPVLMYVLARSNLTEMLLNVEYMMELMDPALQLGEGSYYLTTTYGALEHIKSYDKITVTRQLSVEVQDSIHRWERRRTLNKARASRSSVQDFICVSYLEPEQQARTLASRADTQAQALCAQCAEKFAVERPQAHRLFVLVDGRCFQLADDALPHCIKGYLLRSEPKRDFHFVYRPLDGGGGGGGGSPPCLVVREPNFL

SEQ ID NO: 23055 - protein, 540 aa, Homo sapiens
MQVAVHEGINSGTAMSRGLYQPATIFMGRQMSAILSMRDFSTEHKSPQPTKNFSIPDPHSHRQTAQSSNVTDSCVVQTSNDTQCLNKSDNIDGKASLQIGEKMPVTASVLSEEEQTHCLEIGSNTRHGKSNLSEGKKSAELNSPLRERLSPENRTTDLKCDSSSGSEGEILTREHIEVEEKRASPPVSPIPVSEYCESENKWSQEKHSPWEGVSDHLAHREPKSQKPFRKMQEEEEESWSTSSDLTISISEDDLILESPEPQPNPGGKMEGEDGIEALKLIHAEQERVALSTEKNCILQTLSSPDSEKESSTNAPTREPGQTPDSDVPRAQVGQHVATLKEHDNSVKEEATALLRKALTEECGRRSAIHSSESSCSLPSILNDNSGIKEAKPAVWLNSVPTREQEVSSGCGDKSKKENVAADIPITETEAYQLLKKATLQDNTNQTENRFQKTDASVSHLSGLNIGSGAFETKTANKIASEASFSSSEGSPLSRHENKKKPVINLKSNALWDESDDSNSEIEAALRPRNHNTDDSDDFYD

SEQ ID NO: 23056 - protein, 1177 aa, Homo sapiens
MTENMKECLAQTNAAVGDMVTVVKTEVCSPLRDQEYGQPCSRRPDSSAMEVEPKKLKGKRDLIVPKSFQQVDFWFCESCQEYFVDECPNHGPPVFVSDTPVPVGIPDRAALTIPQGMEVVKDTSGESDVRCVNEVIPKGHIFGPYEGQISTQDKSAGFFSWLIVDKNNRYKSIDGSDETKANWMRYVVISREEREQNLLAFQHSERIYFRACRDIRPGEWLRVWYSEDYMKRLHSMSQETIHRNLARGEKRLQREKSEQVLDNPEDLRGPIHLSVLRQGKSPYKRGFDEGDVHPQAKKKKIDLIFKDVLEASLESAKVEAHQLALSTSLVIRKVPKYQDDAYSQCATTMTHGVQNIGQTQGEGDWKVPQGVSKEPGQLEDEEEEPSSFKADSPAEASLASDPHELPTTSFCPNCIRLKKKVRELQAELDMLKSGKLPEPPVLPPQVLELPEFSDPAASESMVSGPAIMEDDDQEVDSADESVSNDMMTATDEPSKMSSATGRRIRRFKQEWLKKFWFLRYSPTLNEMWCHVCRQYTVQSSRTSAFIIGSKQFKIHTIKLHSQSNLHKKCLQLYKLRMHPEKTEEMCRNMTLLFNTAYHLALEGRPYLDFRPLAELLRKCELKVVDQYMNEGDCQILIHHIARALREDLVERIRQSPCLSVILDGQSDDLLADTVAVYVQYTSSDGPPATEFLSLQELGFSSTESYLQALDRAFSALGIRLQDEKPTVGLGVDGANITASLRASMFMTIRKTLPWLLCLPFMVHRPHLEILDAISGKELPCLEELENNLKQLLSFYRYSPRLMCELRSTAATLCEETEFLGDIRAVRWIIGEQNVLNALIKDYLEVVAHLKEVSSQTQRADASAIALALLQFLMDYQSIKLIYFLLDVIAVLSRLAYIFQGEYLLVSQVDDKIEEAIQEISRLADSPGEYLQEFEENFRESFNGIAMKNLRVAEAKFQSIREKICQKTQVILAQRFDSRSRIFVKACQVFDLAAWPRSSEELMSYGKEDMVQIFDHLEAIPTFSRDVCREGLDPRGSLLMEWRELKADYYTKNGFKDLISHICKYKQRFPLLNKIIQVLKVLPTSTACCEKGRNALQRVRKNHRSRLTLEQLSDLLTIAVNGPPITNFDAKRALDSWFEEKSGNSYALSAEVLSRMSALEQKPALQTMDHGTEFYPDI

SEQ ID NO: 23057 - protein, 90 aa, Homo sapiens
MGAERVCTKAPEITQDEAEIYSLTNMEGNIGIKGCEFKSWLFKFYQARSQVLLCGEVKNPYLLTSNKTTVKEQNACLTHPDRSAMAGLLL

SEQ ID NO: 23058 - protein, 248 aa, Homo sapiens
MKQLPAATVRLLSSSQIITSVVSVVKELIENSLDAGATSVDVKLENYGFDKIEVRDNGEGIKAVDAPVMAMKYYTSKINSHEDLENLTTYGFRGEALGSICCIAEVLITTRTAADNFSTQYVLDGSGHILSQKPSHLGQGTTVTALRLFKNLPVRKQFYSTAKKCKDEIKKIQDLLMSFGILKPDLRIVFVHNKGEAVRLSRQLPMYLSKEDIQDIIYRMKHQFGNEIKECVHGRPFFHHLTYLPETT

SEQ ID NO: 23059 - protein, 403 aa, Homo sapiens
LLSASWQRRAKAMTAAAGSAGRAAVPLLLCALLAPGGAYVLDDSDGLGREFDGIGAVSGGGATSRLLVNYPEPYRSQILDYLFKPNFGASLHILKVEIGGDGQTTDGTEPSHMHYALDENYFRGYEWWLMKEAKKRNPNITLIGLPWSFPGWLGKGFDWPYVNLQLTAYYVVTWIVGAKRYHDLDIDYIGIWNERSYNANYIKILRKMLNYQGLQRVKIIASDNLWESISASMLLDAELFKVVDVIGAHYPGTHSAKDAKLTGKKLWSSEDFSTLNSDMGAGCWGRILNQNYINGYMTSTIAWNLVASYYEQLPYGRCGLMTAQEPWSGHYVVESPVWVSAHTTQFTQPGWYYLKTVGHLEKGGSYVALTDGLGNLTIIIETMVNFCCCYWINSLLYYWKNKI

SEQ ID NO: 23060 - protein, 918 aa, Homo sapiens
MDMPGRELNEDRDSGIARSASLSSLLITPFPSPNSSLTRSCASSYQRRWRRSQTTSLENGVFPRWSIEESFNLSDESCGPNPGIVRKKKIAIGVIFSLSKDEDENNKFNEFFFSHFPLFESHMNKLKSAIEQAMKMSRRSADASQRSLAYNRIVDALNEFRTTICNLYTMPRIGEPVWLTMMSGTPEKNHLCYRFMKEFTFLMENASKNQFLPALITAVLTNHLAWVPTVMPNGQPPIKIFLEKHSSQSVDMLAKTHPYNPLWAQLGDLYGAIGSPVRLARTVVVGKRQDMVQRLLYFLTYFIRCSELQETHLLENGEDEAIVMPGTVITTTLEKGEIEESEYVLVLLFKESEEIRTPNCNCKYCSHPLLGQNVENISQQEREDIQNSSKELLGISDECQMISPSDCQEENAVDVKQYRDKLRTCFDAKLETVVCTGSVPVDKCALSESGLESTEETWQSEKLLDSDSHTGKAMRSTGMVVEKKPPDKIVPASFSCEAAQTKVTFLIGDSMSPDSDTELRSQAVVDQITRHHTKPLKEERGAIDQHQETKQTTKDQSGESDTQNMVSEEPCELPCWNHSDPESMSLFDEYFNDDSIETRTIDDVPFKTSTDSKDHCCMLEFSKILCTKNNKQNNEFCKCIETVPQDSCKTCFPQQDQRDTLSILVPHGDKESSDKKIAVGTEWDIPRNESSDSALGDSESEDTGHDMTRQVSSYYGGEQEDWAEEDEIPFPGSKLIEVSAVQPNIANFGRSLLGGYCSSYVPDFVLQGIGSDERFRQCLMSDLSHAVQHPVLDEPIAEAVCIIADMDKWTVQVASSQRRVTDNKLGKEVLVSSLVSNLLHSTLQLYKHNLSPNFCVMHLEDRLQELYFKSKMLSEYLRGQMRVHVKELGVVLGIESSDLPLLAAVASTHSPYVAQILL

SEQ ID NO: 23061 - protein, 449 aa, Homo sapiens
CVVQTSNDTQCLNKSDNIDGKASLQIGEKMPVTASVLSEEEQTHCLEIGSNTRHGKSNLSEGKKSAELNSPLRERLSPENRTTDLKCDSSSGSEGEILTREHIEVEEKRASPPVSPIPVSEYCESENKWSQEKHSPWEGVSDHLAHREPKSQKPFRKMQEEEEESWSTSSDLTISISEDDLILESPEPQPNPGGKMEGEDGIEALKLIHAEQERVALSTEKNCILQTLSSPDSEKESSTNAPTREPGQTPDSDVPRAQATALLRKALTEECGRRSAIHSSESSCSLPSILNDNSGIKEAKPAVWLNSVPTREQEVSSGCGDKSKKENVAADIPITETEAYQLLKKATLQDNTNQTENRFQKTDASVSHLSGLNIGSGAFETKTANKIASEASFSSSEGSPLSRHENKKKPVINLKSNALWDESDDSNSEIEAALRPRNHNTDDSDDFYD

SEQ ID NO: 23062 - protein, 875 aa, Homo sapiens
MNFQAGGGQSPQQQQQLAGGPPQQFALSNSAAIRAEIQRFESVHPNIYAIYDLIERIEDLALQNQIREHVISIEDSFVNSQEWTLSRSVPELKVGIVGNLSSGKSALVHRYLTGTYVQEESPEGGRFKKEIVVDGQSYLLLIRDEGGPPELQFAAWVDAVVFVFSLEDEISFQTVYNYFLRLCSFRNASEVPMVLVGTQDAISAANPRVIDDSRARKLSTDLKRCTYYETCATYGLNVERVFQDVAQKVVALRKKQQLAIGPCKSLPNSPSHSAVSAASIPAVHINQATNGGGSAFSDYSSSVPSTPSISQRELRIETIAASSTPTPIRKQSKRRSNIFTSRKGADLDREKKAAECKVDSIGSGRAIPIKQGILLKRSGKSLNKEWKKKYVTLCDNGLLTYHPSLHDYMQNIHGKEIDLLRTTVKVPGKRLPRATPATAPGTSPRANGLSVERSNTQLGGGTGAPHSASSASLHSERPLSSSAWAGPRPEGLHQRSCSVSSADQWSEATTSLPPGMQHPASGPAEVLSSSPKLDPPPSPHSNRKKHRRKKSTGTPRPDGPSSATEEAEESFEFVVVSLTGQTWHFEASTAEERELWVQSVQAQILASLQGCRSAKDKTRLGNQNAALAVQAVRTVRGNSFCIDCDAPNPDWASLNLGALMCIECSGIHRHLGAHLSRVRSLDLDDWPPELLAVMTAMGNALANSVWEGALGGYSKPGPDACREEKERWIRAKYEQKLFLAPLPSSDVPLGQQLLRAVVEDDLRLLVMLLAHGSKEEVNETYGDGDGRTALHLSSAMANVVFTQLLIWYGVDVRSRDARGLTPLAYARRAGSQECADILIQHGCPGEGCGLAPTPNREPANGTNPSAELHRSPSLL

SEQ ID NO: 23063 - protein, 763 aa, Homo sapiens
MESPVFAFPLLLKLETHIEKLFLYSFSWDFECSQCGHQYQNRHMKSLVTFTNVIPEWHPLNAAHFGPCNNCNSKSQIRKMVLEKVSPIFMLHFVEGLPQNDLQHYAFHFEGCLYQITSVIQYRANNHFITWILDADGSWLECDDLKGPCSERHKKFEVPASEIHIVIWERKISQVTDKEAACLPLKKTNDQHALSNEKPVSLTSCSVGDAASAETASVTHPKDISVAPRTLSQDTAVTHGDHLLSGPKGLVDNILPLTLEETIQKTASVSQLNSEAFLLENKPVAENTGILKTNTLLSQESLMASSVSAPCNEKLIQDQFVDISFPSQVVNTNMQSVQLNTEDTVNTKSVNNTDATGLIQGVKSVEIEKDAQLKQFLTPKTEQLKPERVTSQVSNLKKKETTADSQTTTSKSLQNQSLKENQKKPFVGSWVKGLISRGASFMPLCVSAHNRNTITDLQPSVKGVNNFGGFKTKGINQKASHVSKKARKSASKPPPISKPPAGPPSSNGTAAHPHAHAASEVLEKSGSTSCGAQLNHSSYGNGISSANHEDLVEGQIHKLRLKLRKKLKAEKKKLAALMSSPQSRTVRSENLEQVPQDGSPNDCESIEDLLNELPYPIDIASESACTTVPGVSLYSSQTHEEILAELLSPTPVSTELSENGEGDFRYLGMGDSHIPPPVPSEFNDVSQNTHLRQDHNYCSPTKKNPCEVQPDSLTNNACVRTLNLESPMKTDIFDEFFSSSALNALANDTLDLPHFDEYLFENY

SEQ ID NO: 23064 - protein, 1140 aa, Homo sapiens
MRLSSLTEEAVDGGNGGEWGEDLLEQFTCIPSRVVEAKTAPEWPLCPGEGQGLHGEPLPDHCQGTGGQIDPSLGRGGRAKQRGSRGSWWAAGETIANMLCGLSRETPGEADDGPYSKGGKDAGGADVSLACRRQSIPEEFRGITVVELIKKEGSTLGLTISGGTDKDGKPRVSNLRPGGLAARSDLLNIGDYIRSVNGIHLTRLRHDEIITLLKNVGERVVLEVEYELPPPAPENNPRIISKTVDVSLYKEGNSFGFVLRGGAHEDGHKSRPLVLTYVRPGGPADREGSLKVGDRLLSVDGIPLHGASHATALATLRQCSHEALFQVEYDVATPDTVANASGPLMVEIVKTPGSALGISLTTTSLRNKSVITIDRIKPASVVDRSGALHPGDHILSIDGTSMEHCSLLEATKLLASISEKVRLEILPVPQSQRPLRPSEAVKVQRSEQLHRWDPCVPSCHSPRPGHCRMPTWATPAGQDQSRSLSSTPFSSPTLNHAFSCNNPSTLPRGSQPMSPRTTMGRRRQRRREHKSSLSLASSTVGPGGQIVHTETTEVVLCGDPLSGFGLQLQGGIFATETLSSPPLVCFIEPDSPAERCGLLQVGDRVLSINGIATEDGTMEEANQLLRDAALAHKVVLEVEFDVAESVIPSSGTFHVKLPKKRSVELGITISSASRKRGEPLIISDIKKGSVAHRTGTLEPGDKLLAIDNIRLDNCPMEDAVQILRQCEDLVKLKIRKDEDNSDELETTGAVSYTVELKRYGGPLGITISGTEEPFDPIVISGLTKRGLAERTGAIHVGDRILAINNVSLKGRPLSEAIHLLQVAGETVTLKIKKQLDRPLLPRKSGSLSETSDADEDPADALKGGLPAARFSPAVPSVDSAVESWDSSATEGGFGGPGSYTPQAAARGTTPQERRPGWLRGSPPPTEPRRTSYTPTPADESFPEEEEEDDWEPPTSPAPGPAREEGFWRMFGEALEDLESCGQSELLRELEASIMTGTVQRVALEGRPGHRPWQRGREVRASPAEMEELLLPTPLEMHKVTLHKDPMRHDFGFSVSDGLLEKGVYVHTVRPDGPAHRGGLQPFDRVLQVNHVRTRDFDCCLAVPLLAEAGDVLELIISRKPHTAHSSRAPRSPGPSSPRML

SEQ ID NO: 23065 - protein, 647 aa, Homo sapiens
MGPWSRSLSALLLLLQVSSWLCQEPEPCHPGFDAESYTFTVPRRHLERGRVLGRVNFEDCTGRQRTAYFSLDTRFKVGTDGVITVKRPLRFHNPQIHFLVYAWDSTYRKFSTKVTLNTVGHHHRPPPHQASVSGIQAELLTFPNSSPGLRRQKRDWVIPPISCPENEKGPFPKNLVQIKSNKDKEGKVFYSITGQGADTPPVGVFIIERETGWLKVTEPLDRERIATYTLFSHAVSSNGNAVEDPMEILITVTDQNDNKPEFTQEVFKGSVMEGALPGTSVMEVTATDADDDVNTYNAAIAYTILSQDPELPDKNMFTINRNTGVISVVTTGLDRESFPTYTLVVQAADLQGEGLSTTATAVITVTDTNDNPPIFNPTTYKGQVPENEANVVITTLKVTDADAPNTPAWEAVYTILNDDGGQFVVTTNPVNNDGILKTAKGLDFEAKQQYILHVAVTNVVPFEVSLTTSTATVTVDVLDVNEAPIFVPPEKRVEVSEDFGVGQEITSYTAQEPDTFMEQKITYRIWRDTANWLEINPDTGAISTRAELDREDFEHVKNSTYTALIIATDNGSPVATGTGTLLLILSDVNDNAPIPEPRTIFFCERNPKPQVINIIDADLPPNLASQSIGITDMSHCTCPAPQLPAIF

SEQ ID NO: 23066 - protein, 783 aa, Homo sapiens
MRNKRVLKTKKRRSGRGGQDPGLHPHRSEATAGRSPPTPTVTLGPDCPPPPPPPPPNNNNNNNSKHTGHKSACVPNMTERRRDELSEEINNLREKVMKQSEENNNLQSQVQKLTEENTTLREQVEPTPEDEDDDIELRGAAAAAAPPPPIEEECPEDLPEKFDGNPDMLAPFMAQCQIFMEKSTRDFSVDRVRVCFVTSMMTGRAARWASAKLERSHYLMHNYPAFMMEMKHVFEDPQRREVAKRKIRRLRQGMGSVIDYSNAFQMIAQDLDWNEPALIDQYHEGLSDHIQEELSHLEVAKSLSALIGQCIHIERRLARAAAARKPRSPPRALVLPHIASHHQVDPTEPVGGARMRLTQEEKERRRKLNLCLYCGTGGHYADNCPAKASKSSPGKLPGPAVEGPSATGPEIIRSPQDDASSPHLQVMLQIHLPGRHTLFVRAMIDSGASGNFIDHEYVAQNGIPLRIKDWPILVEAIDGRPIASGPVVHETHDLIVDLGDHREVLSFDVTQSPFFPVVLGVRWLSTHDPNITWSTRSIVFDSEYCRYHCRMYSPIPPSLPPPAPQPPLYYPVDGYRVYQPVRYYYVQNVYTPVDEHVYPDHRLVDPHIEMIPGAHSIPSGHVYSLSEPEMAALRDFVARNVKDGLITPTIAPNGAQVLQVKRGWKLQVSYDCRAPNNFTIQNQYPRLSIPNLEDQAHLATYTEFVPQIPGYQTYPTYAAYPTYPVGFAWYPVGRDGQGRSLYVPVMITWNPHWYRQPPVPQYPPPQPPPPPPPPPPPPSYSTL

SEQ ID NO: 23067 - protein, 501 aa, Homo sapiens
MGNFKSRKPKSIFKAESGRSHGESQETEHVVSSQSECQVRAGTPAHESPQNNAFKCQETVRLQPRIDQRTAISPKDAFETRQDLNEEEAAQVHGVKDPAPASTQSVLADGTDSADPSPVHKDGQNEADSAPEDLHSVGTSRLLYHITDGDNPLLSPRCSIFSQSQRFNLDPESAPSPPSTQQFMMPRSSSRCSCGDGKEPQTITQLTKHIQSLKRKIRKFEEKFEQEKKYRPSHGDKTSNPEVLKWMNDLAKGRKQLKELKLKLSEEQGSAPKGPPRNLLCEQPTVPRENGKPEAAGPEPSSSGEETPDAALTCLKERREQLPPQEDSKVTKQDKNLIKPLYDRYRIIKQILSTPSLIPTIEEEDSDEDRPQGSQQPSLADPASHLPVGDHLTYSNETEPVRALLPDEKKEVKPPALSMSNLHEATMPVLLDHLRETRADKKRLRKALREFEEQFFKQTGRSPQKEDRIPMADEYYEYKHIKAKLRLLEVLISKQDVAKTI

SEQ ID NO: 23068 - protein, 143 aa, Homo sapiens
MRPSVWAAVAAGLWVLCTVIAEGPPALPALALPLAGAPDAGGCQGAEGPLRGRGAELGAAQLLLPPQEGSSAAIASLHPQAHGEPQRFANLSCLAEKPIQTGVGSSGCPEIRARVCGWEGHGQMQRGASSFAFSICLMSHLQL

SEQ ID NO: 23069 - protein, 1269 aa, Homo sapiens
MSGPTDETAGDLPVKDTGLNLFGMGGLQETSTTRTMKSRQAVSRVSREELEDRFLRLHDENILLKQHARKQEDKIKRMATKLIRLVNDKKRYERVGGGPKRLGRDVEMEEMIEQLQEKVHELEKQNETLKNRLISAKQQLQTQGYRQTPYNNVQSRINTGRRKANENAGLQECPRKGIKFQDADVAETPHPMFTKYGNSLLEEARGEIRNLENVIQSQRGQIEELEHLAEILKTQLRRKENEIELSLLQLREQQATDQRSNIRDNVEMIKLHKQLVEKSNALSAMEGKFIQLQEKQRTLRISHDALMANGDELNMQLKEQRLKCCSLEKQLHSMKFSERRIEELQDRINDLEKERELLKENYDKLYDSAFSAAHEEQWKLKEQQLKVQIAQLETALKSDLTDKTEILDRLKTERDQNEKLVQENRELQLQYLEQKQQLDELKKRIKLYNQENDINADELSEALLLIKAQKEQKNGDLSFLVKVDSEINKDLERSMRELQATHAETVQELEKTRNMLIMQHKINKDYQMEVEAVTRKMENLQQDYELKVEQYVHLLDIRAARIHKLEAQLKDIAYGTKQYKFKPEIMPDDSVDEFDETIHLERGENLFEIHINKVTFSSEVLQASGDKEPVTFCTYAFYDFELQTTPVVRGLHPEYNFTSQYLVHVNDLFLQYIQKNTITLEVHQAYSTEYETIAACQLKFHEILEKSGRIFCTASLIGTKGDIPNFGTVEYWFRLRVPMDQAIRLYRERAKALGYITSNFKGPEHMQSLSQQAPKTAQLSSTDSTDGNLNELHITIRCCNHLQSRASHLQPHPYVVYKFFDFADHDTAIIPSSNDPQFDDHMYFPVPMNMDLDRYLKSESLSFYVFDDSDTQENIYIGKVNVPLISLAHDRCISGIFELTDHQKHPAGTIHVILKWKFAYLPPSGSITTEDLGNFIRSEEPEVVQRLPPASSVSTLVLAPRPKPRQRLTPVDKKVSFVDIMPHQSDETSPPPEDRKEISPEVEHIPEIEINMLTVPHVPKVSQEGSVDEVKENTEKMQQGKDDVSLLSEGQLAEQSLASSEDETEITEDLEPEVEEDMSASDSDDCIIPGPISKNIKQPSEKIRIEIIALSLNDSQVTMDDTIQRLFVECRFYSLPAEETPVSLPKPKSGQWVYYNYSNVIYVDKENNKAKRDILKAILQKQEMPNRSLRFTVVSDPPEDEQDLECEDIGVAHVDLADMFQEGRDLIEQNIDVFDARADGEGIGKLRVTVEALHALQSVYKQYRDDLEA

SEQ ID NO: 23070 - protein, 232 aa, Homo sapiens [sequence omitted]

SEQ ID NO: 23071 - protein, 309 aa, Homo sapiens
MEEENATLLTEFVLTGFLHQPDCKIPLFLAFLVIYLITIMGNLGLIVLIWKDPHLHIPMYLFLGSLAFVDASLSSTVTPKMLINFLAKSKMISLSECMVQFFSLVTTVTTECFLLATMAYDRYVAICKALLYPVIMTNELCIQLLVLSFIGGLLHALIHEAFSFRLTFCNSNIIQHFYCDIIPLLKISCTDSSINFLMVFIFAGSVQVFTIGTILISYTIILFTILEKKSIKGIRKAVSTCGAHLLSVSLYYGPLTFKYLGSASPQADDQDMMESLFYTVIVPLLNPMIYSLRNKQVIASFTKMFKSNV

SEQ ID NO: 23072 - protein, 1260 aa, Homo sapiens
MAQILPVRFQEHFQLQNLGINPANIGFSTLTMESDKFICIREKVGEQAQVTIIDMSDPMAPIRRPISAESAIMNPASKVIALKAGKTLQIFNIEMKSKMKAHTMAEEVIFWKWVSVNTVALVTETAVYHWSMEGDSQPMKMFDRHTSLVGCQVIHYRTDEYQKWLLLVGISAQQNRVVGAMQLYSVDRKVSQPIEGHAAAFAEFKMEGNAKPATLFCFAVRNPTGGKLHIIEVGQPAAGNQPFVKKAVDVFFPPEAQNDFPVAMQIGAKHGVIYLITKYGYLHLYDLESGVCICMNRISADTIFVTAPHKPTSGIIGVNKKGQVLSVCVEEDNIVNYATNVLQNPDLGLRLAVRSNLAGAEKLFVRKFNTLFAQGSYAEAAKVAASAPKGILRTRETVQKFQSIPAQSGQASPLLQYFGILLDQGQLNKLESLELCHLVLQQGRKQLLEKWLKEDKLECSEELGDLVKTTDPMLALSVYLRANVPSKVIQCFAETGQFQKIVLYAKKVGYTPDWIFLLRGVMKISPEQGLQFSRMLVQDEEPLANISQIVDIFMENSLIQQCTSFLLDALKNNRPAEGLLQTWLLEMNLVHAPQVADAILGNKMFTHYDRAHIAQLCEKAGLLQQALEHYTDLYDIKRAVVHTHLLNPEWLVNFFGSLSVEDSVECLHAMLSANIRQNLQLCVQVASKYHEQLGTQALVELFESFKSYKGLFYFLGSIVNFSQDPDVHLKYIQAACKTGQIKEVERICRESSCYNPERVKNFLKEAKLTDQLPLIIVCDRFGFVHDLVLYLYRNNLQRYIEIYVQKVNPSRTPAVIGGLLDVDCSEEVIKHLIMAVRGQFSTDELVAEVEKRNRLKLLLPWLESQIQEGCEEPATHNALAKIYIDSNNSPECFLRENAYYDSSVVGRYCEKRDPHLACVAYERGQCDLELIKVCNENSLFKSEARYLVCRKDPELWAHVLEETNPSRRQLIDQVVQTALSETRDPEEISVTVKAFMTADLPNELIELLEKIVLDNSVFSEHRNLQNLLILTAIKADRTRVMEYISRLDNYDALDIASIAVSSALYEEAFTVFHKFDMNASAIQVLIEHIGNLDRAYEFAERCNEPAVWSQLAQAQLQKDLVKEAINSYIRGDDPSSYLEVVQSASRSNNWEDLVKFLQMARKKGRESYIETELIFALAKTSRVSELEDFINGPNNAHIQQVGDRCYEEGMYEAAKLLYSNVSNFARLASTLVHLGVLCLHGWTRVPLRTAVWSSHRHSCR

SEQ ID NO: 23073 - protein, 300 aa, Homo sapiens
MMGRRRAFAVDGRDGAGEGLARGCIVPGVTSTYRRIPDAAHGCSSWERGDKFRGVGREALFLKLASRDSGVEMAVGDSPLAALPGLSQDSLDFESSGSSEPPAQVGRLLASQKLGEVLERSRRLPTAPTSLSGQHRSLRLASKPEREVPLGAGQQESMEADTDLEAGLEEEAVGGLGPGAWACLPGQGLRYLEHLCLVLEQMARLQQLYLQLRIQRPPGDPGEEESTRAPLPSPLHTPGNRGQGPWELLSQTEHTGAKAASPPKVEVPSANPPRLPETPVEPTYHLPSSQGHKDRVQGPP

SEQ ID NO: 23074 - protein, 263 aa, Homo sapiens
MQRARPTLWAACEPCDARALAQCAPPPAVCAELVREPGCGCCLTCALSEGQPCGIYTERCGSGLRCQPSPDEARPLQALLDGRGLCVNASAVSRLRAYLLPAPPAPGNASESEEDRSAGSVESPSVSSTHRVSDPKFHPLHSKIIIIKKGHAKDSQRYKVDYESQSTDTQNFSSESKRETEYGPCRREMEDTLNHLKFLNVLSPRGVHIPNCDKKGFYKKKQCRPSKGRKRGFCWCVDKYGQPLPGYTTKGKEDVHCYSMQSK

SEQ ID NO: 23075 - protein, 1026 aa, Homo sapiens
MFPLSFWWYCEGKELENSPDIHIVQAGNLHSLTIAEAFEEDTGRYSCFASNIYGTDSTSAEIYIEGVSSSDSEGDPNKEEMNRIQKPNEVSSPPTTSAVIPPAVPQAQHLVAQPRVATIQQCQSPTNYLQGLDGKPIIAAPVFTKMLQNLSASEGQLVVFECRVKGAPSPKVEWYREGTLIEDSPDFRILQKKPRSMAEPEEICTLVIAEVFAEDSGCFTCTASNKYGTVSSIAQLHVRGNEDLSNNGSLHSANSTTNLAAIEPQPSPPHSEPPSVEQPPKPKLEGVLVNHNEPRSSSRIGLRVHFNLPEDDKGSEASSEAGVVTTRQTRPDSFQERFNGQATKTPEPSSPVKEPPPVLAKPKLDSTQLQQLHNQVLLEQHQLQNPPPSSPKEFPFSMTVLNSNAPPAVTTSSKQVKAPSSQTFSLARPKYFFPSTNTTAATVAPSSSPVFTLSSTPQTIQRTVSKESLLVSHPSVQTKSPGGLSIQNEPLPPGPTEPTPPPFTFSIPSGNQFQPRCVSPIPVSPTSRIQNPVAFLSSVLPSLPAIPPTNAMGLPRSAPSMPSQGLAKKNTKSPQPVNDDNIRETKNAVIRDLGKKITFSDVRPNQQEYKISSFEQRLMNEIEFRLERTPVDESDDEIQHDEIPTGKCIAPIFDKRLKHFRVTEGSPVTFTCKIVGIPVPKVYWFKDGKQISKRNEHCKMRREGDGTCSLHIESTTSDDDGNYTIMAANPQGRISCSGHLMVQSLPIRSRLTSAGQSHRGRSRVQERDKEPLQERFFRPHFLQAPGDMVAHEGRLCRLDCKVSGLPPPELTWLLNGQPVLPDASHKMLVRETGVHSLLIDPLTQRDAGTYKCIATNKTGQNSFSLELSVVAKEVKKAPVILEKLQNCGVPEGHPVRLECRVIGMPPPVFYWKKDNETIPCTRERISMHQDTTGYACLLIQPAKKSDAGWYTLSAKNEAGIVSCTARLDIYAQWHHQIPPPMSVRPSGSRYGSLTSKGLDIFSAFSSMESTMVYSCSSRSVVESDEL

SEQ ID NO: 23076 - protein, 1038 aa, Homo sapiens
MRGSGPRGAGRRRPPSGGGDTPITPASLAGCYSAPRRAPLWTCLLLCAALRTLLASPSNEVNLLDSRTVMGDLGWIAFPKNGWEEIGEVDENYAPIHTYQVCKVMEQNQNNWLLTSWISNEGASRIFIELKFTLRDCNSLPGGLGTCKETFNMYYFESDDQNGRNIKENQYIKIDTIAADESFTELDLGDRVMKLNTEVRDVGPLSKKGFYLAFQDVGACIALVSVRVYYKKCPSVVRHLAVFPDTITGADSSQLLEVSGSCVNHSVTDEPPKMHCSAEGEWLVPIGKCMCKAGYEEKNGTCQVCRPGFFKASPHIQSCGKCPPHSYTHEEASTSCVCEKDYFRRESDPPTMACTRPPSAPRNAISNVNETSVFLEWIPPADTGGRKDVSYYIACKKCNSHAGVCEECGGHVRYLPRQSGLKNTSVMMVDLLAHTNYTFEIEAVNGVSDLSPGARQYVSVNVTTNQAAPSPVTNVKKGKIAKNSISLSWQEPDRPNGIILEYEIKYFEKDQETSYTIIKSKETTITAEGLKPASVYVFQIRARTAAGYGVFSRRFEFETTPVSVAASSDQSQIPVIAVSVTVGVILLAVVIGVLLSGSCCECGCGRASSLCAVAHPSLIWRCGYSKAKQDPEEEKMHFHNGHIKLPGVRTYIDPHTYEDPNQAVHEFAKEIEASCITIERVIGAGEFGEVCSGRLKLPGKRELPVAIKTLKVGYTEKQRRDFLGEASIMGQFDHPNIIHLEGVVTKSKPVMIVTEYMENGSLDTFLKKNDGQFTVIQLVGMLRGISAGMKYLSDMGYVHRDLAARNILINSNLVCKVSDFGLSRVLEDDPEAAYTTRGGKIPIRWTAPEAIAFRKFTSASDVWSYGIVMWEVVSYGERPYWEMTNQDVIKAVEEGYRLPSPMDCPAALYQLMLDCWQKERNSRPKFDEIVNMLDKLIRNPSSLKTLVNASCRVSNLLAEHSPLGSGAYRSVGEWLEAIKMGRYTEIFMENGYSSMDAVAQVTLEDLRRLGVTLVGHQKKIMNSLQEMKVQLVNGMVPL

SEQ ID NO: 23077 - protein, 194 aa, Homo sapiens
MCDLRRPAAGGMMDLAYVCEWEKWSKSTHCPSVPLACAWSCRNLIAFTMDLRSDDQDLTRMIHILDTEHPWDLHSIPSEHHEAITCLEWDQSGSRLLSADADGQIKCWSMADHLANSWESSVGSLVEGDPIVALSWLHNGVKLALHVEKSLLRPHFLNTPDKSPGDRLTEICTKITDVDIDKVMINLKTEEFVL

SEQ ID NO: 23078 - protein, 761 aa, Homo sapiens
MLQTKDLIWTLFFLGTAVSLQVDIVPSQGEISVGESKFFLCQVAGDAKDKDISWFSPNGEKLTPNQQRISVVWNDDSSSTLTIYNANIDDAGIYKCVVTGEDGSESEATVNVKIFQKLMFKNAPTPQEFREGEDAVIVCDVVSSLPPTIIWKHKGRDVILKKDVRFIVLSNNYLQIRGIKKTDEGTYRCEGRILARGEINFKDIQVIVNVPPTIQARQNIVNATANLGQSVTLVCDAEGFPEPTMSWTKDGEQIEQEEDDEKYIFSDDSSQLTIKKVDKNDEAEYICIAENKAGEQDATIHLKVFAKPKITYVENQTAMELEEQVTLTCEASGDPIPSITWRTSTRNISSEEKTLDGHMVVRSHARVSSLTLKSIQYTDAGEYICTASNTIGQDSQSMYLEVQYAPKLQGPVAVYTWEGNQVNITCEVFAYPSATISWFRDGQLLPSSNYSNIKIYNTPSASYLEVTPDSENDFGNYNCTAVNRIGQESLEFILVQADTPSSPSIDQVEPYSSTAQVQFDEPEATGGVPILKYKAEWRAVGEEVWHSKWYDAKEASMEGIVTIVGLKPETTYAVRLAALNGKGLGEISAASEFKTQPVHSPPPPASASSSTPVPLSPPDTTWPLPALATTEPAKGEPSAPKLEGQMGEDGNSIKVNLIKQDDGGSPIRHYLVRYRALSSEWKPEIRLPSGSDHVMLKSLDWNAEYEVYVVAENQQGKSKAAHFVFRTSAQPTAIPATLGGNSASYTFVSLLFSAVTLLLLC

SEQ ID NO: 23079 - protein, 416 aa, Homo sapiens
MQVIVSNVPPTLVEKKIEDLTEILDRYVQEQIPGAKVVVESIGARRHGDAFSLEDYTKCDLTVYAIDPQTNRAIDRNELFKFLDGKLLDINKDFQPYYGEGGRILEIRTPEAVTSIKKRGESLGYTEGALLALAFIIILCCIPAILVVLVSYRQRGYGSEQQQLLRPSLLKPEELSMESGIDPGQEYGQDYYSYEHGYEMPQYGSRRRLLPPAGQEEYGEVVGEAEEEYEEEEWARKRMIKLVVDREYETSSTGEDSAPECQRNRLHHPSIHSNINGNIYIAQNGSVVRTRRACLTDNLKVASPVRLGGPFKKLDKLAVTHEENVPLNTLSKGPFSTEKMNARPTLVTFAPCPVGTDNTAVKPLRNRLKSTVEQESMIDSKNIKEALEFHSDHTQSDDEELWMGPWNNLHIPMTKL

SEQ ID NO: 23080 - protein, 373 aa, Homo sapiens [sequence omitted]

SEQ ID NO: 23081 - protein, 858 aa, Homo sapiens [sequence omitted]

SEQ ID NO: 23082 - protein, 346 aa, Homo sapiens
MESPSAPPHRWCIPWQRLLLTASLLTFWNPPTTAKLTIESTPFNVAEGKEVLLLVHNLPQHLFGYSWYKGERVDGNRQIIGYVIGTQQATPGPAYSGREIIYPNASLLIQNIIQNDTGFYTLHVIKSDLVNEEATGQFRVYPELPKPSISSNNSKPVEDKDAVAFTCEPETQDATYLWWVNNQSLPVSPRLQLSNGNRTLTLFNVTRNDARAYVCGIQNSVSANRSDPVTLDVLYGPDTPIISPPDSSYLSGANLNLSCHSASNPSPQYSWRINGIPQQHTQVLFIAKITPNNNGTYACFVSNLATGRNNSIVKSITVSASGTSPGLSAGATVGIMIGVLVGVALI

SEQ ID NO: 23083 - protein, 3121 aa, Homo sapiens
MPGAAGVLLLLLLSGGLGGVQAQRPQQQRQSQAHQQRGLFPAVLNLASNALITTNATCGEKGPEMYCKLVEHVPGQPVRNPQCRICNQNSSNPNQRHPITNAIDGKNTWWQSPSIKNGIEYHYVTITLDLQQVFQIAYVIVKAANSPRPGNWILERSLDDVEYKPWQYHAVTDTECLTLYNIYPRTGPPSYAKDDEVICTSFYSKIHPLENGEIHISLINGRPSADDPSPELLEFTSARYIRLRFQRIRTLNADLMMFAHKDPREIDPIVTRRYYYSVKDISVGGMCICYGHARACPLDPATNKSRCECEHNTCGDSCDQCCPGFHQKPWRAGTFLTKTECEACNCHGKAEECYYDENVARRNLSLNIRGKYIGGGVCINCTQNTAGINCETCTDGFFRPKGVSPNYPRPCQPCHCDPIGSLNEVCVKDEKHARRGLAPGSCHCKTGFGGVSCDRCARGYTGYPDCKACNCSGLGSKNEDPCFGPCICKENVEGGDCSRCKSGFFNLQEDNWKGCDECFCSGVSNRCQSSYWTYGKIQDMSGWYLTDLPGRIRVAPQQDDLDSPQQISISNAEARQALPHSYYWSAPAPYLGNKLPAVGGQLTFTISYDLEEEEEDTERVLQLMIILEGNDLSISTAQDEVYLHPSEEHTNVLLLKEESFTIHGTHFPVRRKEFMTVLANLKRVLLQITYSFGMDAIFRLSSVNLESAVSYPTDGSIAAAVEVCQCPPGYTGSSCESCWPRHRRVNGTIFGGICEPCQCFGHAESCDDVTGECLNCKDHTGGPYCDKCLPGFYGEPTKGTSEDCQPCACPLNIPSNNFSPTCHLDRSLGLICDGCPVGYTGPRCERCAEGYFGQPSVPGGSCQPCQCNDNLDFSIPGSCDSLSGSCLICKPGTTGRYCELCADGYFGDAVDAKNCQPCRCNAGGSFSEVCHSQTGQCECRANVQGQRCDKCKAGTFGLQSARGCVPCNCNSFGSKSFDCEESGQCWCQPGVTGKKCDRCAHGYFNFQEGGCTACECSHLGNNCDPKTGRCICPPNTIGEKCSKCAPNTWGHSITTGCKACNCSTVGSLDFQCNVNTGQCNCHPKFSGAKCTECSRGHWNYPRCNLCDCFLPGTDATTCDSETKKCSCSDQTGQCTCKVNVEGIHCDRCRPGKFGLDAKNPLGCSSCYCFGTTTQCSEAKGLIRTWVTLKAEQTILPLVDEALQHTTTKGIVFQHPEIVAHMDLMREDLHLEPFYWKLPEQFEGKKLMAYGGKLKYAIYFEAREETGFSTYNPQVIIRGGTPTHARIIVRHMAAPLIGQLTRHEIEMTEKEWKYYGDDPRVHRTVTREDFLDILYDIHYILIKATYGNFMRQSRISEISMEVAEQGRGTTMTPPADLIEKCDCPLGYSGLSCEACLPGFYRLRSQPGGRTPGPTLGTCVPCQCNGHSSLCDPETSICQNCQHHTAGDFCERCALGYYGIVKGLPNDCQQCACPLISSSNNFSPSCVAEGLDDYRCTACPRGYEGQYCERCAPGYTGSPGNPGGSCQECECDPYGSLPVPCDPVTGFCTCRPGATGRKCDGCKHWHAREGWECVFCGDECTGLLLGDLARLEQMVMSINLTGPLPAPYKMLYGLENMTQELKHLLSPQRAPERLIQLAEGNLNTLVTEMNELLTRATKVTADGEQTGQDAERTNTRAKSLGEFIKELARDAEAVNEKAIKLNETLGTRDEAFERNLEGLQKEIDQMIKELRRKNLETQKEIAEDELVAAEALLKKVKKLFGESRGENEEMEKDLREKLADYKNKVDDAWDLLREATDKIREANRLFAVNQKNMTALEKKKEAVESGKRQIENTLKEGNDILDEANRLADEINSIIDYVEDIQTKLPPMSEELNDKIDDLSQEIKDRKLAEKVSQAESHAAQLNDSSAVLDGILDEAKNISFNATAAFKAYSNIKDYIDEAEKVAKEAKDLAHEATKLATGPRGLLKEDAKGCLQKSFRILNEAKKLANDVKENEDHLNGLKTRIENADARNGDLLRTLNDTLGKLSAIPNDTAAKLQAVKDKARQANDTAKDVLAQITELHQNLDGLKKNYNKLADSVAKTNAVVKDPSKNTVADADATVKNLEQEADRLIDKLKPIKELEDNLKKNISEIKELINQARKQANSIKVSVSSGGDCIRTYKPEIKKGSYNNIVVNVKTAVADNLLFYLGSAKFIDFLAIEMRKGKVSFLWDVGSGVGRVEYPDLTIDDSYWYRIVASRTGRNGTISVRALDGPKASIVPSTHHSTSPPGYTILDVDANAMLFVGGLTGKLKKADAVRVITFTGCMGETYFDNKPIGLWNFREKEGDCKGCTVSPQVEDSEGTIQFDGEGYALVSRPIRWYPNISTVMFKFRTFSSSALLMYLATRDLRDFMSVELTDGHIKVSYDLGSGMASVVSNQNHNDGKWKSFTLSRIQKQANISIVDIDTNQEENIATSSSGNNFGLDLKADDKIYFGGLPTLRNLSMKARPEVNLKKYSGCLKDIEISRTPYNILSSPDYVGVTKGCSLENVYTVSFPKPGFVELSPVPIDVGTEINLSFSTKNESGIILLGSGGTPAPPRRKRRQTGQAYYAILLNRGRLEVHLSTGARTMRKIVIRPEPNLFHDGREHSVHVERTRGIFTVQVDENRRYMQNLTVEQPIEVKKLFVGGAPPEFQPSPLRNIPPFEGCIWNLVINSVPMDFARPVSFKNADIGRCAHQKLREDEDGAAPAEIVIQPEPVPTPAFPTPTPVLTHGPCAAESEPALLIGSKQFGLSRNSHIAIAFDDTKVKNRLTIELEVRTEAESGLLFYMARINHADFATVQLRNGLPYFSYDLGSGDTHTMIPTKINDGQWHKIKIMRSKQEGILYVDGASNRTISPKKADILDVVGMLYVGGLPINYTTRRIGPVTYSIDGCVRNLHMAEAPADLEQPTSSFHVGTCFANAQRGTYFDGTGFAKAVGGFKVGLDLLVEFEFRTTTTTGVLLGISSQKMDGMGIEMIDEKLMFHVDNGAGRFTAVYDAGVPGHLCDGQWHKVTANKIKHRIELTVDGNQVEAQSPNPASTSADTNDPVFVGGFPDDLKQFGLTTSIPFRGCIRSLKLTKGTGKPLEVNFAKALELRGVQPVSCPAN

SEQ ID NO: 23084 - protein, 2431 aa, Homo sapiens
MKGTDSGSCCRRRCDFGCCCRASRRAHYTPYRSGDATRTPQSPRQTPSRERRRPEPAGSWAAAAEEEEAAAAATPWMRDYFAEDDGEMVPRTSHTAAFLSDTKDRGPPVQSQIWRSGEKVPFVQTYSLRAFEKPPQVQTQALRDFEKHLNDLKKENFSLKLRIYFLEERMQQKYEASREDIYKRNIELKVEVESLKRELQDKKQHLDKTWADVENLNSQNEAELRRQFEERQQETEHVYELLENKIQLLQEESRLAKNEAARMAALVEAEKECNLELSEKLKGVTKNWEDVPGDQVKPDQYTEALAQRDKRIEELNQSLAAQERLVEQLSREKQQLLHLLEEPTSMEVQPMTEELLKQQKLNSHETTITQQSVSDSHLAELQEKIQQTEATNKILQEKLNEMSYELKCAQESSQKQDGTIQNLKETLKSRERETEELYQVIEGQNDTMAKLREMLHQSQLGQLHSSEGTSPAQQQVALLDLQSALFCSQLEIQKLQRVVRQKERQLADAKQCVQFVEAAAHESEQQKEASWKHNQELRKALQQLQEELQNKSQQLRAWEAEKYNEIRTQEQNIQHLNHSLSHKEQLLQEFRELLQYRDNSDKTLEANEMLLEKLRQRIHDKAVALERAIDEKFSALEEKEKELRQLRLAVRERDHDLERLRDVLSSNEATMQSMESLLRAKGLEVEQLSTTCQNLQWLKEEMETKFSRWQKEQESIIQQLQTSLHDRNKEVEDLSATLLCKLGPGQSEIAEELCQRLQRKERMLQDLLSDRNKQVLEHEMEIQGLLQSVSTREQESQAAAEKLVQALMERNSELQALRQYLGGRDSLMSQAPISNQQAEVTPTGRLGKQTDQGSMQIPSRDDSTSLTAKEDVSIPRSTLGDLDTVAGLEKELSNAKEELELMAKKERESQMELSALQSMMAVQEEELQVQAADMESLTRNIQIKEDLIKDLQMQLVDPEDIPAMERLTQEVLLLREKVASVESQGQEISGNRRQQLLLMLEGLVDERSRLNEALQAERQLYSSLVKFHAHPESSERDRTLQVELEGAQVLRSRLEEVLGRSLERLNRLETLAAIGGAAAGDDTEDTSTEFTDSIEEEAAHHSHQQLVKVALEKSLATVETQNPSFSPPSPMGGDSNRCLQEEMLHLRAEFHQHLEEKRKAEEELKELKAQIEEAGFSSVSHIRNTMLSLCLENAELKEQMGEAMSDGWEIEEDKEKGEVMVETVVTKEGLSESSLQAEFRKLQGKLKNAHNIINLLKEQLVLSSKEGNSKLTPELLVHLTSTIERINTELVGSPGKHQHQEEGNVTVRPFPRPQSLDLGATFTVDAHQLDNQSQPRDPGPQSAFSLPGSTQHLRSQLSQCKQRYQDLQEKLLLSEATVFAQANELEKYRVMLSESLVKQDSKQIQVDLQDLGYETCGRSENEAEREETTSPECEEHNSLKEMVLMEGLCSEQGRRGSTLASSSERKPLENQLGKQEEFRVYGKSENILVLRKDIKDLKAQLQNANKVIQNLKSRVRSLSVTSDYSSSLERPRKLRAVGTLEGSSPHSVPDEDEGWLSDGTGAFYSPGLQAKKDLESLIQRVSQLEAQLPKNGLEEKLAEELRSASWPGKYDSLIQDQARELSYLRQKIREGRGICYLITRHAKDTVKSFEDLLRSNDIDYYLGQSFREQLAQGSQLTERLTSKLSTKDHKSEKDQAGLEPLALRLSRELQEKEKVIEVLQAKLDARSLTPSSSHALSDSHRSPSSTSFLSDELEACSDMDIVSEYTHYEEKKASPSHSGFHFHSIPKLASLPQAPLPSAPSSFLPFSPTGPLLLGCCETPVVSLAEAQQELQMLQKQLGESASTVPPASTATLLSNDLEADSSYYLNSAQPHSPPRGTIELGRILEPGYLGSSGKWDVMRPQKGSVSGDLSSGSSVYQLNSKPTGADLLEEHLGEIRNLRQRLEESICINDRLREQLEHRLTSTARGRGSTSNFYSQGLESIPQLCNENRVLREDNRRLQAQLSHVSREHSQETESLREALLSSRSHLQELEKELEHQKVERQQLLEDLREKQQEVLHFREERLSLQENDSRLQHKLVLLQQQCEEKQQLFESLQSELQIYEALYGNSKKGLKAYSLDACHQIPLSSDLSHLVAEVRALRGQLEQSIQGNNCLRLQLQQQLESGAGKASLSPSSINQNFPASTDPGNKQLLLQDSAVSPPVRDVGMNSPALVFPSSASSTPGSETPIINRANGLGLDTSPVMKTPPKLEGDATDGSFANKHGRHVIGHIDDYSALRQQIAEGKLLVKKIVSLVRSACSFPGLEAQGTEVLGSKGIHELRSSTSALHHALEESASLLTMFWRAALPSTHIPVLPGKVGESTERELLELRTKVSKQERLLQSTTEHLKNANQQKESMEQFIVSQLTRTHDVLKKARTNLEVKSLRALPCTPAL

SEQ ID NO: 23085 - protein, 1637 aa, Homo sapiens
MEDEERQKKLEAGKAKVGELIFFFLAQFRQRKAQSDGQSPSKKQKKKRKTSSSKHDVSAHHDLNIDQSQCNEMYINSSQRVESTVIPESTIMRTLHSGEITSHEQGFSVELESEISTTADDCSSEVNGCSFVMRTGKPTNLLREEEFGVDDSYSEQGAQDSPTHLEMMESELAGKQHEIEELNRELEEMRVTYGTEGLQQLQEFEAAIKQRDGIITQLTANLQQARREKDETMREFLELTEQSQKLQIQFQQLQASETLRNSTHSSTAADLLQAKQQILTHQQQLEEQDHLLEDYQKKKEDFTMQISFLQEKIKVYEMEQDKKVENSNKEEIQEKETIIEELNTKIIEEEKKTLELKDKLTTADKLLGELQEQIVQKNQEIKNMKLELTNSKQKERQSSEEIKQLMGTVEELQKRNHKDSQFETDIVQRMEQETQRKLEQLRAELDEMYGQQIVQMKQELIRQHMAQMEEMKTRHKGEMENALRSYSNITVNEDQIKLMNVAINELNIKLQDTNSQKEKLKEELGLILEEKCALQRQLEDLVEELSFSREQIQRARQTIAEQESKLNEAHKSLSTVEDLKAEIVSASESRKELELKHEAEVTNYKIKLEMLEKEKNAVLDRMAESQEAELERLRTQLLFSHEEELSKLKEDLEIEHRINIEKLKDNLGIHYKQQIDGLQNEMSQKIETMQFEKDNLITKQNQLILEISKLKDLQQSLVNSKSEEMTLQINELQKEIEILRQEEKEKGTLEQEVQELQLKTELLEKQMKEKENDLQEKFAQLEAENSILKDEKKTLEDMLKIHTPVSQEERLIFLDSIKSKSKDSVWEKEIEILIEENEDLKQQCIQLNEEIEKQRNTFSFAEKNFEVNYQELQEEYACLLKVKDDLEDSKNKQELEYKSKLKALNEELHLQRINPTTVKMKSSVFDEDKTFVAETLEMGEVVEKDTTELMEKLEVTKREKLELSQRLSDLSEQLKQKHGEISFLNEEVKSLKQEKEQVSLRCRELEIIINHNRAENVQSCDTQVSSLLDGVVTMTSRGAEGSVSKVNKSFGEESKIMVEDKVSFENMTVGEESKQEQLILDHLPSVTKESSLRATQPSENDKLQKELNVLKSEQNDLRLQMEAQRICLSLVYSTHVDQVREYMENEKDKALCSLKEELIFAQEEKIKELQKIHQLELQTMKTQETGDEGKPLHLLIGKLQKAVSEECSYFLQTLCSVLGEYYTPALKCEVNAEDKENSGDYISENEDPELQDYRYEVQDFQENMHTLLNKVTEEYNKLLVLQTRLSKIWGQQTDGMKLEFGEENLPKEETEFLSIHSQMTNLEDIDVNHKSKLSSLQDLEKTKLEEQVQELESLISSLQQQLKETEQNYEAEIHCLQKRLQAVSESTVPPSLPVDSVVITESDAQRTMYPGSCVKKNIDGTIEFSGEFGVKEETNIVKLLEKQYQEQLEEEVAKVIVSMSIAFAQQTELSRISGGKENTASSKQAHAVCQQEQHYFNEMKLSQDQIGFQTFETVDVKFKEEFKPLSKELGEHGKEILLSNSDPHDIPESKDCVLTISEEMFSKDKTFIVRQSIHDEISVSSMDASRQLMLNEEQLEDMRQELVRQYQEHQQATELLRQAHMRQMERQREDQEQTRRD

SEQ ID NO: 23086 - protein, 319 aa, Homo sapiens
MAAAVAAALARLLAAFLLLAAQVACEYGMVHVVSQAGGPEGKDYCILYNPQWAHLPHDLSKASFLQLRNWTASLLCSAADLPARGFSNQIPLVARGNCTFYEKVRLAQGSGARGLLIVSRERLVPPGGNKTQYDEIGIPVALLSYKDMLDIFTRFGRTVRAALYAPKEPVLDYNMVIIFIMAVGTVAIGGYWAGSRDVKKRYMKHKRDDGPEKQEDEAVDVTPVMTCVFVVMCCSMLVLLYYFYDLLVYVVIGIFCLASATGLYSCLAPCVRRLPFGKCRIPNNSLPYFHKRPQARMLLLALFCVAVSVVWGVFRNEDQ

SEQ ID NO: 23087 - protein, 844 aa, Homo sapiens
MRLILPQLERERMAYGIKETMLAKLYIELLNLPRDGKDALKLLNYRTPTGTHGDAGDFAMIAYFVLKPRCLQKGSLTIQQVNDLLDSIASNNSAKRKDLIKKSLLQLITQSSALEQKWLIRMIIKDLKLGVSQQTIFSVFHNDAAELHNVTTDLEKVCRQLHDPSVGLSDISITLFSAFKPMLAAIADIEHIEKDMKHQSFYIETKLDGERMQMHKDGDVYKYFSRNGYNYTDQFGASPTEGSLTPFIHNAFKADIQICILDGEMMAYNPNTQTFMQKGTKFDIKRMVEDSDLQTCYCVFDVLMVNNKKLGHETLRKRYEILSSIFTPIPGRIEIVQKTQAHTKNEVIDALNEAIDKREEGIMVKQPLSIYKPDKRGEGWLKIKPEYVSGLMDELDILIVGGYWGKGSRGGMMSHFLCAVAEKPPPGEKPSVFHTLSRVGSGCTMKELYDLGLKLAKYWKPFHRKAPPSSILCGTEKPEVYIEPCNSVIVQIKAAEIVPSDMYKTGCTLRFPRIEKIRDDKEWHECMTLDDLEQLRGKASGKLASKHLYIGGDDEPQEKKRKAAPKMKKVIGIIEHLKAPNLTNVNKISNIFEDVEFCVMSGTDSQPKPDLENRIAEFGGYIVQNPGPDTYCVIAGSENIRVKNIILSNKHDVVKPAWLLECFKTKSFVPWQPRFMIHMCPSTKEHFAREYDCYGDSYFIDTDLNQLKEVFSGIKNSNEQTPEEMASLIADLEYRYSWDCSPLSMFRRHTVYLDSYAVINDLSTKNEGTRLAIKALELRFHGAKVVSCLAEGVSHVIIGEDHSRVADFKAFRRTFKRKFKILKESWVTDSIDKCELQEENQYLI

SEQ ID NO: 23088 - protein, 468 aa, Homo sapiens
MLPPWTLGLLLLATVRGKEVCYGQLGCFSDEKPWAGTLQRPVKLLPWSPEDIDTRFLLYTNENPNNFQLITGTEPDTIEASNFQLDRKTRFIIHGFLDKAEDSWPSDMCKKMFEVEKVNCICVDWRHGSRAMYTQAVQNIRVVGAETAFLIQALSTQLGYSLEDVHVIGHSLGAHTAAEAGRRLGGRVGRITGLDPAGPCFQDEPEEVRLDPSDAVFVDVIHTDSSPIVPSLGFGMSQKVGHLDFFPNGGKEMPGCKKNVLSTITDIDGIWEGIGGFVSCNHLRSFEYYSSSVLNPDGFLGYPCASYDEFQESKCFPCPAEGCPKMGHYADQFKGKTSAVEQTFFLNTGESGNFTSRYKISVTLSGKEKVNGYIRIALYGSNENSKQYEIFKGSLKPDASHTCAIDVDFNVGKIQKVKFLWNKRGINLSEPKLGASQITVQSGEDGTEYNFCSSDTVEENVLQSLYPC

SEQ ID NO: 23089 - protein, 320 aa, Homo sapiens [sequence omitted]

SEQ ID NO: 23090 - protein, 324 aa, Homo sapiens
MLPEDKEADSLRGNISVKAVKKEVEKKLRCLLADLPLPPELPGGDDLSKSPEEKKTATQLHSKRRPKICGPRYGETKEKDIDWGKRCVDKFDIIGIIGEGTYGQVYKARDKDTGEMVALKKVRLDNEKEGFPITAIREIKILRQLTHQSIINMKEIVTDKEDALDFKKDKGAFYLVFEYMDHDLMGLLESGLVHFNENHIKSFMRQLMEGLDYCHKKNFLHRDIKCSNILLNNRGQIKLADFGLARLYSSEESRPYTNKVITLWYRPPELLLGEERYTPAIDVWSCGCILGELFTKKPIFQANQELAQLELIRHEENEVSDKQI

SEQ ID NO: 23091 - protein, 509 aa, Homo sapiens
MSGSSGPAPTPAVTKARRGDLTLQHGGGGRLGPRVGALTAAGGPCRKQLPPPPLSSLLGQGPGPGVQLDIASQSLDQEILLKVKTEIEEELKSLDKEISEAFTSTGFDRHTSPVFSPANPESSMEDCLAHLGEKVSQELKEPLHKALQMLLSQPVTYQAFRECTLETTVHASGWNKILVPLVLLRQMLLELTRRGQEPLSALLQFGVTYLEDYSAEYIIQQGGWGTVFSLESEEEEYPGITAEDSNDIYILPSDNSGQVSPPESPTVTTSWQSESLPVSLSASQSWHTESLPVSLGPESWQQIAMDPEEVKSLDSNGAGEKSENNSSNSDIVHVEKEEVPEGMEEAAVASVVLPARELQEALPEAPAPLLPHITATSLLGTREPDTEVITVEKSSPATSLFVELDEEEVKAATTEPTEVEEVVPALEPTETLLSEKEINAREESLVEELSPASEKKPVPPSEGKSRLSPAGEMKPMPLSEGKSILLFGGAAAVAILAVAIGVALALRKK

SEQ ID NO: 23092 - protein, 822 aa, Homo sapiens
MPKSTGMLHGGRENAGVKFSSCVGTKGTQYETNSMDFKPQKGKKVVALDPSPPPKDTLLPWPQHQNANGLRRRKRDWVIPPINVPENSRGPFPQQLVRIRSDKDNDIPIRYSITGVGADQPPMEVFSIDSMSGRMYVTRPMDREEHASYHLRAHAVDMNGNKVENPIDLYIYVIDMNDNRPEFINQVYNGSVDEGSKPGTYVMTVTANDADDSTTANGMVRYRIVTQTPQSPSQNMFTINSETGDIVTVAAGLDREKVQQYTVIVQATDMEGNLNYGLSNTATAIITVTDVNDNPPEFTASTFAGEVPENRVETVVANLTVMDRDQPHSPNWNAVYRIISGDPSGHFSVRTDPVTNEGMVTVVKAVDYELNRAFMLTVMVSNQAPLASGIQMSFQSTAGVTISIMDINEAPYFPSNHKLIRLEEGVPPGTVLTTFSAVDPDRFMQQAVRYSKLSDPASWLHINATNGQITTAAVLDRESLYTKNNVYEATFLAADNGIPPASGTGTLQIYLIDINDNAPELLPKEAQICEKPNLNAINITAADADVDPNIGPYVFELPFVPAAVRKNWTITRLNGDYAQLSLRILYLEAGMYDVPIIVTDSGNPPLSNTSIIKVKVCPCDDNGDCTTIGAVAAAGLGTGAIVAILICILILLTMVLLFVMWMKRREKERHTKQLLIDPEDDVRDNILKYDEEGGGEEDQDYDLSQLQQPEAMGHVPSKAPGVRRVDERPVGAEPQYPIRPMVPHPGDIGDFINEGLRAADNDPTAPPYDSLLVFDYEGSGSTAGSVSSLNSSSSGDQDYDYLNDWGPRFKKLADMYGGGEED

SEQ ID NO: 23093 - protein, 559 aa, Homo sapiens
MPDPDFTVRDVKLLVGSRRLVDVMDVNTQKGTEMSMSQFVRYYETPEAQRDKLYNVISLEFSHTKLEHLVKRPTVVDLVDWVDNMWPQHLKEKQTEATNAIAEMKYPKVKKYCLMSVKGCFTDFHIDFGGTSVWYHVFRGGKIFWLIPPTLHNLALYEEWVLSGKQSDIFLGDRVERCQRIELKQGYTFFIPSGWIHAVYTPVDSLVFGGNILHSFNVPMQLRIYEIEDRTRVQPKFRYPFYYEMCWYVLERYVYCVTQRSHLTQEYQRESMLIDAPRKPSIDGFSSDSWLEMEEEACDQQPQEEEEKDEEGEGRDRAPKPPTDGSTSPTSTPSEDQEALGKKPKAPALRFLKRTLSNESEESVKSTTLAVDYPKTPTGSPATEVSAKWTHLTEFELKGLKALVEKLESLPENKKCVPEGIEDPQALLEGVKNVLKEHADDDPSLAITGVPVVTWPKKTPKNRAVGRPKGKLGPASAVKLAANRTTAGARRRRTRCRKCEACLRTECGECHFCKDMKKFGGPGRMKQSCIMRQCIATAIRSLISACPSSNAVETSVILT

SEQ ID NO: 23094 - protein, 304 aa, Homo sapiens
MRAISWTMKKKVGKKYIKALSEEKDEEDGENAHPYRNSDPVIGTHTEKVSLKASDSMDSLYSGQSSSSGITSCSDGTSNRDSFRLDDDGPYSGPFCGRARVHTDFTPSPYDTDSLKIKKGDIIDIICKTPMGMWTGMLNNKVGNFKFIYVDVISEEEAAPKKIKANRRSNSKKSKTLQEFLERIHLQEYTSTLLLNGYETLEDLKDIKESHLIELNIENPDDRRRLLSAAENFLEEEIIQEQENEPEPLSLSSDISLNKSQLDDCPRDSGCYISSGNSDNGKEDLESENLSDMVHKIIITEPSD

SEQ ID NO: 23095 - protein, 828 aa, Homo sapiens
MAAPTKCQLRGRLVLLCSLLGMLWEARASQIRYSVPEETEKGYIVGNISKDLALEPRELAERRVRIVSRGRTQLFSLNPRSGTLVTAGRIDREELCAQSPRCLVNFKVLVEDRVKLYGIEIEVTDINDSAPKFQAESLEVKINEIAVPGARYPLPEAIDPDVGVNSLQSYQLSPNHHFSLNVQTGDNGAINPELVLERALDREEATAHHLVLTASDGGEPRRSSTVRIHVTVLDTNDNAPVFAQRIYRVKVLENVPPGTWLLTATASDLDEGINGKVAYKFWKINEKQSLLFQLNENTGEISTAKSLDYEECSFYEMEIQAEDGGGLKGWTKVLISVEDVNDNRPEVTITSLFSPVREDAPQGTVILLFNAHDRDSGKNGQVVCSIQENLSFTLENSEEDYYRLLTAQILDREKASEYNITVTATDRGTPPLSTEIHITLQVTDINDNPPAFSQASYSVYLPENNARGTSIFSVIAYDPDSNENSRVIYSLAEDTIQGSPLSTYVSINSDTGVLYALCSFDYEQFRDLQMQVTASDSGSPPLSSNVSLRLFVLDQNDNAPEILYPALPTDGSTGVELAPRSAEPGYLVTKVVAVDRDSGQNAWLSYRLFKASEPGLFSVGLHTGEVRTARALLDRDALKQSLVVAVQDHGQPPLSATVTLTVAIADSIPDILADLGSLQIPADLEASDLTLYLVVAVAVVSCVFLTFVITLLALRLRHWHSSHLLRATSDGLAGVPTSHFVGVDGVRAFLQTYSQEFSLTADSRKSHLIFPQPNYADTLISQQSCEKNEPLCVSVDSKFPIEDTPLVPVSSFFFFLSFLFLFFVLFCF

SEQ ID NO: 23096 - protein, 1275 aa, Homo sapiens
MAGVGAAALSLLLHLGALALAAGAEGGAVPREPPGQQTTAHSSVLAGNSQEQWHPLREWLGRLEAAVMELREQNKDLQTRVRQLESCECHPASPQCWGLGRAWPEGARWEPDACTACVCQDGAAHCGPQAHLPHCRGCSQNGQTYGNGETFSPDACTTCRCLTGAVQCQGPSCSELNCLESCTPPGECCPICRPGCDYEGQLYEEGVTFLSSSNPCLQCTCLRSRVRCMALKCPPSPCPEPVLRPGHCCPTCQGCTEGGSHWEHGQEWTTPGDPCRICRCLEGHIQCRQRECASLCPYPARPLPGTCCPVCDGCFLNGREHRSGEPVGSGDPCSHCRCANGSVQCEPLPCPPVPCRHPGKIPGQCCPVCDGCEYQGHQYQSQETFRLQERGLCVRCSCQAGEVSCEEQECPVTPCALPASGRQLCPACELDGEEFAEGVQWEPDGRPCTACVCQDGVPKCGAVLCPPAPCQHPTQPPGACCPSCDSCTYHSQVYANGQNFTDADSPCHACHCQDGTVTCSLVDCPPTTCARPQSGPGQCCPRCPDCILEEEVFVDGESFSHPRDPCQECRCQEGHAHCQPRPCPRAPCAHPLPGTCCPNDCSGCAFGGKEYPSGADFPHPSDPCRLCRCLSGNVQCLARRCVPLPCPEPVLLPGECCPQCPAAPAPAGCPRPGAAHARHQEYFSPPGDPCRRCLCLDGSVSCQRLPCPPAPCAHPRQGPCCPSCDGCLYQGKEFASGERFPSPTAACHLCLCWEGSVSCEPKACAPALCPFPARGDCCPDCDGCEYLGESYLSNQEFPDPREPCNLCTCLGGFVTCGRRPCEPPGCSHPLIPSGHCCPTCQGCRYHGVTTASGETLPDPLDPTCSLCTCQEGSMRCQKKPCPPALCPHPSPGPCFCPVCHSCLSQGREHQDGEEFEGPAGSCEWCRCQAGQVSCVRLQCPPLPCKLQVTERGSCCPRCRGCLAHGEEHPEGSRWVPPDSACSSCVCHEGVVTCARIQCISSCAQPRQGPHDCCPQCSDCEHEGRKYEPGESFQPGADPCEVCICEPQPEGPPSLRCHRRQCPSLVGCPPSQLLPPGPQHCCPTCAEALSNCSEGLLGSELAPPDPCYTCQCQDLTWLCIHQACPELSCPLSERHTPPGSCCPVCRAPTQSCVHQGREVASGERWTVDTCTSCSCMAGTVRCQSQRCSPLSCGPDKAPALSPGSCCPRCLPRPASCMAFGDPHYRTFDGRLLHFQGSCSYVLAKDCHSGDFRWMGTRWPCPSCRSRCCMWSCEDTL

SEQ ID NO: 23097 - protein, 307 aa, Homo sapiens
MDDLMLSPDDIEQWFTEDPGPDEAPRMPEAAPPVAPAPAAPTPAAPAPAPSWPLSSSVPSQKTYQGSYGFRLGFLHSGTAKSVTCTYSPALNKMFCQLAKTCPVQLWVDSTPPPGTRVRAMAIYKQSQHMTEVVRRCPHHERCSDSDGLAPPQHLIRVEGNLRVEYLDDRNTFRHSVVVPYEPPEVGSDCTTIHYNYMCNSSCMGGMNRRPILTIITLEDSSGNLLGRNSFEVRVCACPGRDRRTEEENLRKKGEPHHELPPGSTKRALPNNTSSSPQPKKKPLDGEYFTLQMLLDLRWCYFLINSS

SEQ ID NO: 23098 - protein, 556 aa, Homo sapiens
MSKGILQVHPPICDCPGCRISSPVNRGRLADKRTVALPAARNLKKERTPSFSASDGDSDGSGPTCGRRPGLKQEDGPHIRIMKRSQDGNLPTLISSVHRSRHLVMPEHQSRCEFQRGSLEIGLRPAGDLLGKRLGRSPRISSDCFSEKRARSESPQAEALLLPRELGPSMAPEDHYRRLVSALSEASTFEDPQRLYHLGLPSHGYGFLPPAQAEMFAWQQELLRKQNLARLELPADLLRQKELESARPQLLAPETALRPNDGAEELQRRGALLVLNHGAAPLLALPPQGPPGSGPPTPSRDSARRAPRKGGPGPASARPSESKEMTGARLWAQDGSEDEPPKDSDGEDPETAAVGCRGPTPGQAPAGGAGAEGKGLFPGSTLPLGFPYAVSPYFHTGAVGGLSMDGEEAPAPEDVTKWTVDDVCSFVGGLSGCGEYTRVFREQGIDGETLPLLTEEHLLTNMGLKLGPALKIRAQVARRLGRVFYVASFPVALPLQPPTLRAPERELGTGEQPLSPTTATSPYGGGHALAGQTSPKQENGTLALLPGAPDPSQPLC

SEQ ID NO: 23099 - protein, 336 aa, Homo sapiens
MPLRDKYCQTDHHHHGCCEPVYILEPGDPPLLQQPLQTSKSGIQQIIECFRSGTKQLKHILLKDVDTIFECKLCRSLFRGLPNLITHKKFYCPPSLQMDDNLPDVNDKQSQAINDLLEAIYPSVDKREYIIKLEPIETNQNAVFQYISRTDNPIEVTESSSTPEQTEVQIQETSTEQSKTVPVTDTEVETVEPPPVEIVTDEVAPTSDEQPQESQADLETSDNSDFGHQLICCLCRKEFNSRRGVRRHIRKVHKKKMEELKKYIETRKNPNQSSKGRSKNVLVPLSRSCPVCCKSFATKANVRRHFDEVHRGLRRDSITPDIATKPGQPLFLDSIS

SEQ ID NO: 23100 - protein, 384 aa, Homo sapiens
MWQAPRERQQPAGAAAPQVSEPGAPLRSSLLGLGGSLLPAGFAAGLHCPGEPAMRGYLVAIFLSAVFLYYVLHCILWGTNVYWVAPVEMKRRNKIQPCLSKPAFASLLRFHQFHPFLCAADFRKIASLYGSDKFDLPYGMRTSAEYFRLALSKLQSCDLFDEFDNIPCKKCVVVGNGGVLKNKTLGEKIDSYDVIIRMNNGPVLGHEEEVGRRTTFRLFYPESVFSDPIHNDPNTTVILTAFKPHDLRWLLELLMGDKINTNGFWKKPALNLIYKPYQIRILDPFIIRTAAYELLHFPKVFPKNQKPKHPTTGIIAITLAFYICHEVHLAGFKYNFSDLKSPLHYYGNATMSLMNKNAYHNVTAEQLFLKDIIEKNLVINLTQD

SEQ ID NO: 23101 - protein, 620 aa, Homo sapiens
MATKEKLQCLKDFHKDILKPSPGKSPGTRPEDEAEGKPPQREKWSSKIDFVLSVAGGFVGLGNVWRFPYLCYKNGGGAFLIPYFIFLFGSGLPVFFLEIIIGQYTSEGGITCWEKICPLFSGIGYASVVIVSLLNVYYIVILAWATYYLFQSFQKELPWAHCNHSWNTPHCMEDTMRKNKSVWITISSTNFTSPVIEFWERNVLSLSPGIDHPGSLKWDLALCLLLVWLVCFFCIWKGVRSTGKVVYFTATFPFAMLLVLLVRGLTLPGAGAGIKFYLYPDITRLEDPQVWIDAGTQIFFSYAICLGAMTSLGSYNKYKYNSYRDCMLLGCLNSGTSFVSGFAIFSILGFMAQEQGVDIADVAESGPGLAFIAYPKAVTMMPLPTFWSILFFIMLLLLGLDSQFVEVEGQITSLVDLYPSFLRKGYRREIFIAFVCSISYLLGLTMVTEGGMYVFQLFDYYAASGVCLLWVAFFECFVIAWIYGGDNLYDGIEDMIGYRPGPWMKYSWAVITPVLCVGCFIFSLVKYVPLTYNKTYVYPNWAIGLGWSLALSSMLCVPLVIVIRLCQTEGPFLVRVKYLLTPREPNRWAVEREGATPYNSRTVMNGALVKPTHIIVETMM

SEQ ID NO: 23102 - protein, 1122 aa, Homo sapiens
MSLQEMFRFPMGLLLGSVLLVASAPATLEPPGCSNKEQQVTVSHTYKIDVPKSALVQVDADPQPLSDDGASLLALGEAREEQNIIFRHNIRLQTPQKDCELAGSVQDLLARVKKLEEEMVEMKEQCSAQRCCQGVTDLSRHCSGHGTFSLETCSCHCEEGREGPACERLACPGACSGHGRCVDGRCLCHEPYVGADCGYPACPENCSGHGECVRGVCQCHEDFMSEDCSEKRCPGDCSGHGFCDTGECYCEEGFTGLDCAQVVTPQGLQLLKNTEDSLLVSWEPSSQVDHYLLSYYPLGKELSGKQIQVPKEQHSYEILGLLPGTKYIVTLRNVKNEVSSSPQHLLATTDLAVLGTAWVTDETENSLDVEWENPSTEVDYYKLRYGPMTGQEVAEVTVPKSSDPKSRYDITGLHPGTEYKITVVPMRGELEGKPILLNGRTEIDSPTNVVTDRVTEDTATVSWDPVQAVIDKYVVRYTSADGDTKEMAVHKDESSTVLTGLKPGEAYKVYVWAERGNQGSKKADTNALTDIDSPQNLVTDRVTENMATVSWDPVRATIDRYVVRYTSAKDGETREVPVGKEQSSTVLTGLRPGVEYTVHVWAQKGAQESKKADTKAQTDIDSPQNLVTDWVTENTATVSWDPVQATIDRYVVHYTSANGETREVPVGKEQSSTVLTGLRPGMEYTVHVWAQKGNQESKKADTKAQTEIDGPKNLVTDWVTENMATVSWDPVQATIDKYMVRYTSADGETREVPVGKEHSSTVLTGLRPGMEYMVHVWAQKGAQESKKADTKAQTELDPPRNLRPSAVTQSGGILTWTPPSAQIHGYILTYQFPDGTVKEMQLGREDQRFALQGLEQGATYPVSLVAFKGGRRSRNVSTTLSTVGARFPHPSDCSQVQQNSNAASGLYTIYLHGDASRPLQVYCDMETDGGGWIVFQRRNTGQLDFFKRWRSYVEGFGDPMKEFWLGLDKLHNLTTGTPARYEVRVDLQTANESAYAIYDFFQVASSKERYKLTVGKYRGTAGDALTYHNGWKFTTFDRDNDIALSNCALTHHGGWWYKNCHLANPNGRYGETKHSEGVNWEPWKGHEFSIPYVELKIRPHGYSREPVLGRKKRTLRGRLRTF

SEQ ID NO: 23103 - protein, 726 aa, Homo sapiens
MEPGDAARPGSGRATGAPPPRLLLLPLLLGWGLRVAAAASASSSGAAAEDSSAMEELATEKEAEESHRQDSVSLLTFILLLTLTILTIWLFKHRRVRFLHETGLAMIYGLIVGVILRYGTPATSGRDKSLSCTQEDRAFSTLLVNVSGKFFEYTLKGEISPGKINSVEQNDMLRKVTFDPEVFFNILLPPIIFHAGYSLKKRHFFRNLGSILAYAFLGTAVSCFIIGNLMYGVVKLMKIMGQLSDKFYYTDCLFFGAIISATDPVTVLAIFNELHADVDLYALLFGESVLNDAVAIVLSSSIVAYQPAGLNTHAFDAAAFFKSVGIFLGIFSGSFTMGAVTGVVTALVTKFTKLHCFPLLETALFFLMSWSTFLLAEACGFTGVVAVLFCGITQAHYTYNNLSVESRSRTKQLFEVLHFLAENFIFSYMGLALFTFQKHVFSPIFIIGAFVAIFLGRAAHIYPLSFFLNLGRRHKIGWNFQHMMMFSGLRGAMAFALAIRDTASYARQMMFTTTLLIVFFTVWIIGGGTTPMLSWLNIRVGVEEPSEEDQNEHHWQYFRVGVDPDQDPPPNNDSFQVLQGDGPDSARGNRTKQESAWIFRLWYSFDHNYLKPILTHSGPPLTTTLPAWCGLLARCLTSPQVYDNQEPLREEDSDFILTEGDLTLTYGDSTVTANGSSSSHTASTSLEGSRRTKSSSEEVLERDLGMGDQKVSSRGTRLVFPLEDNA

SEQ ID NO: 23104 - protein, 837 aa, Homo sapiens
MANRLQRGDRSRLLLLLCIFLGTLRGFRARQIRYSVPEETEKGSFVGNISKDLGLEPRELAKRGVRIVSRGKTQLFAVNPRSGSLITAGRIDREELCETVSSCFLNMELLVEDTLKIYGVEVEIIDINDNAPSFQEDEVEIKVSEHAIPGARFALPNARDPDVGVNSLQSYQLSPNNYFSLQLRGRTDGAKNPELVLEGSLDREKEAAHLLLLTALDGGDPIRKGAVPIRVVVLDVNDHIPMFTQSVYRVSVPENISSGTRVLMVNATDPDEGINGEVMYSFRNMESKASEIFQLDSQTGEVQVRGSLDFEKYRFYEMEIQGQDGGGLFTTTTMLITVVDVNDNAPEITITSSINSILENSPPGTVIALLNVQDQDSGENGQVSCFIPNHLPFKLEKTYGNYYKLITSRVLDRELVQSYNITLTATDQGSPPLSAETHVWLNVADDNDNPPVFPHSSYSAYIPENNPRGASIFSVTALDPDSKQNALVTYSLTDDTVQGVPLSSYVSINSNTGVLYALQSFDYEQFRDLELRVIARDSGDPPLSSNVSLSLFVLDQNDNAPEILYPALPTDGSTGVELAPRSAEPGYLVTKVVAVDKDSGQNAWLSYRLLKASEPGLFAVGEHTGEVRTARALLDRDALKQSLVVAVQDHGQPPLSATVTLTVAVADSIPEVLADLGSLESLANSETSDLSLYLVVAVAAVSCIFLVFVIVLLALRLWRWHKSRLLQASEGGLAGMPTSHFVGVDGVQAFLQTYSHEVSLIADSQKSHLIFPQPNYGDTLISQESCEKSEPLLIAEDSAIILGKCDPTSNQVRFISLPPNCWCLGTSLLRRCFLSLL

SEQ ID NO: 23105 - protein, 980 aa, Homo sapiens
MAYTENGEVYFIDHNTKTTSWLDPRCLNKQQKPLEECEDDEGVHTEELDSELELPAGWEKIEDPVYGIYYVDHINRKTQYENPVLEAKRKKQLEQQQQQQQQQQQQQQQQQQQQTEEWTEDHSALVPPVIPNHPPSNPEPAREVPLQGKPFFTRNPSELKGKFIHTKLRKSSRGFGFTVVGGDEPDEFLQIKSLVLDGPAALDGKMETGDVIVSVNDTCVLGHTHAQVVKIFQSIPIGASVDLELCRGYPLPFDPDDPNTSLVTSVAILDKEPIIVNGQETYDSPASHSSKTGKVNGMKDARPSSPADVASNSSHGYPNDTVSLASSIATQPELITVHIVKGPMGFGFTIADSPGGGGQRVKQIVDSPRCRGLKEGDLIVEVNKKNVQALTHNQVVDMLVECPKGSEVTLLVQRGGLPVPKKSPKSQPLERKDSQNSSQHSVSSHRSLHTASPSHSTQVLPEFPPAEAQAPDQTDSSGQKKPDPFKIWAQSRSMYENRPMSPSPASGLSKGEREREINSTNFGECPIPDYQEQDIFLWRKETGFGFRILGGNEPGEPIYIGHIVPLGAADTDGRLRSGDELICVDGTPVIGKSHQLVVQLMQQAAKQGHVNLTVRRKVVFAVPKTENEVPSPASSHHSSNQPASLTEEKRTPQGSQNSLNTVSSGSGSTSGIGSGGGGGSGVVSTVVQPYDVEIRRGENEGFGFVIVSSVSRPEAGTTFGNACVAMPHKIGRIIEGSPADRCGKLKVGDRILAVNGCSITNKSHSDIVNLIKEAGNTVTLRIIPGDESSNATLLTNAEKIATITTTHTPSQQGTQETRNTTKPKQESQFEFKAPQATQEQDFYTVELERGAKGFGFSLRGGREYNMDLYVLRLAEDGPAERCGKMRIGDEILEINGETTKNMKHSRAIELIKNGGRRVRLFLKRGDGSVPEYAMIPPNIAACMRNEKLGEACFYLMGHNQTTTPAATATAPPPVHKVFRK

SEQ ID NO: 23106 - protein, 741 aa, Homo sapiens [sequence omitted]

SEQ ID NO: 23107 - protein, 325 aa, Homo sapiens
MVATNTPHSTLSVNWSLLLSPEPDGGLMVLPKDSIQFSSALVFTRLLEFDSTNVSDTAAKPLGRPYPPYSLADFSWNNITDSLDPATLSATFQGHPMNDPTRTFANGSLAFRVQAFSRSSRPAQPPRLLHTADTCQLEVALIGASPRGNRSLFGLEVATLGQGPDCPSMQEQHSIDDEYAPAVFQLDQLLWGSLPSGFAQWRPVAYSQKPGGRESALPCQASPLHPALAYSLPQSPIVRAFFGSQNNFCAFNLTFGASTGPGYWDQHYLSWSMLLGVGFPPVDGLSPLVLGIMAVALGAPGLMLLGGGLVLLLHHKKYSEYQSIN

SEQ ID NO: 23108 - protein, 585 aa, Homo sapiens
MGPADSWGHHWMGILLSASLCTVWSPPAAAQLTLNANPLDATQSEDVVLPVFGTPRTPQIHGRSRELAKPSIAVSPGTAIEQKDMVTFYCTTKDVNITIHWVSNNLSIVFHERMQLSKDGKILTILIVQREDSGTYQCEARDALLSQRSDPIFLDVKYGPDPVEIKLESGVASGEVVEVMEGSSMTFLAETKSHPPCAYTWFLLDSILSHTTRTFTIHAVSREHEGLYRCLVSNSATHLSSLGTLKVRVLETLTMPQVVPSSLNLVENARSVDLTCQTVNQSVNVQWFLSGQPLLPSEHLQLSADNRTLIIHGLQRNDTGPYACEVWNWGSRARSEPLELTINYGPDQVHITRESASEMISTIEAELNSSLTLQCWAESKPGAEYRWTLEHSTGEHLGEQLIIRALTWEHDGIYNCTASNSLTGLARSTSVLVKVVGPQSSSLSSGAIAGIVIGILAVIAVASELGYFLCIRNARRPSRKTTEDPSHETSQPIPKEEHPTEPSSESLSPEYRNISQLQGRIRVELMQPPDLPEETYETKLPSASRRGNSFSPWKPPPKPLMPPLRLVSTVPKNMESIYEVLGMQQ

SEQ ID NO: 23109 - protein, 302 aa, Homo sapiens
MVWFLDFPNSMAPKRQSPLPLQKKKPRPPPALGLEETSASAGLPKKGEKEQQEAIEHIDEVQNEIDRLNEQDSEEILKVEQKYNKLRQPFFQKRSELIAKIPNFGVTTFVNHPQVSSLLGEEDEEALHYLTKVEVTEFEDIKSGYRIDFYFDENPYFENKVFSKEFHLNESGDPSSKSTKIKWKSGKDVTKRSSQTQNKASRKRQHEEPESFFTWFTDHSDAGADELEEVIKDDIWPNPLQYYLVPDMDDEEGGEDDDDDDDDGDEGEEELEDIDEGDEDEGEEDEDDDEGEEGEEDEGEDD

SEQ ID NO: 23110 - protein, 346 aa, Homo sapiens
MAPRRARGCRTLGLPALLLLLLLRPPATRDARDRLAVLAGRSRISESFNHEVQTHEACVRLRTMENCPQCHHHRTSRQQAGITCPPPMSVEHADIWVKSYSLYSRERYICNSGFKRKAGTSSLTECVLNKATNVAHWTTPSLKCIRDPALVHQRPAPPSTVTTAGVTPQPESLSPSGKEPAASSPSSNNTAATTAAIVPGSQLMPSKSPSTGTTEISSHESSHGTPSQTTAKNWELTASASHQPPGVYPQGHSDTTVAISTSTVLLCGLSAVSLLACYLKSSSHSRELTLLTLKWPKELLLLRRDISPALVEGAGQMPRASAPRQLQTGQPRMTSVLPRLCLSFGS

SEQ ID NO: 23111 - protein, 617 aa, Homo sapiens
MAGLTAAAPRPGVLLLLLSILHPSRPGGVPGAIPGGVPGGVFYPALGPGGKPLKPVPGGLAGAGLGAGLGAFPAVTFPGALVPGGVADAAAAYKAAKAGAGLGGVPGVGGLGVSAGAVVPQPGAGVKPGKVPGVGLPGVYPGGVLPGVGPFGGPQPGVPLGYPIKAPKLPGGYGLPYTTGKLPYGYGPGGVAGAAGKAGYPTGTGVGPQAAAAAAAKAAAKFGAGAAGVLPGVGGAGVPGVPGAIPGIGGIAGVGTPAAAAAAAAAAKAAKYGAAAGLVPGGPGFGPGVVGVPGAGVPGVGVPGAGIPVVPGAGIPGAAVPGVVSPEAAAKAAAKAAKYGARPGVGVGGIPTYGVGAGGFPGFGVGVGAEAQAAAAAKAAKYGLVPGVGVAPGVGVAPGVGVAPGVGLAPGVGVAPGVGVAPGVGVAPGIGPGGVAAAAKSAAKVAAKAQLRAAAGLGAGIPGLGVGVGVPGLGVGAGVPGLGVGAGVPGFGAVPGALAAAKAAKYGAAVPGVLGGLGALGGVGIPGGVVGAGPAAAAAAAKAAAKAAQFGLVGAAGLGGLGVGGLGVPGVGGLGGIPPAAAAKAAKYGVAARPGFGLSPIFPGGACLGKACGRKRK

SEQ ID NO: 23112 - protein, 680 aa, Homo sapiens
MCRECCEYDQIECVCPGKREVVGYTIPCCRNEENECDSCLIHPGCTIFENCKSCRNGSWGGTLDDFYVKGFYCAECRAGWYGGDCMRCGQVLRAPKGQILLESYPLNAHCEWTIHAKPGFVIQLRFVMLSLEFDYMCQYDYVEVRDGDNRDGQIIKRVCGNERPAPIQSIGSSLHVLFHSDGSKNFDGFHAIYEEITACSSSPCFHDGTCVLDKAGSYKCACLAGYTGQRCENLLEERNCSDPGGPVNGYQKITGGPGLINGRHAKIGTVVSFFCNNSYVLSGNEKRTCQQNGEWSGKQPICIKACREPKISDLVRRRVLPMQVQSRETPLHQLYSAAFSKQKLQSAPTKKPALPFGDLPMGYQHLHTQLQYECISPFYRRLGSSRRTCLRTGKWSGRAPSCIPICGKIENITAPKTQGLRWPWQAAIYRRTSGVHDGSLHKGAWFLVCSGALVNERTVVVAAHCVTDLGKVTMIKTADLKVVLGKFYRDDDRDEKTIQSLQISAIILHPNYDPILLDADIAILKLLDKARISTRVQPICLAASRDLSTSFQESHITVAGWNVLADVRSPGFKNDTLRSGVVSVVDSLLCEEQHEDHGIPVSVTDNMFCASWEPTAPSDICTAETGGIAAVSFPGRASPEPRWHLMGLVSWSYDKTCSHRLSTAFTKVLPFKDWIERNMK

SEQ ID NO: 23113 - protein, 225 aa, Homo sapiens
MSRPKNQNYKGHGLSKGKEREQRASIRFKTTLMNTLMDVLRHRPGWVEVKDEGEWDFYWCDVSWLRENFDHTYMDEHVRISHFRNHYELTRKNYMVKNLKRFRKQLEREAGKLEAAKCDFFPKTFEMPCEYHLFVEEFRKNPGITWIMKPVARSQGKGIFLFRRLKDIVDWRKGTTGKSSAAWRPSLPGARSVPLAATTQEALTTRKMIFPWRTMWLSVTLKILT

SEQ ID NO: 23114 - protein, 588 aa, Homo sapiens
MFSGIATSTSSSMSGTGLEHSSLSDCLLLIPLEEEAGRIKDCWDNQEAPALSTCSNANIFRRINAILDNSLDFSRVCTTPINRGIHDHLPDFQDSEETVTSRMLFPTSAQESSRGLPDANDLCLGLQSLSLTGWDRPWSTQDSDSSAQSSTHSVLSMLHNPLGNVLGKPPLSFLPLDPLGSDLVDKFPAPSVRGSRLDTRPILDSRSSSPSDSDTSGFSSGSDHLSDLISSLRISPPLPFLSLSGGGPRDPLKMGVGSRMDQEQAALAAVTPSPTSASKRWPGASVWPSWDLLEAPKDPFSIEREARLHRQAAAVNEATCTWSGQLPPRNYKNPIYSCKVFLGGVPWDITEAGLVNTFRVFGSLSVEWPGKDGKHPRCPPKGYVYLVFELEKSVRSLLQACSHDPLSPDGLSEYYFKMSSRRMRCKEVQVIPWVLADSNFVRSPSQRLDPSRTVFVGALHGMLNAEALAAILNDLFGGVVYAGIDTDKHKYPIGSGRVTFNNQRSYLKAVSAAFVEIKTTKFTKKVQIDPYLEDSLCHICSSQPGPFFCRDQVCFKYFCRSCWHWRHSMEGLRHHSPLMRNQKNRDSS

SEQ ID NO: 23115 - protein, 150 aa, Homo sapiens
MATALVSAHSLAPLNLKKEGLRVVREDHYSTWEQGFKLQGNSKGLGQEPLCKQFRQLRYEETTGPREALSRLRELCQQWLQPETHTKEQILELLVLEQFLIILPKELQARVQEHHPESREDVVVVLEDLQLDLGETGQQDPDQPKKQKIL

SEQ ID NO: 23116 - protein, 863 aa, Homo sapiens
MDASIWSNELIELFIVIGNKRANDFWAGNLQKDEELHMDSPVEKRKNFITQKYKEGKFRKTLLASLTKEELNKALCAAVVKPDVLETMALLFSGADVMCATGDPVHSTPYLLAKKAGQSLQMEFLYHNKFSDFPQHDIHSEGVLSQESSQSTFLCDFLYQAPSAASKLSSEKKLLEETNKKWCVLEGGFLSYYENDKSTTPNGTININEVICLAIHKEDFYLNTGPIFIFEIYLPSERVFLFGAETSQAQRKWTEAIAKHFVPLFAENLTEADYDLIGQLFYKDCHALDQWRKGWFAMDKSSLHFCLQMQEVQGDRMHLRRLQELTISTMVQNGEKLDVLLLVEKGRTLYIHGHTKLDFTVWHTAIEKAAGTDGNALQDQQLSKNDVPIIVNSCIAFVTQYGLGCKYIYQKNGDPLHISELLESFKKDARSFKLRAGKHQLEDVTAVLKSFLSDIDDALLTKELYPYWISALDTQDDKERIKKYGAFIRSLPGVNRATLAAIIEHLYRVQKCSEINHMNAHNLALVFSSCLFQTKGQTSEEVNVIEDLINNYVEIFEVKEDQVKQMDIENSFITKWKDTQVSQAGDLLIEVYVERKEPDCSIIIRISPVMEAEELTNDILAIKNIIPTKGDIWATFEVIENEELERPLHYKENVLEQVLRWSSLAEPGSAYLVVKRFLTADTIKHCSDRSTLGSIKEGILKIKEEPSKILSGNKFQDRYFVLRDGFLFLYKDVKSSKHDKMFSLSSMKFYRGVKKKMKPPTSWGLTAYSEKHHWHLCCDSSRTQTEWMTSIFIAQHEYDIWPPAGKERKRSITKNPKIGGLPLIPIQHEGNATLARKILRVQEQNLKGCGSVKSVIKSPWTLA

SEQ ID NO: 23117 - protein, 617 aa, Homo sapiens
MNRKDSKRKSHQECTGKIGGRGRPRQVRRHKTCPSPREISKVMASMNLGLLSEGGCSEDELLEKCIQSFDSAGSLCHEDHMLNMVLAMHSWVLPSADLAARLLTSYQKATGDTQELRRLQICHLVRYWLMRHPEVMHQDPQLEEVIGRFWATVAREGNSAQRRLGDSSDLLSPGGPGPPLPMSSPGLGKKRKVSLLFDHLETGELAQHLTYLEFRSFQAITPQDLRSYVLQGSVRGCPALEGSVGLSNSVSRWVQVMVLSRPGPLQRAQVLDKFIHVAQRLHQLQNFNTLMAVTGGLCHSAISRLKDSHAHLSPDSTKALLELTELLASHNNYARYRRTWAGCAGFRLPVLGVHLKDLVSLHEAQPDRLPDGRLHLPKLNNLYLRLQELVALQGQHPPCSANEDLLHLLTLSLDLFYTEDEIYELSYAREPRCPKSLPPSPFNAPLVVEWAPGVTPKPDRVTLGRHVEQLVESVFKNYDPEGRGTISQEDFERLSGNFPFACHGLHPPPRQGRGSFSREELTGYLLRASAICSKLGLAFLHTFHEVTFRKPTFCDSCSGFLWGVTKQGYRCRGEWGVSEWEGSLGPQAGRMDDTDRTPAAAFPQSAGCVATNTAETR

SEQ ID NO: 23118 - protein, 4204 aa, Homo sapiens
MGALWSWWILWAGATLLWGLTQEASVDLKNTGREEFLTAFLQNYQLAYSKAYPRLLISSLSESPASVSILSQADNTSKKVTVRPGESVMVNISAKAEMIGSKIFQHAVVIHSDYAISVQALNAKPDTAELTLLRPIQALGTEYFVLTPPGTSARNVKEFAVVAGAAGASVSVTLKGSVTFNGKFYPAGDVLRVTLQPYNVAQLQSSVDLSGSKVTASSPVAVLSGHSCAQKHTTCNHVVEQLLPTSAWGTHYVVPTLASQSRYDLAFVVASQATKLTYNHGGITGSRGLQAGDVVEFEVRPSWPLYLSANVGIQVLLFGTGAIRNEVTYDPYLVLIPDVAAYCPAYVVKSVPGCEGVALVVAQTKAISGLTIDGHAVGAKLTWEAVPGSEFSYAEVELGTADMIHTAEATTNLGLLTFGLAKAIGYATAADCGRTVLSPVEPSCEGMQCAAGQRCQVVGGKAGCVAESTAVCRAQGDPHYTTFDGRRYDMMGTCSYTMVELCSEDDTLPAFSVEAKNEHRGSRRVSYVGLVTVRAYSHSVSLTRGEVGFVLVDNQRSRLPVSLSEGRLRVYQSGPRAVVELVFGLVVTYDWDCQLALSLPARFQDQVCGLCGNYNGDPADDFLTPDGALAPDAVEFASSWKLDDGDYLCEDGCQNNCPACTPGQAQHYEGDRLCGMLTKLDGPFAVCHDTLDPRPFLEQCVYDLCVVGGERLSLCRGLSAYAQACLELGISVGDWRSPANCPLSCPANSRYELCGPACPTSCNGAAAPSNCSGRPCVEGCVCLPGFVASGGACVPASSCGCTFQGLQLAPGQEVWADELCQRRCTCNGATHQVTCRDKQSCPAGERCSVQNGLLGCYPDRFGTCQGSGDPHYVSFDGRRFDFMGTCTYLLVGSCGQNAALPAFRVLVENEHRGSQTVSYTRAVRVEARGVKVAVRREYPGQVLVDDVLQYLPFQAADGQVQVFRQGRDAVVRTDFGLTVTYDWNARVTAKVPSSYAEALCGLCGNFNGDPADDLALRGGGQAANALAFGNSWQEETRPGCGATEPGDCPKLDSLVAQQLQSKNECGILADPKGPFRECHSKLDPQGAVRDCVYDRCLLPGQSGPLCDALATYAAACQAAGATVHPWRSEELCPLSCPPHSHYEACSYGCPLSCGDLPVPEGCESACREGCVCDAGFVLSGDTCVPVGQCGCLHDDRYYPLGQTFYPGPGCDSLCRCREGGEVSCEPSSCGPHETCRPSGGSLGCVAVGSTTCQASGDPHYTTFDGHRFDFMGTCVYVLAQTCGTRPGLHRFAVLQENVAWGNGRVSVTRVITVQVANFTLRLEQRQWKVTVNGVDMKLPVVLANGQIRASQHGSDVVIETDFGLRVAYDLVYYVRVTVPGNYYQLMCGLCGNYNGDPKDDFQKPNGSQAGNANEFGNSWEEVVSDSPCLPPPTCPPGSEGCIPSEECPPELEKKYQKEEFCGLLSSPTGPLSSCHKLVDPQGPLKDCIFDLCLGGGNLSILCSNIHAYVSACQVAGGHVEPWRNETFCPMECPQNSHYELCADTCSLGCSALSAPLQCPDGCAEGCQCDSGFLYNGQACVPIQQCGCYHNGAYYEPEQTVLIDNCRQQCTCHAGKVVVCQEHSCKPGQVCQPSGGILSCVTKDPCHGVTCRPQETCKEQGGQGVCLPNYEATCWLWGDPHYHSFDGRKFDFQGTCNYVLATTGCPGVSTQGLTPFTVTTKNQNRGNPAVSYVRVVTVAALGTNISIHKDEIGKVRVNGVLTALPVSVADGRISVTQGASKALLVADFGLQVSYDWNWRVDVTLPSSYHGAVCGLCGNMDRNPNNDQVFPNGTLAPSIPIWGGSWRAPGWDPLCWDECRGSCPTCPEDRLEQYEGPGFCGPLAPGTGGPFTTCHAHVPPESFFKGCVLDVCMGGGDRDILCKALASYVAACQAAGVVIEDWRAQVGCEITCPENSHYEVCGPPCPASCPSPAPLTTPAVCEGPCVEGCQCDAGFVLSADRCVPLNNGCGCWANGTYHEAGSEFWADGTCSQWCRCGPGGGSLVCTPASCGLGEVCGLLPSGQHGCQPVSTAECQAWGDPHYVTLDGHRFDFQGTCEYLLSAPCHGPPLGAENFTVTVANEHRGSQAVSYTRSVTLQIYNHSLTLSARWPRKLQVDGVFVTLPFQLDSLLHAHLSGADVVVTTTSGLSLAFDGDSFVRLRVPAAYAGSLCGLCGNYNQDPADDLKAVGGKPAGWQVGGAQGCGECVSKPCPSPCTPEQQESFGGPDACGVISATDGPLAPCHGLVPPAQYFQGCLLDACQVQGHPGGLCPAVATYVAACQAAGAQLREWRRPDFCPFQCPAHSHYELCGDSCPGSCPSLSAPEGCESACREGCVCDAGFVLSGDTCVPVGQCGCLHDDRYYPLGQTFYPGPGCDSLCRCREGGEVSCEPSSCGPHETCRPSGGSLGCVAVGSTTCQASGDPHYTTFDGHRFDFMGTCVYVLAQTCGTRPGLHRFAVLQENVAWGNGRVSVTRVITVQVANFTLRLEQRQWKVTVNGVDMKLPVVLANGQIRASQHGSDVVIETDFGLRVAYDLVYYVRVTVPGNYYQLMCGLCGNYNGDPKDDFQKPNGSQAGNANEFGNSWEEVVPDSPCLPPPTCPPGSAGCIPSDKCPPELEKKYQKEEFCGLLSSPTGPLSSCHKLVDPQGPLKDCIFDLCLGGGNLSILCSNIHAYVSACQAAGGHVEPWRNETFCPMECPQNSHYELCADTCSLGCSALSAPLQCPDGCAEGCQCDSGFLYNGQACVPIQQCGCYHNGVYYEPEQTVLIDNCRQQCTCHVGKVVVCQEHSCKPGQVCQPSGGILSCVTKDPCHGVTCRPQETCKEQGGQGVCLPNYEATCWLWGDPHYHSFDGRKFDFQGTCNYVLATTGCPGVSTQGLTPFTVTTKNQNRGNPAVSYVRVVTVAALGTNISIHKDEIGKVRVNGVLTALPVSVADGRISVAQGASKALLVADFGLQVSYDWNWRVDVTLPSSYHGAVCGLCGNMDRNPNNDQVFPNGTLAPSIPIWGGSWRAPGWDPLCWDECRGSCPTCPEDRLEQYEGPGFCGPLSSGTGGPFTTCHAHVPPESFFKGCVLDVCMGGGDRDILCKALASYVAACQAAGVVIEDWRAQVGCEITCPENSHYEVCGPPCPASCPSPAPLTTPAVCEGPCVEGCQCDAGFVLSADRCVPLNNGCGCWANGTYHEAGSEFWADGTCSQWCRCGPGGGSLVCTPASCGLGEVCGLLPSGQHGCQPVSTAECQAWGDPHYVTLDGHRFDFQGTCEYLLSAPCHGPPLGAENFTVTVANEHRGSQAVSYTRSVTLQIYNHSLTLSARWPRKLQVDGVFVALPFQLDSLLHAHLSGADVVVTTTSGLSLAFDGDSFVRLRVPAAYAASLCGLCGNYNQDPADDLKAVGGKPAGWQVGGAQGCGECVSKPCPSPCTPEQQESFGGPDACGVISATDGPLAPCHGLVPPAQYFQGCLLDACQVQGHPGGLCPAVATYVAACQAAGAQLGEWRRPDFCPLQCPAHSHYELCGDSCPVSCPSLSAPEGCESACREGCVCDAGFVLSGDTCVPVGQCGCLHDGRYYPLGEVFYPGPECERRCECGPGGHVTCQEGAACGPHEECRLEDGVQACHATGCGRCLANGGIHYITLDGRVYDLHGSCSYVLAQVCHPKPGDEDFSIVLEKNAAGDLQRLLVTVAGQVVSLAQGQQVTVDGEAVALPVAVGRVRVTAEGRNMVLQTTKGLRLLFDGDAHLLMSIPSPFRGRLCGLCGNFNGNWSDDFVLPNGSAASSVETFGAAWRAPGSSKGCGEGCGPQGCPVCLAEETAPYESNEACGQLRNPQGPFATCQAVLSPSEYFRQCVYDLCAQKGDKAFLCRSLAAYTAACQAAGVAVKPWRTDSFCPLHCPAHSHYSICTRTCQGSCAALSGLTGCTTRCFEGCECDDRFLLSQGVCIPVQDCGCTHNGRYLPVNSSLLTSDCSERCSCSSSSGLTCQAAGCPPGRVCEVKAEARNCWATRGLCVLSVGANLTTFDGARGATTSPGVYELSSRCPGLQNTIPWYRVVAEVQICHGKTEAVGQVHIFFQDGMVTLTPNKGVWVNGLRVDLPAEKLASVSVSRTPDGSLLVRQKAGVQVWLGANGKVAVIVSNDHAGKLCGACGNFDGDQTNDWHDSQEKPAMEKWRAQDFSPCYG

SEQ ID NO: 23119 - protein, 419 aa, Homo sapiens [sequence omitted]

SEQ ID NO: 23120 - protein, 903 aa, Homo sapiens
MGPWSRSLSALLLLLQVSSWLCQEPEPCHPGFDAESYTFTVPRRHLERGRVLGRVNFEDCTGRQRTAYFSLDTRFKVGTDGVITVKRPLRFHNPQIHFLVYAWDSTYRKFSTKVTLNTVGHHHRPPPHQASVSGIQAELLTFPNSSPGLRRQKRDWVIPPISCPENEKGPFPKNLVQIKSNKDKEGKVFYSITGQGADTPPVGVFIIERETGWLKVTEPLDRERIATYTLFSHAVSSNGNAVEDPMEILITVTDQNDNKPEFTQEVFKGSVMEGALPGTSVMEVTATDADDDVNTYNAAIAYTILSQDPELPDKNMFTINRNTGVISVVTTGLDRESFPTYTLVVQAADLQGEGLSTTATAVITVTDTNDNPPIFNPTTYKGQVPENEANVVITTLKVTDADAPNTPAWEAVYTILNDDGGQFVVTTNPVNNDGILKTAKVWYLARCRNWHPHSCSYPCPLGLDFEAKQQYILHVAVTNVVPFEVSLTTSTATVTVDVLDVNEAPIFVPPEKRVEVSEDFGVGQEITSYTAQEPDTFMEQKITYRIWRDTANWLEINPDTGAISTRAELDREDFEHVKNSTYTALIIATDNGSPVATGTGTLLLILSDVNDNAPIPEPRTIFFCERNPKPQVINIIDADLPPNTSPFTAELTHGASANWTIQYNDPTQESIILKPKMALEVGDYKINLKLMDNQNKDQVTTLEVSVCDCEGAAGVCRKAQPVEAGLQIPAILGILGGILALLILILLLLLFLRRRAVVKEPLLPPEDDTRDNVYYYDEEGGGEEDQDFDLSQLHRGLDARPEVTRNDVAPTLMSVPRYLPRPANPDEIGNFIDENLKAADTDPTAPPYDSLLVFDYEGSGSEAASLSSLNSSESDKDQDYDYLNEWGNRFKKLADMYGGGEDD

SEQ ID NO: 23121 - protein, 401 aa, Homo sapiens
MSGCARPTTGAPVQAMVSVGKCKCDQGWYGDACQYPTNCDLTKKKSNQMCKNSQDIICSNAGTCHCGRCKCDNSDGSGLVYGKFCECDDRECIDDETEEICGGHGKCYCGNCYCKAGWHGDKCEFQCDITPWESKRRCTSPDGKICSNRGTCVCGECTCHDVDPTGDWGDIHGDTCECDERDCRAVYDRYSDDFCSGHGQCNCGRCDCKAGWYGKKCEHPQSCTLSAEESIRKCQGSSDLPCSGRGKCECGKCTCYPPGDRRVYGKTCECDDRRCEDLDGVVCGGHGTCSCGRCVCERGWFGKLCQHPRKCNMTEEQSKNLCESADGILCSGKGSCHCGKCICSAEEWYISGEFCDCDDRDCDKHDGLICTGNGICSCGNCECWDGWNGNACEIWLGSEYP

SEQ ID NO: 23122 - protein, 726 aa, Homo sapiens
MLQTKDLIWTLFFLGTAVSLQVDIVPSQGEISVGESKFFLCQVAGDAKDKDISWFSPNGEKLTPNQQRISVVWNDDSSSTLTIYNANIDDAGIYKCVVTGEDGSESEATVNVKIFQKLMFKNAPTPQEFREGEDAVIVCDVVSSLPPTIIWKHKGRDVILKKDVRFIVLSNNYLQIRGIKKTDEGTYRCEGRILARGEINFKDIQVIVNVPPTIQARQNIVNATANLGQSVTLVCDAEGFPEPTMSWTKDGEQIEQEEDDEKYIFSDDSSQLTIKKVDKNDEAEYICIAENKAGEQDATIHLKVFAKPKITYVENQTAMELEEQVTLTCEASGDPIPSITWRTSTRNISSEEKTLDGHMVVRSHARVSSLTLKSIQYTDAGEYICTASNTIGQDSQSMYLEVQYAPKLQGPVAVYTWEGNQVNITCEVFAYPSATISWFRDGQLLPSSNYSNIKIYNTPSASYLEVTPDSENDFGNYNCTAVNRIGQESLEFILVQADTPSSPSIDQVEPYSSTAQVQFDEPEATGGVPILKYKAEWRAVGEEVWHSKWYDAKEASMEGIVTIVGLKPETTYAVRLAALNGKGLGEISAASEFKTQPVQGEPSAPKLEGQMGEDGNSIKVNLIKQDDGGSPIRHYLVRYRALSSEWKPEIRLPSGSDHVMLKSLDWNAEYEVYVVAENQQGKSKAAHFVFRTSAQPTAIPATLGGNSASYTFVSLLFSAVTLLLLC

SEQ ID NO: 23123 - protein, 707 aa, Homo sapiens
MTERRRDELSEEINNLREKVMKQSEENNNLQSQVQKLTEENTTLREQVEPTPEDEDDDIELRGAAAAAAPPPPIEEECPEDLPEKFDGNPDMLAPFMAQCQIFMEKSTRDFSVDRVRVCFVTSMMTGRAARWASAKLERSHYLMHNYPAFMMEMKHVFEDPQRREVAKRKIRRLRQGMGSVIDYSNAFQMIAQDLDWNEPALIDQYHEGLSDHIQEELSHLEVAKSLSALIGQCIHIERRLARAAAARKPRSPPRALVLPHIASHHQVDPTEPVGGARMRLTQEEKERRRKLNLCLYCGTGGHYADNCPAKASKSSPGKLPGPAVEGPSATGPEIIRSPQDDASSPHLQVMLQIHLPGRHTLFVRAMIDSGASGNFIDHEYVAQNGIPLRIKDWPILVEAIDGRPIASGPVVHETHDLIVDLGDHREVLSFDVTQSPFFPVVLGVRWLSTHDPNITWSTRSIVFDSEYCRYHCRMYSPIPPSLPPPAPQPPLYYPVDGYRVYQPVRYYYVQNVYTPVDEHVYPDHRLVDPHIEMIPGAHSIPSGHVYSLSEPEMAALRDFVARNVKDGLITPTIAPNGAQVLQVKRGWKLQVSYDCRAPNNFTIQNQYPRLSIPNLEDQAHLATYTEFVPQIPGYQTYPTYAAYPTYPVGFAWYPVGRDGQGRSLYVPVMITWNPHWYRQPPVPQYPPPQPPPPPPPPPPPPSYSTL

SEQ ID NO: 23124 - protein, 2466 aa, Homo sapiens
MGRKTSRVQQGPPRSPACSAHGERSWGLEFPPFRWLLGIAGRTHLAALPPFQWVLAFEIFIPLVLFFILLGLRQKKPTISVKEVAFYTAAPLTSAGILPVMQSLCPDGQRDEFGFLQYANSTVTQLLERLDRVVEEGNLFDPARPSLGSELEALRQHLEALSAGPGTSGSHLDRSTVSSFSLDSVARNPQELWRFLTQNLSLPNSTAQALLAARVDPPEVYHLLFGPSSALDSQSGLHKGQEPWSRLGGNPLFRMEELLLAPALLEQLTCTPGSGELGRILTVPESQKGALQGYRDAVCSGQAAARARRFSGLSAELRNQLDVAKVSQQLGLDAPNGSDSSPQAPPPRRLQALLGDLLDAQKVLQDVDVLSALALLLPQGACTGRTPGPPASGAGGAANGTGAGAVMGPNATAEEGAPSAAALATPDTLQGQCSAFVQLWAGLQPILCGNNRTIEPEALRRGNMSSLGFTSKEQRNLGLLVHLMTSNPKILYAPAGSEVDRVILKANETFAFVGNVTHYAQVWLNISAEIRSFLEQGRLQQHLRWLQQYVAELRLHPEALNLSLDELPPALRQDNFSLPSGMALLQQLDTIDNAACGWIQFMSKVSVDIFKGFPDEESIVNYTLNQAYQDNVTVFASVIFQTRKDGSLPPHVHYKIRQNSSFTEKTNEIRRAYWRPGPNTGGRFYFLYGFVWIQDMMERAIIDTFVGHDVVEPGSYVQMFPYPCYTRDDFLFVIEHMMPLCMVISWVYSVAMTIQHIVAEKEHRLKEVMKTMGLNNAVHWVAWFITGFVQLSISVTALTAILKYGQVLMHSHVVIIWLFLAVYAVATIMFCFLVSVLYSKAKLASACGGIIYFLSYVPYMYVAIREEVAHDKITAFEKCIASLMSTTAFGLGSKYFALYEVAGVGIQWHTFSQSPVEGDDFNLLLAVTMLMVDAVVYGILTWYIEAVHPGMYGLPRPWYFPLQKSYWLGSGRTEAWEWSWPWARTPRLSVMEEDQACAMESRRFEETRGMEEEPTHLPLVVCVDKLTKVYKDDKKLALNKLSLNLYENQVVSFLGHNGAGKTTTMSILTGLFPPTSGSATIYGHDIRTEMDEIRKNLGMCPQHNVLFDRLTVEEHLWFYSRLKSMAQEEIRREMDKMIEDLELSNKRHSLVQTLSGGMKRKLSVAIAFVGGSRAIILDEPTAGVDPYARRAIWDLILKYKPGRTILLSTHHMDEADLLGDRIAIISHGKLKCCGSPLFLKGTYGDGYRLTLVKRPAEPGGPQEPGLASSPPGRAPLSSCSELQVSQFIRKHVASCLLVSDTSTELSYILPSEAAKKGAFERLFQHLERSLDALHLSSFGLMDTTLEEVFLKVSEEDQSLENSEADVKESRKDVLPGAEGPASGEGHAGNLARCSELTQSQASLQSASSVGSARGDEGAGYTDVYGDYRPLFDNPQDPDNVSLQEVEAEALSRVGQGSRKLDGGWLKVRQFHGLLVKRFHCARRNSKALFSQILLPAFFVCVAMTVALSVPEIGDLPPLVLSPSQYHNYTQPRGNFIPYANEERREYRLRLSPDASPQQLVSTFRLPSGVGATCVLKSPANGSLGPTLNLSSGESRLLAARFFDSMCLESFTQGLPLSNFVPPPPSPAPSDSPASPDEDLQAWNVSLPPTAGPEMWTSAPSLPRLVREPVRCTCSAQGTGFSCPSSVGGHPPQMRVVTGDILTDITGHNVSEYLLFTSDRFRLHRYGAITFGNVLKSIPASFGTRAPPMVRKIAVRRAAQVFYNNKGYHSMPTYLNSLNNAILRANLPKSKGNPAAYGITVTNHPMNKTSASLSLDYLLQGTDVVIAIFIIVAMSFVPASFVVFLVAEKSTKAKHLQFVSGCNPIIYWLANYVWDMLNYLVPATCCVIILFVFDLPAYTSPTNFPAVLSLFLLYGWSITPIMYPASFWFEVPSSAYVFLIVINLFIGITATVATFLLQLFEHDKDLKVVNSYLKSCFLIFPNYNLGHGLMEMAYNEYINEYYAKIGQFDKMKSPFEWDIVTRGLVAMAVEGVVGFLLTIMCQYNFLRRPQRMPVSTKPVEDDVDVASERQRVLRGDADNDMVKIENLTKVYKSRKIGRILAVDRLCLGVRPGECFGLLGVNGAGKTSTFKMLTGDESTTGGEAFVNGHSVLKELLQVQQSLGYCPQCDALFDELTAREHLQLYTRLRGISWKDEARVVKWALEKLELTKYADKPAGTYSGGNKRKLSTAIALIGYPAFIFLDEPTTGMDPKARRFLWNLILDLIKTGRSVVLTSHSMEECEALCTRLAIMVNGRLRCLGSIQHLKNRFGDGYMITVRTKSSQSVKDVVRFFNRNFPEAMLKERHHTKVQYQLKSEHISLAQVFSKMEQVSGVLGIEDYSVSQTTLDNVFVNFAKKQSDNLEQQETEPPSALQSPLGCLLSLLRPRSAPTELRALVADEPEDLDTEDEGLISFEEERAQLSFNTDTLC

SEQ ID NO: 23125 - protein, 220 aa, Homo sapiens
MKTLFLGVTLGLAAALSFTLEEEDITGTWYVKAMVVDKDFPEDRRPRKVSPVKVTALGGGNLEATFTFMREDRCIQKKILMRKTEEPGKFSAYGGRKLIYLQELPGTDDYVFYCKDQRRGGLRYMGKLVASAPCRAVPLSPPWLTWPPHLQVGILIPTWRPWKNLRNWCSTRDSRRRTFSCPCRREAAFSNTRVTPGSAPPEPTLPPDTEPGPPGPTLQP

SEQ ID NO: 23126 - protein, 2725 aa, Homo sapiens
MNGHRFTFRTRSLLPLQKGQHRCITKLLAHNDPWGIFRAPSSRRSYSVSGVCQPAIPNSSLHIPHNACWLKWKLCSEIALPYHHILGERRKLCSIRNFEDWREDVRSCCQARVLPRGRTLGLWLALIGREEFAMNLLRRSGKRRRSESGSDSFSGSGGDSSASPQFLSGSVLSPPPGLGRCLKAAAAGECKPTVPDYERDKLLLANWGLPKAVLEKYHSFGVKKMFEWQAECLLLGQVLEGKNLVYSAPTSAGKTLVAELLILKRVLEMRKKALFILPFVSVAKEKKYYLQSLFQEVGIKVDGYMGSTSPSRHFSSLDIAVCTIERANGLINRLIEENKMDLLGMVVVDELHMLGDSHRGYLLELLLTKICYITRKSASCQADLASSLSNAVQIVGMSATLPNLELVASWLNAELYHTDFRPVPLLESVKVGNSIYDSSMKLVREFEPMLQVKGDEDHVVSLCYETICDNHSVLLFCPSKKWCEKLADIIAREFYNLHHQAEGEGLVKPSECPPVILEQKELLEVMDQLRRLPSGLDSVLQKTVPWGVAFHHAGLTFEERDIIEGAFRQGLIRVLAATSTLSSGVNLPARRVIIRTPIFGGRPLDILTYKQMVGRAGRKGVDTVGESILICKNSEKSKGIALLQGSLKPVRSCLQRREGEEVTGSMIRAILEIIVGGVASTSQDMHTYAACTFLAASMKEGKQGIQRNQESVQLGAIEACVMWLLENEFIQSTEASDGTEGKVYHPTHLGSATLSSSLSPADTLDIFADLQRAMKGFVLENDLHILYLVTPMFEDWTTIDWYRFFCLWEKLPTSMKRVAELVGVEEGFLARCVKGKVVARTERQHRQMAIHKRFFTSLVLLDLISEVPLREINQKYGCNRGQIQSLQQSAAVYAGMITVFSNRLGWHNMELLLSQFQKRLTFGIQRELCDLVRVSLLNAQRARVLYASGFHTVADLARANIVEVEVILKNAVPFKSARKAVDEEEEAVEERRNMRTIWVTGRKGLTEREAAALIVEEARMILQQDLVEMGVQWNPCALLHSSTCSLTHSESEVKEHTFISQTKSSYKKLTSKNKSNTIFSDSYIKHSPNIVQDLNKSREHTSSFNCNFQNGNQEHQTCSIFRARKRASLDINKEKPGASQNEGKTSDKKVVQTFSQKTKKAPLNFNSEKMSRSFRSWKRRKHLKRSRDSSPLKDSGACRIHLQGQTLSNPSLCEDPFTLDEKKTEFRNSGPFAKNVSLSGKEKDNKTSFPLQIKQNCSWNITLTNDNFVEHIVTGSQSKNVTCQATSVVSEKGRGVAVEAEKINEVLIQNGSKNQNVYMKHHDIHPINQYLRKQSHEQTSTITKQKNIIERQMPCEAVSSYINRDSNVTINCERIKLNTEENKPSHFQALGDDISRTVIPSEVLPSAGAFSKSEGQHENFLNISRLQEKTGTYTTNKTKNNHVSDLGLVLCDFEDSFYLDTQSEKIIQQMATENAKLGAKDTNLAAGIMQKSLVQQNSMNSFQKECHIPFPAEQHPLGATKIDHLDLKTVGTMKQSSDSHGVDILTPESPIFHSPILLEENGLFLKKNEVSVTDSQLNSFLQGYQTQETVKPVILLIPQKRTPTGVEGECLPVPETSLNMSDSLLFDSFSDDYLVKEQLPDMQMKEPLPSEVTSNHFSDSLCLQEDLIKKSNVNENQDTHQQLTCSNDESIIFSEMDSVQMVEALDNVDIFPVQEKNHTVVSPRALELSDPVLDEHHQGDQDGGDQDERAEKSKLTGTRQNHSFIWSGASFDLSPGLQRILDKVSSPLENEKLKSMTINFSSLNRKNTELNEEQEVISNLETKQVQGISFSSNNEVKSKIEMLENNANHDETSSLLPRKESNIVDDNGLIPPTPIPTSASKLTFPGILETPVNPWKTNNVLQPGESYLFGSPSDIKNHDLSPGSRNGFKDNSPISDTSFSLQLSQDGLQLTPASSSSESLSIIDVASDQNLFQTFIKEWRCKKRFSISLACEKIRSLTSSKTATIGSRFKQASSPQEIPIRDDGFPIKGCDDTLVVGLAVCWGGRDAYYFSLQKEQKHSEISASLVPPSLDPSLTLKDRMWYLQSCLRKESDKECSVVIYDFIQSYKILLLSCGISLEQSYEDPKVACWLLDPDSQEPTLHSIVTSFLPHELPLLEGMETSQGIQSLGLNAGSEHSGRYRASVESILIFNSMNQLNSLLQKENLQDVFRKVEMPSQYCLALLELNGIGFSTAECESQKHIMQAKLDAIETQAYQLAGHSFSFTSSDDIAEVLFLELKLPPNREMKNQGSKKTLGSTRRGIDNGRKLRLGRQFSTSKDVLNKLKALHPLPGLILEWRRITNAITKVVFPLQREKCLNPFLGMERIYPVSQSHTATGRITFTEPNIQNVPRDFEIKMPTLVGESPPSQAVGKGLLPMGRGKYKKGFSVNPRCQAQMEERAADRGMPFSISMRHAFVPFPGGSILAADYSQLELRILAHLSHDRRLIQVLNTGADVFRSIAAEWKMIEPESVGDDLRQQAKQICYGIIYGMGAKSLGEQMGIKENDAACYIDSFKSRYTGINQFMTETVKNCKRDGFVQTILGRRRYLPGIKDNNPYRKAHAERQAINTIVQGSAADIVKIATVNIQKQLETFHSTFKSHGHREGMLQSDQTGLSRKRKLQGMFCPIRGGFFILQLHDELLYEVAEEDVVQVAQIVKNEMESAVKLSVKLKVKVKIGASWGELKDFDV

SEQ ID NO: 23127 - protein, 470 aa, Homo sapiens
MAEQVLPQALYLSNMRKAVKIRERTPEDIFKPTNGIIHHFKTMHRYTLEMFRTCQFCPQFREIIHKALIDRNIQATLESQKKLNWCREVRKLVALKTNGDGNCLMHATSQYMWGVQDTDLVLRKALFSTLKETDTRNFKFRWQLESLKSQEFVETGLCYDTRNWNDEWDNLIKMASTDTPMARSGLQYNSLEEIHIFVLCNILRRPIIVISDKMLRSLESGSNFAPLKVGGIYLPLHWPAQECYRYPIVLGYDSHHFVPLVTLKDSGPEIRAVPLVNRDRGRFEDLKVHFLTDPENEMKEKLLKEYLMVIEIPVQGWDHGTTHLINAAKLDEANLPKEINLVDDYFELVQHEYKKWQENSEQGRREGHAQNPMEPSVPQLSLMDVKCETPNCPFFMSVNTQPLCHECSERRQKNQNKLPKLNSKPGPEGLPGMALGASRGEAYEPLAWNPEESTGGSFGPTDSTQPFSVQ

SEQ ID NO: 23128 - protein, 941 aa, Homo sapiens
MAAYLQWRRFVFFDKELVKEPLSNDGAAPGATPASGSAASKFLCLPPGITVCDSGRGSLVFGDMEGQIWFLPRSLQLTGFQAYKLRVTHLYQLKQHNILASVGEDEEGINPLVKIWNLEKRDGGNPLCTRIFPAIPGTEPTVVSCLTVHENLNFMAIGFTDGSVTLNKGDITRDRHSKTQILHKGNYPVTGLAFRQAGKTTHLFVVTTENVQSYIVSGKDYPRVELDTHGCGLRCSALSDPSQDLQFIVAGDECVYLYQPDERGPCFAFEGHKLIAHWFRGYLIIVSRDRKVSPKSEFTSRDSQSSDKQILNIYDLCNKFIAYSTVFEDVVDVLAEWGSLYVLTRDGRVHALQEKDTQTKLEMLFKKNLFEMAINLAKSQHLDSDGLAQIFMQYGDHLYSKGNHDGAVQQYIRTIGKLEPSYVIRKFLDAQRIHNLTAYLQTLHRQSLANADHTTLLLNCYTKLKDSSKLEEFIKKKSESEVHFDVETAIKVLRQAGYYSHALYLAENHAHHEWYLKIQLEDIKNYQEALRYIGKLPFEQAESNMKRYGKILMHHIPEQTTQLLKGLCTDYRPSLEGRSDREAPGCRANSEEFIPIFANNPRELKAFLEHMSEVQPDSPQGIYDTLLELRLQNWAHEKDPQVKEKLHAEAISLLKSGRFCDVFDKALVLCQMHDFQDGVLYLYEQGKLFQQIMHYHMQHEQYRQVISVCERHGEQDPSLWEQALSYFARKEEDCKEYVAAVLKHIENKNLMPPLLVVQTLAHNSTATLSVIRDYLVQKLQKQSQQIAQDELRVRRYREETTRIRQEIQELKASPKIFQKTKCSICNSALELPSVHFLCGHSFHQHCFESYSESDADCPTCLPENRKVMDMIRAQEQKRDLHDQFQHQLKCSNDSFSVIADYFGRGVFNKLTLLTDPPTARLTSSLEAGLQRDLLMHSRRGT

SEQ ID NO: 23129 - protein, 295 aa, Homo sapiens
MQRGAALCLRLWLCLGLLDGLVSGYSMTPPTLNITEESHVIDTGDSLSISCRGQHPLEWAWPGAQEAPATGDKDSEDTGVVRDCEGTDARPYCKVLLLHEVHANDTGSYVCYYKYIKARIEGTTAASSYVFVRDFEQPFINKPDTLLVNRKDAMWVPCLVSIPGLNVTLRSQSSVLWPDGQEVVWDDRRGMLVSTPLLHDALYLQCETTWGDQDFLSNPFLVHITGNELYDIQLLPRKSLELLVGEKLVLNCTVWAEFNSGVTFDWDYPGKQKIPSSASSGSKDPSWRPRQETSW

SEQ ID NO: 23130 - protein, 1200 aa, Homo sapiens
MKVAGGLELGAAALLSASPRALVTLSTGPTCSILPKNPLFPQNLSSQPCIKMEGDKSLTFSSYGLQWCLYELDKEEFQTFKELLKKKSSESTTCSIPQFEIENANVECLALLLHEYYGASLAWATSISIFENMNLRTLSEKARDDMKRHSPEDPEATMTDQGPSKEKVPDISDSNNKHKYVGIHSSFAEISQAMEQEGATAAETEEQEISQAMEQEGATAAETEEQGHGGDTWDYKSHVMTKFAEEEDVRRSFENTAADWPEMQTLAGAFDSDRWGFRPRTVVLHGKSGIGKSALARRIVLCWAQGGLYQGMFSYVFFLPVREMQRKKESSVTEFISREWPDSQAPVTEIMSRPERLLFIIDGFDDLGSVLNNDTKLCKDWAEKQPPFTLIRSLLRKVLLPESFLIVTVRDVGTEKLKSEVVSPRYLLVRGISGEQRIHLLLERGIGEHQKTQGLRAIMNNRELLDQCQVPAVGSLICVALQLQDVVGESVAPFNQTLTGLHAAFVFHQLTPRGVVRRCLNLEERVVLKRFCRMAVEGVWNRKSVFDGDDLMVQGLGESELRALFHMNILLPDSHCEEYYTFFHLSLQDFCAALYYVLEGLEIEPALCPLYVEKTKRSMELKQAGFHIHSLWMKRFLFGLVSEDVRRPLEVLLGCPVPLGVKQKLLHWVSLLGQQPNATTPGDTLDAFHCLFETQDKEFVRLALNSFQEVWLPINQNLDLIASSFCLQHCPYLRKIRVDVKGIFPRDESAEACPVVPLWMRDKTLIEEQWEDFCSMLGTHPHLRQLDLGSSILTERAMKTLCAKLRHPTCKIQTLMFRNAQITPGVQHLWRIVMANRNLRSLNLGGTHLKEEDVRMACEALKHPKCLLESLRLDCCGLTHACYLKISQILTTSPSLKSLSLAGNKVTDQGVMPLSDALRVSQCALQKLILEDCGITATGCQSLASALVSNRSLTHLCLSNNSLGNEGVNLLCRSMRLPHCSLQRLMLNQCHLDTAGCGFLALALMGNSWLTHLSLSMNPVEDNGVKLLCEVMREPSCHLQDLELVKCHLTAACCESLSCVISRSRHLKSLDLTDNALGDGGVAALCEGLKQKNSVLARLGLKACGLTSDCCEALSLALSCNRHLTSLNLVQNNFSPKGMMKLCSAFACPTSNLQIIGLWKWQYPVQIRKLLEEVQLLKPRVVIDGSWHSFDEDDRYWWKN

SEQ ID NO: 23131 - protein, 343 aa, Homo sapiens [sequence omitted]

SEQ ID NO: 23132 - protein, 588 aa, Homo sapiens
MEPPDAPAQARGAPRLLLLAVLLAAHPDAQAEVRLSVPPLVEVMRGKSVILDCTPTGTHDHYMLEWFLTDRSGARPRLASAEMQGSELQVTMHDTRGRSPPYQLDSQGRLVLAEAQVGDERDYVCVVRAGAAGTAEATARLNVFAKPEATEVSPNKGTLSVMEDSAQEIATCNSRNGNPAPKITWYRNGQRLEVPVEMNPEGYMTSRTVREASGLLSLTSTLYLRLRKDDRDASFHCAAHYSLPEGRHGRLDSPTFHLTLHYPTEHVQFWVGSPSTPAGWVREGDTVQLLCRGDGSPSPEYTLFRLQDEQEEVLNVNLEGNLTLEGVTRGQSGTYGCRVEDYDAADDVQLSKTLELRVAYLDPLELSEGKVLSLPLNSSAVVNCSVHGLPTPALRWTKDSTPLGDGPMLSLSSITFDSNGTYVCEASLPTVPVLSRTQNFTLLVQGSPELKTAEIEPKADGSWREGDEVTLICSARGHPDPKLSWSQLGGSPAEPIPGRQGWVSSSLTLKVTSALSRDGISCEASNPHGNKRHVFHFGTVSPQTSQAGVAVMAVAVSVGLLLLVVAVFYCVRRKGGPCCRQRREKGAP

SEQ ID NO: 23133 - protein, 794 aa, Homo sapiens
MTLQGRADLSGNQGNAAGRLATVHEPVVTQWAVHPPAPAHPSLLDKMEKAPPQPQHEGLKSKEHLPQQPAEGKTASRRVPRLRAVVESQAFKNILVDEMDMMHARAATLIQANWRGYWLRQKLISQMMAAKAIQEAWRRFNKRHILHSSKSLVKKTRAEEGDIPYHAPQQVRFQHPEENRLLSPPIMVNKETQFPSCDNLVLCRPQSSPLLQPPAAQGTPEPCVQGPHAARVRGLAFLPHQTVTIRFPCPVSLDAKCQPCLLTRTIRSTCLVHIEGDSVKTNASSQRHPPCLSQRPLAAPLTKASSQGHLPTELTKTPSLAHLDTCLSKMHSQTHLATGAVKVQSQAPLATCLTKTQSRGQPITDITTCLIPAHQAADLSSNTHSQVLLTGSKVSNHACQRLGGLSAPPWAKPEDRQTQPQPHGHVPGKTTQGGPCPAACEVQGMLVPPMAPTGHSTCNVESWGDNGATRAQPSMPGQAVPCQEDTGPADAGVVGGQSWNRAWEPARGAASWDTWRNKAVVPPRRSGEPMVSMQAAEEIRILAVITIQAGVRGYLARRRIRLWHRGAMVIQATWRGYRVRRNLAHLCRATTTIQSAWRGYSTRRDQARHWQMLHPVTWVELGSRAGVMSDRSWFQDGRARTVSDHRCFQSCQAHACSVCHSLSSRIGSPPSVVMLVGSSPRTCHTCGRTQPTRVVQGMGQGTEGPGAVSWASAYQLAALSPRQPHRQDKAATAIQSAWRGFKIRQQMRQQQMAAKIVQATWRGHHTRSCLKNTEALLGPADPSASSRHMHWPGI

SEQ ID NO: 23134 - protein, 850 aa, Homo sapiens
MAAQRNRSKESKDCSGLVLLCLFFGIPWEAGARQISYSIPEELEKGSFVGNISKDLGLAPRELAERGVRIVSRGRTQLFSLNPRSGSLITAGRIDREELCAQSARCVVSFNILVEDRVKLFGIEIEVTDINDNAPKFQAENLDVKINENVAAGMRFPLPEAIDPDVGVNSLQSYQLSPNKHFSLRVQSRANGVKYPELVLEHSLDREEEAIHHLVLTASDGGDPLRSGTVLVSVTVFDANDNAPVFTLPEYRVSVPENLPVGTQLLTVTATDRDEGANGEVTYSFRKLPDTQLLKFQLNKYTGEIKISENLDYEETGFYEIEIQAEDGGAYLATAKVLITVEDVNDNSPELTITSLFSPVTEDSPLGTVVALLNVHDLDSEQNGQVTCSILAYLPFKLEKSIDSYYRLVIHRALDREQVSSYNITVTATDGGSPPLSTEAHFMLQVADINDNPPTFSQVSYFTYIPENNARGASIFSVTALDPDSKENAQIIYSLAEDTIQGVPLSSYISINSDTGVLYALRSFDYEQFHELQMQVTASDSGDPPLSSNVSLSLFVLDQNDNAPEILYPALPTDGSTGVELAPRSAEPGYLVTKVVAVDRDSGQNAWLSYRLLKASEPGLFAVGEHTGEVRTARALLDRDALKQSLVVAVQDHGQPPLSATVTLTVAVADSIPQVLADLGSFESPANSETSDLTLYLVVAVAAVSCVFLAFVIVLLAHRLRRWHKSRLLQASGGGLTGVSGSHFVGVDGVRAFLQTYSHEVSLTADSRKSHLIFPQPNYADTLISQESCEKNDPLSLLDDSKFPIEDTPLVPVSFIFIFTFVKKKKIGFYFEVCGMMVESVNAKTLMSRI

SEQ ID NO: 23135 - protein, 446 aa, Homo sapiens
MGLEALVPLAMIVAIFLLLVDLMHRHQRWAARYPPGPLPLPGLGNLLHVDFQNTPYCFDQLRRRFGDVFSLQLAWTPVVVLNGLAAVREAMVTRGEDTADRPPAPIYQVLGFGPRSQGRPFRPNGLLDKAVSNVIASLTCGRRFEYDDPRFLRLLDLAQEGLKEESGFLREVLNAVPVLPHIPALAGKVLRFQKAFLTQLDELLTEHRMTWDPAQPPRDLTEAFLAKKEKAKGSPESSFNDENLRIVVGNLFLAGMVTTSTTLAWGLLLMILHLDVQLRVQQEIDDVIGQVRRPEMGDQAHMPCTTAVIHEVQHFGDIVPLGVTHMTSRDIEVQGFRIPKGTTLITNLSSVLKDEAVWKKPFRFHPEHFLDAQGHFVKPEAFLPFSAGRRACLGEPLARMELFLFFTSLLQHFSFSVAAGQPRPSHSRVVSFLVTPSPYELCAVPR

SEQ ID NO: 23136 - protein, 875 aa, Homo sapiens
MGDSDDEYDRRRRDKFRRERSDYDRSRERDERRRGDDWNDREWDRGRERRSRGEYRDYDRNRRERFSPPRHELSPPQKRMRRDWDEHSSDPYHSGYEMPYAGGGGGPTYGPPQPWGHPDVHIMQHHVLPIQARLGSIAEIDLGVPPPVMKTFKEFLLSLDDSVDETEAVKRYNDYKLDFRRQQMQDFFLAHKDEEWFRSKYHPDEVGKRRQEARGALQNRLRVFLSLMETGWFDNLLLDIDKADAIVKMLDAAVIKMEGGTENDLRILEQEEEEEQAGKPGEPSKKEEGRAGAGLGDGERKTNDKDEKKEDGKQAENDSSNDDKTKKSEGDGDKEEKKEDSEKEAKKSSKKRNRKHSGDDSFDEGSVSESESESESGQAEEEKEEAEALKEKEKPKEEEWEKPKDAAGLECKPRPLHKTCSLFMRNIAPNISRAEIISLCKRYPGFMRVALSEPQPERRFFRRGWVTFDRSVNIKEICWNLQNIRLRECELSPGVNRDLTRRVRNINGITQHKQIVRNDIKLAAKLIHTLDDRTQLWASEPGTPPLPTSLPSQNPILKNITDYLIEEVSAEEEELLGSSGGAPPEEPPKEGNPAEINVERDEKLIKVLDKLLLYLRIVHSLDYYNTCEYPNEDEMPNRCGIIHVRGPMPPNRISHGEVLEWQKTFEEKLTPLLSVRESLSEEEAQKMGRKDPEQEVEKFVTSNTQELGKDKWLCPLSGKKFKGPEFVRKHIFNKHAEKIEEVKKEVAFFNNFLTDAKRPALPEIKPAQPPGPAQILPPGLTPGLPYPHQTPQGLMPYGQPRPPILGYGAGAVRPAVPTGGPPYPHAPYGAGRGNYDAFRGQGGYPGKPRNRMVRGDPRAIVEYRDLDAPDDVDFF

SEQ ID NO: 23137 - protein, 1070 aa, Homo sapiens
MVLDDLPNLEDIYTSLCSSTMEDSEMDFDSGLEDDDTKSDSILEDSTIFVAFKGNIDDKDFKWKLDAILKNVPNLLHMESSKLKVQKVEPWNSVRVTFNIPREAAERLRILAQSNNQQLRDLGILSVQIEGEGAINLALAQNRSQDVRMNGPMGAGNSVRMEAGFPMASGPGIIRMNNPATVMIPPGGNVSSSMMAPGPNPELQPRTPRPASQSDAMDPLLSGLHIQQQSHPSGSLAPPHHPMQPVSVNRQMNPANFPQLQQQQQQQQQQQQQQQQQQQQQQQQQLQARPPQQHQQQQPQGIRPQFTAPTQVPVPPGWNQLPSGALQPPPAQGSLGTMTANQGWKKAPLPGPMQQQLQARPSLATVQTPSHPPPPYPFGSQQASQAHTNFPQMSNPGQFTAPQMKSLQGGPSRVPTPLQQPHLTNKSPASSPSSFQQGSPASSPTVNQTQQQMGPRPPQNNPLPQGFQQPVSSPGRNPMVQQGNVPPNFMVMQQQPPNQGPQSLHPGLGGMPKRLPPGFSAGQANPNFMQGQVPSTTATTPGNSGAPQLQANQNVQHAGGQGAGPPQNQMQVSHGPPNMMQPSLMGIHGNMNNQQAGTSGVPQVNLSNMQGQPQQGPPSQLMGMHQQIVPSQGQMVQQQGTLNPQNPMILSRAQLMPQGQMMVNPPSQNLGPSPQRMTPPKQMLSQQGPQMMAPHNQMMGPQGQVLLQQNPMIEQIMTNQMQGNKQQFNTQNQSNVMPGPAQIMRGPTPNMQGNMVQFTGQMSGQMLPQQGPVNNSPSQVMGIQGQVLRPPGPSPHMAQQHGDPATTANNDVSLSQMMPDVSIQQTNMVPPHVQAMQGNSASGNHFSGHGMSFNAPFSGAPNGNQMSCGQNPGFPVNKDVTLTSPLLVNLLQSDISAGHFGVNNKQNNTNANKPKKKKPPRKKKNSQQDLNTPDTRPAGLEEADQPPLPGEQGINLDNSGPKLPEFSNRPPAPSQNLVSKETSTTALQASVARPELEVNAAIVSGQSSEPKEIVEKSKIPGRRNSRTEEPTVASESVENGHRKRSSRPASASSSTKDITSAVQSKRRKSK

SEQ ID NO: 23138 - protein, 261 aa, Homo sapiens
MFCQLAKTCPVQLWVDSTPPPGTRVRAMAIYKQSQHMTEVVRRCPHHERCSDSDGLAPPQHLIRVEGNLRVEYLDDRNTFRHSVVVPYEPPEVGSDCTTIHYNYMCNSSCMGGMNRRPILTIITLEDSSGNLLGRNSFEVRVCACPGRDRRTEEENLRKKGEPHHELPPGSTKRALPNNTSSSPQPKKKPLDGEYFTLQIRGRERFEMFRELNEALELKDAQAGKEPGGSRAHSSHLKSKKGQSTSRHKKLMFKTEGPDSD

SEQ ID NO: 23139 - protein, 693 aa, Homo sapiens
MGIELLCLFFLFLGRNDHVQGGAQTLQVHVRQTEDYPVDLYYLMDLSASMDDDLNTIKELGSRLSKEMSKLTSNFRLGFGSFVEKPVSPFVKTTPEEIANPCSSIPYFCLPTFGFKHILPLTNDAERFNEIVKNQKISANIDTPEGGFDAIMQAAVCKEKIGWRNDSLHLLVFVSDADSHFGMDSKLAGIVIPNDGLCHLDSKNEYSMSTVLEYPTIGQLIDKLVQNNVLLIFAVTQEQVHLYENYAKLIPGATVGLLQKDSGNILQLIISAYEELRSEVELEVLGDTEGLNLSFTAICNNGTLFQHQKKCSHMKVGDTASFSVTVNIPHCERRSRHIIIKPVGLGDALELLVSPECNCDCQKEVEVNSSKCHHGNGSFQCGVCACHPGHMGPRCECGEDMLSTDSCKEAPDHPSCSGRGDCYCGQCICHLSPYGNIYGPYCQCDNFSCVRHKGLLCGGNGDCDCGECVCRSGWTGEYCNCTTSTDSCVSEDGVLCSGRGDCVCGKCVCTNPGASGPTCERCPTCGDPCNSKRSCIECHLSAAGQAREECVDKCKLAGATISEEEDFSKDGSVSCSLQGENECLITFLITTDNEGKTIIHSINEKDCPKPPNIPMIMLGVSLAILLIGVVLLCIWKLLVSFHDRKEVAKFEAERSKAKWQTGTNPLYRGSTSTFKNVTYKHREKQKVDLSTDC

SEQ ID NO: 23140 - protein, 301 aa, Homo sapiens
MDPKAGGGGEEDDCVDSGAETGGSDYSHLSSTSSELSVEEAQDPFLVSIHIIADPGESQPLQEAIDNVLAWIHPDLPLFRVSERRASRRRRKPPKGAQPALAVVLFLQEEYGEEQILQLHRTLQQPPWRHHHTEQVHGRFLPYLPCSQDFFTLAPGTPLWAIRPVHYGKEIVRFTVYCRYDNYADSLRFYQLILRRSPSQKKADFCIFPIFSNLDVDIQFSLKRLPCDQCPVPTDSSVLEFRVRDIGELVPLLPNPCSPISEGRWQTEDHDGNKILLQVLGGRLSVCLGDLRNQLALPQTL

SEQ ID NO: 23141 - protein, 798 aa, Homo sapiens
MEFSWGSGQESRRLLLLLLLLAAWEAGNGQLHYSVSEEAKHGTFVGRIAQDLGLELAELVPRLFRVASKGRGGLLEVNLQNGILFVNSRIDREELCRRSAECSIHLEVIVDRPLQVFHVDVEVRDINDNPPVFPATQKNLSIAESRPLDSRFPLEGASDADIGENALLTYRLSPNEYFSLEKPPDDELVKGLGLILRKSLDREEAPEIFLVLTATDGGKPELTGTVQLLITVLDANDNAPAFDRTIYKVRLLENVPNGTLVIKLNASDLDEGLNGDIVYSFSNDISPNVKSKFHIDPITGQIIVKGYIDFEESKSYEIIVEGIDKGQLPLSGHCRVIVEVEDNNDNVPDLEFKSLSLPIREDAPLGTVIALISVSDKDMGVNGLVTCSLTSHVPFKLVSTFKNYYSLVLDSALDRESVSAYELVVTARDGGSPSLWATASVSVEVADVNDNAPAFAQPEYTVFVKENNPPGCHIFTVSAWDADAQENALVSYSLVERRVGERALSSYVSVHAESGKVYALQPLDHEELELLQFQVTARDAGVPPLGSNVTLQVFVLDENDNAPALLAPRAGGTGGAVSELVPWSVGVGHVVAKVRAVDADSGYNAWLSYELQPGTGGARIPFRVGLYTGEISTTRALDETDAPRHRLLVLVKDHGEPALTATATVLVSLVESGQAPKASSRALVGAVGPDAALVDVNVYLIIAICAVSSLLVLTLLLYTALRCSALPTEGACAPGKPTLVCSSAVGSWSYSQQRRPRVCSGEGPPKTDLMAFSPSLPDSRDREDQLQTTEESFAKVSV

SEQ ID NO: 23142 - protein, 690 aa, Homo sapiens [sequence omitted]

SEQ ID NO: 23143 - protein, 359 aa, Homo sapiens
MGLWALLPGWVSATLLLALAALPAALAANSSGRWWGIVNVASSTNLLTDSKSLQLVLEPSLQLLSRKQRRLIRQNPGILHSVSGGLQSAVRECKWQFRNRRWNCPTAPGPHLFGKIVNRGCRETAFIFAITSAGVTHSVARSCSEGSIESCTCDYRRRGPGGPDWHWGGCSDNIDFGRLFGREFVDSGEKGRDLRFLMNLHNNEAGRTTVFSEMRQECKCHGMSGSCTVRTCWMRLPTLRAVGDVLRDRFDGASRVLYGNRGSNRASRAELLRLEPDLVYFEKSPNFCTYSGRLGTAGTAGRACNSSSPALDGCELLCCGRGHRTRTQRVTERCNCTFHWCCHVSCRNCTHTRVLHECL

SEQ ID NO: 23144 - protein, 182 aa, Homo sapiens
MGDLQKRNRAITARRQHLKSVMLQIAATELEKEESRREAEKQNYLAEHCPPLHIPGSMSEVQELCKQLHAKIDAAEEEKYDMEVRVQKTSKELEDMNQKLFDLRGKFKRPPLRRVRMSADAMLKALLGSKHKVCMDLRANLKQVKKEDTEKERDLRDVGDWRKNIEEKSGMEGRKKMFESES

SEQ ID NO: 23145 - protein, 645 aa, Homo sapiens
MPLKSPVPFLPGTSPSADGPDSFSCVFEAILESHRAKGTSYTSLASLEALASPGPTQSPFFTFELPPQPPAPRPDPPAPAPLAPLEPDSGTSSAADGPWTQRGEEEEAEARAKLAPGREPPSPCHSEDSLGLGAAPLGSEPPLSQLVSDSDSELDSTERLALGSTDTLSNGQKADLEAAQRLAKRLYRLDGFRKADVARHLGKNNDFSKLVAGEYLKFFVFTGMTLDQALRVFLKELALMGETQERERVLAHFSQRYFQCNPEALSSEDGAHTLTCALMLLNTDLHGHNIGKRMTCGDFIGNLEGLNDGGDFPRELLKALYSSIKNEKLQWAIDEEELRRSLSELADPNPKVIKRISGGSGSGSSPFLDLTPEPGAAVYKHGALVRKVHADPDCRKTPRGKRGWKSFHGILKGMILYLQKEEYKPGKALSETELKNAISIHHALATRASDYSKRPHVFYLRTADWRVFLFQAPSLEQMQSWITRINVVAAMFSAPPFPAAVSSQKKFSRPLLPSAATRLSQEEQVRTHEAKLKAMASELREHRAAQLGKKGRGKEAEEQRQKEAYLEFEKSRYSTYAALLRVKLKAGSEELDAVEAALAQAGSTEDGLPPSHSSPSLQPKPSSQPRAQRHSSEPRPGAGSGRRKP

SEQ ID NO: 23146 - protein, 1122 aa, Homo sapiens
MSLQEMFRFPMGLLLGSVLLVASAPATLEPPGCSNKEQQVTVSHTYKIDVPKSALVQVDADPQPLSDDGASLLALGEAREEQNIIFRHNIRLQTPQKDCELAGSVQDLLARVKKLEEEMVEMKEQCSAQRCCQGVTDLSRHCSGHGTFSLETCSCHCEEGREGPACERLACPGACSGHGRCVDGRCLCHEPYVGADCGYPACPENCSGHGECVRGVCQCHEDFMSEDCSEKRCPGDCSGHGFCDTGECYCEEGFTGLDCAQVVTPQGLQLLKNTEDSLLVSWEPSSQVDHYLLSYYPLGKELSGKQIQVPKEQHSYEILGLLPGTKYIVTLRNVKNEVSSSPQHLLATTDLAVLGTAWVTDETENSLDVEWENPSTEVDYYKLRYGPMTGQEVAEVTVPKSSDPKSRYDITGLHPGTEYKITVVPMRGELEGKPILLNGRTEIDSPTNVVTDRVTEDTATVSWDPVQAVIDKYVVRYTSADGDTKEMAVHKDESSTVLTGLKPGEAYKVYVWAERGNQGSKKADTNALTEIDSPANLVTDRVTENTATISWDPVQATIDRYVVRYTSAKDGETREVPVGKEQSSTVLTGLRPGVEYTVHVWAQKGAQESKKADTKAQTDIDSPQNLVTDWVTENTATVSWDPVQATIDRYVVHYTSANGETREVPVGKEQSSTVLTGLRPGMEYTVHVWAQKGNQESKKADTKAQTEIDGPKNLVTDWVTENMATVSWDPVQATIDKYMVRYTSADGETREVPVGKEHSSTVLTGLRPGMEYMVHVWAQKGAQESKKADTKAQTELDPPRNLRPSAVTQSGGILTWTPPSAQIHGYILTYQFPDGTVKEMQLGREDQRFALQGLEQGATYPVSLVAFKGGRRSRNVSTTLSTVGARFPHPSDCSQVQQNSNAASGLYTIYLHGDASRPLQVYCDMETDGGGWIVFQRRNTGQLDFFKRWRSYVEGFGDPMKEFWLGLDKLHNLTTGTPARYEVRVDLQTANESAYAIYDFFQVASSKERYKLTVGKYRGTAGDALTYHNGWKFTTFDRDNDIALSNCALTHHGGWWYKNCHLANPNGRYGETKHSEGVNWEPWKGHEFSIPYVELKIRPHGYSREPVLGRKKRTLRGRLRTF

SEQ ID NO: 23147 - protein, 522 aa, Homo sapiens
MEFPDHSRHLLQCLSEQRHQGFLCDCTVLVGDAQFRAHRAVLASCSMYFHLFYKDQLDKRDIVHLNSDIVTAPAFALLLEFMYEGKLQFKDLPIEDVLAAASYLHMYDIVKVCKKKLKEKATTEADSTKKEEDASSCSDKVESLSDGSSHIAGDLPSDEDEGEDEKLNILPSKRDLAAEPGNMWMRLPSDSAGIPQAGGEAEPHATAAGKTVASPCSSTESLSQRSVTSVRDSADVDCVLDLSVKSSLSGVENLNSSYFSSQDVLRSNLVQVKVEKEASCDESDVGTNDYDMEHSTVKESVSTNNRVQYEPAHLAPLREDSVLRELDREDKASDDEMMTPESERVQVEGGMESSLLPYVSNILSPAGQIFMCPLCNKVFPSPHILQIHLSTHFREQDGIRSKPAADVNVPTCSLCGKTFSCMYTLKRHERTHSGEKPYTCTQCGKSFQYSHNLSRHAVVHTREKPHACKWCERRFTQSGDLYRHIRKFHCELVNSLSVKSEALSLPTVRDWTLEDSSQELWK

SEQ ID NO: 23148 - protein, 504 aa, Homo sapiens
MEAPLQTEMVELVPNGKHSEGLLPVITPMAGNQRVEDPARSCMEGKSFLQKSPSKEPHFTDFEGKTSFGMSVFNLSNAIMGSGILGLAYAMANTGIILFLFLLTAVALLSSYSIHLLLKSSGVVGIRAYEQLGYRAFGTPGKLAAALAITLQNIGAMSSYLYIIKSELPLVIQTFLNLEEKTSDWYMNGNYLVILVSVTIILPLALMRQLGYLGYSSGFSLSCMVFFLIAVIYKKFHVPCPLPPNFNNTTGNFSHVEIVKEKVQLQVEPEASAFCTPSYFTLNSQTAYTIPIMAFAFVCHPEVLPIYTELKDPSKKKMQHISNLSIAVMYIMYFLAALFGYLTFYNGVESELLHTYSKVDPFDVLILCVRVAVLTAVTLTVPIVLFPVRRAIQQMLFPNQEFSWLRHVLIAVGLLTCINLLVIFAPNILGIFGVIGATSAPFLIFIFPAIFYFRIMPTEKEPARSTPKILALCFAMLGFLLMTMSLSFIIIDWASGTSRHGGNH

SEQ ID NO: 23149 - protein, 485 aa, Homo sapiens
MTKAPCKAYPKRPLLGLVLTPTRELAVQVKQHIDAVARFTGIKTAILVGGMSTQKQQRMLNRRPEIVVATPGRLWELIKEKHYHLRNLRQLRCLVVDEADRMVEKGHFAELSQLLEMLNDSQYNPKRQTLVFSATLTLVHQAPARILHKKHTKKMDKTAKLDLLMQKIGMRGKPKVIDLTRNEATVETLTETKIHCETDEKDFYLYYFLMQYPGRSLVFANSISCIKRLSGLLKVLDIMPLTLHACMHQKQRLRNLEQFARLEDCVLLATDVAARGLDIPKVQHVIHYQVPRTSEIYVHRSGRTARATNEGLSLMLIGPEDVINFKKIYKTLKKDEDIPLFPVQTKYMDVVKERIRLARQIEKSEYRNFQACLHNSWIEQAAAALEIELEEDMYKGGKADQQEERRRQKQMKVLKKELRHLLSQPLFTESQKTKYPTQSGKPPLLVSAPSKSESALSCLSKQKKKKTKKPKEPQPEQPQPSTSAN

SEQ ID NO: 23150 - protein, 251 aa, Homo sapiens
MKSALFTRFFILLPWILIVIIMLDVDTRRPVPPLTPRPYFSPYAVGRGGARLPLRRGGPAHGTQKRNQSRPQPQPEPQLPTIYAITPTYSRPVQKAELTRLANTFRQVAQLHWILVEDAAARSELMRTTRKVSVWPVGLVGGRRYERPLVENGKVVGWYTGWRADRPFAIDMAGFAVSLQVILSNPKAVFKRRGSQPGMQESDFLKQITTVEELEPKANNCTKVLVWHTRTEKVNLANEPKYHLDTVKIEV

SEQ ID NO: 23151 - protein, 546 aa, Homo sapiens
LDSDFGESGRLTYEIVDGNDDHLFEIDPSSGEIRTLHPFWEDVTPVVELVVKVTDHGKPTLSAVAKLIIRSVSGSLPEGVPRVNGEQHHWDMSLPLIVTLSTISIILLAAMITIAVKCKRENKEIRTYNCRIAEYSHPQLGGGKGKKKKINKNDIMLVQSEVEERNAMNVMNVVSSPSLATSPMYFDYQTRLPLSSPRSEVMYLKPASNNLTVPQGHAGCHTSFTGQGTNASETPATRMSIIQTDNFPAEPNYMGSRQQFVQSSTFKDPERASLRDSGHGDSDQADSDQDTNKGSCCDMSVREALKMKTTSTKSQPLEQEPEECVNCTDECRVLGHSDRCWMPQFPAANQAENADYRTNLFVPTVEANVETETYETVNPTGKKTFCTFGKDKREHTILIANVKPYLKAKRALSPLLQEVPSASSSPTKACIEPCTSTKGSLDGCEAKPGALAEASSQYLPTDSQYLSPSKQPRDPPFMASDQMARVFADVHSRASRDSSEMGAVLEQLDHPNRDLGRESVDAEEVVREIDKLLQDCRGNDPVAVRK

SEQ ID NO: 23152 - protein, 449 aa, Homo sapiens
MSDWGQGFPQDPPDTSPSEGTNLNAPNSLGVSALCAICGDRATGKHYGASSCDGCKGFFRRSVRKNHMYSCRFSRQCVVDKDKRNQCRYCRLKKCFRAGMKKEAVQNERDRISTRRSSYEDSSLPSINALLQAEVLSRQITSPVSGINGDIRAKKIASIADVCESMKEQLLVLVEWAKYIPAFCELPLDDQVALLRAHAGEHLLLGATKRSMVFKDVLLLGNDYIVPRHCPELAEMSRVSIRILDELVLPFQELQIDDNEYAYLKAIIFFDPDAKGLSDPGKIKRLRSQVQVSLEDYINDRQYDSRGRFGELLLLLPTLQSITWQMIEQIQFIKLFGMAKIDNLLQEMLLGGSPSDAPHAHHPLHPHLMQEHMGTNVIVANTMPTHLSNGQMCEWPRPRGQAATPETPQPSPPGGSGSEPYKLLPGAVATIVKPLSAIPQPTITKQEVI

SEQ ID NO: 23153 - protein, 444 aa, Homo sapiens
MAEAALLLLPEAAAERDAREKLALWDRRPDTTAPLTDRQTDSVLELKAAAENLPVPAELPIEDLCSLTSQSLPIELTSVVPESTEDILLKGFTSLGMEEERIETAQQFFSWFAKLQTQMDQDEGTKYRQMRDYLSGFQEQCDAILNDVNSALQHLESLQKQYLFVSNKTGTLHEACEQLLKEQSELVDLAENIQQKLSYFNELETINTKLNSPTLSVNSDGFIPMLAKLDDCITYISSHPNFKDYPIYLLKFKQCLSKALHLMKTYTVNTLQTLTSQLLKRDPSSVPNADNAFTLFYVKFRAAAPKVRTLIEQIELRSEKIPEYQQLLNDIHQCYLDQRELLLGPSIACTVAELTSQNNRDHCALVRSGCAFMVHVCQDEHQLYNEFFTKPTSKLDELLEKLCVSLYDVFRPLIIHVIHLETLSELCGILKNEVLEDHVQNNGK

SEQ ID NO: 23154 - protein, 457 aa, Homo sapiens
MKFTLGLGSRAWRVSWEGAAAAAAGPGAGGSALRCRAQRVSSPRLGRRGSRLSGALPLCLSRGGGGAQALPDCAGPSPGHPGHPGARQLAGPLAMEQTYGEVNQLGGVFVNGRPLPNAIRLRIVELAQLGIRPCDISRQLRVSHGCVSKILARYNETGSILPGAIGGSKPRVTTPNVVKHIRDYKQGDPGIFAWEIRDRLLADGVCDKYNVPSVSSISRILRNKIGSLAQPGPYEASKQPPSQPTLPYNHIYQYPYPSPVSPTGAKMGSHPGVPGTAGHVSIPRSWPSAHSVSNILGIRTFMEQTGALAGSEGTAYSPKMEDWAGVNRTAFPATPAVNGLEKPALEADIKYTQSASTLSAVGGFLPACAYPASNQHGVYSAPGGGYLAPGPPWPPAQGPPLAPPGAGVAVHGGELAAAMTFKHPSREVADRKPPSSGSKAPDALSSLHGLPIPASTS

SEQ ID NO: 23155 - protein, 224 aa, Homo sapiens
MNQADPRLRAVCLWTLTSAAMSRGDNCTDLLALGIPSITQAWGLWVLLGAVTLLFLISLAAHLSQWTRGRSRSHPGQGRWVKDNRDGLTESSLLPRSPHSSPKLCVASGESVEEVPLYGNLHYLQTGRLSQDPEPDQQDPTLGGPARAAEEVMCYTSLQLRPPQGRIPGPGTPVKYSEVVLDSEPKSQASGPEPELYASVCAQTRRARASFPDQAYANSQPAAS

SEQ ID NO: 23156 - protein, 960 aa, Homo sapiens
MSRRKQAKPQHLKSDEELLPPDGAPEHAAPGEGAEDADSGPESRSGGEETSVCEKCCAEFFKWADFLEHQRSCTKLPPVLIVHEDAPPGLPSPLLPQTSASGVIFPNPLVSIAATANALDPLSALMKHRKGKPPNVSVFEPKASAEDPFFKHKCRFCAKVFGSDSALQIHLRSHTGERPFKCNICGNRFSTKGNLKVHFQRHKEKYPHIQMNPYPVPEYLDNVPTCSGIPYGMSLPPEKPVTTWLDSKPVLPTVPTSVGLQLPPTVPGAHGYADSPSATPASRSPQRPSPASSECASLSPGLNHVESGVSATAESPQSLLGGPPLTKAEPVSLPCTNARAGDAPVGAQASAAPTSVDGAPTSLGSPGLPAVSEQFKAQFPFGGLLDSMQTSETSKLQQLVENIDKKMTDPNQCVICHRVLSCQSALKMHYRTHTGERPFKCKICGRAFTTKGNLKTHFGVHRAKPPLRVQHSCPICQKKFTNAVVLQQHIRMHMGGQIPNTPLPEGFQDAMDSELAYDDKNAETLSSYDDDMDENSMEDDAELKDAATDPAKPLLSYAGSCPPSPPSVISSIAALENQMKMIDSVMSCQQLTGLKSVENGSGESDRLSNDSSSAVGDLESRSAGSPALSESSSSQALSPAPSNGESFRSKSPGLGAPEEPQEIPLKTERPDSPAAAPGSGGAPGRAGIKEEAPFSLLFLSRERGPSQSTPSLISSAAPTMIKMEVNGHGKAMALGEGPPLPAGVQVPAGPQTVMGPGLAPMLAPPPRRTPKQHNCQSCGKTFSSASALQIHERTHTGEKPFGCTICGRAFTTKGNLKVHMGTHMWNNAPARRGRRLSVENPMALLGGDALKFSEMFQKDLAARAMNVDPSFWNQYAAAITNGLAMKNNEISVIQNGGIPQLPVSLGGSALPPLGSMASGMDKARTGSSPPIVSLDKASSETAASRPFTRFIEDNKEIGIN

SEQ ID NO: 23157 - protein, 1838 aa, Homo sapiens
MDVHTRWKARSALRPGAPLLPPLLLLLLWAPPPSRAAQPADLLKVLDFHNLPDGITKTTGFCATRRSSKGPDVAYRVTKDAQLSAPTKQLYPASAFPEDFSILTTVKAKKGSQAFLVSIYNEQGIQQIGLELGRSPVFLYEDHTGKPGPEDYPLFRGINLSDGKWHRIALSVHKKNVTLILDCKKKTTKFLDRSDHPMIDINGIIVFGTRILDEEVFEGDIQQLLFVSDHRAAYDYCEHYSPDCDTAVPDTPQSQDPNPDEYYTEGDGEGETYYYEYPYYEDPEDLGKEPTPSKKPVEAAKETTEVPEELTPTPTEAAPMPETSEGAGKEEDVGIGDYDYVPSEDYYTPSPYDDLTYGEGEENPDQPTDPGAGAEIPTSTADTSNSSNPAPPPGEGADDLEGEFTEETIRNLDENYYDPYYDPTSSPSEIGPGMPANQDTIYEGIGGPRGEKGQKGEPAIIEPGMLIEGPPGPEGPAGLPGPPGTMGPTGQVGDPGERGPPGRPGLPGADGLPGPPGTMLMLPFRFGGGGDAGSKGPMVSAQESQAQAILQQARLALRGPAGPMGLTGRPGPVGPPGSGGLKGEPGDVGPQGPRGVQGPPGPAGKPGRRGRAGSDGARGMPGQTGPKGDRGFDGLAGLPGEKGHRGDPGPSGPPGPPGDDGERGDDGEVGPRGLPGEPGPRGLLGPKGPPGPPGPPGVTGMDGQPGPKGNVGPQGEPGPPGQQGNPGAQGLPGPQGAIGPPGEKGPLGKPGLPGMPGADGPPGHPGKEGPPGEKGGQGPPGPQGPIGYPGPRGVKGADGIRGLKGTKGEKGEDGFPGFKGDMGIKGDRGEIGPPGPRGEDGPEGPKGRGGPNGDPGPLGPPGEKGKLGVPGLPGYPGRQGPKGSIGFPGFPGANGEKGGRGTPGKPGPRGQRGPTGPRGERGPRGITGKPGPKGNSGGDGPAGPPGERGPNGPQGPTGFPGPKGPPGPPGKDGLPGHPGQRGETGFQGKTGPPGPPGVVGPQGPTGETGPMGERGHPGPPGPPGEQGLPGLAGKEGTKGDPGPAGLPGKDGPPGLRGFPGDRGLPGPVGALGLKGNEGPPGPPGPAGSPGERGPAGAAGPIGIPGRPGPQGPPGPAGEKGAPGEKGPQGPAGRDGLQGPVGLPGPAGPVGPPGEDGDKGEIGEPGQKGSKGDKGEQGPPGPTGPQGPIGQPGPSGADGEPGPRGQQGLFGQKGDEGPRGFPGPPGPVGLQGLPGPPGEKGETGDVGQMGPPGPPGPRGPSGAPGADGPQGPPGGIGNPGAVGEKGEPGEAGEPGLPGEGGPPGPKGERGEKGESGPSGAAGPPGPKGPPGDDGPKGSPGPVGFPGDPGPPGEPGPAGQDGPPGDKGDDGEPGQTGSPGPTGEPGPSGPPGKRGPPGPAGPEGRQGEKGAKGEAGLEGPPGKTGPIGPQGAPGKPGPDGLRGIPGPVGEQGLPGSPGPDGPPGPMGPPGLPGLKGDSGPKGEKGHPGLIGLIGPPGEQGEKGDRGLPGPQGSSGPKGEQGITGPSGPIGPPGPPGLPGPPGPKGAKGSSGPTGPKGEAGHPGPPGPPGPPGEVIQPLPIQASRTRRNIDASQLLDDGNGENYVDYADGMEEIFGSLNSLKLEIEQMKRPLGTQQNPARTCKDLQLCHPDFPDGEYWVDPNQGCSRDSFKVYCNFTAGGSTCVFPDKKSEGSKMARWPKEQPSTWYSQYKRGSLLSYVDAEGNPVGVVQMTFLRLLSASAHQNVTYHCYQSVAWQDAATGSYDKALRFLGSNDEEMSYDNNPYIRALVDGCATKKGYQKTVLEIDTPKVEQVPIVDIMFNDFGEASQKFGFEVGPACFMG

SEQ ID NO: 23158 - protein, 237 aa, Homo sapiens
MNPLLILTFVAAALAAPFDDDDKIVGGYNCEENSVPYQVSLNSGYHFCGGSLINEQWVVSAGHCYKSRIQVRLGEHNINAAKIIRHPQYDRKTLNNDIMLIKLSSRAVINARVSTISLPTAPPATGTKCLISGWGNTASSGADYPDELQCLDAPVLSQAKCEASYPGKITSNMFCVGFLEGGKDSCQGDSGGPVVCNGQLQGVVSWGDGCAQKNKPGVYTKVYNYVKWIKNTIAANS

SEQ ID NO: 23159 - protein, 162 aa, Homo sapiens
MNIFEDIGDYVPSTTKTPRDKERERYRERERDRERDRDRDRERERERDRERERERDREREEEKKRHSYFEKPKVDDEPMDVDKGPGSTKELIKSINEKFAGSAGWEGTESLKKPEDKKQLGDFFGMSNSYAECYPATMDDMAVDSDEEVDYSKMDQGNKKGP

SEQ ID NO: 23160 - protein, 216 aa, Homo sapiens
MSALGQITITVSRCWNTERNQTDKNPCLHGAYLQLRETVKNKSTHLKKPLMKQAPPWKDHLTFQPLHPAERKTQVWRWQSGNSSDLETTSSASPWPTGSNRDVVLNTLAESCCGLSELITAPPYAGVSIQGFSQIWVLFPFCGGTFHHNEKDVLGLQDFERESVSTSQSRNISLLTLGQLQNCVIGKLTIIDLLTEHLLGVRHGVICFPWGLPSSS

SEQ ID NO: 23161 - protein, 552 aa, Homo sapiens [sequence omitted]

SEQ ID NO: 23162 - protein, 545 aa, Homo sapiens
MSYPQFGYPYSSAPQFLMATNSLSTCCESGGRTLADSGPAASAQAPVYCPVYESRLLATARHELNSAAALGVYGGPYGGSQGYGNYVTYGSEASAFYSLNSFDSKDGSGSAHGGLAPAAAAYYPYEPALGQYPYDRIKRLGGHPHKGIGLDLSGLGRSPGSLYGTMDSGTRRKNATRETTSTLKAWLQEHRKNPYPTKGEKIMLAIITKMTLTQVSTWFANARRRLKKENKMTWPPRNKCADEKRPYAEGEEEEGGEEEAREEPLKSSKNAEPVGKEEKELELSDLDDFDPLEAEPPACELKPPFHSLDGGLERVPAAPDGPVKEASGALRMSLAAGGGAALDEDLERARSCLRSAAAGPEPLPGAEGGPQVCEAKLGFVPAGASAGLEAKPRIWSLAHTATAAAAAATSLSQTEFPSCMLKRQGPAAPAAVSSAPATSPSVALPHSGALDRHQDSPVTSLRNWVDGVFHDPILRHSTLNQAWATAKGALLDPGPLGRSLGAGANVLTAPLARAFPPAVPQDAPAAGAARELLALPKAGGKPFCA

SEQ ID NO: 23163 - protein, 182 aa, Homo sapiens
MAIYKQSQHMTEVVRRCPHHERCSDSDGLAPPQHLIRVEGNLRVEYLDDRNTFRHSVVVPYEPPEVGSDCTTIHYNYMCNSSCMGGMNRRPILTIITLEDSSGNLLGRNSFEVRVCACPGRDRRTEEENLRKKGEPHHELPPGSTKRALPNNTSSSPQPKKKPLDGEYFTLQDQTSFQKENC

SEQ ID NO: 23164 - protein, 944 aa, Homo sapiens
MSLTIRAPSVDYRNTLGLCGTFDENPENDFHDKNGMQIDQNFNNYVAFINEWRILPGKSMSDTLPVSMTSPGKPSYCSCSLDTAAYPSSEDLDSVSRSEIALGCKDLNHVSLSSLIPELDVTSEYINSDTLVREINKHTSPEEYNLNLFLQEKKHINLTKLGLNVQKHPGNEKEDSLQYLANKKYTQGRGSHSQEMRYNRQNRWKRQNFHEFPPLFAFPSLSQTDLEELTYFFPEDHAEDVQQEFFPSWPTPSGLTEYSTLTLCQETLANSSIGRLCLAFLGKRLDSVIEMCVKDVLLKDDLSWAEAGVALLENECEKRIVEEGKYNTEEYGTSIEDILSVLKCPNLCSGNGQCMEWGCACSPSFSSYDCSDSYDKAPEITELGNAGFCDVQKYNCMMVRVFGKGFKELPSIKCEVTKLQYNSSEWMPGEPIYTQTVFHNSRAVDCQLPTDVQQFDTMDLVGGKPTGKWQLKVSNDGYKFSNPKITVIYDGACQVCGLYKNDSCTIKENVCIIDGLCYVEGDKNPTSPCLICRPKISRFTWSFLENNQPPVIQALQDKLQTFYGENFEYQFVAFDPEGSDIHFTLDSGPEGASVSSAGLFMWKTDLLTTQQITVRLNDDCDAETRVTIEVTVKSCDCLNGGSCVSDRNFSPGSGVYLCVCLPGFHGSLCEVDISGCQSNPCGLGSYISGFHSYSCDCPPELKVETQFVNQFTTQTVVLTRSDKSVNKEEDDKNAQGRKRHVKPTSGNAFTICKYPCGKSRECVAPNICKCKPGYIGSNCQTALCDPDCKNHGKCIKPNICQCLPGHGGATCDEEHCNPPCQHGGTCLAGNLCTCPYGFVGPRCETMVCNRHCENGGQCLTPDICQCKPGWYGPTCSTALCDPVCLNGGSCNKPNTCLCPNGFFGEHCQNAFCHPPCKNGGHCMRNNVCVCREGYTGRRFQKRHL

SEQ ID NO: 23165 - protein, 792 aa, Homo sapiens
MVIIGPRGPGSQRLLLSLLLLAAWEVGSGQLHYSVYEEAKHGTFVGRIAQDLGLELAELVPRLFRVASKRHGDLLEVNLQNGILFVNSRIDREKLCGRSAECSIHLEVIVDRPLQVFHVDVEVKDINDNPPVFREREQKVPVSESAPLDSHFPLEGASDADIGVNSLLTYALSLNENFELKIKTKKDKSILPELVLRKLLDREQTPKLNLLLMVIDGGKPELTGSVQIQITVLDVNDNGPAFDKPSYKVVLSENVQNDTRVIQLNASDPDEGLNGEISYGIKMILPVSEKCMFSINPDTGEIRIYGELDFEENNAYEIQVNAIDKGIPSMAGHSMVLVEVLDVNDNVPEVMVTSLSLPVQEDAQVGTVIALISVSDRDSGANGQVICSLTPHVPFKLVSTYKNYYSLVLDSALDRESVSAYELVVTARDGGSPSLWATARVSVEVADVNDNAPAFAQPEYTVFVKENNPPGCHIFTVSAWDADAQKNALVSYSLVERRVGEHALSSYVSVHAESGKVYALQPLDHEELELLQFQVSARDAGVPPLGSNVTLQVFVLDENDNAPALLATPAGSAGGAVSELVPRSVGAGHVVAKVRAVDADSGYNAWLSYELQPAAVGAHIPFHVGLYTGEISTTRILDEADAPRHRLLVLVKDHGEPALTSTATVLVSLVENGQAPKTSSRASVGAVDPEAALVDINVYLIIAICAVSSLLVLTLLLYTALRCSAPPTVSRCAPGKPTLVCSSAVGSWSYSQQRRQRVCSAESPPKTDLMAFSPSLQLSREDCLNPPSEVSY

SEQ ID NO: 23166 - protein, 582 aa, Homo sapiens
MAHEGSRQVRDRGVTRSKAEKVRPPTVPVPQVDIVPGRLSEAEWMALTALEEGEDVVGDILADLLARVMDSAFKVYLTQQCIPFTISQAREAMLQITEWRFLARDEGESAVAEDPTWGEDEEPSACTTDSWAQGSVPVLHASTSEGLENFQGEDPGGVDRIPLGRSWMGRGSQEQMESWEPSPQLRVTSAPPPTSELFQEAGPGGPVEEADGQSRGLSSAGSLSASFQLSVEEAPADDADPSLDPYLVASPQASTGRGHPLGFHLSLEDLYCCMPQLDAAGDRLELRSEGVPCIASGVLVSYPSVGGATRPSASCQQQRAGHSDVRLSAHHHRMRRKAAVKRLDPARLPCHWVRPLAEVLVPDSQTRPLEAYRGRQRGEKTKARAEPQALGPGTRVSPAAFFPLRPGIPFRDLDSGPALLFPTLNLGLSSPSLESKLPLPNSRIRFLTTHPVLPDVARSRSPKLWPSVRWPSGWEGKAELLGELWAGRTRVPPQGLELADREGQDPGRWPRTTPPVLEATSQVMWKPVLLPEALKLAPGVSMWNRSTQVLLSSGVPEQEDKEGSTFPPVEQHPIQTGAPKPR

SEQ ID NO: 23167 - protein, 916 aa, Homo sapiens [sequence omitted]

SEQ ID NO: 23168 - protein, 1828 aa, Homo sapiens
MAASELYTKFARVWIPDPEEVWKSAELLKDYKPGDKVLLLHLEEGKDLEYHLDPKTKELPHLRNPDILVGENDLTALSYLHEPAVLHNLRVRFIDSKLIYTYCGIVLVAINPYEQLPIYGEDIINAYSGQNMGDMDPHIFAVAEEAYKQMARDERNQSIIVSGESGAGKTVSAKYAMRYFATVSGSASEANVEEKVLASNPIMESIGNAKTTRNDNSSRFGKYIEIGFDKRYRIIGANMRTYLLEKSRVVFQAEEERNYHIFYQLCASAKLPEFKMLRLGNADNFNYTKQGGSPVIEGVDDAKEMAHTRQACTLLGISESHQMGIFRILAGILHLGNVGFTSRDADSCTIPPKHEPLCIFCELMGVDYEEMCHWLCHRKLATATETYIKPISKLQATNARDALAKHIYAKLFNWIVDNVNQALHSAVKQHSFIGVLDIYGFETFEINSFEQFCINYANEKLQQQFNMHVFKLEQEEYMKEQIPWTLIDFYDNQPCINLIESKLGILDLLDEECKMPKGTDDTWAQKLYNTHLNKCALFEKPRLSNKAFIIQHFADKVEYQCEGFLEKNKDTVFEEQIKVLKSSKFKMLPELFQDDEKAISPTSATSSGRTPLTRTPAKPTKGRPGQMAKEHKKTVGHQFRNSLHLLMETLNATTPHYVRCIKPNDFKFPFTFDEKRAVQQLRACGVLETIRISAAGFPSRWTYQEFFSRYRVLMKQKDVLSDRKQTCKNVLEKLILDKDKYQFGKTKIFFRAGQVAYLEKLRADKLRAACIRIQKTIRGWLLRKKYLRMRKAAITMQRYVRGYQARCYAKFLRRTKAATIIQKYWRMYVVRRRYKIRRAATIVLQSYLRGFLARNRYRKILREHKAVIIQKRVRGWLARTHYKRSMHAIIYLQCCFRRMMAKRELKKLKIEARSVERYKKLHIGMENKIMQLQRKVDEQNKDYKCLVEKLTNLEGIYNSETEKLRSDLERLQLSEEEAKVATGRVLSLQEEIAKLRKDLEQTRSEKKCIEEHADRYKQETEQLVSNLKEENTLLKQEKEALNHRIVQQAKEMTETMEKKLVEETKQLELDLNDERLRYQNLLNEFSRLEERYDDLKEEMTLMVHVPKPGHKRTDSTHSSNESEYIFSSEIAEMEDIPSRTEEPSEKKVPLDMSLFLKLQKRVTELEQEKQVMQDELDRKEEQVLRSKAKEEERPQIRGAELEYESLKRQELESENKKLKNELNELRKALSEKSAPEVTAPGAPAYRVLMEQLTSVSEELDVRKEEVLILRSQLVSQKEAIQPKDDKNTMTDSTILLEDVQKMKDKGEIAQAYIGLKETNRLLESQLQSQKRSHENEAEALRGEIQSLKEENNRQQQLLAQNLQLPPEARIEASLQHEITRLTNENLDLMEQLEKQDKTVRKLKKQLKVFAKKIGELEVGQMENISPGQIIDEPIRPVNIPRKEKDFQGMLEYKKEDEQKLVKNLILGNKPRGVAVNLIPGLPAYILFMCVRHADYLNDDQKVRSLLTSTINSIKKVLKKRGDDFETVSFWLSNTCRFLHCLKQYSGEEGFMKHNTSRQNEHCLTNFDLAEYRQVLSDLAIQIYQQLVRVLENILQPMIVSGMLEHETIQGVSGVKPTGLRKRTSSIADEGTYTLDSILRQLNSFHSVMCQHGMDPELIKQVVKQMFYIIGAITLNNLLLRKDMCSWSKGMQIRYNVSQLEEWLRDKNLMNSGAKETLEPLIQAAQLLQVKKKTDDDAEAICSMCNALTTAQIVKVLNLYTPVNEFEERVSVSFIRTIQMRLRDRKDSPQLLMDAKHIFPVTFPFNPSSLALETIQIPASLGLGFISRV

SEQ ID NO: 23169 - protein, 314 aa, Homo sapiens
GRMSANTSMVTEFLLLGFSHLADLQGLLFSVFLTIYLLTVAGNFLIVVLVSTDAALQSPMYFFLRTLSALEIGYTSVTVPLLLHHLLTGRRHISRSGCALQMFFFLFFGATECCLLAAMAYDRYAAICEPLRYPLLLSHRVCLQLAGSAWACGVLVGLGHTPFIFSLPFCGPNTIPQFFCEIQPVLQLVCGDTSLNELQIILATALLILCPFGLILGSYGRILVTIFRIPSVAGRRKAFSTCSSHLIMVSLFYGTALFIYIRPKASYDPATDPLVSLFYAVVTPILNPIIYSLRNTEVKAALKRTIQKTVPMEI

SEQ ID NO: 23170 - protein, 820 aa, Homo sapiens
MIPARLHRDYKGLVLLGILLGTLWETGCTQIRYSVPEELEKGSRVGDISRDLGLEPRELAERGVRIIPRGRTQLFALNPRSGSLVTAGRIDREELCMGAIKCQLNLDILMEDKVKIYGVEVEVRDINDNAPYFRESELEIKISENAATEMRFPLPHAWDPDIGKNSLQSYELSPNTHFSLIVQNGADGSKYPELVLKRALDREEKAAHHLVLTASDGGDPVRTGTARIRVMVLDANDNAPAFAQPEYRASVPENLALGTQLLVVNATDPDEGVNAEVRYSFRYVDDKAAQVFKLDCNSGTISTIGELDHEESGFYQMEVQAMDNAGYSARAKVLITVLDVNDNAPEVVLTSLASSVPENSPRGTLIALLNVNDQDSEENGQVICFIQGNLPFKLEKSYGNYYSLVTDIVLDREQVPSYNITVTATDRGTPPLSTETHISLNVADTNDNPPVFPQASYSAYIPENNPRGVSLVSVTAHDPDCEENAQITYSLAENTIQGASLSSYVSINSDTGVLYALSSFDYEQFRDLQVKVMARDNGHPPLSSNVSLSLFVLDQNDNAPEILYPALPTDGSTGVELAPRSAEPGYLVTKVVAVDRDSGQNAWLSYRLLKASEPGLFSVGLHTGEVRTARALLDRDALKQSLVVAVQDHGQPPLSATVTLTVAVADSIPQVLADLGSLESPANSETSDLTLYLVVAVAAVSCVFLAFVILLLALRLRRWHKSRLLQASGGGLTGAPASHFVGVDGVQAFLQTYSHEVSLTTDSRKSHLIFPQPNYADMLVSQESFEKSEPLLLSGDSVFSKDSHGLIEVSLYQIFFLFFF

SEQ ID NO: 23171 - protein, 463 aa, Homo sapiens
MVCKRKGAGVPACTPCKQPLCPPPSSPTSEGAPTEAGGDAVRAGGTAPLSAQQQHECGDADCRESPENPCDCHREPPPETPDINQLPPSILLKIFSNLSLDERCLSASLVCKYWRDLCLDFQFWKQLDLSSRQQVTDELLEKIASRSQNIIEINISDCRSMSDNGVCVLAFKCPGLLRYTAYRCKQLSDTSIIAVASHCPLLQKVHVGNQDKLTDEGLKQLGSKCRELKDIHFGQCYKISDEGMIVIAKGCLKLQRIYMQENKLVTDQSVKAFAEHCPELQYVGFMGCSVTSKGVIHLTKLRNLSSLDLRHITELDNETVMEIVKRCKNLSSLNLCLNWIINDRCVEVIAKEGQNLKELYLVSCKITDYALIAIGRYSMTIETVDVGWCKEITDQGATLIAQSSKSLRYLGLMRCDKVNEVTVEQLVQQYPHITFSTVLQDCKRTLERAYQMGWTPNMSAASS

SEQ ID NO: 23172 - protein, 1657 aa, Homo sapiens
MGLQARRWASGSRGAAGPRRGVLQLLPLPLPLPLLLLLLLRPGAGRAAAQGEAEAPTLYLWKTGPWGRCMGDECGPGGIQTRAVWCAHVEGWTTLHTNCKQAERPNNQQNCFKVCDWHKELYDWRLGPWNQCQPVISKSLEKPLECIKGEEGIQVREIACIQKDKDIPAEDIICEYFEPKPLLEQACLIPCQQDCIVSEFSAWSECSKTCGSGLQHRTRHVVAPPQFGGSGCPNLTEFQVCQSSPCEAEELRYSLHVGPWSTCSMPHSRQVRQARRRGKNKEREKDRSKGVKDPEARELIKKKRNRNRQNRQENKYWDIQIGYQTREVMCINKTGKAADLSFCQQEKLPMTFQSCVITKECQVSEWSEWSPCSKTCHDMVSPAGTRVRTRTIRQFPIGSEKECPEFEEKEPCLSQGDGVVPCATYGWRTTEWTECRVDPLLSQQDKRRGNQTALCGGGIQTREVYCVQANENLLSQLSTHKNKEASKPMDLKLCTGPIPNTTQLCHIPCPTECEVSPWSAWGPCTYENCNDQQGKKGFKLRKRRITNEPTGGSGVTGNCPHLLEAIPCEEPACYDWKAVRLGNCEPDNGKECGPGTQVQEVVCINSDGEEVDRQLCRDAIFPIPVACDAPCPKDCVLSTWSTWSSCSHTCSGKTTEGKQIRARSILAYAGEEGGIRCPNSSALQEVRSCNEHPCTVYHWQTGPWGQCIEDTSVSSFNTTTTWNGEASCSVGMQTRKVICVRVNVGQVGPKKCPESLRPETVRPCLLPCKKDCIVTPYSDWTSCPSSCKEGDSSIRKQSRHRVIIQLPANGGRDCTDPLYEEKACEAPQACQSYRWKTHKWRRCQLVPWSVQQDSPGAQEGCGPGRQARAITCRKQDGGQAGIHECLQYAGPVPALTQACQIPCQDDCQLTSWSKFSSCNGDCGAVRTRKRTLVGKSKKKEKCKNSHLYPLIETQYCPCDKYNAQPVGNWSDCILPEGKVEVLLGMKVQGDIKECGQGYRYQAMACYDQNGRLVETSRCNSHGYIEEACIIPCPSDCKLSEWSNWSRCSKSCGSGVKVRSKWLREKPYNGGRPCPKLDHVNQFQVYEVVPCHSDCNQYLWVTEPWSICKVTFVNMRENCGEGVQTRKVRCMQNTADGPSEHVEDYLCDPEEMPLGSRVCKLPCPEDCVISEWGPWTQCVLPCNQSSFRQRSADPIRQPADEGRSCPNAVEKEPCNLNKNCYHYDYNVTDWSTCQLSEKAVCGNGIKTRMLDCVRSDGKSVDLKYCEALGLEKNWQMNTSCMVECPVNCQLSDWSPWSECSQTCGLTGKMIRRRTVTQPFQGDGRPCPSLMDQSKPCPVKPCYRWQYGQWSPCQVQEAQCGEGTRTRNISCVVSDGSADDFSKVVDEEFCADIELIIDGNKNMVLEESCSQPCPGDCYLKDWSSWSLCQLTCVNGEDLGFGGIQVRSRPVIIQELENQHLCPEQMLETKSCYDGQCYEYKWMASAWKGSSRTVWCQRSDGINVTGGCLVMSQPDADRSCNPPCSQPHSYCSETKTCHCEEGYTEVMSSNSTLEQCTLIPVVVLPTMEDKRGDVKTSRAVHPTQPSSNPAGRGRTWFLQPFGPDGRLKTWVYGVAAGAFVLLIFIVSMIYLACKKPKKPQRRQNNRLKPLTLAYDGDADM

SEQ ID NO: 23173 - protein, 669 aa, Homo sapiens
MAEQVLPQALYLSNMRKAVKIRERTPEDIFKPTNGIIHHFKTMHRYTLEMFRTCQFCPQFREIIHKALIDRNIQATLESQKKLNWCREVRKLVALKTNGDGNCLMHATSQYMWGVQDTDLVLRKALFSTLKETDTRNFKFRWQLESLKSQEFVETGLCYDTRNWNDEWDNLIKMASTDTPMARSGLQYNSLEEIHIFVLCNILRRPIIVISDKMLRSLESGSNFAPLKVGGIYLPLHWPAQECYRYPIVLGYDSHHFVPLVTLKDSGPEIRAVPLVNRDRGRFEDLKVHFLTDPENEMKEKLLKEYLMVIEIPVQGWDHGTTHLINAAKLDEANLPKEINLVDDYFELVQHEYKKWQENSEQGRREGHAQNPMEPSVPQLSLMDVKCETPNCPFFMSVNTQPLCHECSERRQKNQNKLPKLNSKPGPEGLPGMALGASRGEAYEPLAWNPEESTGGPHSAPPTAPSPFLFSETTAMKCRSPGCPFTLNVQHNGFCERCHNARQLHASHAPDHTRHLDPGKCQACLQDVTRTFNGICSTCFKRTTAEASSSLSTSLPPSCHQRSKSDPSRLVRSPSPHSCHRAGNDAPAGCLSQAARTPGDRTGTSKCRKAGCVYFGTPENKGFCTLFHRVQRKQTFCCCLRESQSHSVQVPEHHSVPGEGMRHPWKHHV

SEQ ID NO: 23174 - protein, 970 aa, Homo sapiens
MLPCKKRRTTVTESLQHKGNQEENNVDLESAVKPESDQVKDLSSVSLSWDPSHGRVAGFEVQSLQDAGNQLGMEDTSLSSGMLTQNTNVPILEGVDVAISQGITLPSLESFHPLNIHIGKGKLHATGSKRGKKMTLRPGPVTQEDRCDHLTLKEPFSGEPSEEVKEEGGKPQMNSEGEIPSLPSGSQSAKPVSQPRKSTQPDVCASPQEKPLRTLFHQPEEEIEDGGLFIPMEEQDNEESEKRRKKKKGTKRKRDGRGQEGTLAYDLKLDDMLDRTLEDGAKQHNLTAVNVRNILHEVITNEHVVAMMKAAISETEDMPMFEPKMTRSKLKEVVEKGVVIPTWNISPIKKANEIKPPQFVDIHLEEDDSSDEEYQPDDEEEDETAEESLLESDVESTASSPRGAKKSRLRQSSEMTETDEESGILSEAEKVTTPAIRHISAEVVPMGPPPPPKPKQTRDSTFMEKLHAVDEELASSPVCMDSFQPMDDSLIAFRTRSKMPLKDVPLGQLEAELQAPDITPDMYDPNTADDEDWKMWLGGLMNDDVGNEDEADDDDDPEYNFLEDLDEPDTEDFRTDRAVRITKKEVNELMEELFETFQDEMGFSNMEDDGPEEEECVAEPRPNFNTPQALRFEEPLANLLNEQHRTVKELFEQLKMKKSSAKQLQEVEKVKPQSEKVHQTLILDPAQRKRLQQQMQQHVQLLTQIHLLATCNPNLNPEATTTRIFLKELGTFAQSSIALHHQYNPKFQTLFQPCNLMGAMQLIEDFSTHVSIDCSPHKTVKKTANEFPCLPKQVAWILATSKVFMYPELLPVCSLKAKNPQDKIVFTKAEDNLLALGLKHFEGTEFPNPLISKYLLTCKTAHQLTVRIKNLNMNRAPDNIIKFYKKTKQLPVLGKCCEEIQPHQWKPPIEREEHRLPFWLKASLPSIQEELRHMADGARQSYRRKRRGVSQLKPLHLLKSPLMKEPQGQM

SEQ ID NO: 23175 - protein, 1059 aa, Homo sapiens [sequence omitted]

SEQ ID NO: 23176 - protein, 445 aa, Homo sapiens
MRPPGFRNFLLLASSLLFAGLSAVPQSFSPSLRSWPGAACRLSRAESERRCRAPGQPPGAALCHGRGRCDCGVCICHVTEPGMFFGPLCECHEWVCETYDGSTCAGTCHCGRCKCDNSDGSGLVYGKFCECDDRECIDDETEEICGGHGKCYCGNCYCKAGWHGDKCEFQCDITPWESKRRCTSPDGKICSNRGTCVCGECTCHDVDPTGDWGDIHGDTCECDERDCRAVYDRYSDDFCSGHGQCNCGRCDCKAGWYGKKCEHPQSCTLSAEESIRKCQGSSDLPCSGRGKCECGKCTCYPPGDRRVYGKTCECDDRRCEDLDGVVCGGHGTCSCGRCVCERGWFGKLCQHPRKCNMTEEQSKNLCESADGILCSGKGSCHCGKCICSAEEWYISGEFCDCDDRDCDKHDGLICTGNGICSCGNCECWDGWNGNACEIWLGSEYP

SEQ ID NO: 23177 - protein, 859 aa, Homo sapiens
MKLKDTKSRPKQSSCGKFQTKGIKVVGKWKEVKIDPNMFADGQMDDLVCFEELTDYQLVSPAKNPSSLFSKEAPKRKAQAVSEEEEEEEGKSSSPKKKIKLKKSKNVATEGTSTQKEFEVKDPELEAQGDDMVCDDPEAGEMTSENLVQTAPKKKKNKGKKGLEPSQSTAAKVPKKAKTWIPEVHDQKADVSAWKDLFVPRPVLRALSFLGFSAPTPIQALTLAPAIRDKLDILGAAETGSGKTLAFAIPMIHAVLQWQKRNAAPPPSNTEAPPGETRTEAGAETRSPGKAEAESDALPDDTVIESEALPSDIAAEARAKTGGTVSDQALLFGDDDAGEGPSSLIREKPVPKQNENEEENLDKEQTGNLKQELDDKSATCKAYPKRPLLGLVLTPTRELAVQVKQHIDAVARFTGIKTAILVGGMSTQKQQRMLNRRPEIVVATPGRLWELIKEKHYHLRNLRQLRCLVVDEADRMVEKGHFAELSQLLEMLNDSQYNPKRQTLVFSATLTLVHQAPARILHKKHTKKMDKTAKLDLLMQKIGMRGKPKVIDLTRNEATVETLTETKIHCETDEKDFYLYYFLMQYPGRSLVFANSISCIKRLSGLLKVLDIMPLTLHACMHQKQRLRNLEQFARLEDCVLLATDVAARGLDIPKVQHVIHYQVPRTSEIYVHRSGRTARATNEGLSLMLIGPEDVINFKKIYKTLKKDEDIPLFPVQTKYMDVVKERIRLARQIEKSEYRNFQACLHNSWIEQAAAALEIELEEDMYKGGKADQQEERRRQKQMKVLKKELRHLLSQPLFTESQKTKYPTQSGKPPLLVSAPSKSESALSCLSKQKKKKTKKPKEPQPEQPQPSTSAN

SEQ ID NO: 23178 - protein, 671 aa, Homo sapiens
MPDGTPPPQEAEEPSLLKKLLLAPANTQLSYNECSGLSTQNHANHNHRIRTNPAIVKTENSWSNKAKSICQQQKPQRRPCSELLKYLTTNDDPPHTKPTENRNSSRDKCTSKKKSHTQSQSQHLQAKPTTLSLPLTPESPNDPKGSPFENKTIERTLSVELSGTAGLTPPTTPPHKANQDNPFRASPKLKSSCKTVVPPPSKKPRYSESSGTQGNNSTKKGPEQSELYAQLSKSSVLTGGHEERKTKRPSLRLFGDHDYCQSINSKTEILINISQELQDSRQLENKDVSSDWQGQICSSTDSDQCYLRETLEASKQVSPCSTRKQLQDQEIRAELNKHFGHPSQAVFDDEADKTGELRDSDFSNEQFSKLPMFINSGLAMDGLFDDSEDESDKLSYPWDGTQSYSLFNVSPSCSSFNSPCRDSVSPPKSLFSQRPQRMRSRSRSFSRHRSCSRSPYSRSRSRSPGSRSSSRSCYYYESSHYRHRTHRNSPLYVRSRSRSPYSRRPRYDSYEEYQHERLKREEYRREYEKRESERAKQRERQRQKAIEERRVIYVGKIRPDTTRTELRDRFEVFGEIEECTVNLRDDGDSYGFITYRYTCDAFAALENGYTLRRSNETDFELYFCGRKQFFKSNYADLDSNSDDFDPASTKSKYDSLDFDSLLKEAQRSLRR

SEQ ID NO: 23179 - protein, 778 aa, Homo sapiens [sequence omitted]

SEQ ID NO: 23180 - protein, 398 aa, Homo sapiens
MAMVVSSWRDPQDDVAGGNPGGPNPAAQTPGQPGAPATPGTAGDKGQGPPGSGQSQQHIECVVCGDKSSGKHYGQFTCEGCKSFFKRSVRRNLTYTCRANRNCPIDQHHRNQCQYCRLKKCLKVGMRREAVQRGRMPPTQPNPGQYALTNGDPLNGHCYLSGYISLLLRAEPYPTSRYGSQCMQPNNIMGIENICELAARLLFSAVEWARNIPFFPDLQITDQVSLLRLTWSELFVLNAAQCSMPLHVAPLLAAAGLHASPMSADRVVAFMDHIRIFQEQVEKLKALHVDSAEYSCLKAIVLFTSDACGLSDAAHIESLQEKSQCALEEYVRSQYPNQPSRFGKLLLRLPSLRTVSSSVIEQLFFVRLVGKTPIETLIRDMLLSGSSFNWPYMSIQCS

SEQ ID NO: 23181 - protein, 497 aa, Homo sapiens
MDDYMVLRMIGEGSFGRALLVQHESSNQMFAMKEIRLPKSFSNTQNSRKEAVLLAKMKHPNIVAFKESFEAEGHLYIVMEYCDGGDLMQKIKQQKGKLFPEDMILNWFTQMCLGVNHIHKKRVLHRDIKSKNIFLTQNGKVKLGDFGSARLLSNPMAFACTYVGTPYYVPPEIWENLPYNNKSDIWSLGCILYELCTLKHPFQANSWKNLILKVCQGCISPLPSHYSYELQFLVKQMFKRNPSHRPSATTLLSRGIVARLVQKCLPPEIIMEYGEEVLEEIKNSKHNTPRKKTNPSRIRIALGNEASTVQEEEQDRKGSHTDLESINENLVESALRRVNREEKASSPNLHRRQWEKNVPNTALTALENASILTSSLTAEDDRGGSVIKYSKNTTRKQWLKETPDTLLNILKNADLSLAFQTYTIYRPGSEGFLKGPLSEETEASDSVDGGHDSVILDPERLEPGLDEEDTDFEEEDDNPDWVSELKKRAGWQGLCDR

SEQ ID NO: 23182 - protein, 729 aa, Homo sapiens
MAAPDLAHGGHVSRDSVCLHEEQTQAAGMVAGWLINCYQDAVTFDDVAVDFTQEEWTLLDPSQRDLYRDVMLENYENLASVEWRLKTKGPALRQDRSWFRASNETQTARSHNGGQLCDRTQCGEAFSEHSGLSTHVRTQNTGDSCVSNHYERDFFIPCQKTLFKIGEQFSVLGQCGKAFSSTPNVVSQQACTRDRSLDYSSCGEVFLNQSYLQARAGSHNGEETWKWKPCGKALTHSMGCATPVEMHAVRNPHVCRECGKAFRYTAYLTGRVQVHPGEKPCELEECGKASPVSSSLTQHVRIHAAEKPCECKECGKAFTGLSGLSKHVQTDPGQKPYECKDCGKACGGFYLLNEHGKTHTREKPFACVVCGKYFRNSSCLNNHVRIHTGIKPYTCSYCGKAFTVRCGLTRHVRTHTGEKPYTCKDCGKAFCTSSGLTEHVRTHTGEKPYECKDCGKSFTVSSSLTEHARIHTGEKPYECKQCGKAFTGRSGLTKHMRTHTGEKPYECKDCGKAYNRVYLLNEHVKTHTEEKPFICTVCRKSFRNSSCLNKHIQIHTGIKPYECKDCGKTFTVSSSLTEHIRTHTGEKPYECKVCGKAFTTSSHLIVHIRTHTGEKPYICKECGKAFASSSHLIEHRRTHTGEKPYICNECGKAFRASSHLHKHGRIHTGQKPYKCKECGKAYNRFYLLKEHLKTYTEEQVFVCKDCGKSFKNSSCLNHHTQIHTDEKPF

SEQ ID NO: 23183 - protein, 2099 aa, Homo sapiens
MTLHATRGAALLSWVNSLHVADPVEAVLQLQDCSIFIKIIDRIHGTEEGQQILKQPVSERLDFVCSFLQKNRKHPSSPECLVSAQKVLEGSELELAKMTMLLLYHSTMSSKSPRDWEQFEYKIQAELAVILKFVLDHEDGLNLNEDLENFLQKAPVPSTCSSTFPEELSPPSHQAKREIRFLELQKVASSSSGNNFLSGSPASPMGDILQTPQFQMRRLKKQLADERSNRDELELELAENRKLLTEKDAQIAMMQQRIDRLALLNEKQAASPLEPKELEELRDKNESLTMRLHETLKQCQDLKTEKSQMDRKINQLSEENGDLSFKLREFASHLQQLQDALNELTEEHSKATQEWLEKQAQLEKELSAALQDKKCLEEKNEILQGKLSQLEEHLSQLQDNPPQEKGEVLGDVLQLETLKQEAATLAANNTQLQARVEMLETERGQQEAKLLAERGHFEEEKQQLSSLITDLQSSISNLSQAKEELEQASQAHGARLTAQVASLTSELTTLNATIQQQDQELAGLKQQAKEKQAQLAQTLQQQEQASQGLRHQVEQLSSSLKQKEQQLKEVAEKQEATRQDHAQQLATAAEEREASLRERDAALKQLEALEKEKAAKLEILQQQLQVANEARDSAQTSVTQAQREKAELSRKVEELQACVETARQEQHEAQAQVAELELQLRSEQQKATEKERVAQEKDQLQEQLQALKESLKVTKGSLEEEKRRAADALEEQQRCISELKAETRSLVEQHKRERKELEEERAGRKGLEARLQQLGEAHQAETEVLRRELAEAMAAQHTAESECEQLVKEVAAWRERYEDSQQEEAQYGAMFQEQLMTLKEECEKARQELQEAKEKVAGIESHSELQISRQQNELAELHANLARALQQVQEKEVRAQKLADDLSTLQEKMAATSKEVARLETLVRKAGEQQETASRELVKEPARAGDRQPEWLEEQQGRQFCSTQAALQAMEREAEQMGNELERLRAALMESQGQQQEERGQQEREVARLTQERGRAQADLALEKAARAELEMRLQNALNEQRVEFATLQEALAHALTEKEGKDQELAKLRGLEAAQIKELEELRQTVKQLKEQLAKKEKEHASGSGAQSEAAGRTEPTGPKLEALRAEVSKLEQQCQKQQEQADSLERSLEAERASRAERDSALETLQGQLEEKAQELGHSQSALASAQRELAAFRTKVQDHSKAEDEWKAQVARGRQEAERKNSLISSLEEEVSILNRQVLEKEGESKELKRLVMAESEKSQKLEEGCACCRQRQPATVPELQNAALLCGRRCRASGREKQRVASENLRQELTSQAERAEELGQELKAWQEKFFQKEQALSTLQLEHTSTQALVSELLPAKHLCQQLQAEQAAAEKRHREELEQSKQAAGGLRAELLRAQRELGELIPLRQKVAEQERTAQQLRAEKASYAEQLSMLKKAHGLLAEENRGLGERANLGRQFLEVELDQAREKYVQELAAVRADAETRLAEVQREAQSTARELEVMTAKYEGAKVKVLEERQRFQEERQKLTAQVEELSKKLADSDQASKVQQQKLKAVQAQGGESQQEAQRLQAQLNELQAQLSQKEQAAEHYKLQMEKAKTHYDAKKQQNQELQEQLRSLEQLQKENKELRAEAERLGHELQQAGLKTKEAEQTCRHLTAQVRSLEAQVAHADQQLRDLGKFQVATDALKSREPQAKPQLDLSIDSLDLSCEEGTPLSITSKLPRTQPDGTSVPGEPASPISQRLPPKVESLESLYFTPIPARSQAPLESSLDSLGDVFLDSGRKTRSARRRTTQIINITMTKKLDVEEPDSANSSFYSTRSAPASQASLRATSSTQSLARLGSPDYGNSALLSLPGYRPTTRSSARRSQAGVSSGAPPGRNSFYMGTCQDEPEQLDDWNRIAELQQRNRVCPPHLKTCYPLESRPSLSLGTITDEEMKTGDPQETLRRASMQPIQIAEGTGITTRQQRKRVSLEPHQGPGTPESKKATSCFPRPMTPRDRHEGRKQSTTEAQKKAAPASTKQADRRQSMAFSILNTPKKLGNSLLRRGASKKALSKASPNTRSGTRRSPRIATTTASAATAAAIGATPRAKGKAKH

SEQ ID NO: 23184 - protein, 504 aa, Homo sapiens
MAVPAALIPPTQLVPPQPPISTSASSSGTTTSTSSATSSPAPSIGPPASSGPTLFRPEPIASAAAAAATVTSTGGGGGGGGSGGGGGSSGNGGGGGGGGGGSNCNPNLAAASNGSGGGGGGISAGGGVASSTPINASTGSSSSSSSSSSSSSSSSSSSSSSSSCGPLPGKPVYSTPSPVENTPQNNECKMVDLRGAKVASFTVEGCELICLPQAFDLFLKHLVGGLHTVYTKLKRLEITPVVCNVEQVRILRGLGAIQPGVNRCKLISRKDFETLYNDCTNASSRPGRPPKRTQSVTSPENSHIMPHSVPGLMSPGIIPPTDETPLSTPTARDSLDKLSLTGHGQPLPPGFPSPFLFPDGLSSIETLLTNIQGLLKVAIDNARAQEKQVQLEKTELKMDFLRERELRETLEKQLAMEQKNRAIVQKRLKKEKKAKRKLQEALEFETKRREQAEQTLKQAASTDSLRVLNDSLTPEIEADRSGGRTDAERTIQDGRLYLKTTVMY

SEQ ID NO: 23185 - protein, 975 aa, Homo sapiens
MPPRAPPAPGPRPPPRAAAATDTAAGAGGAGGAGGAGGPGFRPLAPRPWRWLLLLALPAACSAPPPRPVYTNHWAVQVLGGPAEADRVAAAHGYLNLGQIGNLEDYYHFYHSKTFKRSTLSSRGPHTFLRMDPQVKWLQQQEVKRRVKRQVRSDPQALYFNDPIWSNMWYLHCGDKNSRCRSEMNVQAAWKRGYTGKNVVVTILDDGIERNHPDLAPNYDSYASYDVNGNDYDPSPRYDASNENKHGTRCAGEVAASANNSYCIVGIAYNAKIGGIRMLDGDVTDVVEAKSLGIRPNYIDIYSASWGPDDDGKTVDGPGRLAKQAFEYGIKKGRQGLGSIFVWASGNGGREGDYCSCDGYTNSIYTISVSSATENGYKPWYLEECASTLATTYSSGAFYERKIVTTDLRQRCTDGHTGTSVSAPMVAGIIALALEANSQLTWRDVQHLLVKTSRPAHLKASDWKVNGAGHKVSHFYGFGLVDAEALVVEAKKWTAVPSQHMCVAASDKRPRSIPLVQVLRTTALTSACAEHSDQRVVYLEHVVVRTSISHPRRGDLQIYLVSPSGTKSQLLAKRLLDLSNEGFTNWEFMTVHCWGEKAEGQWTLEIQDLPSQVRNPEKQGKLKEWSLILYGTAEHPYHTFSAHQSRSRMLELSAPELEPPKAALSPSQVEVPEDEEDYTAQSTPGSANILQTSVCHPECGDKGCDGPNADQCLNCVHFSLGSVKTSRKCVSVCPLGYFGDTAARRCRRCHKGCETCSSRAATQCLSCRRGFYHHQEMNTCVTLCPAGFYADESQKNCLKCHPSCKKCVDEPEKCTVCKEGFSLARGSCIPDCEPGTYFDSELIRCGECHHTCGTCVGPGREECIHCAKNFHFHDWKCVPACGEGFYPEEMPGLPHKVCRRYGPPGGERQAAVSSKGVPGGQSLAASSPGAGEGMLHHPTVDRSPFTELLRGLRPFVHWMHICWVPAVGRHRAAAG

SEQ ID NO: 23186 - protein, 987 aa, Homo sapiens
MVCSPVTVRIAPPDRRFSRSAIPEQIISSTLSSPSSNAPDPCAKETVLSALKEKKKKRTVEEEDQIFLDGQENKRRRHDSSGSGHSAFEPLVASGVPASFVPKPGSLKRGLNSQSSDDHLNKRSRSSSMSSLTGAYTSGIPSSSRNAITSSYSSTRGISQLWKRNGPSSSPFSSPASSRSQTPERPAKKIREEELCHHSSSSTPLAADKESQGEKAADTTPRKKQNSNSQSTPGSSGQRKRKVQLLPSRRGEQLTLPPPPQLGYSITAEDLDLEKKASLQWFNQALEDKSDAASNSVTETPPTTQPSFTFTLPAAATASPPTSLLAPSTNPLLESLKKMQTPPSLPPCPESAGAATTEALSPPKTPSLLPPLGLSQSGPPGLLPSPSFDSKPPTTLLGLIPAPSMVPATDTKAPPTLQAETATKPQATSAPSPAPKQSFLFGTQNTSPSSPAAPAASSASPMFKPIFTAPPKSEKEGLTPPGPSVSATAPSSSSLPTTTSTTAPTFQPVFSSMGPPASVPLPAPFFKQTTTPATAPTTTAPLFTGLASATSAVAPITSASPSTDSASKPAFGFGINSVSSSSVSTTTSTATAASQPFLFGAPQASAASFTPAMGSIFQFGKPPALPTTTTVTTFSQSLPTAVPTATSSSAADFSGFGSTLATSAPATSSQPTLTFSNTSTPTFNIPFGSSAKSPLPSYPGANPQPAFGAAEGQPPGAAKPALTPSFGSSFTFGNSAAPAPATAPTPAPASTIKIVPAHVPTPIQPTFGGATHSAFGLKATASAFGAPASSQPAFGGSTAVFSFGAATSSGFGATTQTASSGSSSSVFGSTTPSPFTFGGSAAPAGSGSFGINVATPGSSATTGAFSFGAGQSGSTATSTPFTGGLGQNALGTTGQSTPFAFNVGSTTESKPVFGGTATPTFGQNTPAPGVGTSGSSLSFGASSAPAQGFVGVGPFGSAAPSFSIGAGSKTPGARQRLQARRQHTRKK

SEQ ID NO: 23187 - protein, 313 aa, Homo sapiens
MTLPSNNSTSPVFEFFLICFPSFQSWQHWLSLPLSLLFLLAMGANATLLITIYLEASLHQPLYYLLSLLSLLDIVLCLTVIPKVLAIFWFDLRSISFPACFLQVFIMNSFLTMESCTFMIMAYDRYVAICKPLQYSSIITDQFVARAAIFVVARNGLLTMPIPILSSRLRYCAGHIIKNCICTNVSVSKLSCDDITLNQSYQFVIGWTLLGSDLILIVLSYFFILKTVLRIKGEGDMAKALGTCGSHFILILFFTTVLLVLVITNLARKRIPPDVPILLNILHHLIPPALNPIVYGVRTKEIKQGIQNLLRRL

SEQ ID NO: 23188 - protein, 360 aa, Homo sapiens
FKSTREALNNKNIKPLLSTFSQVPGSENEKKCTLDQAFRGILEEEIINHSSCENVLAIISLAIGGVTEGICTASTPFVLLGDVLDCLPLDQCDTIFTFVEKNVATWKSNTFYSAGKNYLLRMCNDLLRRLSKSQNTVFCGRIQLFLARLFPLSEKSGLNLQSQFNLENVTVFNTNEQESTLGQKHTEDREEGMDVEEGEMGDEEAPTTCSIPIDYNLYRKFWSLQDYFRNPVQCYEKISWKTFLKYSEEVLAVFKSYKLDDTQASRKKMEELKTGGEHVYFAKFLTSEKLMDLQLSDSNFRRHILLQYLILFQYLKGQVKFKSSNYVLTDEQSLWIEDTTKSVYQVSSTRNKPMIEKMEI

SEQ ID NO: 23189 - protein, 177 aa, Homo sapiens
WQNETSSGNLESCAQARRVTGGLLDRLDDSPDQCRDSITSYLKGEAGKFEANGSHTEITPEAKTKSYFPESQNDVGKQSTKETLKPKIHGSGHVEEPASPLAAYQKSLEETSKLIIEETKPCVPVSMKKMSRTSPADGKPRLSLHEEEGSSGSEQKGEGFKVKTKKEIRHVEKKSHS

SEQ ID NO: 23190 - protein, 2251 aa, Homo sapiens; identical to SEQ ID NO: 7534

SEQ ID NO: 23191 - protein, 721 aa, Homo sapiens
MGDAESCLLRQQTREVRKKPLINYRFLRAAANAEPRGPQAQRTSCAKRECGAFTQRVRERAGRQPPAGGTRHSRAERGRRRSHPRSRTRTTALLRSSQTKEMATKEKLQCLKDFHKDILKPSPGKSPGTRPEDEAEGKPPQREKWSSKIDFVLSVAGGFVGLGNVWRFPYLCYKNGGGAFLIPYFIFLFGSGLPVFFLEIIIGQYTSEGGITCWEKICPLFSGIGYASVVIVSLLNVYYIVILAWATYYLFQSFQKELPWAHCNHSWNTPHCMEDTMRKNKSVWITISSTNFTSPVIEFWERNVLSLSPGIDHPGSLKWDLALCLLLVWLVCFFCIWKGVRSTGKVVYFTATFPFAMLLVLLVRGLTLPGAGAGIKFYLYPDITRLEDPQVWIDAGTQIFFSYAICLGAMTSLGSYNKYKYNSYRDCMLLGCLNSGTSFVSGFAIFSILGFMAQEQGVDIADVAESGPGLAFIAYPKAVTMMPLPTFWSILFFIMLLLLGLDSQFVEVEGQITSLVDLYPSFLRKGYRREIFIAFVCSISYLLGLTMVTEGGMYVFQLFDYYAASGVCLLWVAFFECFVIAWIYGGDNLYDGIEDMIGYRPGPWMKYSWAVITPVLCVGCFIFSLVKYVPLTYNKTYVYPNWAIGLGWSLALSSMLCVPLVIVIRLCQTEGPFLVRVKYLLTPREPNRWAVEREGATPYNSRTVMNGALVKPTHIIVETMM

SEQ ID NO: 23192 - protein, 3530 aa, Homo sapiens
MAKEEDEEKKAKKGKKGKKAPEPEKPKRSLKGTSRLFMGFRDRTPKISKKGQFRSASAFFWGLHTGPQKTKRKRKARTVLKSTSKLMTQMRMGKKKRAMKGKKPSFMVIRFPGRRGYGRLRPRARSLSKASTAINWLTKKFLLKKAEESGSEQATVDAWLQRSSSRMGSRKLPFPSGAEILRPGGRLRRFPRSRSIYASGEPLGFLPFEDEAPFHHSGSRKSLYGLEGFQDLGEYYDYHRDGDDYYDRQSLHRYEEQEPYLAGLGPYSPAWPPYGDHYYGYPPEDPYDYYHPDYYGGPFDPGYTYGYGYDDYEPPYAPPSGYSSPYSYHDGYEGEAHPYGYYLDPYAPYDAPYPPYDLPYHTPYDVPYFDPYGVHYTVPYAEGVYGGGDEAIYPPEVPYFYPEESASAFVYPWVPPPIPSPHNPYAHAMDDIAELEEPEDAGVERQGTSFRLPSAAFFEQQGMDKPARSKLSLIRKFRLFPRPQVKLFGKEKLEVPLPPSLDIPLPLGDADEEEDEEELPPVSAVPYGHPFWGFLTPRQRNLQRALSAFGAHRGLGFGPEFGRPVPRPATSLARFLKKTLSEKKPIARLRGSQKARAGGPAVREAAYKRFGYKLAGMDPEKPGTPIVLRRAQPRARSSNDARRPPAPQPAPRTLSHWSALLSPPVPPRPPSSGPPPAPPLSPALSGLPRPASPYGSLRRHPPPWAAPAHVPPAPQASWWAFVEPPAVSPEVPPDLLAFPGPRPSFRGSRRRGAAFGFPGASPRASRRRAWSPLASPQPSLRSSPGLGYCSPLAPPSPQLSLRTGPFQPPFLPPARRPRSLQESPAPRRAAGRLGPPGSPLPGSPRPPSPPLGLCHSPRRSSLNLPSRLPHTWRRLSEPPTRAVKPQVRLPFHRPPRAGAWRAPLEHRESPREPEDSETPWTVPPLAPSWDVDMPPTQRPPSPWPGGAGSRRGFSRPPPVPENPFLQLLGPVPSPTLQPEDPAADMTRVFLGRHHEPGPGQLTKSAGPTPEKPEEEATLGDPQLPAETKPPTPAPPKDVTPPKDITPPKDVLPEQKTLRPSLSYPLAACDQTRATWPPWHRWGTLPQAAAPLAPIRAPEPLPKGGERRQAAPGRFAVVMPRVQKLSSFQRVGPATLKPQVQPIQDPKPRACSLRWSCLWLRADAYGPWPRVHTHPQSCHLGPGAACLSLRGSWEEVGPPSWRNKMHSIRNLPSMRFREQHGEDGVEDMTQLEDLQETTVLSNLKIRFERNLIYTYIGSILVSVNPYQMFGIYGPEQVQQYNGRALGENPPHLFAVANLAFAKMLDAKQNQCIIISGESGSGKTEATKLILRYLAAMNQKREVMQQVQILEATPLLESFGNAKTVRNDNSSRFGKFVEIFLEGGVISGAITSQYLLEKSRIVFQAKNERNYHIFYELLAGLPAQLRQAFSLQEAETYYYLNQGGNCEIAGKSDADDFRRLLAAMEVLGFSSEDQDSIFRILASILHLGNVYFEKYETDAQEVASVVSAREIQAVAELLQISPEGLQKAITFKVTETMREKIFTPLTVESAVDARDAIAKVLYALLFSWLITRVNALVSPRQDTLSIAILDIYGFEDLSFNSFEQLCINYANENLQYLFNKIVFQEEQEEYIREQIDWQEITFADNQPCINLISLKPYGILRILDDQCCFPQATDHTFLQKCHYHHGANPLYSKPKMPLPEFTIKHYAGKVTYQVHKFLDKNHDQVRQDVLDLFVRSRTRVVAHLFSSHAPQAAPQRLGKSSSVTRLYKAHTVAAKFQQSLLDLVEKMERCNPLFMRCLKPNHKKEPGLFEPDVVMAQLRYSGVLETVRIRKEGFPVRLPFQGFIDRYCCLVALKHDLPANGDMCVSVLSRLCKVMPNMYRVGVSKLFLKEHLYQLLESMREHVLNLAALTLQRCLRGFFIKRRFRSLRHKIILLQSRARGYLARQRYQQMRRSLVKFRSLVHAYVSRRRYLKLRAEWRCQVEGALLWEQEELSKREVVAVGHLEVPAELAGLLQAVAGLGLAQVPQVAPVRTPRLQAEPRVTLPLDINNYPMAKFVQCHFKEPAFGMLTVPLRTPLTQLPAEHHAEAVSIFKLILRFMGDPHLHGARENIFGNYIVQKGLAVPELRDEILAQLANQVWHNHNAHNAERGWLLLAACLSGFAPSPCFNKYLLKFVSDYGRNGFQAVCQHRLMQAMGRAQQQGSGAARTLPPTQLEWTATYEKASMALDVGCFNGDQFSCPVHSWSTGEEVAGDILRHRGLADGWRGWTVAMKNGVQWAELAGHDYVLDLVSDLELLRDFPRQKSYFIVGTEGPAASRGGPKVVFGNSWDSDEDMSTRPQPQEHMPKVLDSDGYSSHNQDGTNGETEAQRGTATHQESDSLGEPAVPHKGLDCYLDSLFDPVLSYGDADLEKPTAIAYRMKGGGQPGGGSSSGTEDTPRRPPEPKPIPGLDASTLALQQAFIHKQAVLLAREMTLQATALQQQPLSAALRSLPAEKPPAPEAQPTSVGTGPPAKPVLLRATPKPLAPAPLAKAPRLPIKPVAAPVLAQDQASPETTSPSPELVRYSTLNSEHFPQPTQQIKNIVRQYQQPFRGGRPEALRKDGGKVFMKRPDPHEEALMILKGQMTHLAAAPGTQVSREAVALVKPVTSAPRPSMAPTSALPSRSLEPPEELTQTRLHRLINPNFYGYQDAPWKIFLRKEVFYPKDSYSHPVQLDLLFRQILHDTLSEACLRISEDERLRMKALFAQNQLDTQKPLVTESVKRAVVSTARDTWEVYFSRIFPATGSVGTGVQLLAVSHVGIKLLRMVKGGQEAGGQLRVLRAYSFADILFVTMPSQNMLEFNLASEKVILFSARAHQVKTLVDDFILELKKDSDYVVAVRNFLPEDPALLAFHKGDIIHLQPLEPPRVGYSAGCVVRRKVVYLEELRRRGPDFGWRFGTIHGRVGRFPSELVQPAAAPDFLQLPTEPGRGRAAAVAAAVASAAAAQEVGRRREGPPVRARSADHGEDALALPPYTMLEFAQKYFRDPQRRPQDGLRLKSKEPRESRTLEDMLCFTKTPLQESLIELSDSSLSKMATDMFLAVMRFMGDAPLKGQSDLDVLCNLLKLCGDHEVMRDECYCQVVKQITDNTSSKQDSCQRGWRLLYIVTAYHSCSEVLHPHLTRFLQDVSRTPGLPFQGIAKACEQNLQKTLRFGGRLELPSSIELRAMLAGRSSKRQLFLLPGGLERHLKIKTCTVALDVVEEICAEMALTRPEAFNEYVIFVVTNRGQHVCPLSRRAYILDVASEMEQVDGGYMLWFRRVLWDQPLKFENELYVTMHYNQVLPDYLKGLFSSVPASRPSEQLLQQVSKLASLQHRAKDHFYLPSVREVQEYIPAQLYRTTAGSTWLNLVSQHRQQTQALSPHQARAQFLGLLSALPMFGSSFFFIQSCSNIAVPAPCILAINHNGLNFLSTETHELMVKFPLKEIQSTRTQRPTANSSYPYVEIALGDVAAQRTLQLQLEQGLELCRVVAVHVENLLSAHEKRLTLPPSEITLL

SEQ ID NO: 23193 - protein, 294 aa, Homo sapiens [sequence omitted]

SEQ ID NO: 23194 - protein, 1098 aa, Homo sapiens
MGSKERFHWQSHNVKQSGVDDMVLLPQITEDAIAANLRKRFMDDYIFTYIGSVLISVNPFKQMPYFTDREIDLYQGAAQYENPPHIYALTDNMYRNMLIDCENQCVIISGESGAGKTVAAKYIMGYISKVSGGGEKVQHVKDIILQSNPLLEAFGNAKTVRNNNSSRFGKYFEIQFSRGGEPDGGKISNFLLEKSRVVMQNENERNFHIYYQLLEGASQEQRQNLGLMTPDYYYYLNQSDTYQVDGTDDRSDFGETLSAMQVIGIPPSIQQLVLQLVAGILHLGNISFCEDGNYARVESVDLLAFPAYLLGIDSGRLQEKLTSRKMDSRWGGRSESINVTLNVEQAAYTRDALAKGLYARLFDFLVEAINRAMQKPQEEYSIGVLDIYGFEIFQKNGFEQFCINFVNEKLQQIFIELTLKAEQEEYVQEGIRWTPIQYFNNKVVCDLIENKLSPPGIMSVLDDVCATMHATGGGADQTLLQKLQAAVGTHEHFNSWSAGFVIHHYAGKVSYDVSGFCERNRDVLFSDLIELMQTSEQAFLRMLFPEKLDGDKKGRPSTAGSKIKKQANDLVATLMRCTPHYIRCIKPNETKRPRDWEENRVKHQVEYLGLKENIRVRRAGFAYRRQFAKFLQRYAILTPETWPRWRGDERQGVQHLLRAVNMEPDQYQMGSTKVFVKNPESLFLLEEVRERKFDGFARTIQKAWRRHVAVRKYEEMREEASNILLNKKERRRNSINRNFVGDYLGLEERPELRQFLGKRERVDFADSVTKYDRRFKPIKRDLILTPKCVYVIGREKVKKGPEKGQVCEVLKKKVDIQALRGVSLSTRQDDFFILQEDAADSFLESVFKTEFVSLLCKRFEEATRRPLPLTFSDTLQFRVKKEGWGGGGTRSVTFSRGFGDLAVLKVGGRTLTVSVGDGLPKSSKPTRKGMAKGKPRRSSQAPTRAAPAPPRGMDRNGVPPSARGGPLPLEIMSGGGTHRPPRGPPSTSLGASRRPRARPPSEHNTEFLNVPDQGMAGMQRKRSVGQRPVPGVGRPKPQPRTHGPRCRALYQYVGQDVDELSFNVNEVIEILMEDPSGWWKGRLHGQEGLFPGNYVEKI

SEQ ID NO: 23195 - protein, 286 aa, Homo sapiens
MAVPQPMPSIPEDLESREAMVAFFNSAVASAEEEQARLRGQLKEQRVRCRRLAHLLASAQKEPEAAAPAPGTGGDSVCGETHRALQGAMEKLQSRFMELMQEKADLKERVEELEHRCIQLSGETDTIGEYIALYQSQRAVLKERHREKEEYISRLAQDKEEMKVKLLELQELVLRLVGDRNEWHGRFLAAAQNPADEPTSGAPAPQELGAANQQGDLCEVSLAGSVEPAQGEAREGSPRDNPTAQQIMQLLREMQNPRERPGLGSNPCIPFFYRADENDEVKITVI

SEQ ID NO: 23196 - protein, 699 aa, Homo sapiens [sequence omitted]

SEQ ID NO: 23197 - protein, 4523 aa, Homo sapiens
MAAQVAAREARDFREAPTLRLTSGAGLEAVGAVELEEEEENEEEAAARRARSFAQDARVRFLGGRLAMMLGFTEEKWSQYLESEDNRQVLGEFLESTSPACLVFSFAASGRLAASQEIPRDANHKLVFISKKITESIGVNDFSQVVLFGELPALSLGHVSAFLDEILVPVLSNKNNHKSWSCFTSQDMEYHIEVMKKKMYIFRGKMSRRTLLPIPTVAGKMDLDQNCSENKPPSNERIILHAIESVVIEWSHQIQEIIERDSVQRLLNGLHLSPQAELDFWMMRRENLSCIYDQLQAPVVLKMVKILTTKQSSYFPTLKDIFLAVENALLEAQDVELYLRPLRRHIQCLQETEFPQTRILIAPLFHTICLIWSHSKFYNTPARVIVLLQEFCNLFINQATAYLSPEDLLRGEIEESLEKVQVAVNILKTFKNSFFNYRKKLASYFMGRKLRPWDFQSHLVFCRFDKFLDRLIKIEDIFATTLEFEKLERLEFGGTKGAILNGQVHEMSEELMELCKLFKQSTYDPSDCTNMEFESDYVAFKSKTLEFDRRLGTIICEAFFNCNGLEAAFKLLTIFGNFLEKPVVMEIFSLHYSTLVHMFNTELDVCKQLYNEHMKQIECGHVVLNKNMPFTSGNMKWAQQVLQRLQMFWSNFASLRYLFLGNPDHALVYQKYVEMTTLLDQFESRIYNEWKSNVDEICEFNLNQPLVKFSAINGLLCVNFDPKLVAVLREVKYLLMLKKQDIPDSALAIFKKRNTILKYIGNLDLLVQGYNKLKQTLLEVEYPLIEDELRAIDEQLTAATTWLTWQDDCWGYIERVRAATSELEHRVERTQKNVKVIQQTMRGWARCVLPPRREHRREAAFTLEDKGDLFTKKYKLIQGDGCKIHNLVEENRKLFKANPSLDTWKIYVEFIDDIVVEGFFQAIMHDLDFFLKNTEKQLKPAPFFQAQMILLPPEIVFKPSLDREAGDGFYDLVEEMLCNSFRMSAQMNRIATHLEIKNYQNDMDNMLGLAEVRQEIMNRVVNVINKVLDFRNTLETHTYLWVDDRAEFMKHFLLYGHAVSSDEMDAHANEEIPEQPPTLEQFKEQIDIYEALYVQMSKFEDFRVFDSWFKVDMKPFKVSLLTIIKKWSWMFQEHLLRFVIDSLNELQEFIKETDSGLQRELNEGDHDGLVDIMVHLLAVRSRQRATDELFEPLKETITLLESYGQKMPEQVYIQLEELPERWETTKKIAATVRHEVSPLHNAEVTLIRKKCILFDAKQAEFRERFRHYAPLGFNAENPYTALDKANEELEALEEEMLQMQESTRLFEVALPEYKQMKQCRKEIKLLKGLWDVIIYVRRSIDNWTKTQWRQIHVEQMDVELRRFAKASSITEIWSLNKEVRVWDAYTGLEGTVKDMTASLRAITELQSPALRDRHWHQLMKAIGVKFLINEATTLADLLALRLHRVEDDVRRIVDKAVKELGTEKVITEISQTWATMKFSYEVHYRTGIPLLKSDEQLFETLEHNQVQLQTLLQSKYVEYFIEQVLSWQNKLNIADLVIFTWMEVQRTWSHLESIFVCSEDIRIQLVKDARRFDGVDAEFKELMFKTAKVENVLEATCRPNLYEKLKDLQSRLSLCEKALAEYLETKRIAFPRFYFVSSADLLDILSKGAQPKQVTCHLAKLFDSIADLQFEDNQDVSAHRAVGMYSKEKEYVPFQAECECVGHVETWLLQLEQTMQETVRHSITEAIVAYEEKPRELWIFDFPAQVALTSSQIWWTTDVGIAFSRLEEGYETALKDFHKKQISQLNTLITLLLGELPPGDRQKIMTICTIDVHARDVVAKLISQKQVVVSPQAFTWLSQLRHRWEDTQKHCFVNICDAQFQYFYEYLGNSPRLVITPLTDRCYITLTQSLHLTMSGAPAGPAGTGKTETTKDLGRALGMMVYVFNCSEQMDYKSIGNIYKGLVQTGAWGCFDEFNRISVEVLSVVAVQVKMIHDAIRNRKKRFVFLGEAITLKPSVGIFITMNPGYAGRTELPENLKALFRPCAMVAPDIELICEILLVAEGFVDARALARKFITLYTLCKELLSKQDHYDWGLRAIKSVLVVAGSLKRGDKNRPEDQVLMRALRDFNMPKIVTDDIPVFLGLVGDLFPALDVPRRRKLHFEQMVRQSTLELRLQPEESFILKVVQLEELLAVRHSVFVVGNAGTGKSKILRTLNRTYVNMKQKPVWNDLNPKAVTTDELFGFIHHATREWKDGKIVYSYFIGLFSSILREQANLKHDGPKWIVLDGDIDPMWIESLNTVMDDNKVLTLASNERIALTPFMRLLFEIHHLRSATPATVSRAGILYVNPQDLGWNPYVASWIDRRRHQSEKANLTILFDKYVPACLDKLRTSFKTITSIPESSLVQTLCVLLECLLTPENVPSDSPKEVYEVYFVFACIWAFGGTLLQDQISDYQADFSRWWQKEMKAVKFPSQGTIFDYYVDHKTKKLLPWADKIAQFTMDPDVPLQTVLVHTTETARLRYFMELLLEKGKPLMLVGNAGVGKTVFVGDTLASLSEDYIVSRVPFNYYTTSTALQKILEKPLEKKAGHNYGPGGNKKLIYFIDDMNMPEVDLYGTVQPHTLIRQHIDYGHWYDRQKVMLKEIHNCQYVACMNPMVGSFTINPRLQRHFTVFAFNFPSLDALNTIYGQIFSFHFQQQAFAPSILRSGPTLIQATIAFHQTMMCNFLPTAIKFHYIFNLRDLSNVFQGILFASPECLKGPLDLIHLWLHESARVYGDKLIDKKDCDLFQRRMLETAYKYFEGIDSHMLLQQPLIYCHFADRGKDPHYMPVKDWEVLKTILTETLDNYNELNAAMHLVLFEDAMQHVCRISRILRTPQGCALLVGVGGSGKQSLSRLAAYLRGLEVFQITLTEGYGIQELRVDLANLYIRTGAKNMPTVFLLTDAQVLDESFLVLINDLLASGEIPDLFSDEDVDKIISGIHNEVHALGMVDSRENCWKFFMARVRLQLKIILCFSPVGRTLRVRARKFPAIVNCTAIDWFHAWPQEALVSVSRRFIEETKGIEPVHKDSISLFMAHVHTTVNEMSTRYYQNERRHNYTTPKSFLEQISLFKNLLKKKQNEVSEKKERLVNGIQKLKTTASQVGDLKARLASQEAELQLRNHDAEALITKIGLQTEKVSREKTIADAEERKVTAIQTEVFQKQRECEADLLKAEPALVAATAALNTLNRVNLSELKAFPNPPIAVTNVTAAVMVLLAPRGRVPKDRSWKAAKVFMGKVDDFLQALINYDKEHIPENCLKVVNEHYLKDPEFNPNLIRTKSFAAAGLCAWVINIIKFYEVYCDVEPKRQALAQANLELAAATEKLEAIRKKLVDLDRNLSRLTASFEKATAEKVRCQEEVNQTNKTIKLANRLVKELEAKKIRWGQSIKSFEAQEKTLCGDVLLTAAFVSYVGPFTRQYRQELVHCKWVPFLQQKVSIPLTEGLDLISMLTDDATIAAWNNEGLPSDRMSTENAAILTHCERWPLVIDPQQQGIKWIKNKYGMDLKVTHLGQKGFLNAIETALAFGDVILIENLEETIDPVLDPLLGRNTIKKGKYIRIGDKECEFNKNFRLILHTKLANPHYKPELQAQTTLLNFTVTEDGLEAQLLAEVVSIERPDLEKLKLVLTKHQNDFKIELKYLEDDLLLRLSAAEGSFLDDTKLVERLEATKTTVAEIEHKVIEAKENERKINEARECYRPVAARASLLYFVINDLQKINPLYQFSLKAFNVLFHRAIEQADKVEDMQGRISILMESITHAVFLYTSQALFEKDKLTFLSQMAFQILLRKKEIDPLELDFLLRFTVEHTHLSPVDFLTSQSWSAIKAIAVMEEFRGIDRDVEGSAKQWRKWVESECPEKEKLPQEWKKKSLIQKLILLRAMRPDRMTYALRNFVEEKLGAKYVERTRLDLVKAFEESSPATPIFFILSPGVDALKDLEILGKRLGFTIDSGKFHNVSLGQGQETVAEVALEKASKGGHWVILQNVHLVAKWLGTLEKLLERFSQGSHRDYRVFMSAESAPTPDEHIIPQGLLENSIKITNEPPTGMLANLHAALYNFDQDTLEICSKEQEFKSILFSLCYFHACVAGRLRFGPQGWSRSYPFNPGDLTICASVLYNYLEANSKVPWEDLRYLFGEIMYGGHITDDWDRKLCRVYLEEFMNPSLTEDELMLAPGFAAPPYLDYAGYHQYIEEMLPPESPALYGLHPNAEIEFLTVTSNTLFRTLLEMQPRNALSGDELGQSTEEKVKNVLDDILEKLPEEFNMAEIMQKNSNRSPYVLVCFQECERMNILIREIRISLEQLDLSLKGELALSPAVEAQQFALSYDTVPDTWSKLAYPSTYGLAQWFNDLLLRCRELDTWTQDLTLPAVVWLSGFFNPQSFLTAIMQTMARKNEWPLDKTRLTADVTKKTKEDYGHPPREGAYLHGLFMEGARWDTQAGTIVEARLKELACPMPVIFAKATPVDRQETKQTYECPVYRTKLRGPSYIWTFRLKSEEKTAKWVLAGVALLLEA

SEQ ID NO: 23198 - protein, 415 aa, Homo sapiens
MIQNLMREVKMDTIFLWSLLLLFFGSQASRCSAQKNTEFAVDLYQEVSLSHKDNIIFSPLGITLVLEMVQLGAKGKAQQQIRQTLKQQETSAGEEFFVLKSFFSAISEKKQEFTFNLANALYLQEGFTVKEQYLHGNKEFFQSAIKLVDFQDAKACAEMISTWVERKTDGKIKDMFSGEEFGPLTRLVLVNAIYFKGDWKQKFRKEDTQLINFTKKNGSTVKIPMMKALLRTKYGYFSESSLNYQVLELSYKGDEFSLIIILPAEGMDIEEVEKLITAQQILKWLSEMQEEEVEISLPRFKVEQKVDFKDVLYSLNITEIFSGGCDLSGITDSSEVYVSQVTQKVFFEINEDGSEAATSTGIHIPVIMSLAQSQFIANHPFLFIMKHNPTESILFMGRVTNPDTQEIKGRDLDSL

SEQ ID NO: 23199 - protein, 479 aa, Homo sapiens
MATALVSAHSLAPLNLKKEGLRVVREDHYSTWEQGFKLQGNSKGLGQEPLCKQFRQLRYEETTGPREALSRLRELCQQWLQPETHTKEQILELLVLEQFLIILPKELQARVQEHHPESREDVVVVLEDLQLDLGETGQQVDPDQPKKQKILVEEMAPLKGVQEQQVRHECEVTKPEKEKGEETRIENGKLIVVTDSCGRVESSGKISEPMEAHNEGSNLERHQAKPKEKIEYKCSEREQRFIQHLDLIEHASTHTGKKLCESDVCQSSSLTGHKKVLSREKGHQCHECGKAFQRSSHLVRHQKIHLGEKPYQCNECGKVFSQNAGLLEHLRIHTGEKPYLCIHCGKNFRRSSHLNRHQRIHSQEEPCECKECGKTFSQALLLTHHQRIHSHSKSHQCNECGKAFSLTSDLIRHHRIHTGEKPFKCNICQKAFRLNSHLAQHVRIHNEEKPYQCSECGEAFRQRSGLFQHQRYHHKDKLA

SEQ ID NO: 23200 - protein, 702 aa, Homo sapiens
MRLPDLRPWTSLLLVDAALLWLLQGPLGTLLPQGLPGLWLEGTLRLGGLWGLLKLRGLLGFVGTLLLPLCLATPLTVSLRALVAGASRAPPARVASAPWSWLLVGYGAAGLSWSLWAVLSPPGAQEKEQDQVNNKVLMWRLLKLSRPDLPLLVAAFFFLVLAVLGETLIPHYSGRVIDILGGDFDPHAFASAIFFMCLFSFGSSLSAGCRGGCFTYTMSRINLRIREQLFSSLLRQDLGFFQETKTGELNSRLSSDTTLMSNWLPLNANVLLRSLVKVVGLYGFMLSISPRLTLLSLLHMPFTIAAEKVYNTRHQEVLREIQDAVARAGQVVREAVGGLQTVRSFGAEEHEVCRYKEALEQCRQLYWRRDLERALYLLVRRVLHLGVQMLMLSCGLQQMQDGELTQGSLLSFMIYQESVGSYVQTLVYIYGDMLSNVGAAEKVFSYMDRQPNLPSPGTLAPTTLQGVVKFQDVSFAYPNRPDRPVLKGLTFTLRPGEVTALVGPNGSGKSTVAALLQNLYQPTGGQVLLDEKPISQYEHCYLHSQVVSVGQEPVLFSGSVRNNIAYGLQSCEDDKVMAAAQAAHADDFIQEMEHGIYTDVGEKGSQLAAGQKQRLAIARALVRDPRVLILDEATSALDVQCEQALQDWNSRGDRTVLVIAHRLQTVQRAHQILVLQEGKLQKLAQLEGQDLYSRLVQQRLMD

SEQ ID NO: 23201 - protein, 683 aa, Homo sapiens
MFSLSSTVQPQVTVPLSHLINAFHTPKNTSVSLSGVSVSQNQHRDVVPEHEAPSSEPSLNLRDLGLSELKIGQIDQLVENLLPGFCKGKNISSHWHTSHVSAQSFFENKYVFIQSRGFKTLKSRTRRLQSTSERLAETQNIAPSFVKGFLLRDRGSDVESLDKLMKTKNIPEAHQDAFKTGFAEGFLKAQALTQKTNDSLRRTRLILFVLLLFGIYGLLKNPFLSVRFRTTTGLDSAVDPVQMKNVTFEHVKGVEEAKQELQEVVEFLKNPQKFTILGGKLPKGILLVGPPGTGKTLLARAVAGEADVPFYYASGSEFDEMFVGVGASRIRNLFREAKANAPCVIFIDELDSVGGKRIESPMHPYSRQTINQLLAEMDGFKPNEGVIIIGATNFPEALDNALIRPGRFDMQVTVPRPDVKGRTEILKWYLNKIKFDQSVDPEIIARGTVGFSGAELENLVNQAALKAAVDGKEMVTMKELEFSKDKILMGPERRSVEIDNKNKTITAYHESGHAIIAYYTKDAMPINKATIMPRGPTLGHVSLLPENDRWNETRAQLLAQMDVSMGGRVAEELIFGTDHITTGASSDFDNATKIAKRMVTKFGMSEKLGVMTYSDTGKLSPETQSAIEQEIRILLRDSYERAKHILKTHAKEHKNLAEALLTYETLDAKEIQIVLEGKKLEVR

SEQ ID NO: 23202 - protein, 517 aa, Homo sapiens [sequence omitted]

SEQ ID NO: 23203 - protein, 1682 aa, Homo sapiens; identical to SEQ ID NO: 15022

SEQ ID NO: 23204 - protein, 3118 aa, Homo sapiens
MPGAAGVLLLLLLSGGLGGVQAQRPQQQRQSQAHQQRGLFPAVLNLASNALITTNATCGEKGPEMYCKLVEHVPGQPVRNPQCRICNQNSSNPNQRHPITNAIDGKNTWWQSPSIKNGIEYHYVTITLDLQQVFQIAYVIVKAANSPRPGNWILERSLDDVEYKPWQYHAVTDTECLTLYNIYPRTGPPSYAKDDEVICTSFYSKIHPLENGEIHISLINGRPSADDPSPELLEFTSARYIRLRFQRIRTLNADLMMFAHKDPREIDPIVTRRYYYSVKDISVGGMCICYGHARACPLDPATNKSRCECEHNTCGDSCDQCCPGFHQKPWRAGTFLTKTECEACNCHGKAEECYYDENVARRNLSLNIRGKYIGGGVCINCTQNTAGINCETCTDGFFRPKGVSPNYPRPCQPCHCDPIGSLNEVCVKDEKHARRGLAPGSCHCKTGFGGVSCDRCARGYTGYPDCKACNCSGLGSKNEDPCFGPCICKENVEGGDCSRCKSGFFNLQEDNWKGCDECFCSGVSNRCQSSYWTYGKIQDMSGWYLTDLPGRIRVAPQQDDLDSPQQISISNAEARQALPHSYYWSAPAPYLGNKLPAVGGQLTFTISYDLEEEEEDTERVLQLMIILEGNDLSISTAQDEVYLHPSEEHTNVLLLKEESFTIHGTHFPVRRKEFMTVLANLKRVLLQITYSFGMDAIFRLSSVNLESAVSYPTDGSIAAAVEVCQCPPGYTGSSCESCWPRHRRVNGTIFGGICEPCQCFGHAESCDDVTGECLNCKDHTGGPYCDKCLPGFYGEPTKGTSEDCQPCACPLNIPSNNFSPTCHLDRSLGLICDGCPVGYTGPRCERCAEGYFGQPSVPGGSCQPCQCNDNLDFSIPGSCDSLSGSCLICKPGTTGRYCELCADGYFGDAVDAKNCQPCRCNAGGSFSEVCHSQTGQCECRANVQGQRCDKCKAGTFGLQSARGCVPCNCNSFGSKSFDCEESGQCWCQPGVTGKKCDRCAHGYFNFQEGGCTACECSHLGNNCDPKTGRCICPPNTIGEKCSKCAPNTWGHSITTGCKACNCSTVGSLDFQCNVNTGQCNCHPKFSGAKCTECSRGHWNYPRCNLCDCFLPGTDATTCDSETKKCSCSDQTGQCTCKVNVEGIHCDRCRPGKFGLDAKNPLGCSSCYCFGTTTQCSEAKGLIRTWVTLKAEQTILPLVDEALQHTTTKGIVFQHPEIVAHMDLMREDLHLEPFYWKLPEQFEGKKLMAYGGKLKYAIYFEAREETGFSTYNPQVIIRGGTPTHARIIVRHMAAPLIGQLTRHEIEMTEKEWKYYGDDPRVHRTVTREDFLDILYDIHYILIKATYGNFMRQSRISEISMEVAEQGRGTTMTPPADLIEKCDCPLGYSGLSCEACLPGFYRLRSQPGGRTPGPTLGTCVPCQCNGHSSLCDPETSICQNCQHHTAGDFCERCALGYYGIVKGLPNDCQQCACPLISSSNNFSPSCVAEGLDDYRCTACPRGYEGQYCERCAPGYTGSPGNPGGSCQECECDPYGSLPVPCDPVTGFCTCRPGATGRKCDGCKHWHAREGWECVFCGDECTGLLLGDLARLEQMVMSINLTGPLPAPYKMLYGLENMTQELKHLLSPQRAPERLIQLAEGNLNTLVTEMNELLTRATKVTADGEQTGQDAERTNTRAKSLGEFIKELARDAEAVNEKAIKLNETLGTRDEAFERNLEGLQKEIDQMIKELRRKNLETQKEIAEDELVAAEALLKKVKKLFGESRGENEEMEKDLREKLADYKNKVDDAWDLLREATDKIREANRLFAVNQKNMTALEKKKEAVESGKRQIENTLKEGNDILDEANRLADEINSIIDYVEDIQTKLPPMSEELNDKIDDLSQEIKDRKLAEKVSQAESHAAQLNDSSAVLDGILDEAKNISFNATAAFKAYSNIKDYIDEAEKVAKEAKDLAHEATKLATGPRGLLKEDAKGCLQKSFRILNEAKKLANDVKENEDHLNGLKTRIENADARNGDLLRTLNDTLGKLSAIPNDTAAKLQAVKDKARQANDTAKDVLAQITELHQNLDGLKKNYNKLADSVAKTNAVVKDPSKNNAVADADATVKNLEQEADRLIDKLKPIKELEDNLKKNISEIKELINQARKQANSIKVSVSSGGDCIRTYKPEIKKGSYNNIVVNVKTAVADNLLFYLGSAKFIDFLAIEMRKGKVSFLWDVGSGVGRVEYPDLTIDDSYWYRIVASRTGRNGTISVRALDGPKASIVPSTHHSTSPPGYTILDVDANAMLFVGGLTGKLKKADAVRVITFTGCMGETYFDNKPIGLWNFREKEGDCKGCTVSPQVEDSEGTIQFDGEGYALVSRPIRWYPNISTVMFKFRTFSSSALLMYLATRDLRDFMSVELTDGHIKVSYDLGSGMASVVSNQNHNDGKWKSFTLSRIQKQANISIVDIDTNQEENIATSSSGNNFGLDLKADDKIYFGGLPTLRNLRPEVNLKKYSGCLKDIEISRTPYNILSSPDYVGVTKGCSLENVYTVSFPKPGFVELSPVPIDVGTEINLSFSTKNESGIILLGSGGTPAPPRRKRRQTGQAYYAILLNRGRLEVHLSTGARTMRKIVIRPEPNLFHDGREHSVHVERTRGIFTVQVDENRRYMQNLTVEQPIEVKKLFVGGAPPEFQPSPLRNIPPFEGCIWNLVINSVPMDFARPVSFKNADIGRCAHQKLREDEDGAAPAEIVIQPEPVPTPAFPTPTPVLTHGPCAAESEPALLIGSKQFGLSRNSHIAIAFDDTKVKNRLTIELEVRTEAESGLLFYMARINHADFATVQLRNGLPYFSYDLGSGDTHTMIPTKINDGQWHKIKIMRSKQEGILYVDGASNRTISPKKADILDVVGMLYVGGLPINYTTRRIGPVTYSIDGCVRNLHMAEAPADLEQPTSSFHVGTCFANAQRGTYFDGTGFAKAVGGFKVGLDLLVEFEFRTTTTTGVLLGISSQKMDGMGIEMIDEKLMFHVDNGAGRFTAVYDAGVPGHLCDGQWHKVTANKIKHRIELTVDGNQVEAQSPNPASTSADTNDPVFVGGFPDDLKQFGLTTSIPFRGCIRSLKLTKGTGKPLEVNFAKALELRGVQPVSCPAN

SEQ ID NO: 23205 - protein, 224 aa, Homo sapiens
KAFRGVDNKIRLFQPNLNMDRMYRSAVRATLPVFDKEELLECIQQLVKLDQEWVPYSTSASLYIRPTFIGTEPSLGVKKPTKALLFVLLSPVGPYFSSGTFNPVSLWANPKYVRAWKGGTGDCKMGGNYGSSLFAQCEAVDNGCQQVLWLYGEDHQITEVGTMNLFLYWINEDGEEELATPPLDGIILPGVTRRCILDLAHQWVGAFDMNNFCKPEIKNNQNKP

SEQ ID NO: 23206 - protein, 1245 aa, Homo sapiens
MMNRTTPDQELAPASEPVWERPWSVEEIRRSSQSWSLAADAGLLQFLQEFSQQTISRTHEIKKQVDGLIRETKATDCRLHNVFNDFLMLSNTQFIENRVYDEEVEEPVLKAEAEKTEQEKTREQKEVDLIPKVQEAVNYGLQVLDSAFEQLDIKAGNSDSEEDDANGRVELILEPKDLYIDRPLPYLIGSKLFMEQEDVGLGELSSEEGSVGSDRGSIVDTEEEKEEEESDEDFAHHSDNEQNRHTTQMSDEEEDDDGCDLFADSEKEEEDIEDIEENTRPKRSRPTSFADELAARIKGDAVGRVDEEPTNEEDNLFAPPKLTDEDFSPFGSGGGLFSGGKGLFDDEDEESDLFTEAPQDRQAGASVKEESSSSKPGKKIPAGAVSVFLGDTDVFGAASVPSMKEPQKPEQPTPRKSPYGPPPTGLFDDDDGDDDDDFFSAPHSKPSKTGKVQSTADIFGDEEGDLFKEKAVASPEATVSQTDENKARAEKKVTLSSSKNLKPSSETKTQKGLFSDEEDSEDLFSSQSASKLKGASLLPGKLPTLVSLFDDEDEEDNLFGGTAAKKQTLCLQAQREEKAKASELSKKKASALLFSSDEEDQWNIPASQTHLASDSRSKGEPRDSGTLQSQEAKAVKKTSLFEEDEEDDLFAIAKDSQKKTQRVSLLFEDDVDSGGSLFGSPPTSVPPATKEGLLTRSAQETVKHSDLFSSSSPWDKGTKPRTKTVLSLFDEEEDKMEDQNIIQAPQKEVGKGRDPDAHPKSTGVFQDEELLFSHKLQKDNDPDVDLFAGTKKTKLLEPSVGSLFGDDEDDDLFSSAKSQPLVQEKKRVVKKDHSVDSFKNQKHPESIQGSKEKGIWKPETPQANLAINPAALLPTAASQISEVKPVLPELAFPSSEHRRSHGLESVPVLPGSGEAGVSFDLPAQADTLHSANKSRVKMRGKRRPQTRAARRLAAQESSETEDMSVPRGPIAQWADGAISPNGHRPQLRAASGEDSTEEALAAAAAPWEGGPVPGVDRSPFAKSLGHSRGEADLFDSGDIFSTGTGSQSVERTKPKAKIAENPANPPVGGKAKSPMFPALGEASSDDDLFQSAKPKPAKKTNPFPLLEDEDDLFTDQKVKKNETKSNSQQDVILTTQDIFEDDIFATEAIKPSQKTREKEKTLESNLFDDNIDIFADLTVKPKEKSKKKVEAKSIFDDDMDDIFSSGIQAKTTKPKSRSAQAAPEPRFEHKVSNIFDDPLNAFGGQ

SEQ ID NO: 23207 - protein, 1337 aa, Homo sapiens
MMEIQMDEGGGVVVYQDDYCSGSVMSERVSGLAGSIYREFERLIHCYDEEVVKELMPLVVNVLENLDSVLSENQEHEVELELLREDNEQLLTQYEREKALRRQAEEKFIEFEDALEQEKKELQIQVEHYEFQTRQLELKAKNYADQISRLEERESEMKKEYNALHQRHTEMIQTYVEHIERSKMQQVGGNSQTESSLPGRSRKERPTSLNVFPLADGTVRAQIGGKLVPAGDHWHLSDLGQLQSSSSYQCPQDEMSESGQSSAAATPSTTGTKSNTPTSSVPSAAVTPLNESLQPLGDYGVGSKNSKRAREKRDSRNMEVQVTQEMRNVSIGMGSSDEWSDVQDIIDSTPELDMCPETRLDRTGSSPTQGIVNKAFGINTDSLYHELSTAGSEVIGDVDEGADLLGEFSVRDDFFGMGKEVGNLLLENSQLLETKNALNVVKNDLIAKVDQLSGEQEVLRGELEAAKQAKVKLENRIKELEEELKRVKSEAIIARREPKEEAEDVSSYLCTESDKIPMAQRRRFTRVEMARVLMERNQYKERLMELQEAVRWTEMIRASREHPSVQEKKKSTIWQFFSRLFSSSSSPPPAKRPYPSVNIHYKSPTTAGFSQRRNHAMCPISAGSRPLEFFPDDDCTSSARREQKREQYRQVREHVRNDDGRLQACGWSLPAKYKQLSPNGGQEDTRMKNVPVPVYCRPLVEKDPTMKLWCAAGVNLSGWRPNEDDAGNGVKPAPGRDPLTCDREGDGEPKSAHTSPEKKKAKELPEMDATSSRVWILTSTLTTSKVVIIDANQPGTVVDQFTVCNAHVLCISSIPAASDSDYPPGEMFLDSDVNPEDPGADGVLAGITLVGCATRCNVPRSNCSSRGDTPVLDKGQGEVATIANGKVNPSQSTEEATEATEVPDPGPSEPETATLRPGPLTEHVFTDPAPTPSSGPQPGSENGPEPDSSSTRPEPEPSGDPTGAGSSAAPTMWLGAQNGWLYVHSAVANWKKCLHSIKLKDSVLSLVHVKGRVLVALADGTLAIFHRGEDGQWDLSNYHLMDLGHPHHSIRCMAVVYDRVWCGYKNKVHVIQPKTMQIEKSFDAHPRRESQVRQLAWIGDGVWVSIRLDSTLRLYHAHTHQHLQDVDIEPYVSKMLGTGKLGFSFVRITALLVAGSRLWVGTGNGVVISIPLTETVVLHRGQLLGLRANKTSPTSGEGARPGGIIHVYGDDSSDRAASSFIPYCSMAQAQLCFHGHRDAVKFFVSVPGNVLATLNGSVLDSPAEGPGPAAPASEVEGQKLRNVLVLSGGEGYIDFRIGDGEDDETEEGAGDMSQVKPVLSKAERSHIIVWQVSYTPE

SEQ ID NO: 23208 - protein, 1317 aa, Homo sapiens
MDRQCSERPYSCTPTGRVSSAVSQNSRISPPVSTSMKDSSCMKVHQDSARRDRWSHPTTILLHKSQSSQATLMLQEHRMFMGEAYSAATGFKMLQDMNSADPFHLKYIIKKIKNMAHGSPKLVMETIHDYFIDNPEISSRHKFRLFQTLEMVIGASDVLEETWEKTFTRLALENMTKATELEDIYQDAASNMLVAICRHSWRVVAQHLETELLTGVFPHRSLLYVMGVLSSSEELFSQEDKACWEEQLIQMAIKSVPFLSTDVWSKELLWTLTTPSWTQQEQSPEKAFLFTYYGLILQAEKNGATVRRHLQALLETSHQWPKQREGMALTLGLAATRHLDDVWAVLDQFGRSRPIRWSLPSSSPKNSEDLRWKWASSTILLAYGQVAAKARAHILPWVDNIVSRMVFYFHYSSWDETLKQSFLTATLMLMGAVSRSEGAHSYEFFQTSELLQCLMVLMEKEPQDTLCTRSRQQAMHIASSLCKLRPPIDLERKSQLLSTCFRSVFALPLLDALEKHTCLFLEPPNIQLWPVARERAGWTHQGWGPRAVLHCSEHLQSLYSRTMEALDFMLQSLIMQNPTADELHFLLSHLYIWLASEKAHERQRAVHSCMILLKFLNHNGYLDPKEDFKRIGQLVGILGMLCQDPDRATQRCSLEGASHLYQLLMCHKTGEALQAESQAPKELSQAHSDGAPLWNSRDQKATPLGPQEMAKNHIFQLCSFQVIKDIMQQLTLAELSDLIWTAIDGLGSTSPFRVQAASEMLLTAVQEHGAKLEIVSSMAQAIRLRLCSVHIPQAKEKTLHAITLLARSHTCELVATFLNISIPLDSHTFQLWRALGAGQPTSHLVLTTLLACLQERPLPTGASDSSPCPKEKTYLRLLAAMNMLHELQFAREFKQAVQEGYPKLFLALLTQMHYVLELNLPSEPPKQQAQEAAVPSPQSCSTSLEALKSLLSTTGHWHDFAHLELQGSWELFTTIHTYPKGVGLLARAMVQNHCRQIPAVLRQLLPSLQSPQERERKVAILILTKFLYSPVLLEVLPKQAALTVLAQGLHDPSPEVRVLSLQGLSNILFHPDKGSLLQGQLRPLLDGFFQSSDQVIVCIMGTVSDTLHRLGAQGTGSQSLGVAISTRSFFNDERDGIRAAAMALFGDLVAAMADRELSGLRTQVHQSMVPLLLHLKDQCPAVATQAKFTFYRCAVLLRWRLLHTLFCTLAWERGLSARHFLWTCLMTRSQEEFSIHLSQALSYLHSHSCHIKTWVTLFIGHTICYHPQAVFQMLNAVDTNLLFRTFEHLRSDPEPSIREFATSQLSFLQKVSARPKQ

SEQ ID NO: 23209 - protein, 703 aa, Homo sapiens
MEIDMTYQLKVIQQSLEQEEAEHKATKARLADKNKIYESIEEAKSEAMKEMEKKLLEERTLKQKVENLLLEAEKRCSLLDCDLKQSQQKINELLKQKDVLNEDVRNLTLKIEQETQKRCLTQNDLKMQTQQVNTLKMSEKQLKQENNHLMEMKMNLEKQNAELRKERQDADGQMKELQDQLEAEQYFSTLYKTQVRELKEECEEKTKLGKELQQKKQELQDERDSLAAQLEITLTKADSEQLARSIAEEQYSDLEKEKIMKELEIKEMMARHKQELTEKDATIASLEETNRTLTSDVANLANEKEELNNKLKDVQEQLSRLKDEEISAAAIKAQFEKQLLTERTLKTQAVNKLAEIMNRKEPVKRGNDTDVRRKEKENRKLHMELKSEREKLTQQMIKYQKELNEMQAQIAEESQIRIELQMTLDSKDSDIEQLRSQLQALHIGLDSSSIGSGPGDAEADDGFPESRLEGWLSLPVRNNTKKFGWVKKYVIVSSKKILFYDSEQDKEQSNPYMVLDIDKLFHVRPVTQTDVYRADAKEIPRIFQILYANEGESKKEQEFPVEPVGEKSNYICHKGHEFIPTLYHFPTNCEACMKPLWHMFKPPPALECRRCHIKCHKDHMDKKEEIIAPCKVYYDISTAKNLLLLANSTEEQQKWVSRLVKKIPKKPPAPDPFARSSPRTSMKIQQNQSIRRPSRQLAPNKPS

SEQ ID NO: 23210 - protein, 931 aa, Homo sapiens
MKSVCRRGPCRAPLWFSWSSRVVLWSTGRKKEVHLLTCYQLSNPGRLLDYPAHMEGQIWFLPRSLQLTGFQAYKLRVTHLYQLKQHNILASVGEDEEGINPLVKIWNLEKRDGGNPLCTRIFPAIPGTEPTVVSCLTVHENLNFMAIGFTDGSVTLNKGDITRDRHSKTQILHKGNYPVTGLAFRQAGKTTHLFVVTTENVQSYIVSGKDYPRVELDTHGCGLRCSALSDPSQDLQFIVAGDECVYLYQPDERGPCFAFEGHKLIAHWFRGYLIIVSRDRKVSPKSEFTSRDSQSSDKQILNIYDLCNKFIAYSTVFEDVVDVLAEWGSLYVLTRDGRVHALQEKDTQTKLEMLFKKNLFEMAINLAKSQHLDSDGLAQIFMQYGDHLYSKGNHDGAVQQYIRTIGKLEPSYVIRKFLDAQRIHNLTAYLQTLHRQSLANADHTTLLLNCYTKLKDSSKLEEFIKKKSESEVHFDVETAIKVLRQAGYYSHALYLAENHAHHEWYLKIQLEDIKNYQEALRYIGKLPFEQAESNMKRYGKILMHHIPEQTTQLLKGLCTDYRPSLEGRSDREAPGCRANSEEFIPIFANNPRELKAFLEHMSEVQPDSPQGIYDTLLELRLQNWAHEKDPQVKEKLHAEAISLLKSGRFCDVFDKALVLCQMHDFQDGVLYLYEQGKLFQQIMHYHMQHEQYRQVISVCERHGEQDPSLWEQALSYFARKEEDCKEYVAAVLKHIENKNLMPPLLVVQTLAHNSTATLSVIRDYLVQKLQKQSQQIAQDELRVRRYREETTRIRQEIQELKASPKIFQKTKCSICNSALELPSVHFLCGHSFHQHCFESYSESDADCPTCLPENRKVMDMIRAQEQKRDLHDQFQHQLKCSNDSFSVIADYFGRGVFNKLTLLTDPPTARLTSSLEAGLQRDLLMHSRRGT

SEQ ID NO: 23211 - protein, 491 aa, Homo sapiens
MGPADSWGHHWMGILLSASLCTVWSPPAAAQLTLNANPLDATQSEDVVLPVFGTPRTPQIHGRSRELAKPSIAVSPGTAIEQKDMVTFYCTTKDVNITIHWVSNNLSIVFHERMQLSKDGKILTILIVQREDSGTYQCEARDALLSQRSDPIFLDVKYGPDPVEIKLESGVASGEVVEVMEGSSMTFLAETKSHPPCAYTWFLLDSILSHTTRTFTIHAVSREHEGLYRCLVSNSATHLSSLGTLKVRVLETLTMPQVVPSSLNLVENARSVDLTCQTVNQSVNVQWFLSGQPLLPSEHLQLSADNRTLIIHGLQRNDTGPYACEVWNWGSRARSEPLELTINCPQSSSLSSGAIAGIVIGILAVIAVASELGYFLCIRNARRPSRKTTEDPSHETSQPIPKEEHPTEPSSESLSPEYRNISQLQGRIRVELTKLPSASRRGNSFSPWKPPPKPLMPPLRLVSTVPKNMESIYEELVNPEPNTYIQINPSV

SEQ ID NO: 23212 - protein, 269 aa, Homo sapiens
MSAAPGLLHQELSCPLCLQLFDAPVTAECGHSFCRACLGRVAGEPAADGTVLCPCCQAPTRPQALSTNLQLARLVEGLAQVPQGHCEEHLDPLSIYCEQDRALVCGVCASLGSHRGHRLLPAAEAHARLKTQLPQQKLQLQEACMRKEKSVAVLEHQLVEVEETVRQFRGAVGEQLGKMRVFLAALEGSLDREAERVRGEAGVALRRELGSLNSYLEQLRQMEKVLEEVADKPQTEFLMKYCLVTSRLQKILAESPPPARLDIQLPIIS

SEQ ID NO: 23213 - protein, 241 aa, Homo sapiens
RLRFLRTNTLLGHLMGKALRDPTVTRRYYYSIKDISIGGRCVCHGHADACDAKDPTDPFSSPNLSGHNRQLPCCPSPDLHSSQAGTKAQDGDGRVGAANTPHLLCPVCLLSGAAEGTAEHPPPGSPSQDGQQPWCWHRHIPGPHPESSVRLQCTCQHNTCGGTCDRCCPGFNQQPWKPATANSANECQSCNCYGHATDCYYDPEVDRRRASQSLDGTYQGGGVCIDCQHHTTGVNCERCLP

SEQ ID NO: 23214 - protein, 450 aa, Homo sapiens
MDSDTLRVFQNELICCICVNYFIDPVTTDCVHSFCRPCLCLCSEEGRAPMRCPLCRKISEKPNFNTNVALKKLASLARQTRPQNINSSDNICVLHEETKELFCEADKRLLCGPCSESPEHMAHSHSPIGWAAEECRVQKLIKEMDYLWKINQETQNNLNQETSKFCSLVDYVSLRKVIITIQYQKMHIFLDEEEQRHLQALEREAKELFQQLQDSQVRMTQHLEGMKDMYRELWETYHMPDVELLQDVGNISARTDLAQMPKPQPVNPELTSWCITGVLDMLNNFRVDNALSTEMTPCYISLSEDVRRVIFGDDHRSAPMDPQGVESFAVWCAQAFTSGKHYWEVDVTHSSNWILGVCRDSRTADTNIVIDSDKTFFSISSKTSNHYSLSTNSPPLIQYVQRPLGWVGVFLDYDNGSVSFFDVSKGSLIYGFPPSSFSSPLRPFFCFGCT

SEQ ID NO: 23215 - protein, 475 aa, Homo sapiens [sequence omitted]

SEQ ID NO: 23216 - protein, 815 aa, Homo sapiens
MAGNSLVLPIVLWGRKAPTHCISAVLLTDDGATIVTGCHDGQICLWDLSVELQINPRALLFGHTAVLFQQVKETIKENIKEHLLDDEEEDEEIMRQRREESDPEYRSSKSKPLTLLEYNLTMDTAKLFMSCLHAWGLNEVLDEVCLDRLGMLKPHCTVSFGLLSRGGHMSLMLPGYNQPACKLSHGKTEVGRKLPASEGVGKGTYGVSRAVTTQHLLSIISLANTLMSMTNATFIGDHMKKGPTRPPRPSTPDLSKARGSPPTSSNIVQGQIKQVAAPVVSARSDADHSGSDPPSAPALHTCFLVNEGWSQLAAMHCVMLPDLLGLDKFRPPLLEMLARRWQDRCLEVREAAQALLLAELRRIEQAGRKEAIDAWAPYLPQYIDHVISPGVTSEAAQTITTAPDASGPEAKVQEEEHDLVDDDITTGCLSSVPQMKKISTSYEERRKQATAIVLLGVIGAEFGAEIEPPKLLTRPRSSSQIPEGFGLTSGGSNYSLARHTCKALTFLLLQPPSPKLPPHSTIRRTAIDLIGRGFTVWEPYMDVSAVLMGLLELCADAEKQLANITMGLPLSPAADSARSARHALSLIATARPPAFITTIAKEVHRHTALAANTQSQQNMHTTTLARAKGEILRVIEILIEKMPTDVVDLLVEVMDIIMYCLEGSLVKKKGLQECFPAICRFYMVSYYERNHRIAVGARHGSVALYDIRTGKCQTIHGHKGPITAVAFAPDGRYLATYSNTDSHISFWQMNTSLLGSIGMLNSAPQLRCIKTYQVPPVQPASPGSHNALKLARLIWTSNRNVILMAHDGKEHRFMV

SEQ ID NO: 23217 - protein, 579 aa, Homo sapiens
MKDFSDVILCMEATESSKTEFCNPAFEPESGPPCPPPVFPEDASYSVPAPWHGRRPRGLRPDCRFSWLCVLLLSSLLLLLLGLLVAIILAQLQAAPPSGASHSPLPAGGLTTTTTTPTITTSQAAGTPKGQQESGVSPSPQSTCGGLLSGPRGFFSSPNYPDPYPPNTHCVWHIQVATDHAIQLKIEALSIESVASCLFDRLELSPEPEGPLLRVCGRVPPPTLNTNASHLLVVFVSDSSVEGFGFHAWYQAMAPGRGSCAHDEFRCDQLICLLPDSVCDGFANCADGSDETNCSAKFSGCGGNLTGLQGTFSTPSYLQQYPHQLLCTWHISVPAGHSIELQFHNFSLEAQDECKFDYVEVYETSSSGAFSLLGRFCGAEPPPHLVSSHHELAVLFRTDHGISSGGFSATYLAFNATENPCGPSELSCQAGGCKGVQWMCDMWRDCTDGSDDNCSGPLFPPPELACEPVQVEMCLGLSYNTTAFPNIWVGMITQEEVVEVLSGYKSLTSLPCYQHFRRLLCGLLVPRCTPLGSVLPPCRSVCQEAEHQCQSGLALLGTPWPFNCNRLPEAADLEACAQP

SEQ ID NO: 23218 - protein, 487 aa, Homo sapiens
MFSCFCFSLQDNSFSSTTVTECDEDPVSLHEDQTDCSSLRDENNKENYPDAGALVEEHAPPSWEPQQQNVEATVLVDSVLRPSMGNFKSRKPKSIFKAESGRSHGESQETEHVVSSQSECQVRAGTPAHESPQNNAFKCQETVRLQPRIDQRTAISPKDAFETRQDLNEEEAAQVHGVKDPAPASTQSVLADGTDSADPSPVHKDGQNEADSAPEDLHSVGTSRLLYHITDGDNPLLSPRCSIFSQSQRFNLDPESAPSPPSTQQFMMPRSSSRCSCGDGKEPQTITQLTKHIQSLKRKIRKFEEKFEQEKKYRVTKQDKNLIKPLYDRYRIIKQILSTPSLIPTIQEEEDSDEDRPQGSQQPSLADPASHLPVGDHLTYSNETEPVRALLPDEKKEVKPPALSMSNLHEATMPVLLDHLRETRADKKRLRKALREFEEQFFKQTGRSPQKEDRIPMADEYYEYKHIKAKLRLLEVLISKQDVAKTI

SEQ ID NO: 23219 - protein, 746 aa, Homo sapiens
MDTSGHFHDSGVGDLDEDPKCPCPSSGDEQQQQQQQQQQQQPPPPAPPAAPQQPLGPSLQPQPPQLQQQQQQQQQQQQQQPPHPLSQLAQLQSQPVHPGLLHSSPTAFRAPPSSNSTAILHPSSRQGSQLNLNDHLLGHSPSSTATSGPGGGSRHRQASPLVHRRDSNPFTEIAMSSCKYSGGVMKPLSRLSASRRNLIEAETEGQPLQLFSPSNPPEIVISSREDNHAHQTLLHHPNATHNHQHAGTTASSTTFPKANKRKNQNIGYKLGHRRALFEKRKRLSDYALIFGMFGIVVMVIETELSWGLYSKDSMFSLALKCLISLSTIILLGLIIAYHTREVQLFVIDNGADDWRIAMTYERILYISLEMLVCAIHPIPGEYKFFWTARLAFSYTPSRAEADVDIILSIPMFLRLYLIARVMLLHSKLFTDASSRSIGALNKINFNTRFVMKTLMTICPGTVLLVFSISLWIIAAWTVRVCESPESPAQPSGSSLPAWYHDQQDVTSNFLGAMWLISITFLSIGYGDMVPHTYCGKGVCLLTGIMGAGCTALVVAVVARKLELTKAEKHVHNFMMDTQLTKRIKNAAANVLRETWLIYKHTKLLKKIDHAKVRKHQRKFLQAIHQLRSVKMEQRKLSDQANTLVDLSKMQNVMYDLITELNDRSEDLEKQIGSLESKLEHLTASFNSLPLLIADTLRQQQQQLLSAIIEARGVSVAVGTTHTPISDSPIGVSSTSFPTPYTSSSSC

SEQ ID NO: 23220 - protein, 585 aa, Homo sapiens
MFSCFCFSLQDNSFSSTTVTECDEDPVSLHEDQTDCSSLRDENNKENYPDAGALVEEHAPPSWEPQQQNVEATVLVDSVLRPSMGNFKSRKPKSIFKAESGRSHGESQETEHVVSSQSECQVRAGTPAHESPQNNAFKCQETVRLQPRIDQRTAISPKDAFETRQDLNEEEAAQVHGVKDPAPASTQSVLADGTDSADPSPVHKDGQNEADSAPEDLHSVGTSRLLYHITDGDNPLLSPRCSIFSQSQRFNLDPESAPSPPSTQQFMMPRSSSRCSCGDGKEPQTITQLTKHIQSLKRKIRKFEEKFEQEKKYRPSHGDKTSNPEVLKWMNDLAKGRKQLKELKLKLSEEQGSAPKGPPRNLLCEQPTVPRENGKPEAAGPEPSSSGEETPDAALTCLKERREQLPPQEDSKVTKQDKNLIKPLYDRYRIIKQILSTPSLIPTIQEEEDSDEDRPQGSQQPSLADPASHLPVGDHLTYSNETEPVRALLPDEKKEVKPPALSMSNLHEATMPVLLDHLRETRADKKRLRKALREFEEQFFKQTGRSPQKEDRIPMADEYYEYKHIKAKLRLLEVLISKQDVAKTI

SEQ ID NO: 23221 - protein, 1083 aa, Homo sapiens
MDGKRRPGPGPGVPPKRARGGLWDDDDAPRPSQFEEDLALMEEMEAEHRLQEQEEEELQSVLEGVADGQVPPSAIDPRWLRPTPPALDPQTEPLIFQQLEIDHYVGPAQPVPGGPPPSRGSVPVLRAFGVTDEGFSVCCHIHGFAPYFYTPAPPGFGPEHMGDLQRELNLAISRDSRGGRELTGPAVLAVELCSRESMFGYHGHGPSPFLRITVALPRLVAPARRLLEQGIRVAGLGTPSFAPYEANVDFEIRFMVDTDIVGCNWLELPAGKYALRLKEKATQCQLEADVLWSDVVSHPPEGPWQRIAPLRVLSFDIECAGRKGIFPEPERDPVIQICSLGLRWGEPEPFLRLALTLRPCAPILGAKVQSYEKEEDLLQAWSTFIRIMDPDVITGYNIQNFDLPYLISRAQTLKVQTFPFLGRVAGLCSNIRDSSFQSKQTGRRDTKVVSMVGRVQMDMLQVLLREYKLRSYTLNAVSFHFLGEQKEDVQHSIITDLQNGNDQTRRRLAVYCLKDAYLPLRLLERLMVLVNAVEMARVTGVPLSYLLSRGQQVKVVSQLLRQAMHEGLLMPVVKSEGGEDYTGATVIEPLKGYYDVPIATLDFSSLYPSIMMAHNLCYTTLLRPGTAQKLGLTEDQFIRTPTGDEFVKTSVRKGLLPQILENLLSARKRAKAELAKETDPLRRQVLDGRQLALKSVTGFGRQMIEKTKQLVESKYTVENGYSTSAKVVYGDTDSVMCRFGVSSVAEAMALGREAADWVSGHFPSPIRLEFEKVYFPYLLISKKRYAGLLFSSRPDAHDRMDCKGLEAVRRDNCPLVANLVTASLRRLLIDRDPEGAVAHAQDVISDLLCNRIDISQLVITKELTRAASDYAGKQAHVELAERMRKRDPGSAPSLGDRVPYVIISAAKGVAAYMKSEDPLFVLEHSLPIDTQYYLEQQLAKPLLRIFEPILGEGRAEAVLLRGDHTRCKTVLTGKVGGLLAFAKRRNCCIGCRTVLSHQGAVCEFCQPRESELYQKEVSHLNALEERFSRLWTQCQRCQGSLHEDVICTSRDCPIFYMRKKVRKDLEDQEQLLRRFGPPGPEAW

SEQ ID NO: 23222 - protein, 477 aa, Homo sapiens
MQRLQDEQEIVQKRTFTKWINSHLAKRKPPMVVDDLFEDMKDGVKLLALLEVLSGQKLPCEQGRRMKRIHAVANIGTALKFLEGRKSMHRGSPIKLVNINSTDIADGRPSIVLGLMWTIILYFQIEELTSNLPQLQSLSSSASSVDSIVSSETPSPPSKRKVTTKIQGNAKKALLKWVQYTAGKQTGIEVKDFGKSWRSGVAFHSVIHAIRPELVDLETVKGRSNRENLEDAFTIAETELGIPRLLDPEDVDVDKPDEKSIMTYVAQFLKHYPDIHNASTDGQEDDEILPGFPSFANSVQNFKREDRVIFKEMKVWIEQFERDLTRAQMVESNLQDKYQSFKHFRVQYEMKRKQIEHLIQPLHRDGKLSLDQALVKQSWDRVTSRLFDWHIQLDKSLPAPLGTIGAWLYRAEVALREEITVQQVHEETANTIQRKLEQHKKIEAIRKELPPAPTATSTHLRNCICARIHALHFCYYG

SEQ ID NO: 23223 - protein, 824 aa, Homo sapiens
MARQKKMGQSVLRAVFFLVLGLLGHSHGGFPNTISIGGLFMRNTVQEHSAFRFAVQLYNTNQNTTEKPFHLNYHVDHLDSSNSFSVTNAFCSQFSRGVYAIFGFYDQMSMNTLTSFCGALHTSFVTPSFPTDADVQFVIQMRPALKGAILSLLGHYKWEKFVYLYDTERGFSILQAIMEAAVQNNWQVTARSVGNIKDVQEFRRIIEEMDRRQEKRYLIDCEVERINTILEQVVILGKHSRGYHYMLANLGFTDILLERVMHGGANITGFQIVNNENPMVQQFIQRWVRLDEREFPEAKNAPLKYTSALTHDAILVIAEAFRYLRRQRVDVSRRGSAGDCLANPAVPWSQGIDIERALKMVQVQGMTGNIQFDTYGRRTNYTIDVYEMKVSGSRKAGYWNEYERFVPFSDQQISNDSASSENRTIVVTTILESPYVMYKKNHEQLEGNERYEGYCVDLAYEIAKHVRIKYKLSIVGDGKYGARDPETKIWNGMVGELVYGRADIAVAPLTITLVREEVIDFSKPFMSLGISIMIKKPQKSKPGVFSFLDPLAYEIWMCIVFAYIGVSVVLFLVSRFSPYEWHLEDNNEEPRDPQSPPDPPNEFGIFNSLWFSLGAFMQQGCDISPRSLSGRIVGGVWWFFTLIIISSYTANLAAFLTVERMVSPIESAEDLAKQTEIAYGTLDSGSTKEFFRRSKIAVYEKMWSYMKSAEPSVFTKTTADGVARVRKSKGKFAFLLESTMNEYIEQRKPCDTMKVGGNLDSKGYGVATPKGSALRNAVNLAVLKLNEQGLLDKLKNKWWYDKGECGSGGGDSKNACKPCSIETQ

SEQ ID NO: 23224 - protein, 282 aa, Homo sapiens
MHRGARVRDERTRPLHPHQGRLPAPCAQLRSGKRTGFPLSGNPGDVLYELLQYIKTQRRALVCGPFFGGIFRLKTPTQHSPVPPEEVTGPSQMDTRRGHLLQPPDPGLTSNFGHLDDPGLARWTPGKEESLNLCHCAELGCRTQGVCSFPAMPQAPIDGRIADCRLLWDYVYQLLLDTRYEPYIKWEDKDAKIFRVVDPNGLARLWGNHKNRVNMTYEKMSRALRHYYKLNIIKKEPGQKLLFRFLKTPGKMVQDKHSHLEPLESQEQDRIEFKDKRPEISP

SEQ ID NO: 23225 - protein, 419 aa, Homo sapiens
MGPLPAPSCTQRITWKGLLLTASLLNFWNPPTTAEVTIEAQPPKVSEGKDVLLLVHNLPQNLPGYFWYKGEMTDLYHYIISYIVDGKIIIYGPAYSGRETVYSNASLLIQNVTRKDAGTYTLHIIKRGDETREEIRHFTFTLYLETPKPYISSSNLNPREAMEAVRLICDPETLDASYLWWMNGQSLPVTHRLQLSKTNRTLYLFGVTKYIAGPYECEIRNPVSASRSDPVTLNLLPKLPIPYITINNLNPRENKDVLAFTCEPKSENYTYIWWLNGQSLPVSPGVKRPIENRILILPSVTRNETGPYQCEIRDRYGGLRSNPVILNVLYGPDLPRIYPSFTYYRSGENLDLSCFTESNPPAEYFWTINGKFQQSGQKLFIPQITRNHSGLYACSVHNSATGKEISKSMTVKVSDWILP

SEQ ID NO: 23226 - protein, 1799 aa, Homo sapiens [sequence omitted]

SEQ ID NO: 23227 - protein, 820 aa, Homo sapiens
MEPLTFKDVAIEFSLEEWQCLDTAQRDLYRNVLLENYRNLVFLVMSFHFAQDLWPEQNIKDSFQKVTLRRYGKCEYENLQLRKGCKHVDECTGHKGGHNTVNQCLTATPSKIFQCNKYVKVFDKFSNSNRYKRRHTGNKHFKCKECSKSFCVLSQLTQHRRIHTRVNSYKCEECGKAFNWFSTLTKHKRIHTGEKPYKCEECGKAFNQSSQLTRHKIIHTEEKPNKCEECGKAFKQASHLTIHKIIHTGEKPYKYEECGKVFSQSSHLTTQKILHTGENLYKCKECGKAFNLFSNLTNHKRIHAGEKPYKCKECGRAFNISSNLNKQEKIHTGGKLNKCEECDKAFNRSLKLTAHKKILMEEKPYKCEECGKVFNQFSTLTRHKIIHTGEKPYKCKECGKAFNQSSNLTEHKKIHTAEKSYKCEECGKAFNQHSNLINHRKIYSGEKPYKCEECGKAFNRSSTLTRHKKIHTGEKPYKCEECDRAFSQSSNLTEHKKIHTGEKPYKCEECGKAFNRFSTLTKHKRIHTGEKPYKCEECGKAFNQSYQLTRHKIVHTKEKLNKCEEFGKAFKQSSHRTIHKIIHTGEKPYKCEEHGKVFNQSSNLTTQKIIHTGENLYKFEEHGKAFNLFSNITNHKIIYTGEKPHKCEECGKAYNRFSNLTIHKRIHTGEKPYQCAECGKAFNCSSTLNRHKIIHTGEKPYKCKECGKAFNLSSTLTAHKKIHTGEKPYKCEECGKAFNQSSNLTTHKKIHTSEKPYKCEECGKSFNQFSSLNIHKIIHTGEKPYKCGDYGRAFNLSSNLTTHKKIHTGEKPYKCEYGKT

SEQ ID NO: 23228 - protein, 195 aa, Homo sapiens
MLLLINVILTLWVSCANGQVKPCDFPDIKHGGLFHENMRRPYFPVAVGKYYSYYCDEHFETPSGSYWDYIHCTQNGWSPAVPCLRKCYFPYLENGYNQNYGRKFVQGNSTEVACHPGYGLPKAQTTVTCTEKGWSPTPRCIRVRTCSKSDIEIENGFISESSSIYILNKEIQYKCKPGYATADGNSSDMVFCISY

SEQ ID NO: 23229 - protein, 719 aa, Homo sapiens
MYLETRRAIFVFWIFLQVQGTKVCQEAVWEAYRIFLDRIPDTGEYQDWVSICQQETFCLFDIGKNFSNSQEHLDLLQQRIKQRSFPDRKDEISAEKTLGEPGETIVISTDVANVSLGPFPLTPDDTLLNEILDNTLNDTKMPTTERETEFAVLEEQRVELSVSLVNQKFKAELADSQSPYYQELAGKSQLQMQKIFKKLPGFKKIHVLGFRPKKEKDGSSSTEMQLTAIFKRHSAEAKSPASDLLSFDSNKIESEEVYHGTMEEDKQPEIYLTATDLKRLISKALEEEQSLDVGTIQFTDEIAGSLPAFGPDTQSELPTSFAVITEDATLSPELPPVEPQLETVDGAEHGLPDTSWSPPAMASTSLSEAPPFFMASSIFSLTDQGTTDTMATDQTMLVPGLTIPTSDYSAISQLALGISHPPASSDDSRSSAGGEDMVRHLDEMDLSDTPAPSEVPELSEYVSVPDHFLEDTTPVSALQYITTSSMTIAPKGRELVVFFSLRVANMAFSNDLFNKSSLEYRALEQQFTQLLVPYLRSNLTGFKQLEILNFRNGSVIVNSKMKFAKSVPYNLTKAVHGVLEDFRSAAAQQLHLEIDSYSLNIEPADQADPCKFLACGEFAQCVKNERTEEAECRCKPGYDSQGSLDGLEPGLCGPGTKECEVLQGKGAPCRLPDHSENQAYKTSVKKFQNQQNNKVISKRNSELLTVEYEEFNHQDWEGN

SEQ ID NO: 23230 - protein, 1062 aa, Homo sapiens
LIAVFEEQEPLHKIESPSGNPADRQSPDAFETEVAAQLAAFKPIGGEIEVTPSALKLGTPLLVRRSSDPVPGPPADTQPSASHPGGQSLKLVVPDSTQNLEDREVLNGVQTELLTSPRTKDTLSDMTRTVEISGEGGPLGIHVVPFFSSLSGRILGLFIRGIEDNSRSKREGLFHENECIVKINNVDLVDKTFAQAQDVFRQAMKSPSVLLHVLPPQNREQYEKSVIGSLNIFGNNDGVLKTKVPPPVHGKSGLKTANLTGTDSPETDASASLQQNKSPRVPRLGGKPSSPSLSPLMGFGSNKNAKKIKIDLKKGPEGLGFTVVTRDSSIHGPGPIFVKNILPKGAAIKDGRLQSGDRILEVNGRDVTGRTQEELVAMLRSTKQGETASLVIARQEGHFLPRELKGEPDCCALSLETSEQLTFEIPLNDSGSAGLGVSLKGNKSRETGTDLGIFIKSIIHGGAAFKDGRLRMNDQLIAVNGESLLGKSNHEAMETLRRSMSMEGNIRGMIQLVILRRPERPMEDPAECGAFSKPCFENCQNAVTTSRRNDNSILHPLGTCSPQDKQKGLLLPNDGWAESEVPPSPTPHSALGLGLEDYSHSSGVDSAVYFPDQHINFRSVTPARQPESINLKASKSMDLVPDESKVHSLAGQKSDGLSDKSSHSGQGALNCESAPQGNSELEDMENKARKVKKTKEKEKKKEKGKLKVKEKKRKEENEDPERKIKKKGFGAMLRFGKKKEDKGGKAEQKGTLKHGGLREEELEKMKEERERIGAKHQELREKQARGLLDYATGAIGSVYDMDDDEMDPNYARVNHFREPCTSANVFRSPSPPRAGPFGYPRDGHPLSPERDHLEGLYAKVNKPYHPLVPADSGRPTGGSTDRIQKLRKEYYQARREGFPLYEDDEGRARPSEYDLLWVPGRGPDGNAHNLRFEGMERQYASLPRGGPADPVDYLPAAPRGLYKERELPYYPGAHPMHPPKGSYPRPTELRVADLRYPQHYPPPPAPQHKGPFRQDVPPSPPQHQRMPAYQETGRPGPRGGSPDQYPYRTQDSRQKNPMTAAV

SEQ ID NO: 23231 - protein, 1463 aa, Homo sapiens
MVSESDFSKDVAVQVLPLDKIEENNKQKANDIFISQYTMGQKDALRTVLKQKAQSMPVFKEVKVHLLEDAGIEKDAVTQETRISPSGIDSATTVAAATAAAIATAAPLIKVQSDLEAKVNSVTELLSKLQETDKHLQRVTEQQTSIQRKQEKLHCHDHEKQMNVFMEQHIRHLEKLQQQQIDIQTHFISAALKTSSFQPVSMPSSRAVEKYSVKPEHPNLGSCNPSLYNTFASKQAPLKEVEDTSFDKQKSPLETPAPRRFAPVPVSRDDELSKRENLLEEKENMEVSCHRGNVRLLEQILNNNDSLTRKSESSNTTSLTRSKIGWTPEKTNRFPSCEELETTKVTMQKSDDVLHDLGQKEKETNSMVQPKESLSMLKLPDLPQNSVKLQTTNTTRSVLKDAEKILRGVQNNKKVLEENLEAIIRAKDGAAMYSLINALSTNREMSEKIRIRKTVDEWIKTISAEIQDELSRTDYEQKRFDQKNQRTKKGQNMTKDIRTNTQDKTVNKSVIPRKHSQKQIEEHFRNLPMRGMPASSLQKERKEGLLKATTVIQDEDYMLQVYGKPVYQGHRSTLKKGPYLRFNSPSPKSRPQRPKVIERVKGTKVKSIRTQTDFYATKPKKMDSKMKHSVPVLPHGDQQYLFSPSREMPTFSGTLEGHLIPMAILLGQTQSNSDTMPPAGVIVSKPHPVTVTTSIPPSSRKVETGVKKPNIAIVEMKSEKKDPPQLTVQVLPSVDIDSISNSSADVLSPLSSPKEASLPPVQTWIKTPEIMKVDEEEVKFPGTNFDEIIDVIQEEEKCDEIPDSEPILEFNRSVKADSTKYNGPPFPPVASTFQPTADILDKVIERKETLENSLIQWVEQEIMSRIISGLFPVQQQIAPSISVSVSETSEPLTSDIVEGTSSGALQLFVDAGVPVNSNVIKHFVNEALAETIAVMLGDREAKKQGPVATGVSGDASTNETYLPARVCTPLPTPQPTPPCSPSSPAKECVLVKTPDSSPCDSDHDMAFPVKEICAEKGDDMPAIMLVNTPTVTPTTTPPPAAAVFTPTLSDISIDKLKVSSPELPKPWGDGDLPLEEENPNSPQEELHPRAIVMSVAKDEEPESMDFPAQPPPPEPVPFMPFPAGTKAPSPSQMPGSDSSTLESTLSVTVTETETLDKPISEGEILFSCGQKLAPKILEDIGLYLTNLNDSLSSTLHDAVEMEDDPPSEGQVIRMSHKKFHADAILSFAKQNQESAVSQQAVYHSEDLENSVGELSEGQRPQLTAAAENILMGHSLYMQPPVTNTQSLDQQCDPKPLSRQFDTVSGSIYEDSCASHGPMSLGELELEPNSKLVLPTTLLTAQENDVNLPVAAEDFSQYQLKQNQDVKQVEHKPSQSYLRVRNKSDIAPSQQQVSPGDMDRTQIELNPYLTCVFSGGKAVPLSASQMPPAKMSVMLPSVNLEDCSQSLSLSTMQEDMESSGADTF

SEQ ID NO: 23232 - protein, 596 aa, Homo sapiens
MGPADSWGHHWMGILLSASLCTVWSPPAAAQLTLNANPLDATQSEDVVLPVFGTPRTPQIHGRSRELAKPSIAVSPGTAIEQKDMVTFYCTTKDVNITIHWVSNNLSIVFHERMQLSKDGKILTILIVQREDSGTYQCEARDALLSQRSDPIFLDVKYGPDPVEIKLESGVASGEVVEVMEGSSMTFLAETKSHPPCAYTWFLLDSILSHTTRTFTIHAVSREHEGLYRCLVSNSATHLSSLGTLKVRVLETLTMPQVVPSSLNLVENARSVDLTCQTVNQSVNVQWFLSGQPLLPSEHLQLSADNRTLIIHGLQRNDTGPYACEVWNWGSRARSEPLELTINYGPDQVHITRESASEMISTIEAELNSSLTLQCWAESKPGAEYRWTLEHSTGEHLGEQLIIRALTWEHDGIYNCTASNSLTGLARSTSVLVKVVGPQSSSLSSGAIAGIVIGILAVIAVASELGYFLCIRNARRPSRKTTEDPSHETSQPIPKEEHPTEPSSESLSPEYRNISQLQGRIRVELMQPPDLPEETYETKLPSASRRGNSFSPWKPPPKPLMPPLRLVSTVPKNMESIYEELVNPEPNTYIQINPSV

SEQ ID NO: 23233 - protein, 1370 aa, Homo sapiens
MGGKNKKHKAPAAAVVRAAVSASRAKSAEAGIAGEAQSKKPVSRPATAAAAAAGSREPRVKQGPKIYSFNSTNDSSGPANLDKSILKVVINNKLEQRIIGVINEHKKQNNDKGMISGRLTAKKLQDLYMALQAFSFKTKDIEDAMTNTLLYGGDLHSALDWLCLNLSDDALPEGFSQEFEEQQPKSRPKFQSPQIQATISPPLQPKTKTYEEDPKSKPKKEEKNMEVNMKEWILRYAEQQNEEEKNENSKSLEEEEKFDPNERYLHLAAKLLDAKEQAATFKLEKNKQGQKEAQEKIRKFQREMETLEDHPVFNPAMKISHQQNERKKPPVATEGESALNFNLFEKSAAATEEEKGKKKEPHDVRNFDYTARSWTGKSPKQFLIDWVRKNLPKSPNPSFEKVPVGRYWKCRVRVIKSEDDVLVVCPTILTEDGMQAQHLGATLALYRLVKGQSVHQLLPPTYRDVWLEWSDAEKKREELNKMETNKPRDLFIAKLLNKLKQQQQQQQQHSENKRENSEDPEESWENLVSDEDFSALSLESANVEDLEPVRNLFRKLQSTPKYQKLLKERQQLPVFKHRDSIVETLKRHRVVVVAGETGSGKSTQVPHFLLEDLLLNEWEASKCNIVCTQPRRISAVSLANRVCDELGCENGPGGRNSLCGYQIRMESRACESTRLLYCTTGVLLRKLQEDGLLSNVSHVIVDEVHERSVQSDFLLIILKEILQKRSDLHLILMSATVDSEKFSTYFTHCPILRISGRSYPVEVFHLEDIIEETGFVLEKDSEYCQKFLEEEEEVTINVTSKAGGIKKYQEYIPVQTGAHADLNPFYQKYSSRTQHAILYMNPHKINLDLILELLAYLDKSPQFRNIEGAVLIFLPGLAHIQQLYDLLSNDRRFYSERYKVIALHSILSTQDQAAAFTLPPPGVRKIVLATNIAETGITIPDVVFVIDTGRTKENKYHESSQMSSLVETFVSKASALQRQGRAGRVRDGFCFRMYTRERFEGFMDYSVPEILRVPLEELCLHIMKCNLGSPEDFLSKALDPPQLQVISNAMNLLRKIGACELNEPKLTPLGQHLAALPVNVKIGKMLIFGAIFGCLDPVATLAAVMTEKSPFTTPIGRKDEADLAKSALAMADSDHLTIYNAYLGWKKARQEGGYRSEITYCRRNFLNRTSLLTLEDVKQELIKLVKAAGFSSSTTSTSWEGNRASQTLSFQEIALLKAVLVAGLYDNVGKIIYTKSVDVTEKLACIVETAQGKAQVHPSSVNRDLQTHGWLLYQEKIRYARVYLRETTLITPFPVLLFGGDIEVQHRERLLSIDGWIYFQAPVKIAVIFKQLRVLIDSVLRKKLENPKMSLENDKILQIITELIKTENNN

SEQ ID NO: 23234 - protein, 235 aa, Homo sapiens [sequence omitted]

SEQ ID NO: 23235 - protein, 565 aa, Homo sapiens
MTVLEITLAVILTLLGLAILAILLTRWARCKQSEMYISRYSSEQSARLLDYEDGRGSRHAYHKVTLHMITERISKRDYTPSTNSLALSRSSIALPQGSMSSIKCLQTTEEPPSRTAGAMMQFTAPIQPELQDLSSSLKKPLCKLQDLLYNWIQCQIASSHNHTVHLQHPGPPMAPIIISQRTASQLAAPIRIPQVHTMDSSGKITLTPVVILTGYMDEELAKKSCSKIQILKCGGTARSQNSREENKEALKNDIIFTNSVESLKSAHIKEPEREGKGTDLEKDKIGMEVKVDSDAGIPKRQETQLKISDEYTTRTGSPNKEKCVRCTKRTGQVKKSESGVPKGQEAQVTKSGLVVLKGQEAQVEKSEMGVPRRQESQVKKSQSGVSKGQEAQVKKRESVVLKGQEAQVEKSELKVPKGQEGQVEKTEADVPKEQEVQEKKSEAGVLKGPESQVKNTEVSVPETLESQVKKSESGVLKGQEAQEKKESFEDKGNNDKEKERDAEKDPNKKEKGDKNTKGDKGKDKVKGKRESEINGEKSKGSKRRQIQEGSTTKKWKSKDKFFKGP

SEQ ID NO: 23236 - protein, 156 aa, Homo sapiens
MVYEPNQNKWISRSPMLQRRVYHSMAAVQRKLYVLGGNDLDYNNDRILVRHIDSYNIDTDQWTRCNFNLLTGQNESGVAVHNGRIYLVGGYSIWTNEPLACIQVLDVSREGKEEVFYGPTLPFASNGIAACFLPAPYFTCPNLQTLQVPHHRIGTI

SEQ ID NO: 23237 - protein, 1381 aa, Homo sapiens
MGRHVATSCHVAWLLVLISGCWGQVNRLPFFTNHFFDTYLLISEDTPVGSSVTQLLAQDMDNDPLVFGVSGEEASRFFAVEPDTGVVWLRQPLDRETKSEFTVEFSVSDHQGVITRKVNIQVGDVNDNAPTFHNQPYSVRIPENTPVGTPIFIVNATDPDLGAGGSVLYSFQPPSQFFAIDSARGIVTVIRELDYETTQAYQLTVNATDQDKTRPLSTLANLAIIITDVQDMDPIFINLPYSTNIYEHSPPGTTVRIITAIDQDKGRPRGIGYTIVSGNTNSIFALDYISGVLTLNGLLDRENPLYSHGFILTVKGTELNDDRTPSDATVTTTFNILVIDINDNAPEFNSSEYSVAITELAQVGFALPLFIQVVDKDENLGLNSMFEVYLVGNNSHHFIISPTSVQGKADIRIRVAIPLDYETVDRYDFDLFANESVPDHVGYAKVKITLINENDNRPIFSQPLYNISLYENVTVGTSVLTVLATDNDAGTFGEVSYFFSDDPDRFSLDKDTGLIMLIARLDYELIQRFTLTIIARDGGGEETTGRVRINVLDVNDNVPTFQKDAYVGALRENEPSVTQLVRLRATDEDSPPNNQITYSIVSASAFGSYFDISLYEGYGVISVSRPLDYEQISNGLIYLTVMAMDAGNPPLNSTVPVTIEVFDENDNPPTFSKPAYFVSVVENIMAGATVLFLNATDLDRSREYGQESIIYSLEGSTQFRINARSGEITTTSLLDRETKSEYILIVRAVDGGVGHNQKTGIATVNITLLDINDNHPTWKDAPYYINLVEMTPPDSDVTTVVAVDPDLGENGTLVYSIQPPNKFYSLNSTTGKIRTTHAMLDRENPDPHEAELMRKIVVSVTDCGRPPLKATSSATVFVNLLDLNDNDPTFQNLPFVAEVLEGIPAGVSIYQVVAIDLDEGLNGLVSYRMPVGMPRMDFLINSSSGVVVTTTELDRERIAEYQLRVVASDAGTPTKSSTSTLTIHVLDVNDETPTFFPAVYNVSVSEDVPREFRVVWLNCTDNDVGLNAELSYFITGGNVDGKFSVGYRDAVVRTVVGLDRETTAAYMLILEAIDNGPVGKRHTGTATVFVTVLDVNDNRPIFLQSSYEASVPEDIPEGHSILQLKATDADEGEFGRVWYRILHGNHGNNFRIHVSNGLLMRGPRPLDRERNSSHVLIVEAYNHDLGPMRSSVRVIVYVEDINDEAPVFTQQQYSRLGLRETAGIGTSVIVVQATDRDSGDGGLVNYRILSGAEGKFEIDESTGLIITVNYLDYETKTSYMMNVSATDQAPPFNQGFCSVYITLLNELDEAVQFSNASYEAAILENLALGTEIVRVQAYSIDNLNQITYRFNAYTSTQAKALFKIDAITVRGWGQGAPFLPI

SEQ ID NO: 23238 - protein, 508 aa, Homo sapiens [sequence omitted]

SEQ ID NO: 23239 - protein, 1087 aa, Homo sapiens
MDISTRSKDPGSAERTAQKRKFPSPPHSSNGHSPQDTSTSPIKKKKKPGLLNSNNKEQSELRHGPFYYMKQPLTTDPVDVVPQDGRNDFYCWVCHREGQVLCCELCPRVYHAKCLRLTSEPEGDWFCPECEKITVAECIETQSKAMTMLTIEQLSYLLKFAIQKMKQPGTDAFQKPVPLEQHPDYAEYIFHPMDLCTLEKNAKKKMYGCTEAFLADAKWILHNCIIYNGGNHKLTQIAKVVIKICEHEMNEIEVCPECYLAACQKRDNWFCEPCSNPHPLVWAKLKGFPFWPAKALRDKDGQVDARFFGQHDRAWVPINNCYLMSKEIPFSVKKTKSIFNSAMQEMEVYVENIRRKFGVFNYSPFRTPYTPNSQYQMLLDPTNPSAGTAKIDKQEKVKLNFDMTASPKILMSKPVLSGGTGRRISLSDMPRSPMSTNSSVHTGSDVEQDAEKKATSSHFSASEESMDFLDKSTASPASTKTGQAGSLSGSPKPFSPQLSAPITTKTDKTSTTGSILNLNLDRSKAEMDLKELSESVQQQSTPVPLISPKRQIRSRFQLNLDKTIESCKAQLGINEISEDVYTAVEHSDSEDSEKSDSSDSEYISDDEQKSKNEPEDTEDKEGCQMDKEPSAVKKKPKPTNPVEIKEELKSTSPASEKADPGAVKDKASPEPEKDFSEKAKPSPHPIKDKLKGKDETDSPTVHLGLDSDSESELVIDLGEDHSGREGRKNKKEPKEPSPKQDAVQQKEITQSPSTSTITLVTSTQSSPLVTSSGSMSTLVSSVNADLPIATASADVAADIAKYTSKMMDAIKGTMTEIYNDLSKNTTGSTIAEIRRLRIEIEKLQWLHQQELSEMKHNLELTMAEMRQSLEQERDRLIAEVKKQLELEKQQAVDETKKKQWCANCKKEAIFYCCWNTSYCDYPCQQAHWPEHMKSCTQSATAPQQEADAEVNTETLNKSSQGSSSSTQSAPSETASASKEKETSAEKSKESGSTLDLSGSRETPSSILLGSNQGSVSKRCDKQPAYAPTTTDHQPHPNYPAQKYHSRSNKSSWSSSDEKRGSTRSDHNTSTSTKSLLPKESRLDTFWD

SEQ ID NO: 23240 - protein, 224 aa, Homo sapiens
MDVCTFEKVGIRGTNIVVLGVEKKSVAKLQDERTVRKICALDDHVCMAFAGLTADARVVINRARVECQSHKLTVEDPVTVEYITRFIATLKQKYTQSNGRRPFGISALIVGFDDDGISRLYQTDPSGTYHAWKANAIGRSAKTVREFLEKNYTEDAIASDSEAIKLAIKALLEVVQSGGKNIELAIIRRNQPLKMFSAKEVELYVTEIEKEKEEAEKKKSKKSV

SEQ ID NO: 23241 - protein, 345 aa, Homo sapiens; identical to SEQ ID NO: 5597

SEQ ID NO: 23242 - protein, 327 aa, Homo sapiens [sequence omitted]

SEQ ID NO: 23243 - protein, 476 aa, Homo sapiens
MDEAGSSASGGGFRPGVDSLDEPPNSRIFLVISKYTPESVLRERFSPFGDIQDIWVVRDKHTKESKGIAFVKFARSSQACRAMEEMHGQCLGPNDTKPIKVFIAQSRSSGSHRDVEDEELTRIFVMIPKSYTEEDLREKFKVYGDIEYCSIIKNKVTGESKGLGYVRYLKPSQAAQAIENCDRSFRAILAEPKNKASESSEQDYYSNMRQEALGHEPRVNMFPFVGEQQSEFSSFDKNDSRGQEAISKRLSVVSRVPFTEEQLFSIFDIVPGLEYCEVQRDPYSNYGHGVVQYFNVASAIYAKYKLHGFQYPPGNRIGVSFIDDGSNATDLLRKMATQMVAAQLASMVWNNPSQQQFMQFGGSSGSQLPQIQTDVVLPSCKKKAPAETPVKERLFIVFNPHPLPLDVLEDIFCRFGNLIEVYLVSGKNVGYAKYADRISANDAIATLHGKILNGVRLKVMLADSPREESNKRQRTY

SEQ ID NO: 23244 - protein, 601 aa, Homo sapiens
MSKGILQVHPPICDCPGCRISSPVNRGRLADKRTVALPAARNLKKERTPSFSASDGDSDGSGPTCGRRPGLKQEDGPHIRIMKRRVHTHWDVNISFREASCSQDGNLPTLISSVHRSRHLVMPEHQSRCEFQRGSLEIGLRPAGDLLGKRLGRSPRISSDCFSEKRARSESPQEALLLPRELGPSMAPEDHYRRLVSALSEASTFEDPQRLYHLGLPSHDLLRVRQEVAAAALRGPSGLEAHLPSSTAGYGFLPPAQAEMFAWQQELLRKQNLARLELPADLLRQKELESARPQLLAPETALRPNDGAEELQRRGALLVLNHGAAPLLALPPQGPPGSGPPTPSRDSARRAPRKGGPGPASARPSESKEMTGARLWAQDGSEDEPPKDSDGEDPETAAVGCRGPTPGQAPAGGAGAEGKGLFPGSTLPLGFPYAVSPYFHTGAVGGLSMDGEEAPAPEDVTKWTVDDVCSFVGGLSGCGEYTRVFREQGIDGETLPLLTEEHLLTNMGLKLGPALKIRAQVARRLGRVFYVASFPVALPLQPPTLRAPERELGTGEQPLSPTTATSPYGGGHALAGQTSPKQENGTLALLPGAPDPSQPLC

SEQ ID NO: 23245 - protein, 152 aa, Homo sapiens
DWFSKSFVGCFVMVLLLLSLDFWSVKNVTGRLLVGLRWWNQIDEDGKSHWIFEARKVSPNSIAATEAEARIFWLGLIICPMIWIVFFFSTLFSLKLKWLALVVAGISLQAANLYGYILCKMGGNSDIGKVTASFLSQTVFQTAFLSSQAEMA

SEQ ID NO: 23246 - protein, 502 aa, Homo sapiens
MPVLERYFHPAELGRRWTGPEGVLPSSPGSRPGCQQGPLPWDLPEMIRMVKLVWKSKSELQATKQRGILDNEDALRSFPGDIRLRGQTGVRAERRGSYPFIDFRLLNSTTYSGEIGTKKKVKRLLSFQRYFHASRLLRGIIPQAPLHLLDEDYLGQARHMLSKVGMWDFDIFLFDRLTNGNSLVTLLCHLFNTHGLIHHFKLDMVTLHRFLVMVQEDYHSQNPYHNAVHAADVTQAMHCYLKEPKLASFLTPLDIMLGLLAAAAHDVDHPGVNQPFLIKTNHHLANLYQNMSVLENHHWRSTIGMLRESRLLAHLPKEMTQDIEQQLGSLILATDINRQNEFLTRLKAHLHNKDLRLEDAQDRHFMLQIALKCADICNPCRIWEMSKQWSERVCEEFYRQGELEQKFELEISPLCNQQKDSIPSIQIGFMSYIVEPLFREWAHFTGNSTLSENMLGHLAHNKAQWKSLLPRQHRSRGSSGSGPDHDHAGQGTESEEQEGDSP

SEQ ID NO: 23247 - protein, 818 aa, Homo sapiens
MSEGAYQRLWESSHATLQELLDQEQLLLEPAPDRERQSFQYRLASLYLHYLGLLRRFDTVYDQMVQPQKRRLLRRLLDGVAGRVLELKDELVRADLCENHCLDRVLQDFKLTPADLEVPIPKYFLLEQSTTVRERGLILAEILSRLEPVSSQKSFTGMHRTEAIILVQKAERARQGRLRATFMREIRRDEEQDGRIREDGWHKFSQGQAAVTIQKVWKGYLQRKRTQQDRRMEMEFIGMLPSPNQVEHLSIISQPCLVEDVQRLRQMEKEEEFRAAMVKAHDSLVETEGPDMKEKMKEQIRQWFIECHDLTGRFPDYPDASSGGSYSIFADKTPEQVRMELEMQMQENRKKEQEKSKEKGKDEKEKKKGKEEKAKKGEVDAVLQVLPSKCIPMICAGHEEYLNTWKNRCESIHPSQNYDSETLREEKRKEVELEIRIQVDELMRQELRKLRLAVDKEEERPLRAPKKTPGKKTGKKKEKDLTSDRSVESLYEELVISGLLRKSESVALKDYIGDFLYLGSTLSLVKKLPMPSLFDIRQNVALYAVLRLGSPDIHIMAPLIRSILLVGPSGMGKKMLVKAVCTETGANLFDLSPENLLGKYPGRNGAQMMVHIVFKVARLLQPSVIWIGNAEKNFYKKTPKEDKEMDPKRIKKDLTKALRLLTPGDRVMLIGTTSRPQLAEMRGLCRVYERILFMPRPDYASRYVLWKRMIEARGIQPTQHLDISALAKVSDGYTPGHILQAIQSVLSERRFLQLSKRPLVASEFLGQLVKLDPVYREEEESLKDWYFKTPLGKKSMKHRMDQLEAEEAKLDKEKKKRK

SEQ ID NO: 23248 - protein, 752 aa, Homo sapiens
MSSTRSQNPHGLKQIGLDQIWDDLRAGIQQVYTRQSMAKSRYMELYTHVYNYCTSVHQFVGLELYKRLKEFLKNYLTNLLKDGEDLMDESVLKFYTQQWEDYRFSSKVLNGICAYLNRHWVRRECDEGRKGIYEIYSLALVTWRDCLFRPLNKQVTNAVLKLIEKERNGETINTRLISGVVQSYVELGLNEDDAFAKGPTLTVYKESFESQFLADTERFYTRESTEFLQQNPVTEYMKKAEARLLEEQRRVQVYLHESTQDELARKCEQVLIEKHLEIFHTEFQNLLDADKNEDLGRMYNLVSRIQDGLGELKKLLETHIHNQGLAAIEKCGEAALNDPKMYVQTVLDVHKKYNALVMSAFNNDAGFVAALDKACGRFINNNAVTKMAQSSSKSPELLARYCDSLLKKSSKNPEEAELEDTLNQVMVVFKYIEDKDVFQKFYAKMLAKRLVHQNSASDDAEASMISKLKQACGFEYTSKLQRMFQDIGVSKDLNEQFKKHLTNSEPLDLDFSIQVLSSGSWPFQQSCTFALPSELERSYQRFTAFYASRHSGRKLTWLYQLSKGELVTNCFKNRYTLQASTFQMAILLQYNTEDAYTVQQLTDSTQIKMDILAQVLQILLKSKLLVLEDENANVDEVELKPDTLIKLYLGYKNKKLRVNINVPMKTEQKQEQETTHKNIEEDRKLLIQAAIVRIMKMRKVLKHQQLLGEVLTQLSSRFKPRVPVIKKCIDILIEKEYLERVDGEKDTYSYLA

SEQ ID NO: 23249 - protein, 1439 aa, Homo sapiens
MENKISTIERGAFQDLKELERLRLNRNHLQLFPELLFLGTAKLYRLDLSENQIQAIPRKAFRGAVDIKNLQLDYNQISCIEDGAFRALRDLEVLTLNNNNITRLSVASFNHMPKLRTFRLHSNNLYCDCHLAWLSDWLRQRPRVGLYTQCMGPSHLRGHNVAEVQKREFVCSARHGGHQSFMAPSCSVLHCPAACTCSNNIVDCRGKGLTEIPTNLPETITEIRLEQNTIKVIPPGAFSPYKKLRRIDLSNNQISELAPDAFQGLRSLNSLVLYGNKITELPKSLFEGLFSLQLLLLNANKINCLRVDAFQDLHNLNLLSLYDNKLQTIAKGTFSPLRAIQTMHLAQNPFICDCHLKWLADYLHTNPIETSGARCTSPRRLANKRIGQIKSKKFRCSGTEDYRSKLSGDCFADLACPEKCRCEGTTVDCSNQKLNKIPEHIPQYTAELRLNNNEFTVLEATGIFKKLPQLRKINFSNNKITDIEEGAFEGASGVNEILLTSNRLENVQHKMFKGLESLKTLMLRSNRITCVGNDSFIGLSSVRLLSLYDNQITTVAPGAFDTLHSLSTLNLLANPFNCNCYLAWLGEWLRKKRIVTGNPRCQKPYFLKEIPIQDVAIQDFTCDDGNDDNSCSPLSRCPTECTCLDTVVRCSNKGLKVLPKGIPRDVTELYLDGNQFTLVPKELSNYKHLTLIDLSNNRISTLSNQSFSNMTQLLTLILSYNRLRCIPPRTFDGLKSLRLLSLHGNDISVVPEGAFNDLSALSHLAIGANPLYCDCNMQWLSDWVKSEYKEPGIARCAGPGEMADKLLLTTPSKKFTCQGPVDVNILAKCNPCLSNPCKNDGTCNSDPVDFYRCTCPYGFKGQDCDVPIHACISNPCKHGGTCHLKEGEEDGFWCICADGFEGENCEVNVDDCEDNDCENNSTCVDGINNYTCLCPPEYTGELCEEKLDFCAQDLNPCQHDSKCILTPKGFKCDCTPGYVGEHCDIDFDDCQDNKCKNGAHCTDAVNGYTCICPEGYSGLFCEFSPPMVLPRTSPCDNFDCQNGAQCIVRINEPICQCLPGYQGEKCEKLVSVNFINKESYLQIPSAKVRPQTNITLQIATDEDSGILLYKGDKDHIAVELYRGRVRASYDTGSHPASAIYSVETINDGNFHIVELLALDQSLSLSVDGGNPKIITNLSKQSTLNFDSPLYVGGMPGKSNVASLRQAPGQNGTSFHGCIRNLYINSELQDFQKVPMQTGILPGCEPCHKKVCAHGTCQPSSQAGFTCECQEGWMGPLCDQRTNDPCLGNKCVHGTCLPINAFSYSCKCLEGHGGVLCDEEEDLFNPCQAIKCKHGKCRLSGLGQPYCECSSGYTGDSCDREISCRGERIRDYYQKQQGYAACQTTKKVSRLECRGGCAGGQCCGPLRSKRRKYSFECTDGSSFVDEVEKVVKCGCTRCVS

SEQ ID NO: 23250 - protein, 682 aa, Homo sapiens
MSKGILQVHPPICDCPGCRISSPVNRGRLADKRTVALPAARNLKKERTPSFSASDGDSDGSGPTCGRRPGLKQEDGPHIRIMKRRVHTHWDVNISFREASCSQDGNLPTLISSVHRSRHLVMPEHQSRCEFQRGSLEIGLRPAGDLLGKRLGRSPRISSDCFSEKRARSESPQAEALLLPRELGPSMAPEDHYRRLVSALSEASTFEDPQRLYHLGLPSHGEDPPWHDPPHHLPSHDLLRVRQEVAAAALRGPSGLEAHLPSSTAGQRRKQGLAQHREGAAPAAAPSFSERELPQPPPLLSPQNAPHVALGPHLRPPFLGVPSALCQTPGYGFLPPAQAEMFAWQQELLRKQNLARLELPADLLRQKELESARPQLLAPETALRPNDGAEELQRRGALLVLNHGAAPLLALPPQGPPGSGPPTPSRDSARRAPRKGGPGPASARPSESKEMTGARLWAQDGSEDEPPKDSDGEDPETAAVGCRGPTPGQAPAGGAGAEGKGLFPGSTLPLGFPYAVSPYFHTGAVGGLSMDGEEAPAPEDVTKWTVDDVCSFVGGLSGCGEYTRVFREQGIDGETLPLLTEEHLLTNMGLKLGPALKIRAQVARRLGRVFYVASFPVALPLQPPTLRAPERELGTGEQPLSPTTATSPYGGGHALAGQTSPKQENGTLALLPGAPDPSQPLC

SEQ ID NO: 23251 - protein, 1162 aa, Homo sapiens [sequence omitted]

SEQ ID NO: 23252 - protein, 253 aa, Homo sapiens
MMNSDQKAVKFLANFYINGGKHWTHGHLRQTQPEPTQPKASVLLLGPEPGMAWDETQPPKMKEIPVGLRLQTGTPQESLPTYTQTLRELLLEQRPLITADLEVPSPTRYQVPSPSVRESSPHPHYSIGCKHQGREGGGRRAWQTLWFQSESPFTQKADFDQEQKASLQAPGKRCPGPNTYNILPGSRLQSPRSPAFSMSRSPAFTSWLSTSRTPGPAAYHVEDCNSRFPSAPGVVIQGVRRPKRHDTGPFCTL

SEQ ID NO: 23253 - protein, 524 aa, Homo sapiens
MESPSAPPHRWCIPWQRLLLTASLLTFWNPPTTAKLTIESTPFNVAEGKEVLLLVHNLPQHLFGYSWYKGERVDGNRQIIGYVIGTQQATPGPAYSGREIIYPNASLLIQNIIQNDTGFYTLHVIKSDLVNEEATGQFRVYPEPPKPFITSNNSNPVEDEDAVALTCEPEIQNTTYLWWVNNQSLPVSPRLQLSNDNRTLTLLSVTRNDVGPYECGIQNELSVDHSDPVILNVLYGPDDPTISPSYTYYRPGVNLSLSCHAASNPPAQYSWLIDGNIQQHTQELFISNITEKNSGLYTCQANNSASGHSRTTVKTITVSAELPKPSISSNNSKPVEDKDAVAFTCEPEAQNTTYLWWVNGQSLPVSPRLQLSNGNRTLTLFNVTRNDARAYVCGIQNSVSANRSDPVTLDVLYGPDTPIISPPDSSYLSGANLNLSCHSASNPSPQYSWRINGIPQQHTQVLFIAKITPNNNGTYACFVSNLATGRNNSIVKSITVSASGTSPGLSAGATVGIMIGVLVGVALI

SEQ ID NO: 23254 - protein, 537 aa, Homo sapiens [sequence omitted]

SEQ ID NO: 23255 - protein, 732 aa, Homo sapiens
MPGGGPQGAPAAAGGGGVSHRAGSRDCLPPAACFRRRRLARRPGYMRSSTGPGIGFLSPAVGTLFRFPGGVSGEESHHSESRARQCGLDSRGLLVRSPVSKSAAAPTVTSVRGTSAHFGIQLRGGTRLPDRLSWPCGPGSAGWQQEFAAMDSSETLDASWEAACSDGARRVRAAGSLPSAELSSNSCSPGCGPEVPPTPPGSHSAFTSSFSFIRLSLGSAGERGEAEGCPPSREAESHCQSPQEMGAKAASLDGPHEDPRCLSRPFSLLATRVSADLAQAARNSSRPERDMHSLPDMDPGSSSSLDPSLAGCGGDGSSGSGDAHSWDTLLRKWEPVLRDCLLRNRRQMEVISLRLKLQKLQEDAVENDDYDKAETLQQRLEDLEQEKISLHFQLPSRQPALSSFLGHLAAQVQAALRRGATQHLQERIKSLNLSLKEITTKVCMSEKFCSTLRKKVNDIETQLPALLEAKMHAISGNHFWTAKDLTEEIRSLTSEREGLEGLLSKLLVLSSRNVKKLGSVKEDYNRLRREVEHQETAYETSVKENTMKYMETLKNKLCSCKCPLLGKVWEADLEACRLLIQSLQLQEARGSLSVEDERQMDDLEGAAPPIPPRLHSEDKRKTPLKVLEEWKTHLIPSLHCAGGEQKEESYILSAELGEKCEDIGKKLLYLEDQLHTAIHSHDEDLIHSLRRELQMVKETLQAMILQLQPAKEAGEREAAASCMTAGVHEAQA

SEQ ID NO: 23256 - protein, 1282 aa, Homo sapiens [sequence omitted]

SEQ ID NO: 23257 - protein, 1112 aa, Homo sapiens
MPGSVGPVGPRGPQGLQGQQGGAGPTGPPGEPGDPGPMGPIGSRGPEGPPGKPGEDGEPGRNGNPGEVGFAGSPGARGFPGAPGLPGLKGHRGHKGLEGPKGEVGAPGSKGEAGPTGPMGDPGTVGPPGPVGERGAPGNRGFPGSDGLPGPKGAQGERGPVGSSGPKGSQGDPGRPGEPGLPGARGLTGNPGVQGPEGKLGPLGAPGEDGRPGPPGSIGIRGQPGSMGLPGPKGSSGDPGKPGEAGNAGVPGQRGAPGKDGEVGPSGPVGPPGLAGERGEQGPPGPTGFQGLPGPPGPPGEGGKPGDQGVPGDPGAVGPLGPRGERGNPGERGEPGITGLPGEKGMAGGHGPDGPKGSPGPSGTPGDTGPPGLQGMPGERGIAGTPGPKGDRGGIGEKGAEGTAGNDGARGLPGPLGPPGPAGPTGEKGEPGPRGLVGPPGSRGNPGSRGENGPTGAVGFAGPQGPDGQPGVKGEPGEPGQKGDAGSPGPQGLAGSPGPHGPNGVPGLKGGRGTQGPPGATGFPGSAGRVGPPGPAGAPGPAGPLGEPGKEGPPGLRGDPGSHGRVGDRGPAGPPGGPGDKGDPGEDGQPGPDGPPGPAGTTGQRGIVGMPGQRGERGMPGLPGPAGTPGKVGPTGATGDKGPPGPVGPPGSNGPVGEPGPEGPAGNDGTPGRDGAVGERGDRGDPGPAGLPGSQGAPGTPGPVGAPGDAGQRGDPGSRGPIGPPGRAGKRGLPGPQGPRGDKGDHGDRGDRGQKGHRGFTGLQGLPGPPGPNGEQGSAGIPGPFGPRGPPGPVGPSGKEGNPGPLGPIGPPGVRGSVGEAGPEGPPGEPGPPGPPGPPGHLTAALGDIMGHYDESMPDPLPEFTEDQAAPDDKNKTDPGVHATLKSLSSQIETMRSPDGSKKHPARTCDDLKLCHSAKQSGEYWIDPNQGSVEDAIKVYCNMETGETCISANPSSVPRKTWWASKSPDNKPVWYGLDMNRGSQFAYGDHQSPNTAITQMTFLRLLSKEASQNITYICKNSVGYMDDQAKNLKKAVVLKGANDLDIKAEGNIRFRYIVLQDTCSKRNGNVGKTVFEYRTQNVARLPIIDLAPVDVGGTDQEFGVEIGPVCFV

SEQ ID NO: 23258 - protein, 701 aa, Homo sapiens
ISEIEEIFSTDLVPGDVMVIPLNGTIMPCDAVLINGTCIVNESMLTGESVPVTKTNLPNPSVDVKGIGDELYNPETHKRHTLFCGTTVIQTRFYTGELVKAIVVRTGFSTSKGQLVRSILYPKPTDFKLYRDAYLFLLCLVAVAGIGFIYTIINSILNEVQVGVIIIESLDIITITVPPALPAAMTAGIVYAQRRLKKIGIFCISPQRINICGQLNLVCFDKTGTLTEDGLDLWGIQRVENARFLSPEENVCNEMLVKSQFVACMATCHSLTKIEGVLSGDPLDLKMFEAIGWILEEATEEETALHNRIMPTVVRPPKQLLPESTPAGNQEMELFELPATYEIGIVRQFPFSSALQRMSVVARVLGDRKMDAYMKGAPEAIAGLCKPETVPVDFQNVLEDFTKQGFRVIALAHRKLESKLTWHKVQNISRDAIENNMDFMGLIIMQNKLKQETPAVLEDLHKANIRTVMVTGDSMLTAVSVARDCGMILPQDKVIIAEALPPKDGKVAKINWHYADSLTQCSHPSAIDPEAIPVKLVHDSLEDLQMTRYHFAMNGKSFSVILEHFQDLVPKLMLHGTVFARMAPDQKTQLIEALQNVDYFVGMCGDGANDCGALKRAHGGISLSELEASVASPFTSKTPSISCVPNLIREGRAALITSFCELALFSIVTYSLDHFIISILISNMLVLFFSDFHNCAFYSLV

SEQ ID NO: 23259 - protein, 364 aa, Homo sapiens
MLQTKDLIWTLFFLGTAVSLQVDIVPSQGEISVGESKFFLCQVAGDAKDKDISWFSPNGEKLTPNQQRISVVWNDDSSSTLTIYNANIDDAGIYKCVVTGEDGSESEATVNVKIFQKLMFKNAPTPQEFREGEDAVIVCDVVSSLPPTIIWKHKGRDVILKKDVRFIVLSNNYLQIRGIKKTDEGTYRCEGRILARGEINFKDIQVIVNVPPTIQARQNIVNATANLGQSVTLVCDAEGFPEPTMSWTKDGEQIEQEEDDEKYIFSDDSSQLTIKKVDKNDEAEYICIAENKAGEQDATIHLKVFAKPKITYVENQTAMELEEQVTLTCEASGDPIPSITWRTSTRNISSEEKASWTRPEKQEV

SEQ ID NO: 23260 - protein, 248 aa, Homo sapiens
MSREFRGHRNCVLTLAYSAPWDLPSTPCAEEAAAGGLLVTGSTDGTAKVWQVASGCCHQTLRGHTGAVLCLVLDTPGHTAFTGSTDATIRAWDILSGEQLRVFREHRGSVICLELVNRLVYSGSADRTVKCWLADTGECVRTFTAHRRNVSALKYHAGTLFTGSGDACARAFDAQSGELRRVFRGHTFIINCIQVHGQVLYTASHDGALRLWDVRGLRGAPRPPPPMRSLSRLFSNKVGCAAAPLQPA

SEQ ID NO: 23261 - protein, 302 aa, Homo sapiens
MDDLMLSPDDIEQWFTEDPGPDEAPRMPEAAPPVAPAPAAPTPAAPAPAPSWPLSSSVPSQKTYQGSYGFRLGFLHSGTAKSVTCTYSPALNKMFCQLAKTCPVQLWVDSTPPPGTRVRAMAIYKQSQHMTEVVRRCPHHERCSDSDGLAPPQHLIRVEGNLRVEYLDDRNTFRHSVVVPYEPPEVGSDCTTIHYNYMCNSSCMGGMNRRPILTIITLEDSSGNLLGRNSFEVRVCACPGRDRRTEEENLRKKGEPHHELPPGSTKRALPNNTSSSPQPKKKPLDGEYFTLQDQTSFQKENC

SEQ ID NO: 23262 - protein, 4363 aa, Homo sapiens
MLEGLVAWVLNTYLGKYVNNLNTDQLSVALLKGAVELENLPLKKDALKELELPFEVKAGFIGKVTLQIPFYRPHVDPWVISISSLHLIGAPEKIQDFNDEKEKLLERERKKALLQALEEKWKNDRQQKGESYWYSVTASVVTRIVENIELKIQDVHLRFEDGVTNPSHPFAFGICIKNVSMQNAVNEPVQKLMRKKQLDVAEFSIYWDVDCTLLGDLPQMELQEAMARSMESRSHHYVLEPVFASALLKRNCSKKPLRSRHSPRIDCDIQLETIPLKLSQLQYRQIMEFLKELERKERQVKFRRWKPKVAISKNCREWWYFALNANLYEIREQRKRCTWDFMLHRARDAVSYTDKYFNKLKGGLLSTDDKEEMCRIEEEQSFEELKILRELVHDRFHKQEELAESLREPQFDSPGACPGAPEPGGGSGMLQYLQSWFPGWGGWYGQQTPEGNVVEGLSAEQQEQWIPEEILGTEEFFDPTADASCMNTYTKRDHVFAKLNLQLQRGTVTLLHKEQGTPQMNESAFMQLEFSDVKLLAESLPRRNSSLLSVRLGGLFLRDLATEGTMFPLLVFPNPQKEVGRVSQSFGLQTTSADRSDHYPAADPDGPVFEMLYERNPAHSHFERRLNVSTRPLNIIYNPQAIKKVADFFYKGKVHTSGFGYQSELELRVAEAARRQYNKLKMQTKAEIRQTLDRLLVGDFIEESKRWTVRLDISAPQVIFPDDFKFKNPVLVVVDLGRMLLTNTQDNSRRKSRDGSASEETQFSDDEYKTPLATPPNTPPPESSSSNGEKTPPFSGVEFSEEQLQAHLMSTKMYERYSLSFMDLQIMVGRVKDNWKHVQDIDVGPTHVVEKFNVHLQLERRLIYTSDPKYPGAVLSGNLPDLKIHINEDKISALKNCFALLTTPEMKTSDTQIKEKIFPQEEQRGSLQDSVMNLTQSIVLLEQHTREVLVESQLLLAEFKVNCMQLGVESNGRYISVLKVFGTNAHFVKRPYDAEVSLTVHGLLLVDTMQTYGADFDLLMASHKNLSFDIPTGSLRDSRAQSPVSGPNVAHLTDGATLNDRSATSVSLDKILTKEQESLIKLEYQFVSSECPSMNLDSTLQVISLQVNNLDIILNPETIVELIGFLQKSFPKEKDDLSPQPLMTDFERSFREQGTYQSTYEQNTEVAVEIHRLNLLLLRTVGMANREKYGRKIATASIGGTKVNVSMGSTFDMNGSLGCLQLMDLTQDNVKNQYVVSIGNSVGYENIISDIGYFESVFVRMEDAALTEALSFTFVERSKQECFLNLKMASLHYNHSAKFLKELTLSMDELEENFRGMLKSAATKVTTVLATKTAEYSEMVSLFETPRKTREPFILEENEIYGFDLASSHLDTVKLILNINIESPVVSIPRKPGSPELLVGHLGQIFIQNFVAGDDESRSDRLQVEIKDIKLYSLNCTQLAGREAVGSEGSRMFCPPSGSGSANSQEEAHFTRHDFFESLHRGQAFHILNNTTIQFKLEKIPIERESELTFSLSPDDLGTSSIMKIEGKFVNPVQVVLAKHVYEQVLQTLDNLVYSEDLNKYPASATSSPCPDSPLPPLSTCGESSVERKENGLFSHSSLSNTSQKSLSVKEVKSFTQIQATFCISELQVQLSGDLTLGAQGLVSLKFQDFEVEFSKDHPQTLSIQIALHSLLMEDLLEKNPDSKYKNLMVSRGAPKPSSLAQKEYLSQSCPSVSNVEYPDMPRSLPSHMEEAPNVFQLYQRPTSASRKKQKEVQDKDYPLTPPPSPTVDEPKILVGKSKFDDSLVHINIFLVDKKHPEFSSSYNRVNRSIDVDFNCLDVLITLQTWVVILDFFGIGSTADNHAMRLPPEGILHNVKLEPHASMESGLQDPVNTKLDLKVHSLSLVLNKTTSELAKANVSKLVAHLEMIEGDLALQGSIGSLSLSDLTCHGEFYRERFTTSGEEALIFQTFKYGRPDPLLRREHDIRVSLRMASVQYVHTQRFQAEVVAFIQHFTQLQDVLGRQRAAIEGQTVRDQAQRCSRVLLDIEAGAPVLLIPESSRSNNLIVANLGKLKVKNKFLFAGFPGTFSLQDKESVPSASPTGIPKHSLRKTTSTEEPRGTHSQGQFTMPLAGMSLGSLKSEFVPSTSTKQQGPQPTLSVGQESSSPEDHVCLLDCVVVDLQDMDIFAAERHPREYSKAPEDSSGDLIFPSYFVRQTGGSLLTEPCRLKLQVERNLDKEISHTVPDISIHGNLSSVHCSLDLYKYKLIRGLLENNLGEPIEEFMRPYDLQDPRIHTVLSGEVYTCMCFLIDMVNVSLELKDPKRKEGAGSLARFDFKKCKLLYESFSNQTKSINLVSHSMMAFDTRYAGQKTSPGMTNVFSCIFQPAKNSSTTQGSIQIELHFRSTKDSSCFTVVLNNLRVFLIFDWLLLVHDFLHTPSDIKKQNHVTPSRHRNSSSESAIVPKTVKSGVVTKRSSLPVSNERHLEVKVNVTGTEFVVIEDVSCFDTNAIILKGTTVLTYKPRFVDRPFSGSLFGIEVFSCRLGNEHDTALSIVDPVQIQMELVGNSSYQNSSGLMDAFNSEDFPPVLEIQLQALDIRLSYNDVQLFLAIAKSIPEQANAAVPDSVALESDSVGTYLPGASRVGEEIREGTRHTLDPVLELQLARLQELGFSMDDCRKALLACQGQLKKAASWLFKNAEPLKSLSLASTSRDSPGAVAAPLISGVEIKAESVCICFIDDCMDCDVPLAELTFSRLNFLQRVRTSPEGYAHFTLSGDYYNRALSGWEPFIEPWPCSVSWQQQAASRLHPPRLKLEAKAKPRLDINITSVLIDQYVSTKESWMADYCKDDKDIESAKSEDWMGSSVDPPCFGQTEVKTPKRRQPFVPFALRNHTGCTLWFATLTTTPTRAALSHSGSPGVVPEGNGTFLDDTHNVSEWREVLTGEEIPFEFEARGKLRHRHTHDLRIHQLQVRVNGWEQVSPVSVDKVGTFFRYAAPDKNSSSSTIGSPSSRTNIIHPQVYFSSLPPVRVVFAVTMEGSARKVITVRSALIVRNRLETPMELRLDSPSAPDKPVVLPAIMPGDSFAVPLHLTSWRLQARPKGLGVFFCKAPIHWTNVVKTAEISSSKRECHSMDTEKSRFFRFCVAIKKENYPDYMPSNIFSDSAKQIFRQPGHTIYLLPTVVICNLLPCELDFYVKGMPINGTLKPGKEAALHTADTSQNIELGVSLENFPLCKELLIPPGTQNYMVRMRLYDVNRRQLNLTIRIVCRAEGSLKIFISAPYWLINKTGLPLIFRQDNAKTDAAGQFEEHELARSLSPLLFCYADKEQPNLCTMRIGRGIHPEGMPGWCQGFSLDGGSGVRALKVIQQGNRPGLIYNIGIDVKKGRGRYIDTCMVIFAPRYLLDNKSSHKLAFAQREFARGQGTANPEGYISTLPGSSVVFHWPRNDYDQLLCVRLMDVPNCIWSGGFEVNKNNSFHINMRDTLGKCFFLRVEITLRGATYRISFSDTDQLPPPFRIDNFSKVPVVFTQHGVAEPRLRTEVKPMTSLDYAWDEPTLPPFITLTVKGAGSSEINCNMNDFQDNRQLYYENFIYIAATYTFSGLQEGTGRPVASNKAITCAELVLDVSPKTQRVILKKKEPGKRSQLWRMTGTGMLAHEGSSVPHNPNKPSAARSTEGSAILDIAGLAAVTDNRYEPLMLRKPDRRRSTTQTWSFREGKLTCGLHGLVVQAKGGLSGLFDGAEVVLGPDTSMELLGPVPPEQQFINQKMRPGSGMLSIRVIPDGPTRALQITDFCHRKSSRSYEVDELPVTEQELQKLKNPDTEQELEVLVRLEGGIGLSLINKVPEELVFASLTGINVHYTQLATSHMLELSIQDVQVDNQLIGTTQPFMLYVTPLSNENEVIETGPAVQVNAVKFPSKSALTNIYKHLMITAQRFTVQIEEKLLLKLLSFFGYDQAESEVEKYDENLHEKTAEQGGTPIRYYFENLKISIPQIKLSVFTSNKLPLDLKALKSTLGFPLIRFEDAVINLDPFTRVHPYETKEFIINDILKHFQEELLSQAARILGSVDFLGNPMGLLNDVSEGVTGLIKYGNVGGLIRNVTHGVSNSAAKFAGTLSDGLGKTMDNRHQSEREYIRYHAATSGEHLVAGIHGLAHGIIGGLTSVITSTVEGVKTEGGVSGFISGLGKGLVGTVTKPVAGALDFASETAQAVRDTATLSGPRTQAQRVRKPRCCTGPQGLLPRYSESQAEGQEQLFKLTDNIQDEFFIAVENIDSYCVLISSKAVYFLKSGDYVDREAIFLEVKYDDLYHCLVSKDHGKVYVQVTKKAVSTSSGVSIPGPSHQKPMVHVKSEVLAVKLSQEINYAKSLYYEQQLMLRLSENREQLELDS

SEQ ID NO: 23263 - protein, 345 aa, Homo sapiens
MQVVPLELARGHQVALSSISYVGCSLSVLCLVATLVTFAVLSSVSTIRNQRYHIHANLSFAVLVAQVLLLISFRLEPGTTPCQVMAVLLHYFFLSAFAWMLVEGLHLYSMVIKVFGSEDSKHRYYYGMGWGFPLLICIISLSFAMDSYGTSNNCWLSLASGAIWAFVAPALFVIVVNIGILIAVTRVISQISADNYKIHGDPSAFKLTAKAVAVLLPILGTSWVFGVLAVNGCAVVFQYMFATLNSLQGLFIFLFHCLLNSEARWAKEGRAESLSRMVAGQKGCMITKPSDPLIATPSDPLQGLRWIPVAGRQCSHGSPPAHPPACPPRICLFASLSHSPRDIHC

SEQ ID NO: 23264 - protein, 737 aa, Homo sapiens
MPASAARPRPGPGQPTASPFPLLLLAVLSGPVSGRVPRSVPRTSLPISEADSCLTRFAVPHTYNYSVLLVDPASHTLYVGARDTIFALSLPFSGERPRRIDWMVPEAHRQNCRKKGKKEDVSRFQQVERLESGRGKCPFEPAQRSAAVMAGGVLYAATVKNYLGTEPIITRAVGRAEDWIRTDTLPSWLNAPAFVAAVALSPAEWGDEDGDDEIYFFFTETSRAFDSYERIKVPRVARVCAGDLGGRKTLQQRWTTFLKADLLCPGPEHGRASSVLQDVAVLRPELGAGTPIFYGIFSSQWEGATISAVCAFRPQDIRTVLNGPFRELKHDCNRGLPVVDNDVPQPRPGECITNNMKLRHFGSSLSLPDRVLTFIRDHPLMDRPVFPADGHPLLVTTDTAYLRVVAHRVTSLSGKEYDVLYLGTEDGHLHRAVRIGAQLSVLEDLALFPEPQPVENMKLYHSWLLVGSRTEVTQVNTTNCGRLQSCSECILAQDPVCAWSFRLDECVAHAGEHRGLVQDIESADVSSLCPKEPGERPVVFEVPVATAAHVVLPCSPSSAWASCVWHQPSGVTALTPRRDGLEVVVTPGAMGAYACECQEGGAAHVVAAYSLVWGSQRDAPSRAHTVGAGLAGFFLGILAASLTLILIGRRQQRRRQRELLARDKVGLDLGAPPSGTTSYSQDPPSPSPEDERLPLALAKRGSGFGGFSPPFLLDPCPSPAHIRLTGAPLATCDETSI

SEQ ID NO: 23265 - protein, 719 aa, Homo sapiens
MGKKPSDAKTFWMELEDDGKVDFIFEQVQNVLQSLKQKIKDGSATNKEYIQAMILVNEATIINSSTSIKGASQKEVNAQSSDPMPVTQKEQENKSNAFPSTSCENSFPEDCTFLTTENKEILSLEDKVVDFREKDSSSNLSYQSHDCSGACLMKMPLNLKGENPLQLPIKCHFQRRHAKTNSHSSALHVSYKTPCGRSLRNVEEVFRYLLETECNFLFTDNFSFNTYVQLARNYPKQKEVVSDVDISNGVESVPISFCNEIDSRKLPQFKYRKTVWPRAYNLTNFSSMFTDSCDCSEGCIDITKCACLQLTARNAKTSPLSSDKITTGYKYKRLQRQIPTGIYECSLLCKCNRQLCQNRVVQHGPQVRLQVFKTEQKGWGVRCLDDIDRGTFVCIYSGRLLSRANTEKSYGIDENGRDENTMKNIFSKKRKLEVACSDCEVEVLPLGLETHPRTAKTEKCPPKFSNNPKELTVETKYDNISRIQYHSVIRDPESKTAIFQHNGKKMEFVSSESVTPEDNDGFKPPREHLNSKTKGAQKDSSSNHVDEFEDNLLIESDVIDITKYREETPPRSRCNQATTLDNQNIKKAIEVQIQKPQEGRSTACQRQQVFCDEELLSETKNTSSDSLTKFNKGNVFLLDATKEGNVGRFLNHSCCPNLLVQNVFVETHNRNFPLVAFFTNRYVKARTELTWDYGYEAGTVPEKEIFCQCGVNKCRKKIL

SEQ ID NO: 23266 - protein, 706 aa, Homo sapiens
MAVPAALIPPTQLVPPQPPISTSASSSGTTTSTSSATSSPAPSIGPPASSGPTLFRPEPIASAAAAAATVTSTGGGGGGGGSGGGGGSSGNGGGGGGGGGGSNCNPNLAAASNGSGGGGGGISAGGGVASSTPINASTGSSSSSSSSSSSSSSSSSSSSSSSSCGPLPGKPVYSTPSPVENTPQNNECKMVDLRGAKVASFTVEGCELICLPQAFDLFLKHLVGGLHTVYTKLKRLEITPVVCNVEQVRILRGLGAIQPGVNRCKLISRKDFETLYNDCTNASSRPGRPPKRTQSVTSPENSHIMPHSVPGLMSPGIIPPTGLTAAAAAAAAATNAAIAEAMKVKKIKLEAMSNYHASNNQHGADSENGDMNSSVGLELPFMMMPHPLIPVSLPPASVTMAMSQMNHLSTIANMAAAAQVQSPPSRVETSVIKERVPDSPSPAPSLEEGRRPGSHPSSHRSSSVSSSPARTESSSDRIPVHQNGLSMNQMLMGLSPNVLPGPKEGDLAGHDMGHESKRMHIEKDETPLSTPTARDSLDKLSLTGHGQPLPPGFPSPFLFPDGLSSIETLLTNIQGLLKVAIDNARAQEKQVQLEKTELKMDFLRERELRETLEKQLAMEQKNRAIVQKRLKKEKKAKRKLQEALEFETKRREQAEQTLKQAASTDSLRVLNDSLTPEIEADRSGGRTDAERTIQDGRLYLKTTVMY

SEQ ID NO: 23267 - protein, 472 aa, Homo sapiens
MTSENQEKVKALLRDLQEQDADAGSERGLSGEEEDDEPDCCNDERYWPAGQEPSLVPDLDPLEYAGLASVEPYVPEFTVSPFAVQKLSRYGFNTERCQAVLRMCDGDVGASLEHLLTQCFSETFGERMKISEAVNQISLDECMEQRQEEAFALKSICGEKFIERIQNRVWTIGLELEYLTSRFRKSKPKESTKNVQENSLEICKFYLKGNCKFGSKCRFKHEVPPNQIVGRIERSVDDSHLNAIEDASFLYELEIRFSKDHKYPYQAPLVAFYSTNENLPLACRLHISEFLYDKALTFAETSEPVVYSLITLLEEESEIVKLLTNTHHKYSDPPVNFLPVPSRTRINNPACHKTVIPNNSFVSNQIPEVEKASESEESDEDDGPAPVIVENESYVNLKKKISKRYDWQAKSVHAENGKICKQFRMKQASRQFQSILQERQSLPAWEERETILNLLRKHQVVVISGMTGTYLF

SEQ ID NO: 23268 - protein, 571 aa, Homo sapiens
MNPLFGPNLFLLQQEQQGLAGPLGDSLGGDHFAGGGDLPPAPLSPAGPAAYSPPGPGPAPPAAMALRNDLGSNINVLKTLNLRFRCFLAKVHELERRNRLLEKQLQQALEEGKQGRRGLGRRDQAVQTGFVSPIRPLGLQLGARPAAVCSPSARVLGSPARSPAGPLAPSAASLSSSSTSTSTTYSSSARFMPGTIWSFSHARRLGPGLEPTLVQGPGLSWVHPDGVGVQIDTITPEIRALYNVLAKVKRERDEYKRRWEEEYTVRIQLQDRVNELQEEAQEADACQEELALKVEQLKAELVVFKGLMSNNLSELDTKIQEKAMKVDMDICRRIDITAKLCDVAQQRNCEDMIQMFQKKLSLHLSPIKVPSMGGRKRERKAAVEEDTSLSESEGPRQPDGDEEESTALSINEEMQRMLNQLREYDFEDDCDSLTWEETEETLLLWEDFSGYAMAAAEAQGEQQEDSLEKVIKDTESLFKTREKEYQETIDQIELELATAKNDMNRHLHEYMEMCSMKRGLDVQMETCRRLITQSGDRKSPAFTAVPLSDPPPPPSEAEDSDRDVSSDSSMR

SEQ ID NO: 23269 - protein, 289 aa, Homo sapiens
MHLSSHRLDEYWDRQRNRHRMVKVDPETRYMSLAVCELDQPGLGPLVAAACSDGAVRLFLLQDSGRILQLLAETFHHKRCVLKVHSFTHEAPNQRRRLLLCSAATDGSLAFWDLTTMLDHDSTVLEPPVDPGLPYRLGTPSLTLQAHSCGINSLHTLPTREGHHLVASGSEDGSLHVFVLAVEMLQLEEAVGEAGLVPQLRVLEEYSVPCAHAAHVTGLKILSPSIMVSASIDQRLTFWRLGHGEPTFMNSTVFHVPDVADMDCWPVSPEFGHRCALGGQGLEVYNWYD

SEQ ID NO: 23270 - protein, 1114 aa, Homo sapiens
MACPWKFLFKTKFHQYAMNGEKDINNNVEKAPCATSSPVTQDDLQYHNLSKQQNESPQPLVETGKKSPESLVKLDATPLSSPRHVRIKNWGSGMTFQDTLHHKAKGILTCRSKSCLGSIMTPKSLTRGPRDKPTPPDELLPQAIEFVNQYYGSFKEAKIEEHLARVEAVTKEIETTGTYQLTGDELIFATKQAWRNAPRCIGRIQWSNLQVFDARSCSTAREMFEHICRHVRYSTNNGNIRSAITVFPQRSDGKHDFRVWNAQLCIDLGWKPNGRDPELFEIPPDLVLEVAMEHPKYEWFRELELKWYALPAVANMLLEVGGLEFPGCPFNGWYMGTEIGVRDFCDVQRYNILEEVGRRMGLETHKLASLWKDQAVVEINIAVLHSFQKQNVTIMDHHSAAESFMKYMQNEYRSRGGCPADWIWLVPPMSGSITPVFHQEMLNYVLSPFYYYQVEAWKTHVWQDEKRRPKRREIPLKVLVKAVLFACMLMRKTMASRVRVTILFATETGKSEALAWDLGALFSCAFNPKVVCMDKYRLSCLEEERLLLVVTSTFGNGDCPGNGEKLKKSLFMLKELNNKFRYAVFGLGSSMYPRFCAFAHDIDQKLSHLGASQLTPMGEGDELSGQEDAFRSWAVQTFKAACETFDVRGKQHIQIPKLYTSNVTWDPHHYRLVQDSQPLDLSKALSSMHAKNVFTMRLKSRQNLQSPTSSRATILVELSCEDGQGLNYLPGEHLGVCPGNQPALVQGILERVVDGPTPHQTVRLEALDESGSYWVSDKRLPPCSLSQALTYFLDITTPPTQLLLQKLAQVATEEPERQRLEALCQPSEYSKWKFTNSPTFLEVLEEFPSLRVSAGFLLSQLPILKPRFYSISSSRDHTPTEIHLTVAVVTYHTRDGQGPLHHGVCSTWLNSLKPQDPVPCFVRNASGFHLPEDPSHPCILIGPGTGIAPFRSFWQQRLHDSQHKGVRGGRMTLVFGCRRPDEDHIYQEEMLEMAQKGVLHAVHTAYSRLPGKPKVYVQDILRQQLASEVLRVLHKEPGHLYVCGDVRMARDVAHTLKQLVAAKLKLNEEQVEDYFFQLKSQKRYHEDIFGAVFPYEAKKDRVAVQPSSLEMSAL

SEQ ID NO: 23271 - protein, 1857 aa, Homo sapiens; identical to SEQ ID NO: 20315

SEQ ID NO: 23272 - protein, 1208 aa, Homo sapiens
MERLRDVRERLQAWERAFRRQRGRRPSQDDVEAAPEETRALYREYRTLKRTTGQAGGGLRSSESLPAAAEEAPEPRCWGPHLNRAATKSPQSTPGRSRQGSVPDYGQRLKANLKGTLQAGPALGRRPWPLGRASSKASTPKPPGTGPVPSFAEKVSDEPPQLPEPQPRPGRLQHLQASLSQRLGSLDPGWLQRCHSEVPDFLGAPKACRPDLGSEESQLLIPGESAVLGPGAGSQGPEASAFQEVSIRVGSPQPSSSGGEKRRWNEEPWESPAQVQQESSQAGPPSEGAGAVAVEEDPPGEPVQAQPPQPCSSPSNPRYHGLSPSSQARAGKAEGTAPLHIFPRLARHDRGNYVRLNMKQKHYVRGRALRSRLLRKQAWKQKWRKKGECFGGGGATVTTKESCFLNEQFDHWAAQCPRPASEEDTDAVGPEPLVPSPQPVPEVPSLDPTVLPLYSLGPSGQLAETPAEVFQALEQLGHQAFRPGQERAVMRILSGISTLLVLPTGAGKSLCYQLPALLYSRRSPCLTLVVSPLLSLMDDQVSGLPPCLKAACIHSGMTRKQRESVLQKIRAAQVHVLMLTPEALVGAGGLPPAAQLPPVAFACIDEAHCLSQWSHNFRPCYLRVCKVLRERMGVHCFLGLTATATRRTASDVAQHLAVAEEPDLHGPAPVPTNLHLSVSMDRDTDQALLTLLQGKRFQNLDSIIIYCNRREDTERIAALLRTCLHAAWVPGSGGRAPKTTAEAYHAGMCSRERRRVQRAFMQGQLRVVVATVAFGMGLDRPDVRAVLHLGLPPSFESYVQAVGRAGRDGQPAHCHLFLQPQGEDLRELRRHVHADSTDFLAVKRLVQRVFPACTCTCTRPPSEQEGAVGGERPVPKYPPQEAEQLSHQAAPGPRRVCMGHERALPIQLTVQALDMPEEAIETLLCYLELHPHHWLELLATTYTHCRLNCPGGPAQLQALAHRCPPLAVCLAQQLPEDPGQGSSSVEFDMVKLVDSMGWELASVRRALCQLQWDHEPRTGVRRGTGVLVEFSELAFHLRSPGDLTAEEKDQICDFLYGRVQARERQALARLRRTFQAFHSVAFPSCGPCLEQQDEERSTRLKDLLGRYFEEEEGQEPGGMEDAQGPEPGQARLQDWEDQVRCDIRQFLSLRPEEKFSSRAVARIFHGIGSPCYPAQVYGQDRRFWRKYLHLSFHALVGLATEELLQVAR

SEQ ID NO: 23273 - protein, 105 aa, Homo sapiens
MRSEKEGAGGLRAAVAARGPSGREKLSALEVQFHRDSQQQEAETPPTSSSGCGGGAGKPREEKRTALSKVVIRRLPPGLTKEQLEEQLRPLPAHDYFEFFAADLR

SEQ ID NO: 23274 - protein, 1888 aa, Homo sapiens
MFRQFYLWTCLASGIILGSLFEICLGQYDDDCKLARGGPPATIVAIDEESRNGTILVDNMLIKGTAGGPDPTIELSLKDNVDYWVLMDPVKQMLFLNSTGRVLDRDPPMNIHSIVVQVQCINKKVGTIIYHEVRIVVRDRNDNSPTFKHESYYATVNELTPVGTTIFTGFSGDNGATDIDDGPNGQIEYVIQYNPDDPTSNDTFEIPLMLTGNIVLRKRLNYEDKTRYFVIIQANDRAQNLNERRTTTTTLTVDVLDGDDLGPMFLPCVLVPNTRDCRPLTYQAAIPELRTPEELNPIIVTPPIQAIDQDRNIQPPSDRPGILYSILVGTPEDYPRFFHMHPRTAELSLLEPVNRDFHQKFDLVIKAEQDNGHPLPAFAGLHIEILDENNQSPYFTMPSYQGYILESAPVGATISDSLNLTSPLRIVALDKDIEDTKDPELHLFLNDYTSVFTVTQTGITRYLTLLQPVDREEQQTYTFSITAFDGVQESEPVIVNIQVMDANDNTPTFPEISYDVYVYTDMRPGDSVIQLTAVDADEGSNGEITYEILVGAQGDFIINKTTGLITIAPGVEMIVGRTYALTVQAADNAPPAERSTGILTLGKALDRESTDRYILIITASDGRPDGTSTATVNIVVTDVNDNAPVFDPYLPRNLSVVEEEANAFVGQVKATDPDAGINGQVHYSLGNFNNLFRITSNGSIYTAVKLNREVRDYYELVVVATDGAVHPRHSTLTLAIKVLDIDDNSPVFTNSTYTVLVEENLPAGTTILQIEAKDVDLGANVSYRIRSPEVKHFFALHPFTGELSLLRSLDYEAFPDQEASITFLVEAFDIYGTMPPGIATVTVIVKDMNDYPPVFSKRIYKGMVAPDAVKGTPITTVYAEDADPPGLPASRVRYRVDDVQFPYPASIFEVEEDSGRVITRVNLNEEPTTIFKLVVVAFDDGEPVMSSSATVKILVLHPGEIPRFTQEEYRPPPVSELATKGTMVGVISAAAINQSIVYSIVSGNEEDTFGINNITGVIYVNGPLDYETRTSYVLRVQADSLEVVLANLRVPSKSNTAKVYIEIQDENNHPPVFQKKFYIGGVSEDARMFTSVLRVKATDKDTGNYSVMAYRLIIPPIKEGKEGFVVETYTGLIKTAMLFHNMRRSYFKFQVIATDDYGKGLSGKADVLVSVVNQLDMQVIVSNVPPTLVEKKIEDLTEILDRYVQEQIPGAKVVVESIGARRHGDAFSLEDYTKCDLTVYAIDPQTNRAIDRNELFKFLDGKLLDINKDFQPYYGEGGRILEIRTPEAVTSIKKRGESLGYTEGALLALAFIIILCCIPAILVVLVSYRQVFKGRQAECTKTARIQAALPAAKPAVPAPAPVAAPPPPPPPPPGAHLYEELGDSSILSSLFLLYHFQQSRGNNSVSEDRKHQQVVMPFSSNTIEAHKSAHVDGSLKSNKLKSARKFTFLSDEDDLSAHNPLYKENISQVSTNSDISQRTDFVDPFSPKIQAKSKSLRGPREKIQRLWSQSVSLPRRLMRKVPNRPEIIDLQQWQGTRQKAENENTGICTNKRGSSNPLLTTEEANLTEKEEIRQGETLMIEGTEQLKSLSSDSSFCFPRPHFSFSTLPTVSRTVELKSEPNVISSPAECSLELSPSRPCVLHSSLSRRETPICMLPIETERNIFENFAHPPNISPSACPLPPPPPISPPSPPPAPAPLAPPPDISPFSLFCPPPSPPSIPLPLPPPTFFPLSVSTSGPPTPPLLPPFPTPLPPPPPSIPCPPPPSASFLSTECVCITGVKCTTNLMPAEKIKSSMTQLSTTTVCKTDPQREPKGILRHVKNLAELEKSVANMYSQIEKNYLRTNVSELQTMCPSEVTNMEITSEQNKGSLNNIVEGTEKQSHSQSTSL

SEQ ID NO: 23275 - protein, 779 aa, Homo sapiens
MPGSATALRHERLKKTNARPIPLGLFTINEEDEQQKNGNSRRPKAPDSYKVQDKKNASSRPASAISGQNNNHSGNKPDPPPVLRVDDRQRLARERREEREKQLAAREIVWLEREERARQHYEKHLEERKKRLEEQRQKEERRRAAVEEKRRQRLEEDKERHEAVVRRTMERSQKPKQKHNRWSWGGSLHGSPSIHSADPDRRSVSTMNLSKYVDPVISKRLSSSSATLLNSPDRARRLQLSPWESSVVNRLLTPTHSFLARSKSTAALSGEAVIPICPRSASCSPIIMPYKAAHSRNSMDRPKLFVTPPEGSSRRRIIHGTASYKKERERENVLFLTSGTRRAVSPSNPKARQPARSRLWLPSKSLPHLPGTPRPTSSLPPGSVKAAPAQVRPPSPGNIRPVKREVKVEPEKKDPEKEPQKVANEPSLKGRAPLVKVEEATVEERTPAEPEVGPAAPAMAPAPASAPAPASAPAPAPVPTPAMVSAPSSTVNASASVKTSAGTTDPEEATRLLAEKRRLAREQREKEERERREQEELERQKREELAQRVAEERTTRREEESRRLEAEQAREKEEQLQRQAEERALREREEAERAQRQKEEEARVREEAERVRQEREKHFQREEQERLERKKRLEEIMKRTRRTEATDKKTSDQRNGDIAKGALTGGTEVSALPCTTNAPGNGKPVGSPHVVTSHQSKVTVESTPDLEKQPNENGVSVQNENFEEIINLPIGSKPSRLDVTNSESPEIPLNPILAFDDEGTLGPLPQVDGVQTQQTAEVI

SEQ ID NO: 23276 - protein, 712 aa, Homo sapiens
MAELGAGGDGHRGGDGAVRSETAPDSYKVQDKKNASSRPASAISGQNNNHSGNKPDPPPVLRVDDRQRLARERREEREKQLAAREIVWLEREERARQHYEKHLEERKKRLEEQRQKEERRRAAVEEKRRQRLEEDKERHEAVVRRTMERSQKPKQKHNRWSWGGSLHGSPSIHSAARRLQLSPWESSVVNRLLTPTHSFLARSKSTAALSGEAASCSPIIMPYKAAHSRNSMDRPKLFVTPPEGSSRRRIIHGTASYKKERERENVLFLTSGTRRAVSPSNPKARQPARSRLWLPSKSLPHLPGTPRPTSSLPPGSVKAAPAQVRPPSPGNIRPVKREVKVEPEKKDPEKEPQKVANEPSLKGRAPLVKVEEATVEERTPAEPEVGPAAPAMAPAPASAPAPASAPAPAPVPTPAMVSAPSSTVNASASVKTSAGTTDPEEATRLLAEKRRLAREQREKEERERREQEELERQKREELAQRVAEERTTRREEESRRLEAEQAREKEEQLQRQAEERALREREEAERAQRQKEEEARVREEAERVRQEREKHFQREEQERLERKKRLEEIMKRTRRTEATDKKTSDQRNGDIAKGALTGGTEVSALPCTTNAPGNGKPVGSPHVVTSHQSKVTVESTPDLEKQPNENGVSVQNENFEEIINLPIGSKPSRLDVTNSESPEIPLNPILAFDDEGTLGPLPQVDGVQTQQTAEVI

SEQ ID NO: 23277 - protein, 291 aa, Homo sapiens
MVHVVSQAGGPEGKDYCILYNPQWAHLPHDLSKASFLQLRNWTASLLCSAADLPARGFSNQIPLVARGNCTFYEKVRLAQGSGARGLLIVSRERLVPPGGNKTQYDEIGIPVALLSYKDMLDIFTRFGRTVRAALYAPKEPVLDYNMVIIFIMAVGTVAIGGYWAGSRDVKKRYMKHKRDDGPEKQEDEAVDVTPVMTCVFVVMCCSMLVLLYYFYDLLVYVVIGIFCLASATGLYSCLAPCVRRLPFGKCRIPNNSLPYFHKRPQARMLLLALFCVAVSVVWGVFRNEDQ

SEQ ID NO: 23278 - protein, 1346 aa, Homo sapiens
MDNKRDKAKAGAAARTPAARAPGLLTPRPPGSPRPPPPVTPAALRVLGAAGAVGRKPLAERAGGIGGATIPESAPRAGPTRSAGTSSRNPASRPPASGRGERAPPAKNTSPGPVSSPGRASGTTRPGPLGQKGLRISAEETVARGKATEAPKRSALSAGARRDTSGPTPGTPSPAMARRSRAAGTEVGLPRPAPSARPRPPTEGPRKSVSSASEHSTTEPSPAARRRPSAGGGLQRPASRSLSSSATPLSSPARSGPSARGTPRAPAHPSQPKPKGLQALRPPQVTPPRKDAAPALGPLSSSPLATPSPSGTKARPVPPPDNAATPLPATLPPSPPVTPPPPAALQSQAPPTLPATPHSSSLTCQLATPLPLAPPSPSAPPSLQTLPSPPATPPSQVPPTQLIMSFPEAGVSSLATAAFVASVSPSVSSPLQSMPPTQANPALPSLPTLLSPLATPPLSAMSPLQGPVSPATSLGNSAFPLAALPQPGLSALTTPPPQASPSPSPPSLQATPHTLATLPLQDSPLLATLPLQASPSPLTTVSLQDPPLVSPSLLASPPLQAPPHPQAPPSMTTPPMQAPPSLQTIPPIQVPHSLTSPSLQAPPSPLALSSLQATTSLGSPTLQATHSFLTMSPRQTQASLISPSRPASTPPDSPPLQAPLSLPASPPLQTSLSPAVSPLSSPLTIHPLQALSSLASHSPQAPLSSLIMPPLETQSSLAPPSLQTPPASLTTPPLENLPSLAPPPLQTASAPLTTPPLENLPSLAPPPLQTASAPLTTPHLETPPCPAPCPLQAPPSPLTTPPPETPSSIATPPPQAPPALASPPLQGLPSPPLSPLATPPPQAPPALALPPLQAPPSPPASPPLSPLATPSPQAPNALAVHLLQAPFSPPPSPPVQAPFSPPASPPVSPSATPPSQAPPSLAAPPLQVPPSPPASPPMSPSATPPPQAPPPLAAPPLQVPPSPPASPPMSPSATPPPRVPPLLAAPPLQVPPSPPASLPMSPLAKPPPQAPPALATPPLQALPSPPASFPGQAPFSPSASLPMSPLATPPPQAPPVLAAPLLQVPPSPPASPTLQAPRRPPTPGPDTSVSGPRLTLALAPGPPPPPSRSPSSTLSGPDLAGHSSSATSTPEELRGYDSGPEGGAAASPPPDAELAACHPAAWSRGPAPPLAFRGAPGAPLPWPPATGPGSADGLCTIYETEGPESATPAPGALDPGPSPGTSGGKAAAGAGAGASSRSPKQARLGELPLGALQASVVQHLLSRTLLLAAAEGAAGGSGGGPGGAEGGGVTGGARAALSDAELGRWAELLSPLDESRASITSVTSFSPDDVASPQGDWTVVEVETFH

SEQ ID NO: 23279 - protein, 356 aa, Homo sapiens
MKKFRVSLVSKVGKQKYVDLNMLSDSENSQHLELHEPPKAVDKAKSPGVDPKQLAAELQKVSLQQSPLVLSSVVEKGSHVHSGPTSAGSSSVPSPGQPGSPSVSKKKHGSSKPTDGTKVVSHPITGEIQLQINYDLGNLIIHILQARNLVPRDNNGYSDPFVKVYLLPGRGAEYKRRTKHVQKSLNPEWNQTVIYKSISMEQLKKKTLEVTVWDYDRFSSNDFLGEVLIDLSSTSHLDNTPRWYPLKEQTESIDHGKSHSSQSSQQSPKPSVIKSRSHGIFPDPSKDMQVPTIEKSHSSPGSSKSSSEGHLRSHGPSRSQSKTSVTQTHLEDAGAAIAAAEAAVQQLRIQPSKRRK

SEQ ID NO: 23280 - protein, 844 aa, Homo sapiens
MAPRRLLLVGEGNFSFAAALSETLDQSTQLTATCLQRPAELARDPLAWENLQCLRERGIDVRFGVDCTQLADVFELHEREFDQIYFIFPHCGRKAGVAKNRELLAKFFQSCADVLAEEGEVHVALCRGQGGTPADKPQREWHNSWQVVAMAALGGLILSDVYPFSCKAVAGYKCTGYRSQDKSFHVEGALNHIFTRSLPFEGSQPRIFRIKLGNQWFSFPEPEALVGKLNRLAMASRGARQRLKGSGASSGDTAPAADKLRELLGSREAGGAEHRTELSGNKAGQVWAPEGSTAFKCLLSARLCAALLSNISDCDETFNYWEPTHYLIYGEGFQTWEYSPAYAIRSYAYLLLHAWPAAFHARILQTNKILVFYFLRCLLAFVSCICELYFYKAVCKKFGLHVSRMMLAFLVLSTGMFCSSSAFLPSSFCMYTTLIAMTGWYMDKTSIAVLGVAAGAILGWPFSAALGLPIAFDLLVMKHRWKSFFHWSLMALILFLVPVVVIDSYYYGKLVIAPLNIVLYNVFTPHGPDLYGTEPWYFYLINGFLNFNVAFALALLVLPLTSLMEYLLQRFHVQNLGHPYWLTLAPMYIWFIIFFIQPHKEERFLFPVYPLICLCGAVALSALQKCYHFVFQRYRLEHYTVTSNWLALGTVFLFGLLSFSRSVALFRGYHGPLDLYPEFYRIATDPTIHTVPEGRPVNVCVGKEWYRFPSSFLLPDNWQLQFIPSEFRGQLPKPFAEGPLATRIVPTDMNDQNLEEPSRYIDISKCHYLVDLDTMRETPREPKYSSNKEEWISLAYRPFLDASRSSKLLRAFYVPFLSDQYTVYVNYTILKPRKAKQIRKKSGG

SEQ ID NO: 23281 - protein, 688 aa, Homo sapiens
MATANSIIVLDDDDEDEAAAQPGPSHPLPNAASPGAEAPSSSEPHGARGSSSSGGKKCYKLENEKLFEEFLELCKMQTADHPEVVPFLYNRQQRAHSLFLASAEFCNILSRVLSRARSRPAKLYVYINELCTVLKAHSAKKKLNLAPAATTSNEPSGNNPPTHLSLDPTNAENTASQSPRTRGSRRQIQRLEQLLALYVAEIRRLQEKELDLSELDDPDSAYLQEARLKRKLIRLFGRLCELKDCSSLTGRVIEQRIPYRGTRYPEVNRRIERLINKPGPDTFPDYGDVLRAVEKAAARHSLGLPRQQLQLMAQDAFRDVGIRLQERRHLDLIYNFGCHLTDDYRPGVDPALSDPVLARRLRENRSLAMSRLDEVISKYAMLQDKSEEGERKKRRARLQGTSSHSADTPEASLDSGEGPSGMASQGCPSASRAETDDEDDEESDEEEEEEEEEEEEEATDSEEEEDLEQMQEGQEDDEEEDEEEEAAAGKDGDKSPMSSLQISNEKNLEPGKQISRSSGEQQNKGRIVSPSLLSEEPLAPSSIDAESNGEQPEELTLEEESPVSQLFELEIEALPLDTPSSVETDISSSRKQSEEPFTTVLENGAGMVSSTSFNGGVSPHNWGDSGPPCKKSRKEKKQTGSGPLGNSYVERQSPAVPNPPFTASSAWYLQDKCGHTMRSRRDHRALRL

SEQ ID NO: 23282 - protein, 972 aa, Homo sapiens
PVIVEIPHFGSMRGKERELIVLRSENGETWKEHQFDSKNEDLTELLNGMDEELDSPEELGKKRICRIITKDFPQYFAVVSRIKQESNQIGPEGGILSSTTVPLVQASFPEGALTKRIRVGLQAQPVPDEIVKKILGNKATFSPIVTVEPRRRKFHKPITMTIPVPPPSGEGVSNGYKGDTTPNLRLLCSITGGTSPAQWEDITGTTPLTFIKDCVSFTTNVSARFWLADCHQVLETVGLATQLYRELICVPYMAKFVVFAKMNDPVESSLRCFCMTDDKVDKTLEQQENFEEVARSKDIEVLEGKPIYVDCYGNLAPLTKGGQQLVFNFYSFKENRLPFSIKIRDTSQEPCGRLSFLKEPKTTKGLPQTAVCNLNITLPAHKKETESDQDDEIEKTDRRQSFASLALRPQSPCERTDIRMAIVADHLGLSWTELARELNFSVDEINQIRVENPNSLISQSFMLLKKWVTRDGKNATTDALTSVLTKINRIDIVTLLEGPIFDYGNISGTRSFADENNVFHDPVDGYPSLQVELETPTGLHYTPPTPFQQDDYFSDISSIESPLRTPSRLSDGLVPSQGNIEHSADGPPVVTAEDASLEDSKLEDSVPLTEMPEAVDVDESQLENVCLSEYPQYLGNLAGSPKDVKPAEPRKLGVSSEQQEKGKSGPDEEMMEEKLKSLFEDIQLEEGVESEEMTEEKVQAILKRVQQAELEMSSITGWQNETSSGNLESCAQARRVTGGLLDRLDDSPDQCRDSITSYLKGEAGKFEANGSHTEITPEAKTKSYFPESQNDVGKQSTKETLKPKIHGSGHVEEPASPLAAYQKSLEETSKLIIEETKPCVPVSMKKMSRTSPADGKPRLSLHEEEGSSGSEQKDLKDSESDSSSEEERRVTTRVIRRRLIIKGEEAKNIPGESVTEEQFTDEEGNLITRKITRKVLRRIVIPQERKRDDVQGEGFKVKTKKEIRHVEKKSHS

SEQ ID NO: 23283 - protein, 642 aa, Homo sapiens
MEVQLGLGRVYPRPPSKTYRGAFQNLFQSVREVIQNPGPRHPEAASAAPPGASLLLLQQQQQQQQQQQQQQQQQQQQQQQETSPRQQQQQQGEDGSPQAHRRGPTGYLVLDEEQQPSQPQSALECHPERGCVPEPGAAVAASKGLPQQLPAPPDEDDSAAPSTLSLLGPTFPGLSSCSADLKDILSEASTMQLLQQQQQEAVSEGSSSGRAREASGAPTSSKDNYLGGTSTISDNAKELCKAVSVSMGLGVEALEHLSPGEQLRGDCMYAPLLGVPPAVRPTPCAPLAECKGSLLDDSAGKSTEDTAEYSPFKGGYTKGLEGESLGCSGSAAAGSSGTLELPSTLSLYKSGALDEAAAYQSRDYYNFPLALAGPPPPPPPPHPHARIKLENPLDYGSAWAAAAAQCRYGDLASLHGAGAAGPGSGSPSAAASSSWHTLFTAEEGQLYGPCGGGGGGGGGGGGGGGGGGGGGGGEAGAVAPYGYTRPPQGLAGQESDFTAPDVWYPGGMVSRVPYPSPTCVKSEMGPWMDSYSGPYGDMRLETARDHVLPIDYYFPPQKTCLICGDEASGCHYGALTCGSCKVFFKRAAEGFFRMNKLKESSDTNPKPYCMAAPMGLTENNRNRKKSYRETNLKAVSWPLNHT

SEQ ID NO: 23284 - protein, 568 aa, Homo sapiens
MASKPAAGKSRGEKRKRVVLTLKEKIDICTRLEKGESRKALMQEYNVGMSTLYDIRAHKAQLLRFFASSDSNKALEQRRTLHTPKLEHLDRVLYEWFLGKRSEGVPVSGPMLIEKAKDFYEQMQLTEPCVFSGGWLWRFKARHGIKKLDASSEKQSADHQAAEQFCAFFRSLAAEHGLSAEQVYNADETGLFWRCLPNPTPEGGAVPGPKQGKDRLTVLMCANATGSHRLKPLAIGKCSGPRAFKGIQHLPVAYKAQGNAWVDKEIFSDWFHHIFVPSVREHFRTIGLPEDSKAVLLLDSSRAHPQEAELVSSNVFTIFLPASVASLVQPMEQGIRRDFMRNFINPPVPLQGPHARYNMNDAIFSVACAWNAVPSHVFRRAWRKLWPSVAFAEGSSSEEELEAECFPVKPHNKSFAHILELVKEGSSCPGQLRQRQAASWGVAGREAEGGRPPAATSPAEVVWSSEKTPKADQDGRGDPGEGEEVAWEQAAVAFDAVLRFAERQPCFSAQEVGQLRALRAVFRSQQQVRRRRGALGAVVKVEALQEGPGGCGATAQSPLPCSSTAGDN

SEQ ID NO: 23285 - protein, 855 aa, Homo sapiens
MEPTVADVHLVPRTTKEVPALDAACCRAASIGVVATSLVVLTLGVLLAFLSTQGFHVDHTAELRGIRWTSSLRRETSDYHRTLTPTLEALLHFLLRPLQTLSLGLEEELLQRGIRARLREHGISLAAYGTIVSAELTGRHKGPLAERDFKSGRCPGNSFSCGNSQCVTKVNPECDDQEDCSDGSDEAHCECGLQPAWRMAGRIVGGMEASPGEFPWQASLRENKEHFCGAAIINARWLVSAAHCFNEFQDPTKWVAYVGATYLSGSEASTVRAQVVQIVKHPLYNADTADFDVAVLELTSPLPFGRHIQPVCLPAATHIFPPSKKCLISGWGYLKEDFLVKPEVLQKATVELLDQALCASLYGHSLTDRMVCAGYLDGKVDSCQGDSGGPLVCEEPSGRFFLAGIVSWGIGCAEARRPGVYARVTRLRDWILEATTKASMPLAPTMAPAPAAPSTAWPTSPESPVVSTPTKSMQALSTVPLDWVTVPKLQECGARPAMEKPTRVVGGFGAASGEVPWQVSLKEGSRHFCGATVVGDRWLLSAAHCFNHTKVEQVRAHLGTASLLGLGGSPVKIGLRRVVLHPLYNPGILDFDLAVLELASPLAFNKYIQPVCLPLAIQKFPVGRKCMISGWGNTQEGNATKPELLQKASVGIIDQKTCSVLYNFSLTDRMICAGFLEGKVDSCQGDSGGPLACEEAPGVFYLAGIVSWGIGCAQVKKPGVYTRITRLKGWILEIMSSQPLPMSPPSTTRMLATTSPRTTAGLTVPGATPSRPTPGAASRVTGQPANSTLSAVSTTARGQTPFPDAPEATTHTQLPDCGLAPGNTVAGPCWWQRGGCCRRRTASTSTGTPSSGRPS

SEQ ID NO: 23286 - protein, 618 aa, Homo sapiens
MASRGARQRLKGSGASSGDTAPAADKLRELLGSREAGGAEHRTELSGNKAGQVWAPEGSTAFKCLLSARLCAALLSNISDCDETFNYWEPTHYLIYGEGFQTWEYSPAYAIRSYAYLLLHAWPAAFHARILQTNKILVFYFLRCLLAFVSCICELYFYKAVCKKFGLHVSRMMLAFLVLSTGMFCSSSAFLPSSFCMYTTLIAMTGWYMDKTSIAVLGVAAGAILGWPFSAALGLPIAFDLLVMKHRWKSFFHWSLMALILFLVPVVVIDSYYYGKLVIAPLNIVLYNVFTPHGPDLYGTEPWYFYLINGFLNFNVAFALALLVLPLTSLMEYLLQRFHVQNLGHPYWLTLAPMYIWFIIFFIQPHKEERFLFPVYPLICLCGAVALSALQHSFLYFQKCYHFVFQRYRLEHYTVTSNWLALGTVFLFGLLSFSRSVALFRGYHGPLDLYPEFYRIATDPTIHTVPEGRPVNVCVGKEWYRFPSSFLLPDNWQLQFIPSEFRGQLPKPFAEGPLATRIVPTDMNDQNLEEPSRYIDISKCHYLVDLDTMRETPREPKYSSNKEEWISLAYRPFLDASRSSKLLRAFYVPFLSDQYTVYVNYTILKPRKAKQIRKKSGG

SEQ ID NO: 23287 - protein, 547 aa, Homo sapiens
MFYYPNVLQRHTGCFATIWLAATRGSRLVKREYLRVNVVKTCEEILNYVLVRVQPPQPGLPRPRFSLYLSAQLQIGVIRVYSQQCQYLVEDIQHILERLHRAQLQIRIDMETELPSLLLPNHLAMMETLEDAPDPFFGMMSVDPRLPSPFDIPQIRHLLEAAIPERVEEIPPEVPTEPREPERIPVTVLPPEAITILEAEPIRMLEIEGERELPEVSRRELDLLIAEEEEAILLEIPRLPPPAPAEVEGIGEALGPEELRLTGWEPGALLMEVTPPEELRLPAPPSPERRPPVPPPPRRRRRRRLLFWDKETQISPEKFQEQLQTRAHCWECPMVQPPERTIRGPAELFRTPTLSGWLPPELLGLWTHCAQPPPKALRRELPEEAAAEEERRKIEVPSEIEVPREALEPSVPLMVSLEISLEAAEEEKSRISLIPPEERWAWPEVEAPEAPALPVVPELPEVPMEMPLVLPPELELLSLEAVHRAVALELQANREPDFSSLVSPLSPRRMAARVFYLLLVLSAQQILHVKQEKPYGRLLIQPGPRFH

SEQ ID NO: 23288 - protein, 635 aa, Homo sapiens
MTSQSSVISNSCVTMERLSHMMERKAWCSQESALSEEEEDTTRPLETVTFKDVAVDLTQEEWEQMKPAQRNLYRDVMLENYSNLVTVGCQVTKPDVIFKLEQEEEPWVMEEEMFGRHCPEPRRGENCCASEVMAEGLKFKDVVIYFSQKEWECLHSAQKDLYRDVMLENYGNLVLLGLSDTKPNVISLLEQKKEPWMVKRKETKEWCPDWEFGRETKNLSPKENIYEIRSPQQEKARVIREIRCQVERQQGHQEGHFRPAVIPFTSMQCTAHREYQWLHTGEKSCECRKCKNAFRYQSCPIQHEIIHNKEKEPECGECRKIFNSGSDLIKHQTLHESKKHSENNKCAFNHDSGITQPQSINTGEKPHKCKECGKAFRSSSQISQHQRMHLGEKPYKCRECGKAFPSTAQLNLHQRIHTDEKYYESKACGKAFTRPSHLFRHQRIHTGEKPHKCKECGKAFRYDTQLSLHQIIHTGERRYECRECGKVYSCASQLSLHQRIHTGEKPHECKECGKAFISDSHLIRHQSVHTGEKPCKCKECGKSFRRGSELTRHQRAHTGEKPYECKECEKAFTCSTELVRHQKVHTGERPHKCKECGKAFIRRSELTHHERSHTGEKPYECKECGKPFGGGSELS

SEQ ID NO: 23289 - protein, 571 aa, Homo sapiens
MAARWSSENVVVEFRDSQATAMSVDCLGQHAVLSGRRFLYIVNLDAPFEGHRKISRQSKWDIGAVQWNPHDSFAHYFAASSNQRVDLYKWKDGSGEVGTTLQGHTRVISDLDWAVFEPDLLVTSSVDTYIYIWDIKDTRKPTVALSAVAGASQVKWNKKNANCLATSHDGDVRIWDKRKPSTAVEYLAAHLSKIHGLDWHPDSEHILATSSQDNSVKFWDYRQPRKYLNILPCQVPVWKARYTPFSNGLVTVMVPQLRRENSLLLWNVFDLNTPVHTFVGHDDVVLEFQWRKQKEGSKDYQLVTWSRDQTLRMWRVDSQMQRLCANDILDGVDEFIESISLLPEPEKTLHTEDTDHQHTASHGEEEALKEDPPRNLLEERKSDQLGLPQTLQQEFSLINVQIRNVNVEMDAADRSCTVSVHCSNHRVKMLVKFPAQYPNNAAPSFQFINPTTITSTMKAKLLKILKDTALQKVKRGQSCLEPCLRQLVSCLESFVNQEDSASSNPFALPNSVTPPLPTFARVTTAYGSYQDANIPFPRTSGARFCGAGYLVYFTRPMTMHRAVSPTEPTPR

SEQ ID NO: 23290 - protein, 1525 aa, Homo sapiens
MLLPSGSLFFLRIVHGRKSRPDEGVYVCVARNYLGEAVSHNASLEVAILRDDFRQNPSDVMVAVGEPAVMECQPPRGHPEPTISWKKDGSPLDDKDERITIRGGKLMITYTRKSDAGKYVCVGTNMVGERESEVAELTVLERPSFVKRPSNLAVTVDDSAEFKCEARGDPVPTVRWRKDDGELPKSRYEIRDDHTLKIRKVTAGDMGSYTCVAENMVGKAEASATLTVQVGSEPPHFVVKPRDQVVALGRTVTFQCEATGNPQPAIFWRREGSQNLLFSYQPPQSSSRFSVSQTGDLTITNVQRSDVGYYICQTLNVAGSIITKAYLEVTDVIADRPPPVIRQGPVNQTVAVDGTFVLSCVATGSPVPTILWRKDGVLVSTQDSRIKQLENGVLQIRYAKLGDTGRYTCIASTPSGEATWSAYIEVQEFGVPVQPPRPTDPNLIPSAPSKPEVTDVSRNTVTLSWQPNLNSGATPTSYIIEAFSHASGSSWQTVAENVKTETSAIKGLKPNAIYLFLVRAANAYGISDPSQISDPVKTQDVLPTSQGVDHKQVQRELGNAVLHLHNPTVLSSSSIEVHWTVDQQSQYIQGYKILYRPSGANHGESDWLVFEVRTPAKNSVVIPDLRKGVNYEIKARPFFNEFQGADSEIKFAKTLEEGNAPPQGVTVSKNDGNGTAILVSWQPPPEDTQNGMVQEYKVWCLGNETRYHINKTVDGSTFSVVIPFLVPGIRYSVEVAASTGAGSGVKSEPQFIQLDAHGNPVSPEDQVSLAQQISDVVKQPAFIAGIGAACWIILMVFSIWLYRHRKKRNGLTSTYAGIRKVTYQRGGEAVSSGGRPGLLNISEPAAQPWLADTWPNTGNNHNDCSISCCTAGNGNSDSNLTTYSRPADCIANYNNQLDNKQTNLMLPESTVYGDVDLSNKINEMKTFNSPNLKDGRFVNPSGQPTPYATTQLIQSNLSNNMNNGSGDSGEKHWKPLGQQKQEVAPVQYNIVEQNKLNKDYRANDTVPPTIPYNQSYDQNTGGSYNSSDRGSSTSGNQGHKKGARTPKVPKQGGMNWADLLPPPPAHPPPHSNSEEYNISVDESYDQEMPCPVPPARMYLQQDELEEEEDERGPTPPVRGAASSPAAVSYSHQSTATLTPSPQEELQPMLQDCPEETGHMQHQPDRRRQPVSPPPPPRPISPPHTYGYISGPLVSDMDTDAPEEEEDEADMEVAKMQTRRLLLRGLEQTPASSVGDLESSVTGSMINGWGSASEEDNISSGRSSVSSSDGSFFTDADFAQAVAAAAEYAGLKVARRQMQDAAGRRHFHASQCPRPTSPVSTDSNMSAAVMQKTRPAKKLKHQPGHLRRETYTDDLPPPPVPPPAIKSPTAQSKTQLEVRPVVVPKLPSMDARTDRSSDRKGSSYKGREVLDGRQVVDMRTNPGDPREAQEQQNDGKGRGNKAAKRDLPPAKTHLIQEDILPYCRPTFPTSNNPRDPSSSSSMSSRGSGSRQREQANVGRRNIAEMQVLGGYERGEDNNEELEETES

SEQ ID NO: 23291 - protein, 1265 aa, Homo sapiens
MSTTVNVDSLAEYEKSQIKRALELGTVMTVFSFRKSTPERRTVQVIMETRQVAWSKTADKIEGFLDIMEIKEIRPGKNSKDFERAKAVRQKEDCCFTILYGTQFVLSTLSLAADSKEDAVNWLSGLKILHQEAMNASTPTIIESWLRKQIYSVDQTRRNSISLRELKTILPLINFKVSSAKFLKDKFVEIGAHKDELSFEQFHLFYKKLMFEQQKSILDEFKKDSSVFILGNTDRPDASAVYLHDFQRFLIHEQQEHWAQDLNKVRERMTKFIDDTMRETAEPFLFVDEFLTYLFSRENSIWDEKYDAVDMQDMNNPLSHYWISSSHNTYLTGDQLRSESSPEAYIRCLRMGCRCIELDCWDGPDGKPVIYHGWTRTTKIKFDDVVQAIKDHAFVTSSFPVILSIEEHCSVEQQRHMAKAFKEVFGDLLLTKPTEASADQLPSPSQLREKIIIKHKKLGPRGDVDVNMEDKKDEHKQQGELYMWDSIDQKWTRHYCAIADAKLSFSDDIEQTMEEEVPQDIPPTELHFGEKWFHKKVEKRTSAEKLLQEYCMETGGKDGTFLVRESETFPNDYTLSFWRSGRVQHCRIRSTMEGGTLKYYLTDNLTFSSIYALIQHYRETHLRCAEFELRLTDPVPNPNPHESKPWYYDSLSRGEAEDMLMRIPRDGAFLIRKREGSDSYAITFRARGKVKHCRINRDGRHFVLGTSAYFESLVELVSYYEKHSLYRKMRLRYPVTPELLERYNMERDINSLYDVSRMYVDPSEINPSMPQRTVKALYDYKAKRSDELSFCRGALIHNVSKEPGGWWKGDYGTRIQQYFPSNYVEDISTADFEELEKQIIEDNPLGSLCRGILDLNTYNVVKAPQGKNQKSFVFILEPKQQGDPPVEFATDRVEELFEWFQSIREITWKIDTKENNMKYWEKNQSIAIELSDLVVYCKPTSKTKDNLENPDFREIRSFVETKADSIIRQKPVDLLKYNQKGLTRVYPKGQRVDSSNYDPFRLWLCGSQMVALNFQTADKYMQMNHALFSLNGRTGYVLQPESMRTEKYDPMPPESQRKILMTLTVKVLGARHLPKLGRSIACPFVEVEICGAEYDNNKFKTTVVNDNGLSPIWAPTQEKVTFEIYDPNLAFLRFVVYEEDMFSDPNFLAHATYPIKAVKSGFRSVPLKNGYSEDIELASLLVFCEMRPVLESEEELYSSCRQLRRRQEELNNQLFLYDTHQNLRNANRDALVKEFSVNENQLQLYQEKCNKRLREKRVSNSKFYS

SEQ ID NO: 23292 - protein, 340 aa, Homo sapiens
MNYPSTSPGSLVKHICAICGDRSSGKHYGVYSCEGCKGFFKRTIRKDLIYTCRDNKDCLIDKRQRNRCQYCRYQKCLVMGMKREAVQEERQRSRERAESEAECATSGHEDMPVERILEAELAVEPKTESYGDMNMENSTNDPVTNICHAADKQLFTLVEWAKRIPHFSDLTLEDQVILLRAGWNELLIASFSHRSVSVQDGILLATGLHVHRSSAHSAGVGSIFDRVLTELVSKMKDMQMDKSELGCLRAIVLFNPDAKGLSNPSEVETLREKVYATLEAYTKQKYPEQPGRFAKLLLRLPALRSIGLKCLEHLFFFKLIGDTPIDTFLMEMLETPLQIT

SEQ ID NO: 23293 - protein, 977 aa, Homo sapiens
MAQVAMSTLPVEDEESSESRMVVTFLMSALESMCKELAKSKAEVACIAVYETDVFVVGTERGRAFVNTRKDFQKDFVKYCVEEEEKAAEMHKMKSTTQANRMSVDAVEIETLRKTVEDYFCFCYGKALGKSTVVPVPYEKMLRDQSAVVVQGLPEGVAFKHPENYDLATLKWILENKAGISFIIKRPFLEPKKHVGGRVMVTDADRSILSPGGSCGPIKVKTEPTEDSGISLEMAAVTVKEESEDPDYYQYNIQAGPSETDDVDEKQPLSKPLQGSHHSSEGNEGTEMEVPAEDDDYSPPSKRPKANELPQPPVPEPANAGKRKVREFNFEKWNARITDLRKQVEELFERKYAQAIKAKGPVTIPYPLFQSHVEDLYVEGLPEGIPFRRPSTYGIPRLERILLAKERIRFVIKKHELLNSTREDLQLDKPASGVKEEWYARITKLRKMVDQLFCKKFAEALGSTEAKAVPYQKFEAHPNDLYVEGLPENIPFRSPSWYGIPRLEKIIQVGNRIKFVIKRPELLTHSTTEVTQPRTNTPVKEDWNVRITKLRKQVEEIFNLKFAQALGLTEAVKVPYPVFESNPEFLYVEGLPEGIPFRSPTWFGIPRLERIVRGSNKIKFVVKKPELVISYLPPGMASKINTKALQSPKRPRSPGSNSKVPEIEVTVEGPNNNNPQTSAVRTPTQTNGSNVPFKPRGREFSFEAWNAKITDLKQKVENLFNEKCGEALGLKQAVKVPFALFESFPEDFYVEGLPEGVPFRRPSTFGIPRLEKILRNKAKIKFIIKKPEMFETAIKESTSSKSPPRKINSSPNVNTTASGVEDLNIIQVTIPDDDNERLSKVEKARQLREQVNDLFSRKFGEAIGMGFPVKVPYRKITINPGCVVVDGMPPGVSFKAPSYLEISSMRRILDSAEFIKFTVIRPFPGLVINNQLVDQSESEGPVIQESAEPSQLEVPATEEIKETDGSSQIKQEPDPTW

SEQ ID NO: 23294 - protein, 324 aa, Homo sapiens
MKNVDSDDLVTGTLPKLKSSKEWLEPKPLCFMEVLAKEDTEAAIQSILYKENSVIKELDKYLQHHAFLNARRKEMLYKRWVDCVADPLQKKIIEKVCSHKKIKKRRQGELDGFLKHVNKKGNAFIEHYDPKEYDPFYMSKKDPNFLKVTIPPFHDPLKKAQYDKDNEKRTLLQCETGKIYSIKEFKEVEKVQLHSRFPQISNSRHFITPNEWLKLPTRYIESEFCRRRRLKVKVNFNDCSFDLKPLARAPYLLESQEEEKTVIYKNKGSSFLEREPLCYQEGNNPSAKEAISEGYFSSLSLSQEREEDQDGSPSPRLGLLKLEL

SEQ ID NO: 23295 - protein, 439 aa, Homo sapiens
MHSLNKTWANYSDCLRFLQPDISIGKQEFFERLYVMYTVGYSISFGSLAVAILIIGYFRRLHCTRNYIHMHLFVSFMLRATSIFVKDRVVHAHIGVKELESLIMQDDPQNSIEATSVDKSQYIGCKIAVVMFIYFLATNYYWILVEGLYLHNLIFVAFFSDTKYLWGFILIGWGFPAAFVAAWAVARATLADARCWELSAGDIKWIYQAPILAAIGLNFILFLNTVRVLATKIWETNAVGHDTRKQYRKLAKSTLVLVLVFGVHYIVFVCLPHSFTGLGWEIRMHCELFFNSFQGFFVSIIYCYCNGEVQAEVKKMWSRWNLSVDWKRTPPCGSRRCGSVLTTVTHSTSSQSQVAASTRMVLISGKAAKIASRQPDSHITLPGYVWSNSEQDCLPHSFHEETKEDSGRQGDDILMEKPSRPMESNPDTEGCQGETEDVL

SEQ ID NO: 23296 - protein, 558 aa, Homo sapiens
MAVPAALIPPTQLVPPQPPISTSASSSGTTTSTSSATSSPAPSIGPPASSGPTLFRPEPIASAAAAAATVTSTGGGGGGGGSGGGGGSSGNGGGGGGGGGGSNCNPNLAAASNGSGGGGGGISAGGGVASSTPINASTGSSSSSSSSSSSSSSSSSSSSSSSSCGPLPGKPVYSTPSPVENTPQNNECKMVDLRGAKVASFTVEGCELICLPQAFDLFLKHLVGGLHTVYTKLKRLEITPVVCNVEQVRILRGLGAIQPGVNRCKLISRKDFETLYNDCTNASSRPGRPPKRTQSVTSPENSHIMPHSVPGLMSPGIIPPTGLTAAAAAAAAATNAAIAEAMKVKKIKLEAMSNYHASNNQHGADSENGDMNSSVDETPLSTPTARDSLDKLSLTGHGQPLPPGFPSPFLFPDGLSSIETLLTNIQGLLKVAIDNARAQEKQVQLEKTELKMDFLRERELRETLEKQLAMEQKNRAIVQKRLKKEKKAKRKLQEALEFETKRREQAEQTLKQAASTDSLRVLNDSLTPEIEADRSGGRTDAERTIQDGRLYLKTTVMY

SEQ ID NO: 23297 - protein, 810 aa, Homo sapiens
MFGFQRRGLGTPRLQLWLLLLEFWEVGSGQLHYSVSEEAKHGTFVGRIAQDLGLELAELVQRLFRVASKTHGDLLEVNLQNGILFVNSRIDREELCGQSAECSIHLEVIVDRPLQVFHVNVEVKDINDNPPVFSLREQKLLIAESKQSDSRFPLEGASDADIEENALLTYRLSKNEYFSLDSPTNGKQIKRLSLILKKSLDREKTPELNLLLTATDGGKPELTGTVRLLVQVLDVNDNDPEFDKSEYKVSLMENAAKETLVLKLNATDRDEGVNGEVTYSLMSIKPNGRHLFTLDQNNGEVRVNGTLDYEENKFYKIEVQATDKGTPPMAGHCTVWVEILDTNDNSPEVAVTSLSLPVREDAQPSTVIALISVSDRDSGVNGQVTCSLTPHVPFKLVSTFKNYYSLVLDSALDRENVWAYELVVTARDGGSPSLWATARVSVEVADVNDNAPAFAQPEYTVFVKENNPPGCHIFTVSARDADAQENALVSYSLVERRLGDRALSSYVSVHAESGKVYALQPLDHEELELLQFQVSARDAGVPPLSSNVTLQVFVLDENDNAPALLATQAGSAGGAVNKLVPRSVGAGHVVAKVRAVDADSGYNAWLSYELQPAAGGSRIPFRVGLYTGEISTTRALDEADSPRHRLLVLVKDHGEPALTATATVLVSLVESGQAPKASSRTLAGAASPEAALVDVNVYLIIAICVVSSLLVLTLLLYTALWWSATPTEGACAPGKPTLVCSRAVGSWSYSQQRRQRVCSEEGPPKTDLMAFSPSLPLGLNKEEEGERQEPGSNHPGQVSFLQIPPIRKCM

SEQ ID NO: 23298 - protein, 410 aa, Homo sapiens
METRPTALMSSTVAAAAPAAGAASRKESPGRWGLGEDPTGVSPSLQCRVCGDSSSGKHYGIYACNGCSGFFKRSVRRRLIYRCQVGAGMCPVDKAHRNQCQACRLKKCLQAGMNQDAVQNERQPRSTAQVHLDSMESNTESRPESLVAPPAPAGRSPRGPTPMSAARALGHHFMASLITAETCAKLEPEDADENIDVTSNDPEFPSSPYSSSSPCGLDSIHETSARLLFMAVKWAKNLPVFSSLPFRDQVILLEEAWSELFLLGAIQWSLPLDSCPLLAPPEASAAGGAQGRLTLASMETRVLQETISRFRALAVDPTEFACMKALVLFKPETRGLKDPEHVEALQDQSQVMLSQHSKAHHPSQPVRFGKLLLLLPSLRFITAERIELLFFRKTIGNTPMEKLLCDMFKN

SEQ ID NO: 23299 - protein, 751 aa, Homo sapiens [sequence omitted]

SEQ ID NO: 23300 - protein, 289 aa, Homo sapiens
MSPALVDVHPEDTQLEENEERTMIDPTSKEDPKFKELVKVLLDWINDVLVEERIIVKQLEEDLYDGQVLQKLLEKLAGCKLNVAEVTQSEIGQKQKLQTVLEAVHDLLRPRGWALRWSVDSIHGKNLVAILHLLVSLAMHFRAPIRLPEHVTVQVVVVRKREGLLHSSHISEELTTTTEMMMGRFERDAFDTLFDHAPDKLSVVKKFADGVYLVLLMGLLEDYFVPLHHFYLTPESFDQKVHNVSFAFELMLDGGLKKPKARPEDVVNLDLKSTLRVLYNLFTKYKNVE

SEQ ID NO: 23301 - protein, 951 aa, Homo sapiens
MEKQKPFALFVPPRSSSSQVSAVKPQTLGGDSTFFKSFNKCTEDDFEFPFAKTNLSKNGENIDSDPALQKVNFLPVLEQVGNSDCHYQEGLKDSDLENSEGLSRVYSKLYKEAEKIKKWKVSTEAELRQKESKLQENRKIIEAQRKAIQELQFGNEKVSLKLEEGIQENKDLIKENNATRHLCNLLKETCARSAEKTKKYEYEREETRQVYMDLNNNIEKMITAFEELRVQAENSRLEMHFKLKEDYEKIQHLEQEYKKEINDKEKQVSLLLIQITEKENKMKDLTFLLEESRDKVNQLEEKTKLQSENLKQSIEKQHHLTKELEDIKVSLQRSVSTQKALEEDLQIATKTICQLTEEKETQMEESNKARAAHSFVVTEFETTVCSLEELLRTEQQRLEKNEDQLKILTMELQKKSSELEEMTKLTNNKEVELEELKKVLGEKETLLYENKQFEKIAEELKGTEQELIGLLQAREKEVHDLEIQLTAITTSEQYYSKEVKDLKTELENEKLKNTELTSHCNKLSLENKELTQETSDMTLELKNQQEDINNNKKQEERMLKQIENLQETETQLRNELEYVREELKQKRDEVKCKLDKSEENCNNLRKQVENKNKYIEELQQENKALKKKGTAESKQLNVYEIKVNKLELELESAKQKFGEITDTYQKEIEDKKISEENLLEEVEKAKVIADEAVKLQKEIDKRCQHKIAEMVALMEKHKHQYDKIIEERDSELGLYKSKEQEQSSLRASLEKLKREAKENTATLKEKKDKKTQTFLLETPEIYWKLDSKAVPSQTVSRNFTSVDHGISKDKRDYLWTSAKNTLSTPLPKAYTVKTPTKPKLQQRENLNIPIEESKKKRKMAFEFDINSDSSETTDLLSMVSEEETLKTLYRNNNPPASHLCVKTPKKAPSSLTTPGSTLKFGAIRKMREDRWAVIAKMDRKKKLKEAEKLFV

SEQ ID NO: 23302 - protein, 637 aa, Homo sapiens
AQGLEVALTDLQSSRNNVRHHTEEITVDHLLVRRGQAFNLTLYFRNRSFQPGLDNIIFVVETEDAVYLDSEPQRQEYVMNDYGFIYQGSKNWIRPCPWNYGQFEDKIIDICLKLLDKSLHFQTDPATDCALRGSPVYVSRVVCAMINSNDDNGVLNGNWSENYTDGANPAEWTGSVAILKQWNATGCQPVRYGQCWVFAAVMCTVMRCLGIPTRVITNFDSGHDTDGNLIIDEYYDNTGRILGNKKKDTIWNFHVWNECWMARKDLPPAYGGWQVLDATPQEMSNGVYCCGPASVRAIKEGEVDLNYDTPFVFSMVNADCMSWLVQGGKEQKLHQDTSSVGNFISTKSIQSDERDDITENYKYEEGSLQERQVFLKALQKLKARSFHGSQRGAELQPSRPTSLSQDSPRSLHTPSLRPSDVVQVSLKFKLLDPPNMGQDICFVLLALNMSSQFKDLKVNLSAQSLLHDGSPLSPFWQDTAFITLSPKEAKTYPCKISYSQYSQYLSTDKLIRISALGEEKSSPEKILVNKIITLSYPSITINVLGAAVVNQPLSIQVIFSNPLSEQVEDCVLTVEGSGLFKKQQKVFLGVLKPQHQASIILETVPFKSGQRQIQANMRSNKFKDIKGYRNVYVDFAL

SEQ ID NO: 23303 - protein, 301 aa, Homo sapiens
MHPEPAPPPSRSSPELPPSGGSTTSGSRRSRRRSGDGEPPGAPPPPPSAVTYPDWIGQSYSEVMSLNEHSMQALSWRKLYLSRAKLKASSRTSALLSGFAMVAMVEVQLDADHDYPPGLLIAFSACTTVLVAVHLFALMISTCILPNIEAVSNVHNLNSVKESPHERMHRHIELAWAFSTVIGTLLFLAEVVLLCWVKFLPLKKQPGQPRPTSKPPASGAAANVSTSGITPGQAAAIASTTIMVPFGLIFIVFAVHFYRSLVSHKTDRQFQELNELAEFARLQDQLDHRGDHPLTPGSHYA

SEQ ID NO: 23304 - protein, 878 aa, Homo sapiens
MGPKTLPQLAGKWQVLCMLSLCCWGWVSGQLRYSVVEESEPGTLVGNVAQDLGLKMTDLLSRRLQLGSEENGRYFSLSLMSGALAVNQKIDRESLCGASTSCLLPVQVVTEHPLELIRVEVEILDLNDNSPSFATPEREMRISESAASGARFPLDSAQDPDVGTNTVSFYTLSPNSHFSLNVKTLKDGKPFPELVLEQQLDREAQARHQLVLTAVDGGTPARSGTTLISVIVLDINDNAPTFQSSVLRVGIPENAPIGTLLLRLNATDPDEGTNGQLDYSFGDHTSEAVRNLFGLDPSSGAIHVLGPIDFEESRFYEIHARARDQGQPAMEGHCVIQVDVGDVNDNAPEVLLASLANPVLESTPVGTVVGLFNVRDRDSGRNGEVSLDISPDLPFQIKPSENHYSLLTSQPLDREATSHYIIELLASDAGSPSLHKHLTIRLNISDVNDNAPRFNQQLYTAYILENRPPGSLLCTVAASDPDTGDNARLTYSIVGNQVQGAPASSFVYVNPEDGRIFAQRTFDYELLQMLQIVVGVRDSGSPPLHANTSLHVFVLDENDNAPAVLHPRPDWEHSAPQRLPRSAPPGSLVTKVTAVDADAGHNAWLSYSLLPQSTAPGLFLVSTHTGEVRTARALLEDDSDTQQVVVLVRDNGDPSLSSTATVLLVLEDEDPEEMPKSSDFLIHPPERSDLTLYLIVALATVSLLSLVTFTFLSAKCLQGNADGDGGGGQCCRRQDSPSPDFYKQSSPNLQVSSDGTLKYMEVTLRPTDSQSHCYRTCFSPASDGSDFTFLRPLSVQQPTALALEPDAIRSRSNTLRERSQVRGSAPPRATPGGGTGEAARPHKGLNLHPLLSGRLGRWLRSTRFSGSLDRLRETRVAD

SEQ ID NO: 23305 - protein, 561 aa, Homo sapiens
MGEEDYYLELCERPVQFEKANPVNCVFFDEANKQVFAVRSGGATGVVVKGPDDRNPISFRMDDKGEVKCIKFSLENKILAVQRTSKTVVLPEKRSLKLLKSHNLNVNWYMYCPESAVILLSTTVLENVLQPFHFRAGTMSKLPKFEIELPAAPKSTKPSLSERDIAMATIYGQLYVLFLRHHSRTSNSTGAEVVLYHLPREGACKKMHILKLNRTGKFALNVVDNLVVVHHQDTETSVIFDIKLRGEFDGSVTFHHPVLPARSIQPYQIPITGPAAVTSQSPVPCKLYSSSWIVFQPDIIISASQGYLWNLQVKLEPIVNLLPDKGRLMDFLLQRKECKMVILSVCSQMLSESDRASLPVIATVFDKLNHEYKKYLDAEQSYAMAVEAGQSRSSPLLKRPVRTQAVLDQSDVYTHVLSAFVEKKEMPHKFVIAVLMEYIRSLNQFQIAVQHYLHELVIKTLVQHNLFYMLHQFLQYHVLSDSKPLACLLLSLESFYPPAHQLSLDMLKMLQSRLKTTCFSIQYSAFLNSETSVCEGAPISHQGNTVKNMLLFSNRFLETKL

SEQ ID NO: 23306 - protein, 584 aa, Homo sapiens
MDTCGVGYVALGEAGPVGNMTVVDSPGQEVLNQLDVKTSSEMTSAEASVEMSLPTPLPGFEDSPDQRRLPPEQESLSRLEQPDLSSEMSKVSKPRASKPGRKRGGRTRKGPKRPQQPNPPSAPLVPGLLDQSNPLSTPMPKKRGRKSKAELLLLKLSKDLDRPESQSPKRPPEDFETPSGERPRRRAAQVALLYLQELAEELSTALPAPVSCPEGPKVSSPTKPKKIRQPAACPGGEEVDGAPRDEDFFLQVEAEDVEESEGPSESSSEPEPVVPRSTPRGSTSGKQKPHCRGMAPNGLPNHIMAPVWKCLHLTKDFREQKHSYWEFAEWIPLAWKWHLLSELEAAPYLPQEEKSPLFSVQREGLPEDGTLYRINRFSSITAHPERWDVSFFTGGPLWALDWCPVPEGAGASQYVALFSSPDMNETHPLSQLHSGPGLLQLWGLGTLQQESCPGNRAHFVYGIACDNGCIWDLKFCPSGAWELPGTPRKAPLLPRLGLLALACSDGKVLLFSLPHPEALLAQQPPDAVKPAIYKVQCVATLQVGSMQATDPSECGQCLSLAWMPTRPHQHLAAGYYNGKNQNKT

SEQ ID NO: 23307 - protein, 429 aa, Homo sapiens
MSQLRATKSGLVVRAVICIFIFLYLRNPTPAESEEEPAQPEVVECGFYPDELCSALFEGKGAAPIAKFCKTPHKSEIHAHLHTPGNCSRISRGLHFITRPLSAEEGDFSLAYIITIHKELAMFVQLLRAIYVPQNVYCIHVDEKAPMKYKTAVQTLVNCFENVFISSKTEKVAYAGFTRLQADINCMKVLVHSKFQWNYVINLCGQDFPIKTNREIIHYIRSKWSDKNITPGVIQPLHIKSKTSQSHLEFVPKGSIYAPPNNRFKDKPPHNLTIYFGSAYYVLTRKFVEFILTDIHAKDMLQWSKDIRSPEQHYWVTLNRLKDAPGATPNAGWEGNVRAIKRKSEEGNVHDGCKGRYVEDICVYGPGDLPWLIQSPSLFANKFEPSTDPLVVTCLERRHRLQVLRQAEVPIEPHWHFQQQSHFNMRLNR

SEQ ID NO: 23308 - protein, 590 aa, Homo sapiens
METTHSFGNPSISVSTQQPPKKFAPVVAPKPKYNPYKQPGGEGDFLPPPPPPLDDSSALPSISGNFPPPPPLDEEAFKVQGNPGGKTLEERRSSLDAEIDSLTSILADLECSSPYKPRPPQSSTGSTASPPVSTPVTGHKRMVIPNQPPLTATKKSTLKPQPAPQAGPIPVAPIGTLKPQPQPVPASYTTASTSSRPTFNVQVKSAQPSPHYMAAPSSGQIYGSGPQGYNTQPVPVSGQCPPPSTRGGMDYAYIPPPGLQPEPGYGYAPNQGRYYEGYYAAGPGYGGRNDSDPTYGQQGHPNTWKREPGYTPPGAGNQNPPGMYPVTGPKKTYITDPVSAPCAPPLQPKGGHSGQLGPSSVAPSFRPEDELEHLTKKMLYDMENPPADEYFGRCARCGENVVGEGTGCTAMDQVFHVDCFTCIICNNKLRGQPFYAVEKKAYCEPCYINTLEQCNVCSKPIMERILRATGKAYHPHCFTCVMCHRSLDGIPFTVDAGGLIHCIEDFHKKFAPRCSVCKEPIMPAPGQEETVRIVALDRDFHVHCYRCEDCGGLLSEGDNQGCYPLDGHILCKTCNSARIRVLTAKASTDL

SEQ ID NO: 23309 - protein, 637 aa, Homo sapiens
MAGGAGWSGAPAALLRSVRRLREVFEVCGRDPDGFLRVERVAALGLRFGQGEEVEKLVKYLDPNDLGRINFKDFCRGVFAMKGCEELLKDVLSVESAGTLPCAPEIPDCVEQGSEVTGPTFADGELIPREPGFFPEDEEEAMTLAPPEGPQELYTDSPMESTQSLEGSVGSPAEKDGGLGGLFLPEDKSLVHTPSMTTSDLSTHSTTSLISNEEQFEDYGEGDDVDCAPSSPCPDDETRTNVYSDLGSSVSSSAGQTPRKMRHVYNSELLDVYCSQCCKKINLLNDLEARLKNLKANSPNRKISSTAFGRQLMHSSNFSSSNGSTEDLFRDSIDSCDNDITEKVSFLEKKVTELENDSLTNGDLKSKLKQENTQLVHRVHELEEMVKDQETTAEQALEEEARRHREAYGKLEREKATEVELLNARVQQLEEENTELRTTVTRLKSQTEKLDEERQRMSDRLEDTSLRLKDEMDLYKRMMDKLRQNRLEFQKEREATQELIEDLRKELEHLQMYKLDCERPGRGRSASSGLGEFNARAREVELEHEVKRLKQENYKLRDQNDDLNGQILSLSLYEAKNLFAAQTKAQSLAAEIDTASRDELMEALKEQEEINFRLRQYMDKIILAILDHNPSILEIKH

SEQ ID NO: 23310 - protein, 1294 aa, Homo sapiens
MELLPPLPQSFLLLLLLPAKPAAGEDWQCPRTPYAASRDFDVKYVVPSFSAGGLVQAMVTYEGDRNESAVFVAIRNRLHVLGPDLKSVQSLATGPAGDPGCQTCAACGPGPHGPPGDTDTKVLVLDPALPALVSCGSSLQGRCFLHDLEPQGTAVHLAAPACLFSAHHNRPDDCPDCVASPLGTRVTVVEQGQASYFYVASSLDAAVAASFSPRSVSIRRLKADASGFAPGFVALSVLPKHLVSYSIEYVHSFHTGAFVYFLTVQPASVTDDPSALHTRLARLSATEPELGDYRELVLDCRFAPKRRRRGAPEGGQPYPVLRVAHSAPVGAQLATELSIAEGQEVLFGVFVTGKDGGPGVGPNSVVCAFPIDLLDTLIDEGVERCCESPVHPGLRRGLDFFQSPSFCPNPVFQVPIQGPGCRHFLTCGRCLRAWHFMGCGWCGNMCGQQKECPGSWQQDHCPPKLTEFHPHSGPLRGSTRLTLCGSNFYLHPSGLVPEGTHQVTVGQSPCRPLPKDSSKLRPVPRKDFVEEFECELEPLGTQAVGPTNVSLTVTNMPPGKHFRVDGTSVLRGFSFMEPVLIAVQPLFGPRAGGTCLTLEGQSLSVGTSRAVLVNGTECLLARVSEGQLLCATPPGATVASVPLSLQVGGAQVPGSWTFQYREDPVVLSISPNCGYINSHITICGQHLTSAWHLVLSFHDGLRAVESRCERQLPEQQLCRLPEYVVRDPQGWVAGNLSARGDGAAGFTLPGFRFLPPPHPPSANLVPLKPEEHAIKFEYIGLGAVADCVGINVTVGGESCQHEFRGDMVVCPLPPSLQLGQDGAPLQVCVDGECHILGRVVRPGPDGVPQSTLLGILLPLLLLVAALATALVFSYWWRRKQLVLPPNLNDLASLDQTAGATPLPILYSGSDYRSGLALPAIDGLDSTTCVHGASFSDSEDESCVPLLRKESIQLRDLDSALLAEVKDVLIPHERVVTHSDRVIGKGHFGVVYHGEYIDQAQNRIQCAIKSLSRITEMQQVEAFLREGLLMRGLNHPNVLALIGIMLPPEGLPHVLLPYMCHGDLLQFIRSPQRNPTVKDLISFGLQVARGMEYLAEQKFVHRDLAARNCMLDESFTVKVADFGLARDILDREYYSVQQHRHARLPVKWMALESLQTYRFTTKSDVWSFGVLLWELLTRGAPPYRHIDPFDLTHFLAQGRRLPQPEYCPDSLYQVMQQCWEADPAVRPTFRVLVGEVEQIVSALLGDHYVQLPATYMNLGPSTSHEMNVRPEQPQFSPMPGNVRRPRPLSEPPRPT

SEQ ID NO: 23311 - protein, 912 aa, Homo sapiens; identical to SEQ ID NO: 5768

SEQ ID NO: 23312 - protein, 1173 aa, Homo sapiens
MVTVGTNILPSRPAASANTAREDAALFSRRIPPRHKNGAAQPGAAPGPGAPGANMGNAHSKSGDRHSALPGRPELSFYGSFPRKWSENVFLDNELLTSKILSVLRPQSERGFRAGDLRYPTHFLSTNSVLASVTASLKEHPRGTLLSDGSPALSRNVGMTVSQKGGPQPTPSPAGPGTQLGPITGEMDEADSAFLKFKQTADDSLSLTSPNTESIFVEDPYTASLRSEIESDGHEFEAESWSLAVDAAYAKKQKREVVKRQDVLYELMQTEVHHVRTLKIMLKVYSRALQEELQFSSKAIGRLFPCADDLLETHSHFLARLKERRQESLEEGSDRNYVIQKIGDLLVQQFSGENGERMKEKYGVFCSGHNEAVSHYKLLLQQNKKFQNLIKKIGNFSIVRRLGVQECILLVTQRITKYPVLVERIIQNTEAGTEDYEDLTQALNLIKDIISQVDAKVSECEKGQRLREIAGKMDLKSSSKLKNGLTFRKEDMLQRQLHLEGMLCWKTTSGRLKDILAILLTDVLLLLQEKDQKYVFASVDSKPPVISLQKLIVREVANEEKAMFLISASLQGPEMYEIYTSSKEDRNAWMAHIQRAVESCPDEEEGPFSLPEEERKVVEARATRLRDFQERLSMKDQLIAQSLLEKQQIYLEMAEMGGLEDLPQPRGLFRGGDPSETLQGELILKSAMSEIEGIQSLICRQLGSANGQAEDGGSSTGPPRRAETFAGYDCTNSPTKNGSFKKKVSSTDPRPRDWRGPPNSPDLKLSDSDIPGSSEESPQVVEAPGTESDPRLPTVLESELVQRIQTLSQLLLNLQAVIAHQDSYVETQRAAIQEREKQFRLQSTRGNLLLEQERQRNFEKQREERAALEKLQSQLRHEQQRWERERQWQHQELERAGARLQEREGEARQLRERLEQERAELERQRQAYQHDLERLREAQRAVERERERLELLRRLKKQNTAPGALPPDTLAEAQPPSHPPSFNGEGLEGPRVSMLPSGVGPEYAERPEVARRDSAPTENRLAKSDVPIQLLSATNQFQRQAAVQQQIPTKLAASTKGGKDKGGKSRGSQRWESSASFDLKQQLLLNKLMGKDESTSRNRRSLSPILPGRHSPAPPPDPGFPAPSPPPADSPSEGFSLKAGGTALLPGPPAPSPLPATPLSAKEDASKEDVIFF

SEQ ID NO: 23313 - protein, 1030 aa, Homo sapiens
LIAVFEEQEPLHKIESPSGNPADRQSPDAFETEVAAQLAAFKPIGGEIEVTPSALKLGTPLLVRRSSDPVPGPPADTQPSASHPGGQSLKLVVPDSTQNLEDREVLNGVQTELLTSPRTKDTLSDMTRTVEISGEGGPLGIHVVPFFSSLSGRILGLFIRGIEDNSRSKREGLFHENECIVKINNVDLVDKTFAQAQDVFRQAMKSPSVLLHVLPPQNREQYEKSVIGSLNIFGNNDGVLKTKVPPPVHGKSGLKTANLTGTDSPETDASASLQQNKSPRVPRLGGKPSSPSLSPLMGFGSNKNAKKIKIDLKKGPEGLGFTVVTRDSSIHGPGPIFVKNILPKGAAIKDGRLQSGDRILEVNGRDVTGRTQEELVAMLRSTKQGETASLVIARQEGHFLPRELKGEPDCCALSLETSEQLTFEIPLNDSGSAGLGVSLKGNKSRETGTDLGIFIKSIIHGGAAFKDGRLRMNDQLIAVNGESLLGKSNHEAMETLRRSMSMEGNIRGMIQLVILRRPERPMEDPAECGAFSKPCFENCQNAVTTSRRNDNSILHPLGTCSPQDKQKGLLLPNDGWAESEVPPSPTPHSALGLGLEDYSHSSGVDSAVYFPDQHINFRSVTPARQPESINLKASKSMDLVPDESKVHSLAGQKSESPSKDFGPTLGLKKSSSLESLQTAVAEVRKNDLPFHRPRPHMVRGRGCNESFRAAIDKSYDGPEEIEADGLSDKSSHSGQGALNCESAPQGNSELEDMENKARKVKKTKEKEKKKEKGKLKVKEKKRKEENEDPERKIKKKGFGAMLRFGKKKEDKGGKAEQKGTLKHGGLREEELEKMKEERESGRPTGGSTDRIQKLRKEYYQARREGFPLYEDDEGRARPSEYDLLWVPGRGPDGNAHNLRFEGMERQYASLPRGGPADPVDYLPAAPRGLYKERELPYYPGAHPMHPPKGSYPRPTELRVADLRYPQHYPPPPAPQHKGPFRQDVPPSPPQHQRMPAYQETGRPGPRGGSPDQYPYRTQDSRQKNPMTAAV

SEQ ID NO: 23314 - protein, 421 aa, Homo sapiens
MCWVRSDNKRPCLEFSQLSVKDSFRDLFIPRIETILMMYTRNNLNCAEPLFEQNNSLNVNFNTQKKTVWLIHGYRPVGSIPLWLQNFVRILLNEEDMNVIVVDWSRGATTFIYNRAVKNTRKVAVSLSVHIKNLLKHGASLDNFHFIGVSLGAHISGFVGKIFHGQLGRITGLDPAGPRFSRKPPYSRLDYTDAKFVDVIHSDSNGIQFIKCNHQRAVHLFMASLETNCNFISFPCRSYKDYKTSLCVDCDCFKEKSCPRLGYQAKLFKGVLKERMEGRPLRTTVFLDTSGTYPFCTYYFVLSIIVPDKTMMDGSFSFKLLNQLGMIEEPRLYEKNKPFYKLQEVKILAQFYNDFVNISSIGLTYFQSSNLQCSTCTYKIQSLMLKSLTYPERPPLCRYNIVLKDREEVFLNPNTCTPKNT

SEQ ID NO: 23315 - protein, 359 aa, Homo sapiens
LGPDCPPPPPPPPPNNNNNNNSKHTGHKSACVPNMTERRRDELSEEINNLREKVMKQSEENNNLQSQVQKLTEENTTLREQVEPTPEDEDDDIELRGAAAAAAPPPPIEEECPEDLPEKFDGNPDMLAPFMAQCQIFMEKSTRDFSVDRVRVCFVTSMMTGRAARWASAKLERSHYLMHNYPAFMMEMKHVFEDPQRREVAKRKIRRLRQGMGSVIDYSNAFQMIAQDLDWNEPALIDQYHEGLSDHIQEELSHLEVAKSLSALIGQCIHIERRLARAAAARKPRSPPRALVLPHIASHHQVDPTEPVGGARMRLTQEEKERRRKLNLCLYCGTGGHYADNCPAKASKSSPAGNSPAPL

SEQ ID NO: 23316 - protein, 311 aa, Homo sapiens
MGRRNNTNVADFILMGLTLSEEIQMALFMLFLLIYLITMLGNVGMILIIRLDLQLHTPMYFFLTHLSFIDLSYSTVVTPKTLANLLTSNYISFTGCFAQMFFFAFLGTAECYLLSSMAHDRYAAICSPLHYTVIMSKRLCLALITGPYVIGFIDSFVNVVSMSRLHFYDSNVIHHFFCDTSPILALSCTDTYNTEILIFIIVGSTLMVSLFTISASYVFILFTILKINSTSGKQKAFSTCVSHLLGVTIFYSTLIFTYLKPRKSYSLGRDQVASVFYTIVIPVLNPLIYSLRNKEVKNAVIRVMQRRQDSR

SEQ ID NO: 23317 - protein, 137 aa, Homo sapiens
MKVVNLKQAILQAWKERWSDYQWAINMKKFFPKGATWDILNLADALLEQAMIGPSPNPLILSYLKYAISSQMVSYSSVLTAISKFDDFSRDHKPSGHPCVRPPQPRSSLTSEELSRCKVCMCVCVCVCVCLCVFCNM

SEQ ID NO: 23318 - protein, 765 aa, Homo sapiens
MLADLGLIGTIGEDDEVPVEPESDSGDEEEEGPIVLGRRQKALGKNRSADFNPDFVFTEKEGTYDGSWALADVMSQLKKKRAATTLDEKIEKVRKKRKTEDKEAKSGKLEKEKEAKEGSEPKEQEDLQENDEEGSEDEASETDYSSADENILTKADTLKVKDRKKKKKKGQEAGGFFEDASQYDENLSFQDMNLSRPLLKAITAMGFKQPTPIQKACIPVGLLGKDICACAATGTGKTAAFALPVLERLIYKPRQAPVTRVLVLVPTRELGIQVHSVTRQLAQFCNITTCLAVGGLDVKSQEAALRAAPDILIATPGRLIDHLHNCPSFHLSSIEVLILDEADRMLDEYFEEQMKEIIRMCSHHRQTMLFSATMTDEVKDLASVSLKNPVRIFVNSNTDVAPFLRQEFIRIRPNREGDREAIVAALLTRTFTDHVMLFTQTKKQAHRMHILLGLMGLQVGELHGNLSQTQRLEALRRFKDEQIDILVATDVAARGLDIEGVKTVINFTMPNTIKHYVHRVGRTARAGRAGRSVSLVGEDERKMLKEIVKAAKAPVKARILPQDVILKFRDKIEKMEKDVYAVLQLEAEEKEMQQSEAQINTAKRLLEKGKEAVVQEPERSWFQTKEERKKEKIAKALQEFDLALRGKKKRKKFMKDAKKKGEMTAEERSQFEILKAQMFAERLAKRNRRAKRARAMPEEEPVRGPAKKQKQGKKSVFDEELTNTSKKALKQYRAGPSFEERKQLGLPHQRRGGNFKSKSRYKRRK

SEQ ID NO: 23319 - protein, 355 aa, Homo sapiens
MNILSAVITEAFGVALVGYVASLALAQGSAKKFKYSIDDNQEFLAHGLSNIVSSFFFCIPSAAAMGRTAGLYSTGAKTQVACLISCIFVLIVIYAIGPLLYWLPMCVLASIIVVGLKGMLIQFRDLKKYWNVDKIDWGIWVSTYVFTICFAANVGLLFGVVCTIAIVIGRFPRAMTVSIKNMKEMEFKVKTEMDSETLQQVKIISINNPLVFLNAKKFYTDLMNMIQKENACNQPLDDISKCEQNTLLNSLSNGNCNEEASQSCPNEKCYLILDCSGFTFFDYSGVSMLVEVYMDCKGRSVDVLLAHCTASLIKAMTYYGNLDSEKPIFFESVSAAISHIHSNKNLSKLSDHSEV

SEQ ID NO: 23320 - protein, 235 aa, Homo sapiens
MEEGERSPLLSQETAGQKPLSVHRPPTSGCLGPVPREDQAEAWGCSCCPPETKHQALSGTPKKGPAPSLSPGSSCVKYLIFLSNFPFSLLGLLALAIGLWGLAVKGSLGSDLGGPLPADPMLGLALGGLVVSAVSLAGYLGALCENTCLLRGFSGGILAFLVLEAVAGALVVALWGPLQDSLEHTLRVAIAHYQDDPDLRFLLDQVQLGLRCCGAASYQDWQQNLYCLSSPCSSQ

SEQ ID NO: 23321 - protein, 618 aa, Homo sapiens
MLENYRNLAFLGIAVSKPDLITCLEQGKEPWNMKRHEMVDEPPGMCPHFAQDLWPEQGMEDSFQKAILRRYGKYGHENLQLRKGCKSVDEYKVNKEGYNGLNQCFTTAQSKVFQCDKYLKVFYKFLNSNRPKIRHTEKKSFKCKKRVKLFCMLSHKTQHKSIYHREKSYKCKECGKTFNWSSTLTNHRKIYTEEKPYKCEEYNKSPKQLSTLTTHEIIHAGEKLYKCEECGEAFNRSSNLTTHKIIHTGEKPYKCEECGKAFIWSSTLTEHKKIHTRKKPYKCEECGKAFIWSSTLTRHKRMHTGEKPYKCEECGKAFSQSSTLTTHKIIHTGEKRYKCLECGKAFKQLSTLTTHKIIHVGEKLYKCEECGKGFNRSSNLTTHKIIHTGEKPYKCEECGKAFIWSSTLTKHKRIHTREKPYKCEECGKAFIWSSTLTRHKRMHTGEKPYKCEECGKSFSQSSTLTTHKIIHTGEKPYKCEECGKAFNWSSTLTKHKIIHTEEKPYKCEKCGKAFKQSSILTNHKRIHTGEKPYKCEECGKSFNRSSTFTKHKVIHTGVKPYKCEECGKAFFWSSTLTKHKRIHTGEQPYKWEKFGKAFNRSSHLTTDKITHWREILQV

SEQ ID NO: 23322 - protein, 1204 aa, Homo sapiens; identical to SEQ ID NO: 16073

SEQ ID NO: 23323 - protein, 349 aa, Homo sapiens
MASRKEGTGSTATSSSSTAGAAGKGKGKGGSGDSAVKQVQIDGLVIIKHYQEEGQGTEVVQGVLLGLVVEDRLEITNCFPFPQHTEDDADFDEVQYQMEMMRSLRHVNIDHLHVGWYQSTYYGSFVTRALLDSQFSYQHAIEESVVLIYDPIKTAQGSLSLKAYRLTPKLMEVCKEKDFSPEALKKANITFEYMFEEVPIVIKNSHLINVLMWELEKKSAVADKHELLSLASSNHLGKNLQLLMDRVDEMSQDIVKYNTYMRNTSKQQQQKHQYQQRRQQENMQRQSRGEPPLPEEDLSKLFKPPQPPARMDSLLIAGQINTYCQNIKEFTAQNLGKLFMAQALQEYNN

SEQ ID NO: 23324 - protein, 1243 aa, Homo sapiens
MPTPGKHGWTVLQGRIGRPDNPFRVALEYISSGNRSLSAVDFFALKNCSEGTSPGSKMALQSSFTCWNGTVLQLGQACDFHQDCAQGEDESQMCRKLPVGFYCNFEDGFCGWTQGTLSPHTPQWQVRTLKDARFQDHQDHALLLSTTDVPASESATVTSATFPAPIKSSPCELRMSWLIRGVLRGNVSLVLVENKTGKEQGRMVWHVAAYEGLSLWQWMVLPLLDVSDRFWLQMVAWWGQGSRAIVAFDNISISLDCYLTISGEDKILQNTAPKSRNLFERNPNKELKPGENSPRQTPIFDPTVHWLFTTCGASGPHGPTQAQCNNAYQNSNLSVEVGSEGPLKGIQIWKVPATDTYSISGYGAAGGKGGKNTMMRSHGVSVLGIFNLEKDDMLYILVGQQGEDACPSTNQLIQKVCIGENNVIEEEIRVNRSVHEWAGGGGGGGGATYVFKMKDGVPVPLIIAAGGGGRAYGAKTDTFHPERLENNSSVLGLNGNSGAAGGGGGWNDNTSLLWAGKSLQEGATGGHSCPQAMKKWGWETRGGFGGGGGGCSSGGGGGGYIGGNAASNNDPEMDGEDGVSFISPLGILYTPALKVMEGHGEVNIKHYLNCSHCEVDECHMDPESHKVICFCDHGTVLAEDGVSCIVSPTPEPHLPLSLILSVVTSALVAALVLAFSGIMIVYRRKHQELQAMQMELQSPEYKLSKLRTSTIMTDYNPNYCFAGKTSSISDLKEVPRKNITLIRGLGHGAFGEVYEGQVSGMPNDPSPLQVAVKTLPEVCSEQDELDFLMEALIISKFNHQNIVRCIGVSLQSLPRFILLELMAGGDLKSFLRETRPRPSQPSSLAMLDLLHVARDIACGCQYLEENHFIHRDIAARNCLLTCPGPGRVAKIGDFGMARDIYRASYYRKGGCAMLPVKWMPPEAFMEGIFTSKTDTWSFGVLLWEIFSLGYMPYPSKSNQEVLEFVTSGGRMDPPKNCPGPVYRIMTQCWQHQPEDRPNFAIILERIEYCTQDPDVINTALPIEYGPLVEEEEKVPVRPKDPEGVPPLLVSQQAKREEERSPAAPPPLPTTSSGKAAKKPTAAEISVRVPRGPAVEGGHVNMAFSQSNPPSELHKVHGSRNKPTSLWNPTYGSWFTEKPTKKNNPIAKKEPHDRGNLGLEGSCTVPPNVATGRLPGASLLLEPSSLTANMKEVPLFRLRHFPCGNVNYGYQQQGLPLEAATAPGAGHYEDTILKSKNSMNQPGP

SEQ ID NO: 23325 - protein, 650 aa, Homo sapiens
MMYHLDGNSHFRHLNVPRPYACRECGRTFRDRNSLLKHMIIHQERRQKLMEEIRELKELQDEGRSARLQCPQCVFGTNCPKTFVQHAKTHEKDKRYYCCEECNFMAVTENELECHRGIAHGAVVKCPMVTSDIAQRKTQKKTFMKDSVVGSSKKSATYICKMCPFTTSAKSVLKKHTEYLHSSSCVDSFGSPLGLDKRKNDILEEPVDSDSTKTLTKQQSTTFPKNSALKQDVKRTFGSTSQSSSFSKIHKRPHRIQKARKSIAQSGVNMCNQNSSPHKNVTIKSSVDQKPKYFHQAAKEKSNAKANSHYLYRHKYENYRMIKKSGESYPVHFKKEEASSLNSLHLFSSSSNSHNNFISDPHKPDAKRPESFKDHRRVAVKRVIKESKKESSVGGEDLDSYPDFLHKMTVVVLQKLNSAEKKDSYETEDESSWDNVELGDYTTQAIEDETYSDINQEHVNLFPLFKSKVEGQEPGENATLSYDQNDGFYFEYYEDTGSNNFLHEIHDPQHLETADASLSKHSSVFHWTDLSLEKKSCPYCPATFETGVGLSNHVRGHLHRAGLSYEARHVVSPEQIATSDKMQHFKRTGTGTPVKRVRKAIEKSETTSEHTCQLCGGWFDTKIGLSNHVRGHLKRLGKTKWDAHKSPICV

SEQ ID NO: 23326 - protein, 969 aa, Homo sapiens
MPPRAPPAPGPRPPPRAAAATDTAAGAGGAGGAGGAGGPGFRPLAPRPWRWLLLLALPAACSAPPPRPVYTNHWAVQVLGGPAEADRVAAAHGYLNLGQIGNLEDYYHFYHSKTFKRSTLSSRGPHTFLRMDPQVKWLQQQEVKRRVKRQVRSDPQALYFNDPIWSNMWYLHCGDKNSRCRSEMNVQAAWKRGYTGKNVVVTILDDGIERNHPDLAPNYDSYASYDVNGNDYDPSPRYDASNENKHGTRCAGEVAASANNSYCIVGIAYNAKIGGIRMLDGDVTDVVEAKSLGIRPNYIDIYSASWGPDDDGKTVDGPGRLAKQAFEYGIKKGRQGLGSIFVWASGNGGREGDYCSCDGYTNSIYTISVSSATENGYKPWYLEECASTLATTYSSGAFYERKIVTTDLRQRCTDGHTGTSVSAPMVAGIIALALEANSQLTWRDVQHLLVKTSRPAHLKASDWKVNGAGHKVSHFYGFGLVDAEALVVEAKKWTAVPSQHMCVAASDKRPRSIPLVQVLRTTALTSACAEHSDQRVVYLEHVVVRTSISHPRRGDLQIYLVSPSGTKSQLLAKRLLDLSNEGFTNWEFMTVHCWGEKAEGQWTLEIQDLPSQVRNPEKQGKLKEWSLILYGTAEHPYHTFSAHQSRSRMLELSAPELEPPKAALSPSQVEVPEDEEDYTAQSTPGSANILQTSVCHPECGDKGCDGPNADQCLNCVHFSLGSVKTSRKCVSVCPLGYFGDTAARRCRRCHKGCETCSSRAATQCLSCRRGFYHHQEMNTCVTLCPAGFYADESQKNCLKCHPSCKKCVDEPEKCTVCKEGFSLARGSCIPDCEPGTYFDSELIRCGECHHTCGTCVGPGREECIHCAKNFHFHDWKCVPACGEGFYPEEMPGLPHKVCRRCDENCLSCAGSSRNCSRCKTGFTQLGTSCITNHTCSNADETFCEMVKSNRLCERKLFIQFCCRTCLLAG

SEQ ID NO: 23327 - protein, 378 aa, Homo sapiens
MAREWRAAQGKDPGPSEKQKPVFTPLRRPGMLVPKQNVSPPDMSALSLKGDQALLGGIFYFLNIFSHGELPPHCEQRFLPCEIGCVKYSLQEGIMADFHSFINPGEIPRGFRFHCQAASDSSHKIPISNFERGHNQATVLQNLYRFIHPNPGNWPPIYCKSDDRTRVNWCLKHMAKASEIRQDLQLLTVEDLVVGIYQQKFLKEPSKTWIRSLLDVAMWDYSSNTRCKWHEENDILFCALAVCKKIAYCISNSLATLFGIQLTEAHVPLQDYEASNSVTPKMVVLDAGRYQKLRVGSSGFSHFNSSNEEQRSNTPIGDYPSRAKISGQNSSVRGRGITRLLESISNSSSNIHKFSNCDTSLSPYMSQKDGYKSFSSLS

SEQ ID NO: 23328 - protein, 460 aa, Homo sapiens
LVEKKIEDLTEILDRYVQEQIPGAKVVVESIGARRHGDAFSLEDYTKCDLTVYAIDPQTNRAIDRNELFKFLDGKLLDINKDFQPYYGEGGRILEIRTPEAVTSIKKRGESLGYTEGALLALAFIIILCCIPAILVVLVSYRQFKVRQAECTKTARIQAALPAAKPAVPAPAPVAAPPPPPPPPPGAHLYEELGDSSMRGYGSEQQQLLRPSLLKPEELSMESGIDPGQEYGQDYYSYEHGYEMPQYGSRRRLLPPAGQEEYGEVVGEAEEEYEEEEWARKRMIKLVVDREYETSSTGEDSAPECQRNRLHHPSIHSNINGNIYIAQNGSVVRTRRACLTDNLKVASPVRLGGPFKKLDKLAVTHEENVPLNTLSKGPFSTEKMNARPTLVTFAPCPVGTDNTAVKPLRNRLKSTVEQESMIDSKNIKEALEFHSDHTQSDDEELWMGPWNNLHIPMTKL

SEQ ID NO: 23329 - protein, 590 aa, Homo sapiens
MKSKVDTIVNFTHQHFTSQFEVTVWAPRLPLQIEISDTELSQIKGWRIPVAANRRPTRESDDEDDEEKKGRGCSLQYQHATVRVLTQFVAESPDLGQLTYMLGPDWQFDITDLVTEFMKVEEPKIAQLQDGRTLAGREPGITTVQVLSPLSDSILAEKTVIVLDDRVTIAELGVQLVAGMSLSLQPHRADKRAIVSTAAALDVLQSPQQEAIVSSWILFSDGSVTPLDIYDPKDYSVTVSSLDEMVVSVQANLESKWPIVVAEGEGQGPLIKLEMMISEPCQKTKRKSVLAVGKGNVKVKFEPSSDEHQGGSNDIEGINREYKDHLSNSIEREGNQERAVQEWFHRGTPVGQEESTNKSTTPQSPMEGKNKLLKSGGPDAFTSFPTQGKSPDPNNPSDLTVTSRGLTDLEIGMYALLCVFCLAILVFLINCVAFAWKYRHKRFAVSEQGNIPHSHDWVWLGNEVELLENPVDITLPSEECTTMIDRGLQFEERNFLLNGSSQKTFHSQLLRPSDYVYEKEIKNEPMNSSGPKRKRVKFTSYTTILPEDGGPYTNSILFDSDDNIKWVCQDMGLGDSQDFRDYMESLQDQM

SEQ ID NO: 23330 - protein, 1790 aa, Homo sapiens
MFRQFYLWTCLASGIILGSLFEICLGQYDDDWQYEDCKLARGGPPATIVAIDEESRNGTILVDNMLIKGTAGGPDPTIELSLKDNVDYWVLMDPVKQMLFLNSTGRVLDRDPPMNIHSIVVQVQCINKKVGTIIYHEVRIVVRDRNDNSPTFKHESYYATVNELTPVGTTIFTGFSGDNGATDIDDGPNGQIEYVIQYNPDDPTSNDTFEIPLMLTGNIVLRKRLNYEDKTRYFVIIQANDRAQNLNERRTTTTTLTVDVLDGDDLGPMFLPCVLVPNTRDCRPLTYQAAIPELRTPEELNPIIVTPPIQAIDQDRNIQPPSDRPGILYSILVGTPEDYPRFFHMHPRTAELSLLEPVNRDFHQKFDLVIKAEQDNGHPLPAFAGLHIEILDENNQSPYFTMPSYQGYILESAPVGATISDSLNLTSPLRIVALDKDIEDVPPSGVPTKDPELHLFLNDYTSVFTVTQTGITRYLTLLQPVDREEQQTYTFSITAFDGVQESEPVIVNIQVMDANDNTPTFPEISYDVYVYTDMRPGDSVIQLTAVDADEGSNGEITYEILVGAQGDFIINKTTGLITIAPGVEMIVGRTYALTVQAADNAPPAERRNSICTVYIEVLPPNNQSPPRFPQLMYSLEISEAMRVGAVLLNLQATDREGDSITYAIENGDPQRVFNLSETTGILTLGKALDRESTDRYILIITASDGRPDGTSTATVNIVVTDVNDNAPVFDPYLPRNLSVVEEEANAFVGQVKATDPDAGINGQVHYSLGNFNNLFRITSNGSIYTAVKLNREVRDYYELVVVATDGAVHPRHSTLTLAIKVLDIDDNSPVFTNSTYTVLVEENLPAGTTILQIEAKDVDLGANVSYRIRSPEVKHFFALHPFTGELSLLRSLDYEAFPDQEASITFLVEAFDIYGTMPPGIATVTVIVKDMNDYPPVFSKRIYKGMVAPDAVKGTPITTVYAEDADPPGLPASRVRYRVDDVQFPYPASIFEVEEDSGRVITRVNLNEEPTTIFKLVVVAFDDGEPVMSSSATVKILVLHPGEIPRFTQEEYRPPPVSELATKGTMVGVISAAAINQSIVYSIVSGNEEDTFGINNITGVIYVNGPLDYETRTSYVLRVQADSLEVVLANLRVPSKSNTAKVYIEIQDENNHPPVFQKKFYIGGVSEDARMFTSVLRVKATDKDTGNYSVMAYRLIIPPIKEGKEGFVVETYTGLIKTAMLFHNMRRSYFKFQVIATDDYGKGLSGKADVLVSVVNQLDMQVIVSNVPPTLVEKKIEDLTEILDRYVQEQIPGAKVVVESIGARRHGDAFSLEDYTKCDLTVYAIDPQTNRAIDRNELFKFLDGKLLDINKDFQPYYGEGGRILEIRTPEAVTSIKKRGESLGYTEGALLALAFIIILCCIPAILVVLVSYRQFKVRQAECTKTARIQAALPAAKPAVPAPAPVAAPPPPPPPPPGAHLYEELGDSSMHKYEMPQYGSRRRLLPPAGQEEYGEVVGEAEEEYEEEEEEPKKIKKPKVEIREPSEEEEVVVTIEKPPAAEPTYTTWKRARIFPMIFKKVRGLADKRGIVDLEGEEWQRRLEEEDKDYLKLTLDQEEATESTVESEEESSSDYTEYSEEESEFSESETTEEESESETPSEEEESSTPESEESESTESEGEKARKNIVLARRRPMVEEVKEVKGRKEEPQEEQKEPKMEEEEHSEEEESGPAPVEESTDPEAQDIPEEGSAESASVEGGVESEEESESGSSSSSSESQSGGPWGYQVPAYDRSKNANQKKSPGANSEGYNTAL

SEQ ID NO: 23331 - protein, 158 aa, Homo sapiens
MSRRKQSNPRQIKRSLGDMEAREEVQLVGASHMEQKATAPEAPSPPSADVNSPPPLPPPTSPGGPKELEGQEPEPRPTEEEPGSPWSGPDELEPVVQDGQRRIRARLSLATGLSWGPFHGSVQTRASSPRQAEPMRKLRLQDVKSIAQIPRIKQQREK

SEQ ID NO: 23332 - protein, 758 aa, Homo sapiens
MAVPAALIPPTQLVPPQPPISTSASSSGTTTSTSSATSSPAPSIGPPASSGPTLFRPEPIASAAAAAATVTSTGGGGGGGGSGGGGGSSGNGGGGGGGGGGSNCNPNLAAASNGSGGGGGGISAGGGVASSTPINASTGSSSSSSSSSSSSSSSSSSSSSSSSCGPLPGKPVYSTPSPVENTPQNNECKMVDLRGAKVASFTVEGCELICLPQAFDLFLKHLVGGLHTVYTKLKRLEITPVVCNVEQVRILRGLGAIQPGVNRCKLISRKDFETLYNDCTNASSRPGRPPKRTQSVTSPENSHIMPHSVPGLMSPGIIPPTGLTAAAAAAAAATNAAIAEAMKVKKIKLEAMSNYHASNNQHGADSENGDMNSSVGSSDGSWDKETLPSSPSQGPQASITHPRMPGARSLPLSHPLNHLQQSHLLPNGLELPFMMMPHPLIPVSLPPASVTMAMSQMNHLSTIANMAAAAQVQSPPSRVETSVIKERVPDSPSPAPSLEEGRRPGSHPSSHRSSSVSSSPARTESSSDRIPVHQNGLSMNQMLMGLSPNVLPGPKEGDLAGHDMGHESKRMHIEKDETPLSTPTARDSLDKLSLTGHGQPLPPGFPSPFLFPDGLSSIETLLTNIQGLLKVAIDNARAQEKQVQLEKTELKMDFLRERELRETLEKQLAMEQKNRAIVQKRLKKEKKAKRKLQEALEFETKRREQAEQTLKQAASTDSLRVLNDSLTPEIEADRSGGRTDAERTIQDGRLYLKTTVMY

SEQ ID NO: 23333 - protein, 969 aa, Homo sapiens
MEGDRVAGRPVLSSLPVLLLLPLLMLRAAALHPDELFPHGESWGDQLLQEGDDESSAVVKLANPLHFYEARFSNLYVGTNGIISTQDFPRETQYVDYDFPTDFPAIAPFLADIDTSHGRGRVLYRVNGKVSGHLHVGHTPVHFTDVDLHAYIVGNDGRAYTAISHIPQPAAQALLPLTPIGGLFGWLFALEKPGSENGFSLAGAAFTHDMEVTFYPGEETVRITQTAEGLDPENYLSIKTNIQGQVPYVSANFTAHISPYKELYHYSDSTVTSTSSRDYSLTFGAINQTWSYRIHQNITYQVCRHAPRHPSFPTTQQLNVDRVFALYNDEERVLRFAVTNQIGPVKEDSDPTPGNPCYDGSHMCDTTARCHPGTGVDYTCECASGYQGDGRNCVDENECATGFHRCGPNSVCINLPGSYRCECRSGYEFADDRHTCILITPPANPCEDGSHTCAPAGQARCVHHGGSTFSCACLPGYAGDGHQCTDVDECSENRCHPAATCYNTPGSFSCRCQPGYYGDGFQCIPDSTSSLTPCEQQQRHAQAQYAYPGARFHIPQCDEQGNFLPLQCHGSTGFCWCVDPDGHEVPGTQTPPGSTPPHCGPSPEPTQRPPTICERWRENLLEHYGGTPRDDQYVPQCDDLGHFIPLQCHGKSDFCWCVDKDGREVQGTRSQPGTTPACIPTVAPPMVRPTPRPDVTPPSVGTFLLYTQGQQIGYLPLNGTRLQKDAAKTLLSLHGSIIVGIDYDCRERMVYWTDVAGRTISRAGLELGAEPETIVNSGLISPEGLAIDHIRRTMYWTDSVLDKIESALLDGSERKVLFYTDLVNPRAIAVDPIRGNLYWTDWNREAPKIETSSLDGENRRILINTDIGLPNGLTFDPFSKLLCWADAGTKKLECTLPDGTGRRVIQNNLKYPFSIVSYADHFYHTDWRRDGVVSVNKHSGQFTDEYLPEQRSHLYGITAVYPYCPTGRK

SEQ ID NO: 23334 - protein, 1096 aa, Homo sapiens [sequence omitted]

SEQ ID NO: 23335 - protein, 588 aa, Homo sapiens [sequence omitted]

SEQ ID NO: 23336 - protein, 574 aa, Homo sapiens
MELLPPLPQSFLLLLLLPAKPAAGEDWQCPRTPYAASRDFDVKYVVPSFSAGGLVQAMVTYEGDRNESAVFVAIRNRLHVLGPDLKSVQSLATGPAGDPGCQTCAACGPGPHGPPGDTDTKVLVLDPALPALVSCGSSLQGRCFLHDLEPQGTAVHLAAPACLFSAHHNRPDDCPDCVASPLGTRVTVVEQGQASYFYVASSLDAAVAASFSPRSVSIRRLKADASGFAPGFVALSVLPLLLLVAALATALVFSYWWRRKQLVLPPNLNDLASLDQTAGATPLPILYSGSDYRSGLALPAIDGLDSTTCVHGASFSDSEDESCVPLLRKESIQLRDLDSALLAEVKDVLIPHERVVTHSDRVIGKGHFGVVYHGEYIDQAQNRIQCAIKSLSRITEMQQVEAFLREGLLMRGLNHPNVLALIGIMLPPEGLPHVLLPYMCHGDLLQFIRSPQRNPTVKDLISFGLQVARGMEYLAEQKFVHRDLAARNCMYQVMQQCWEADPAVRPTFRVLVGEVEQIVSALLGDHYVQLPATYMNLGPSTSHEMNVRPEQPQFSPMPGNVRRPRPLSEPPRPT

SEQ ID NO: 23337 - protein, 962 aa, Homo sapiens
MPPRAPPAPGPRPPPRAAAATDTAAGAGGAGGAGGAGGPGFRPLAPRPWRWLLLLALPAACSAPPPRPVYTNHWAVQVLGGPAEADRVAAAHGYLNLGQIGNLEDYYHFYHSKTFKRSTLSSRGPHTFLRMDPQVKWLQQQEVKRRVKRQVRSDPQALYFNDPIWSNMWYLHCGDKNSRCRSEMNVQAAWKRGYTGKNVVVTILDDGIERNHPDLAPNYDSYASYDVNGNDYDPSPRYDASNENKHGTRCAGEVAASANNSYCIVGIAYNAKIGGIRMLDGDVTDVVEAKSLGIRPNYIDIYSASWGPDDDGKTVDGPGRLAKQAFEYGIKKGRQGLGSIFVWASGNGGREGDYCSCDGYTNSIYTISVSSATENGYKPWYLEECASTLATTYSSGAFYERKIVTTDLRQRCTDGHTGTSVSAPMVAGIIALALEANSQLTWRDVQHLLVKTSRPAHLKASDWKVNGAGHKVSHFYGFGLVDAEALVVEAKKWTAVPSQHMCVAASDKRPRSIPLVQVLRTTALTSACAEHSDQRVVYLEHVVVRTSISHPRRGDLQIYLVSPSGTKSQLLAKRLLDLSNEGFTNWEFMTVHCWGEKAEGQWTLEIQDLPSQVRNPEKQGKLKEWSLILYGTAEHPYHTFSAHQSRSRMLELSAPELEPPKAALSPSQVEVPEDEEDYTGVCHPECGDKGCDGPNADQCLNCVHFSLGSVKTSRKCVSVCPLGYFGDTAARRCRRCHKGCETCSSRAATQCLSCRRGFYHHQEMNTCVTLCPAGFYADESQKNCLKCHPSCKKCVDEPEKCTVCKEGFSLARGSCIPDCEPGTYFDSELIRCGECHHTCGTCVGPGREECIHCAKNFHFHDWKCVPACGEGFYPEEMPGLPHKVCRRYGPPGGERQAAVSSKGVPGGQSLAASSPGAGEGMLHHPTVDRSPFTELLRGLRPFVHWMHICWVPAVGRHRAAAG

SEQ ID NO: 23338 - protein, 116 aa, Homo sapiens
MLLECGMQEEGLFRVAPSASKLKKLKAALDCCVVDVQEYSADPHAIAGALKSYLRELPEPLMTFELYDEWIQASNVQEQDKKLQALWNACEKLPKANHNNIRYLIKFYPSCQNIKM

SEQ ID NO: 23339 - protein, 135 aa, Homo sapiens
MLQTKDLIWTLFFLGTAGEPSAPKLEGQMGEDGNSIKVNLIKQDDGGSPIRHYLVRYRALSSEWKPEIRLPSGSDHVMLKSLDWNAEYEVYVVAENQQGKSKAAHFVFRTSAQPTAIPANGSPTSGLSTGAIVGI

SEQ ID NO: 23340 - protein, 406 aa, Homo sapiens
MKQNLILLTFVSIFSLYSVHLLLKTANEGGSLLYEQLGYKAFGLVGKLAASGSITMQNIGAMSSYLFIVKYELPLVIQALTNIEDKTGLWYLNGNYLVLLVSLVVILPLSLFRNLGYLGYTSGLSLLCMVFFLIVVICKKFQVPCPVEAALIINETINTTLTQPTALVPALSHNVTENDSCRPHYFIFNSQTVYAVPILIFSFVCHPAVLPIYEELKDRSRRRMMNVSKISFFAMFLMYLLAALFGYLTFYEHVESELLHTYSSILGTDILLLIVRLAVLMAVTLTVPVVIFPIRSSVTHLLCASKDFSWWRHSLITVSILAFTNLLVIFVPTIRDIFGFIGASAASMLIFILPSAFYIKLVKKEPMKSVQKIGALFFLLSGVLVMTGSMALIVLDWVHNAPGGGH

SEQ ID NO: 23341 - protein, 418 aa, Homo sapiens
MRECISIHVGQAGVQIGNACWELYCLEHGIQPDGQMPSDKTIGGGDDSFNTFFSETGAGKHVPRAVFVDLEPTVVDEVRTGTYRQLFHPEQLITGKEDAANNYARGHYTIGKEIVDLVLDRIRKLADLCTGLQGFLIFHSFGGGTGSGFASLLMERLSVDYGKKSKLEFAIYPAPQVSTAVVEPYNSILTTHTTLEHSDCAFMVDNEAIYDICRRNLDIERPTYTNLNRLIGQIVSSITASLRFDGALNVDLTEFQTNLVPYPRIHFPLATYAPVISAEKAYHEQLSVAEITNACFEPANQMVKCDPRHGKYMACCMLYRGDVVPKDVNAAIATIKTKRTIQFVDWCPTGFKVGINYQPPTVVPGGDLAKVQRAVCMLSNTTAIAEAWARLDLAALEKDYEEVGVDSVEAEAEEGEEY

SEQ ID NO: 23342 - protein, 448 aa, Homo sapiens
MDRMKKIKRQLSMTLRSAPEIVHEDLKMGSDGESDQASATSSDEVQSPVRVRMRNHPPRKISTEDINKRLSLPADIRLPEGYLEKLTLNSPIFDKPLSRRLRRVSLSEIGFGKLETYIKLDKLGEGTYATVYKGKSKLTDNLVALKEIRLEHEEGAPCTAIREVSLLKDLKHANIVTLHDIIHTEKSLTLVFEYLDKDLKQYLDDCGNIINMHNVKLFLFQLLRGLAYCHRQKVLHRDLKPQNLLINERGELKLADFGLARAKSIPTKTYSNEVVTLWYRPPDILLGSTDYSTQIDMWGVGCIFYEMATGRPLFPGSTVEEQLHFIFRILGTPTEETWPGILSNEEFKTYNYPKYRAEALLSHAPRLDSDGADLLTKLLQFEGRNRISAEDAMKHPFFLSLGERIHKLPDTTSIFALKEIQLQKEASLRSSSMPDSGRPAFRVVDTEF

SEQ ID NO: 23343 - protein, 737 aa, Homo sapiens
MELGCWTQLGLTFLQLLLISSLPREYTVINEACPGAEWNIMCRECCEYDQIECVCPGKREVVGYTIPCCRNEENECDSCLIHPGCTIFENCKSCRNGSWGGTLDDFYVKGFYCAECRAGWYGGDCMRCGQVLRAPKGQILLESYPLNAHCEWTIHAKPGFVIQLRFVMLSLEFDYMCQYDYVEVRDGDNRDGQIIKRVCGNERPAPIQSIGSSLHVLFHSDGSKNFDGFHAIYEEITACSSSPCFHDGTCVLDKAGSYKCACLAGYTGQRCENLLEAGKSKIKASEDSLSVLEERNCSDPGGPVNGYQKITGGPGLINGRHAKIGTVVSFFCNNSYVLSGNEKRTCQQNGEWSGKQPICIKACREPKISDLVRRRVLPMQVQSRETPLHQLYSAAFSKQKLQSAPTKKPALPFGDLPMGYQHLHTQLQYECISPFYRRLGSSRRTCLRTGKWSGRAPSCIPICGKIENITAPKTQGLRWPWQAAIYRRTSGVHDGSLHKGAWFLVCSGALVNERTVVVAAHCVTDLGKVTMIKTADLKVVLGKFYRDDDRDEKTIQSLQISAIILHPNYDPILLDADIAILKLLDKARISTRVQPICLAASRDLSTSFQESHITVAGWNVLADVRSPGFKNDTLRSGVVSVVDSLLCEEQHEDHGIPVSVTDNMFCASWEPTAPSDICTAETGGIAAVSFPGRASPEPRWHLMGLVSWSYDKTCSHRLSTAFTKVLPFKDWIERNMK

SEQ ID NO: 23344 - protein, 382 aa, Homo sapiens
MEEPQSDPSVEPPLSQETFSDLWKLLPENNVLSPLPSQAMDDLMLSPDDIEQWFTEDPGPDEAPRMPEAAPPVAPAPAAPTPAAPAPAPSWPLSSSVPSQKTYQGSYGFRLSCKYSPALNKMFCQLAKTCPVQLWVDSTPPPGTRVRAMAIYKQSQHMTEVVRRCPHHERCSDSDGLAPPQHLIRVEGNLRVEYLDDRNTFRHSVVVPYEPPEVGSDCTTIHYNYMCNSSCMGGMNRRPILTIITLEDSSGNLLGRNSFEVRVCACPGRDRRTEEENLRKKGEPHHELPPGSTKRALPNNTSSSPQPKKKPLDGEYFTLQIRGRERFEMFRELNEALELKDAQAGKEPGGSRAHSSHLKSKKGQSTSRHKKLMFKTEGPDSD

SEQ ID NO: 23345 - protein, 1278 aa, Homo sapiens
MSEAPRFFVGPEDTEINPGNYRHFFHHADEDDEEEDDSPPERQIVVGICSMAKKSKSKPMKEILERISLFKYITVVVFEEEVILNEPVENWPLCDCLISFHSKGFPLDKAVAYAKLRNPFVINDLNMQYLIQDRREVYSILQAEGILLPRYAILNRDPNNPKECNLIEGEDHVEVNGEVFQKPFVEKPVSAEDHNVYIYYPTSAGGGSQRLFRKIGSRSSVYSPESNVRKTGSYIYEEFMPTDGTDVKVYTVGPDYAHAEARKSPALDGKVERDSEGKEVRYPVILNAREKLIAWKVCLAFKQTVCGFDLLRANGQSYVCDVNGFSFVKNSMKYYDDCAKILGNIVMRELAPQFHIPWSIPLEAEDIPIVPTTSGTMMELRCVIAVIRHGDRTPKQKMKMEVRHQKFFDLFEKCDGYKSGKLKLKKPKQLQEVLDIARQLLMELGQNNDSEIEENKPKLEQLKTVLEMYGHFSGINRKVQLTYLPHGCPKTSSEEEDSRREEPSLLLVLKWGGELTPAGRVQAEELGRAFRCMYPGGQGDYAGFPGCGLLRLHSTYRHDLKIYASDEGRVQMTAAAFAKGLLALEGELTPILVQMVKSANMNGLLDSDSDSLSSCQQRVKARLHEILQKDRDFTAEDYEKLTPSGSISLIKSMHLIKNPVKTCDKVYSLIQSLTSQIRHRMEDPKSSDIQLYHSETLELMLRRWSKLEKDFKTKNGRYDISKIPDIYDCIKYDVQHNGSLKLENTMELYRLSKALADIVIPQEYGITKAEKLEIAKGYCTPLVRKIRSDLQRTQDDDTVNKLHPVYSRGVLSPERHVRTRLYFTSESHVHSLLSILRYGALCNTNDSQNEDGGMVKEMESKDEQWKRAMDYLNVVNELNYMTQIVIMLYEDPNKDLSSEERFHVELHFSPGAKGCEEDKNLPSGYGYRPASRENEGRRPFKIDNDDEPHTSKRDEVDRAVILFKPMVSEPIHIHRKSPLPRSRKTATNDEESPLSVSSPEGTGTWLHYTSGVGTGRRRRRSGEQITSSPVSPKSLAFTSSIFGSWQQVVSENANYLRTPRTLVEQKQNPTVGSHCAGLFSTSVLGGSSSAPNLQDYARTHRKKLTSSGCIDDATRGSAVKRFSISFARHPTNEHLHLYRCWSVSSVEFLGSSGFELYSMVPSICPLETLHNALSLKQVDEFLASIASPSSDVPRKTAEISSTALRSSPIMRKKVSLNTYTPAKILPTPPATLKSTKASSKPATSGPSSAVVPNTSSRKKNITSKTETHEHKKNTGKKK

SEQ ID NO: 23346 - protein, 1789 aa, Homo sapiens
MFRQFYLWTCLASGIILGSLFEICLGQYDDDWQYEDCKLARGGPPATIVAIDEESRNGTILVDNMLIKGTAGGPDPTIELSLKDNVDYWVLMDPVKQMLFLNSTGRVLDRDPPMNIHSIVVQVQCINKKVGTIIYHEVRIVVRDRNDNSPTFKHESYYATVNELTPVGTTIFTGFSGDNGATDIDDGPNGQIEYVIQYNPDDPTSNDTFEIPLMLTGNIVLRKRLNYEDKTRYFVIIQANDRAQNLNERRTTTTTLTVDVLDGDDLGPMFLPCVLVPNTRDCRPLTYQAAIPELRTPEELNPIIVTPPIQAIDQDRNIQPPSDRPGILYSILVGTPEDYPRFFHMHPRTAELSLLEPVNRDFHQKFDLVIKAEQDNGHPLPAFAGLHIEILDENNQSPYFTMPSYQGYILESAPVGATISDSLNLTSPLRIVALDKDIEDVPPSGVPTKDPELHLFLNDYTSVFTVTQTGITRYLTLLQPVDREEQQTYTFSITAFDGVQESEPVIVNIQVMDANDNTPTFPEISYDVYVYTDMRPGDSVIQLTAVDADEGSNGEITYEILVGAQGDFIINKTTGLITIAPGVEMIVGRTYALTVQAADNAPPAERRNSICTVYIEVLPPNNQSPPRFPQLMYSLEISEAMRVGAVLLNLQATDREGDSITYAIENGDPQRVFNLSETTGILTLGKALDRESTDRYILIITASDGRPDGTSTATVNIVVTDVNDNAPVFDPYLPRNLSVVEEEANAFVGQVKATDPDAGINGQVHYSLGNFNNLFRITSNGSIYTAVKLNREVRDYYELVVVATDGAVHPRHSTLTLAIKVLDIDDNSPVFTNSTYTVLVEENLPAGTTILQIEAKDVDLGANVSYRIRSPEVKHFFALHPFTGELSLLRSLDYEAFPDQEASITFLVEAFDIYGTMPPGIATVTVIVKDMNDYPPVFSKRIYKGMVAPDAVKGTPITTVYAEDADPPGLPASRVRYRVDDVQFPYPASIFEVEEDSGRVITRVNLNEEPTTIFKLVVVAFDDGEPVMSSSATVKILVLHPGEIPRFTQEEYRPPPVSELATKGTMVGVISAAAINQSIVYSIVSGNEEDTFGINNITGVIYVNGPLDYETRTSYVLRVQADSLEVVLANLRVPSKSNTAKVYIEIQDENNHPPVFQKKFYIGGVSEDARMFTSVLRVKATDKDTGNYSVMAYRLIIPPIKEGKEGFVVETYTGLIKTAMLFHNMRRSYFKFQVIATDDYGKGLSGKADVLVSVVNQLDMQVIVSNVPPTLVEKKIEDLTEILDRYVQEQIPGAKVVVESIGARRHGDAFSLEDYTKCDLTVYAIDPQTNRAIDRNELFKFLDGKLLDINKDFQPYYGEGGRILEIRTPEAVTSIKKRGESLGYTEGALLALAFIIILCCIPAILVVLVSYRQVFKGRQAECTKTARIQAALPAAKPAVPAPAPVAAPPPPPPPPPGAHLYEELGDSSMYEMPQYGSRRRLLPPAGQEEYGEVVGEAEEEYEEEEEEPKKIKKPKVEIREPSEEEEVVVTIEKPPAAEPTYTTWKRARIFPMIFKKVRGLADKRGIVDLEGEEWQRRLEEEDKDYLKLTLDQEEATESTVESEEESSSDYTEYSEEESEFSESETTEEESESETPSEEEESSTPESEESESTESEGEKARKNIVLARRRPMVEEVKEVKGRKEEPQEEQKEPKMEEEEHSEEEESGPAPVEESTDPEAQDIPEEGSAESASVEGGVESEEESESGSSSSSSESQSGGPWGYQVPAYDRSKNANQKKSPGANSEGYNTAL

SEQ ID NO: 23347 - protein, 1462 aa, Homo sapiens
MHPENKLTNHGKTGNGGAQSQHQNVNQGPTCNVGSKGVGAGNHGAKANQISPSNSSLKNPQAGVPPFSSLKGKVKRDRSVSVDSGEQREAGTPSLDSEAKEVAPRSKRRCVLERKQPYSGDEWCSGPDSEEDDKPIGATHNCNVADPAMAAPQLGPGQTTQLPLSESSVPGAPHGPPPGLRPDAPGGGGGGGGVPGKPPSQFVYVFTTHLANTAAEAVLQGRADSILAYHQQNVPRAKLDQAPKVPPTPEPLPLSTPSAGTPQSQPPPLPPPPPPAPGSAPPALPPEGPPEDSSQDLAPNSVGAASTGGGTGGTHPNTPTATTANNPLPPGGDPSSAPGPALLGEAAAPGNGQRSLVGSEGLSKEQLEHRERSLQTLRDIERLLLRSGETEPFLKGPPGGAGEGGPPAQAPPPPQQPPTAPPSGLKKYEEPLQSMISQTQSLGGPPLEHEVPGHPPGGDMGQQMNMMIQRLGQDSLTPEQVAWRKLQEEYYEEKRRKEEQIGLHGSRPLQDMMGMGGMMVRGPPPPYHSKPGDQWPPGMGAQLRGPMDVQDPMQLRGGPPFPGPRFPGNQIQRVPGFGGMQSMPMEVPMNAMQRPVRPGMGWTEDLPPMGGPSNFAQNTMPYPGGQGEAERFMTPRVREELLRHQLLEKRSMGMQRPLGMAGSGMGQSMEMERMMQAHRQMDPAMFPGQMAGGEGLAGTPMGMEFGGGRGLLSPPMGQSGLREVDPPMGPGNLNMNMNVNMNMNMNLNVQMTPQQQMLMSQKMRGPGDLMGPQGLSPEEMARVRAQNSSGVMGGPQKMLMPSQFPNQGQQGFSGGQGPYQAMSQDMGNTQDMFSPDQSSMPMSNVGTTRLSHMPLPPASNPPGTVHSAPNRGLGRRPSDLTISINQMGSPGMGHLKSPTLSQVHSPLVTSPSANLKSPQTPSQMVPLPSANPPGPLKSPQVLGSSLSVRSPTGSPSRLKSPSMAVPSPGWVASPKTAMPSPGVSQNKQPPLNMNSSTTLSNMEQGTLPPSGPRSSSSAPPANPPSGLMNPSLPFTSSPDPTPSQNPLSLMMTQMSKYAMPSSTPLYHNAIKTIATSDDELLPDRPLLPPPPPPQGSGPGISNSQPSQMHLNSAAAQSPMGMNLPGQQPLSHEPPPAMLPSPTPLGSNIPLHPNAQGTGGPPQNSMMMAPGGPDSLNAPCGPVPSSSQMMPFPPRLQQPHGAMAPTGGGGGGPGLQQHYPSGMALPPEDLPNQPPGPMPPQQHLMGKAMAGRMGDAYPPGVLPGVASVLNDPELSEVIRPTPTGIPEFDLSRIIPSEKPSSTLQYFPKSENQPPKAQPPNLHLMNLQNMMAEQTPSRPPNLPGQQGVQRGLNMSMCHPGQMSLLGRTGVPPQQGMVPHGLHQGVMSPPQGLMTQQNFMLMKQRGVGGEVYSQPPHMLSPQGSLMGPPPQQNLMVSHPLRQRSVSLDSQMGYLPAPGGMANLPF

SEQ ID NO: 23348 - protein, 503 aa, Homo sapiens
MGPADSWGHHWMGILLSASLCTVWSPPAAAQLTLNANPLDATQSEDVVLPVFGTPRTPQIHGRSRELAKPSIAVSPGTAIEQKDMVTFYCTTKDVNITIHWVSNNLSIVFHERMQLSKDGKILTILIVQREDSGTYQCEARDALLSQRSDPIFLDVKYGPDPVEIKLESGVASGEVVEVMEGSSMTFLAETKSHPPCAYTWFLLDSILSHTTRTFTIHAVSREHEGLYRCLVSNSATHLSSLGTLKVRVLETLTMPQVVPSSLNLVENARSVDLTCQTVNQSVNVQWFLSGQPLLPSEHLQLSADNRTLIIHGLQRNDTGPYACEVWNWGSRARSEPLELTINCPQSSSLSSGAIAGIVIGILAVIAVASELGYFLCIRNARRPSRKTTEDPSHETSQPIPKEEHPTEPSSESLSPEYRNISQLQGRIRVELMQPPDLPEETYETKLPSASRRGNSFSPWKPPPKPLMPPLRLVSTVPKNMESIYEELVNPEPNTYIQINPSV

SEQ ID NO: 23349 - protein, 184 aa, Homo sapiens
MEERKVKRRSPKSFSAHCTQVVNAKKNAIPVSKSTGFSNPASQSTSQRPKLKRVMKEKTKPQGGEGKGAQSTPIQHSFLTDVSDVQEMERGLLSLLNDFHSGKLQAFGNECSIEQMEHVRGMQEKLARLNLELYGELEELPEDKRKTASDSNLDRLLSDLEELNSSIQKLHLADAQDVPNTSAS

SEQ ID NO: 23350 - protein, 357 aa, Homo sapiens
MSVSVLSPSRRLGGVSGILQVTSLLILLLLLIKAAQLYLHRQWLLKALQQFPCPPSHWLFGHIQEFQHDQELQRIQERVKTFPSACPYWIWGGKVRVQLYDPDYMKVILGRSDPKSHGSYKFLAPRIGYGLLLLNGQTWFQHRRMLTPAFHNDILKPYVGLMADSVRVMLDKWEELLGQDSPLEVFQHVSLMTLDTIMKSAFSHQGSIQVDRPSDPTEEGSTTEGGGAGEDQEEEALGFSGHPPLGQRAPGLPRPCWCSGWNCFRNHLDQMPYTTMCIKEALRLYPPVPGIGRELSTPVTFPDGRSLPKGIMVLLSIYGLHHNPKVWPNLEVFDPSRFAPGSAQHSHAFLPFSGGSR

SEQ ID NO: 23351 - protein, 622 aa, Homo sapiens
MKENVASATVFTLLLFLNTCLLNGQLPPGKPEIFKCRSPNKETFTCWWRPGTDGGLPTNYSLTYHREGETLMHECPDYITGGPNSCHFGKQYTSMWRTYIMMVNATNQMGSSFSDELYVDVTYIVQPDPPLELAVEVKQPEDRKPYLWIKWSPPTLIDLKTGWFTLLYEIRLKPEKAAEWEIHFAGQQTEFKILSLHPGQKYLVQVRCKPDHGYWSAWSPATFIQIPSDFTMNDTTVWISVAVLSAVICLIIVWAVALKGYSMVTCIFPPVPGPKIKGFDAHLLEKGKSEELLSALGCQDFPPTSDYEDLLVEYLEVDDSEDQHLMSVHSKEHPSQGMKPTYLDPDTDSGRGSCDSPSLLSEKCEEPQANPSTFYDPEVIEKPENPETTHTWDPQCISMEGKIPYFHAGGSKCSTWPLPQPSQHNPRSSYHNITDVCELAVGPAGAPATLLNEAGKDALKSSQTIKSREEGKATQQREVESFHSETDQDTPWLLPQEKTPFGSAKPLDYVEIHKVNKDGALSLLPKQRENSGKPKKPGTPENNKEYAKVSGVMDNNILVLVPDPHAKNVACFEESAKEAPPSLEQNQAEKALANFTATSSKCRLQLGGLDYLDPACFTHSFH

SEQ ID NO: 23352 - protein, 55 aa, Homo sapiens [sequence omitted]

SEQ ID NO: 23353 - protein, 644 aa, Homo sapiens; identical to SEQ ID NO: 5766

SEQ ID NO: 23354 - protein, 4168 aa, Homo sapiens
MEPEDLPWPGELEEEEEEEEEEEEEEEEAAAAAAANVDDVVVVEEVEEEAGRELDSDSHYGPQHLESIDDEEDEEAKAWLQAHPGRILPPLSPPQHRYSEGERTSLEKIVPLTCHVWQQIVYQGNSRTQISDTNVVCLETTAQRGSGDDQKTESWHCLPQEMDSSQTLDTSQTRFNVRTEDTEVTDFPSLEEGILTQSENQVKEPNRDLFCSPLLVIQDSFASPDLPLLTCLTQDQEFAPDSLFHQSELSFAPLRGIPDKSEDTEWSSRPSEVSEALFQATAEVASDLASSRFSVSQHPLIGSTAVGSQCPFLPSEQGNNEETISSVDELKIPKDCDRYDDLCSYMSWKTRKDTQWPENNLADKDQVSVATSFDITDENIATKRSDHFDAARSYGQYWTQEDSSKQAETYLTKGLQGKVESDVITLDGLNENAVVCSERVAELQRKPTRESEYHSSDLRMLRMSPDTVPKAPKHLKAGDTSKGGIAKVTQSNLKSGITTTPVDSDIGSHLSLSLEDLSQLAVSSPLETTTGQHTDTLNQKTLADTHLTEETLKVTAIPEPADQKTATPTVLSSSHSHRGKPSIFYQQGLPDSHLTEEALKVSAAPGLADQTTGMSTLTSTSYSHREKPGTFYQQELPESNLTEEPLEVSAAPGPVEQKTGIPTVSSTSHSHVEDLLFFYRQTLPDGHLTDQALKVSAVSGPADQKTGTATVLSTPHSHREKPGIFYQQEFADSHQTEETLTKVSATPGPADQKTEIPAVQSSSYSQREKPSILYPQDLADSHLPEEGLKVSAVAGPADQKTGLPTVPSSAYSHREKLLVFYQQALLDSHLPEEALKVSAVSGPADGKTGTPAVTSTSSASSSLGEKPSAFYQQTLPNSHLTEEALKVSIVPGPGDQKTGIPSAPSSFYSHREKPIIFSQQTLPDFLFPEEALKVSAVSVLAAQKTGTPTVSSNSHSHSEKSSVFYQQELPDSDLPRESLKMSAIPGLTDQKTVPTPTVPSGSFSHREKPSIFYQQEWPDSYATEKALKVSTGPGPADQKTEIPAVQSSSYPQREKPSVLYPQVLSDSHLPEESLKVSAFPGPADQMTDTPAVPSTFYSQREKPGIFYQQTLPESHLPKEALKISVAPGLADQKTGTPTVTSTSYSQHREKPSIFHQQALPGTHIPEEAQKVSAVTGPGNQKTWIPRVLSTFYSQREKPGIFYQQTLPGSHIPEEAQKVSPVLGPADQKTGTPTPTSASYSHTEKPGIFYQQVLPDNHPTEEALKISVASEPVDQTTGTPAVTSTSYSQYREKPSIFYQQSLPSSHLTEEAKNVSAVPGPADQKTVIPILPSTFYSHTEKPGVFYQQVLPHSHPTEEALKISVASEPVDQTTGTPTVTSTSYSQHTEKPSIFYQQSLPGSHLTEEAKNVSAVPGPGDRKTGIPTLPSTFYSHTEKPGSFYQQVLPHSHLPEEALEVSVAPGPVDQTIGTPTVTSPSSSFGEKPIVIYKQAFPEGHLPEESLKVSVAPGPVGQTTGAPTITSPSYSQHRAKSGSFYQLALLGSQIPEEALRVSSAPGPADQTTGIPTITSTSYSFGEKPIVNYKQAFPDGHLPEEALKVSIVSGPTEKKTDIPAGPLGSSALGEKPITFYRQALLDSPLNKEVVKVSAAPGPADQKTETLPVHSTSYSNRGKPVIFYQQTLSDSHLPEEALKVPPVPGPDAQKTETPSVSSSLYSYREKPIVFYQQALPDSELTQEALKVSAVPQPADQKTGLSTVTSSFYSHTEKPNISYQQELPDSHLTEEALKVSNVPGPADQKTGVSTVTSTSYSHREKPIVSYQRELPHFTEAGLKILRVPGPADQKTGINILPSNSYPQREHSVISYEQELPDLTEVTLKAIGVPGPADQKTGIQIASSSSYSNREKASIFHQQELPDVTEEALNVFVVPGQGDRKTEIPTVPLSYYSRREKPSVISQQELPDSHLTEEALKVSPVSIPAEQKTGIPIGLSSSYSHSHKEKLKISTVHIPDDQKTEFPAATLSSYSQIEKPKISTVIGPNDQKTPSQTAFHSSYSQTVKPNILFQQQLPDRDQSKGILKISAVPELTDVNTGKPVSLSSSYFHREKSNIFSPQELPGSHVTEDVLKVSTIPGPAGQKTVLPTALPSSFSHREKPDIFYQKDLPDRHLTEDALKISSALGQADQITGLQTVPSGTYSHGENHKLVSEHVQRLIDNLNSSDSSVSSNNVLLNSQADDRVVINKPESAGFRDVGSEEIQDAENSAKTLKEIRTLLMEAENMALKRCNFPAPLARFRDISDISFIQSKKVVCFKEPSSTGVSNGDLLHRQPFTEESPSSRCIQKDIGTQTNLKCRRGIENWEFISSTTVRSPLQEAESKVSMALEETLRQYQAAKSVMRSEPEGCSGTIGNKIIIPMMTVIKSDSSSDASDGNGSCSWDSNLPESLESVSDVLLNFFPYVSPKTSITDSREEEGVSESEDGGGSSVDSLAAHVKNLLQCESSLNHAKEILRNAEEEESRVRAHAWNMKFNLAHDCGYSISELNEDDRRKVEEIKAELFGHGRTTDLSKGLQSPRGMGCKPEAVCSHIIIESHEKGCFRTLTSEHPQLDRHPCAFRSAGPSEMTRGRQNPSSCRAKHVNLSASLDQNNSHFKVWNSLQLKSHSPFQNFIPDEFKISKGLRMPFDEKMDPWLSELVEPAFVPPKEVDFHSSSQMPSPEPMKKFTTSITFSSHRHSKCISNSSVVKVGVTEGSQCTGASVGVFNSHFTEEQNPPRDLKQKTSSPSSFKMHSNSQDKEVTILAEGRRQSQKLPVDFERSFQEEKPLERSDFTGSHSEPSTRANCSNFKEIQISDNHTLISMGRPSSTLGVNRSSSRLGVKEKNVTITPDLPSCIFLEQRELFEQSKAPRADDHVRKHHSPSPQHQDYVAPDLPSCIFLEQRELFEQCKAPYVDHQMRENHSPLPQGQDSIASDLPSPISLEQCQSKAPGVDDQMNKHHFPLPQGQDCVVEKNNQHKPKSHISNINVEAKFNTVVSQSAPNHCTLAASASTPPSNRKALSCVHITLCPKTSSKLDSGTLDERFHSLDAASKARMNSEFNFDLHTVSSRSLEPTSKLLTSKPVAQDQESLGFLGPKSSLDFQVVQPSLPDSNTITQDLKTIPSQNSQIVTSRQIQVNISDFEGHSNPEGTPVFADRLPEKMKTPLSAFSEKLSSDAVTQITTESPEKTLFSSEIFINAEDRGHEIIEPGNQKLRKAPVKFASSSSVQQVTFSRGTDGQPLLLPYKPSGSTKMYYVPQLRQIPPSPDSKSDTTVESSHSGSNDAIAPDFPAQVLGTRDDDLSATVNIKHKEGIYSKRVVTKASLPVGEKPLQNENADASVQVLITGDENLSDKKQQEIHSTRAVTEAAQAKEKESLQKDTADSSAAAAAEHSAQVGDPEMKNLPDTKAITQKEEIHRKKTVPEEAWPNNKESLQINIEESECHSEFENTTRSVFRSAKFYIHHPVHLPSDQDICHESLGKSVFMRHSWKDFFQHHPDKHREHMCLPLPYQNMDKTKTDYTRIKSLSINVNLGNKEVMDTTKSQVRDYPKHNGQISDPQRDQKVTPEQTTQHTVSLNELWNKYRERQRQQRQPELGDRKELSLVDRLDRLAKILQNPITHSLQVSESTHDDSRGERSVKEWSGRQQQRNKLQKKKRFKSLEKSHKNTGELKKSKVLSHHRAGRSNQIKIEQIKFDKYILSKQPGFNYISNTSSDCRPSEESELLTDTTTNILSGTTSTVESDILTQTDREVALHERSSSVSTIDTARLIQAFGHERVCLSPRRIKLYSSITNQQRRYLEKRSKHSKKVLNTGHPLVTSEHTRRRHIQVANHVISSDSISSSASSFLSSNSTFCNKQNVHMLNKGIQAGNLEIVNGAKKHTRDVGITFPTPSSSEAKLEENSDVTSWSEEKREEKMLFTGYPEDRKLKKNKKNSHEGVSWFVPVENVESRSKKENVPNTCGPGISWFEPITKTRPWREPLREQNCQGQHLDGRGYLAGPGREAGRDLLRPFVRATLQESLQFHRPDFISRSGERIKRLKLIVQERKLQSMLQTERDALFNIDRERQGHQNRMCPLPKRVFLAIQKNKPISKKEMIQRSKRIYEQLPEVQKKREEEKRKSEYKSYRLRAQLYKKRVTNQLLGRKVPWD

SEQ ID NO: 23355 - protein, 1666 aa, Homo sapiens
MHPGLWLLLVTLCLTEELAAAGEKSYGKPCGGQDCSGSCQCFPEKGARGRPGPIGIQGPTGPQGFTGSTGLSGLKGERGFPGLLGPYGPKGDKGPMGVPGFLGINGIPGHPGQPGPRGPPGLDGCNGTQGAVGFPGPDGYPGLLGPPGLPGQKGSKGDPVLAPGSFKGMKGDPGLPGLDGITGPQGAPGFPGAVGPAGPPGLQGPPGPPGPLGPDGNMGLGFQGEKGVKGDVGLPGPAGPPPSTGELEFMGFPKGKKGSKGEPGPKGFPGISGPPGFPGLGTTGEKGEKGEKGIPGLPGPRGPMGSEGVQGPPGQQGKKGTLGFPGLNGFQGIEGQKGDIGLPGPDVFIDIDGAVISGNPGDPGVPGLPGLKGDEGIQGLRGPSGVPGLPALSGVPGALGPQGFPGLKGDQGNPGRTTIGAAGLPGRDGLPGPPGPPGPPSPEFETETLHNKESGFPGLRGEQGPKGNLGLKGIKGDSGFCACDGGVPNTGPPGEPGPPGPWGLIGLPGLKGARGDRGSGGAQGPAGAPGLVGPLGPSGPKGKKGEPILSTIQGMPGDRGDSGSQGFRGVIGEPGKDGVPGLPGLPGLPGDGGQGFPGEKGLPGLPGEKGHPGPPGLPGNGLPGLPGPRGLPGDKGKDGLPGQQGLPGSKGITLPCIIPGSYGPSGFPGTPGFPGPKGSRGLPGTPGQPGSSGSKGEPGSPGLVHLPELPGFPGPRGEKGLPGFPGLPGKDGLPGMIGSPGLPGSKGATGDIFGAENGAPGEQGLQGLTGHKGFLGDSGLPGLKGVHGKPGLLGPKGERGSPGTPGQVGQPGTPGSSGPYGIKGKSGLPGAPGFPGISGHPGKKGTRGKKGPPGSIVKKGLPGLKGLPGNPGLVGLKGSPGSPGVAGLPALSGPKGEKGSVGFVGFPGIPGLPGIPGTRGLKGIPGSTGKMGPSGRAGTPGEKGDRGNPGPVGIPSPRRPMSNLWLKGDKGSQGSAGSNGFPGPRGDKGEAGRPGPPGLPGAPGLPGIIKGVSGKPGPPGFMGIRGLPGLKGSSGITGFPGMPGESGSQGIRGSPGLPGASGLPGLKGDNGQTVEISGSPGPKGQPGESGFKGTKGRDGLIGNIGFPGNKGEDGKVGVSGDVGLPGAPGFPGVAGMRGEPGLPGSSGHQGAIGPLGSPGLIGPKGPSITGVPGPAGLPGPKGEKGYPGIGIGAPGKPGLRGQKGDRGFPGLQGPAGLPGAPGISLPSLIAGQPGDPGRPGLDGERGRPGPAGPPGPPGPSSNQGDTGDPGFPGIPGPKGPKGDQGIPGFSGLPGELGLKGMRGEPGFMGTPGKVGPPGDPGFPGMKGKAGPRGSSGLQGDPGQTPTAEAVQVPPGPLGLPGIDGIPGLTGDPGAQGPVGLQGSKGLPGIPGKDGPSGLPGPPGALGDPGLPGLQGPPGFEGAPGQQGPFGMPGMPGQSMRVGYTLVKHSQSEQVPPCPIGMSQLWVGYSLLFVEGQEKAHNQDLGFAGSCLPRFSTMPFIYCNINEVCHYARRNDKSYWLSTTAPIPMMPVSQTQIPQYISRCSVCEAPSQAIAVHSQDITIPQCPLGWRSLWIGYSFLMHTAAGAEGGGQSLVSPGSCLEDFRATPFIECSGARGTCHYFANKYSFWLTTVEERQQFGELPVSETLKAGQLHTRVSRCQVCMKSL

SEQ ID NO: 23356 - protein, 628 aa, Homo sapiens [sequence omitted]

SEQ ID NO: 23357 - protein, 446 aa, Homo sapiens
MLHPETSPGRGHLLAVLLALLGTTWAEVWPPQLQEQAPMAGALNRKESFLLLSLHNRLRSWVQPPAADMRRLDWSDSLAQLAQARAALCGIPTPSLASGLWRTLQVGWNMQLLPAGLASFVEVVSLWFAEGQRYSHAAGECARNATCTHYTQLVWATSSQLGCGRHLCSAGQTAIEAFVCAYSPRGNWEVNGKTIIPYKKGAWCSLCTASVSGCFKAWDHAGGLCEVPRNPCRMSCQNHGRLNISTCHCHCPPGYTGRYCQVRCSLQCVHGRFREEECSCVCDIGYGGAQCATKVHFPFHTCDLRIDGDCFMVSSEADTYYRARMKCQRKGGVLAQIKSQKVQDILAFYLGRLETTNEVIDSDFETRNFWIGLTYKTAKDSFRWATGEHQAFTSFAFGQPDNHGFGNCVELQASAAFNWNDQRCKTRNRYICQFAQEHISRWGPGS

SEQ ID NO: 23358 - protein, 198 aa, Homo sapiens
MASRGARQRLKGSGASSGDTAPAADKLRELLGSREAGGAEHRTELSGNKAGQVWAPEGSTAFKCLLSARLCAALLSNISDCDETFNYWEPTHYLIYGEGFQTWEYSPAYAIRSYAYLLLHAWPAAFHARILQTNKILVFYFLRCLLAFVSCICELYFYKAVCKKFGLHVSRMMLAFLVLSTGMFCSSSVYPLPLICWS

SEQ ID NO: 23359 - protein, 381 aa, Homo sapiens [sequence omitted]

SEQ ID NO: 23360 - protein, 761 aa, Homo sapiens
MRKQEVRTGREAGQGHGTGSPAEQVKALMDLLAGKGSQGSQAPQALDRTPDAPLGPCSNDSRIQRHRKALLSKVGGGPELGGPWHRLASLLLVEGLTDLQLREHDFTQVEATRGGGHPARTVALDRLFLPLSRVSVPPRVSITIGVAGMGKTTLVRHFVRLWAHGQVGKDFSLVLPLTFRDLNTHEKLCADRLICSVFPHVGEPSLAVAVPARALLILDGLDECRTPLDFSNTVACTDPKKEIPVDHLITNIIRGNLFPEVSIWITSRPSASGQIPGGLVDRMTEIRGFNEEEIKVCLEQMFPEDQALLGWMLSQVQADRALYLMCTVPAFCRLTGMALGHLWRSRTGPQDAELWPPRTLCELYSWYFRMALSGEGQEKGKASPRIEQVAHGGRKMVGTLGRLAFHGLLKKKYVFYEQDMKAFGVDLALLQGAPCSCFLQREETLASSVAYCFTHLSLQEFVAAAYYYGASRRAIFDLFTESGVSWPRLGFLTHFRSAAQRAMQAEDGRLDVFLRFLSGLLSPRVNALLAGSLLAQGEHQAYRTQVAELLQGCLRPDAAVCARAINVLHCLHELQHTELARSVEEAMESGALARLTGPAHRAALAYLLQVSDACAQEANLSLSLSQGVLQSLLPQLLYCRKLRLDTNQFQDPVMELLGSVLSGKDCRIQKISLAENQISNKGAKALARSLLVNRSLTSLDLRGNSIGPQGAKALADALKINRTLTSLRVKFMYHKIDCFRRVPEADACNPSTLGGQGRWIT

SEQ ID NO: 23361 - protein, 297 aa, Homo sapiens
MAGYATTPSPMQTLQEEAVCAICLDYFKDPVSISCGHNFCRGCVTQLWSKEDEEDQNEEEDEWEEEEDEEAVGAMDGWDGSIREVLYRGNADEELFQDQDDDELWLGDSGITNWDNVDYMWDEEEEEEEEDQDYYLGGLRPDLRIDVYREEEILEAYDEDEDEELYPDIHPPPSLPLPGQFTCPQCRKSFTRRSFRPNLQLANMVQIIRQMCPTPYRGNRSNDQGMCFKHQEALKLFCEVDKEAICVVCRESRSHKQHSVLPLEEVVQEYQEIKLETTLVGILQIEQESIHSKAYNQ

SEQ ID NO: 23362 - protein, 337 aa, Homo sapiens
MVNAGAIVVSSLIKMDCNKAEKFDFVLQYLNKMAGNEYMGFSNATFQSEKETGDRNYAIGYYLKEKKCFPKGVDMMAALDLYFQLCSVEVTCESGSVMAATLANGGICPITGESVLSAEAVRNTLSLMHSCGMYDFSGQFAFHVGLPAKSAVSGAILLVVPNVMGMMCLSPPLDKLGNSHRGTSFCQKLVSLFNFHNYDNLRHCARKLDPRREGAEIRNKTVVNLLFAAYSGDVSALRRFALSAMDMEQKDYDSRTALHVAAAEGHIEVVKFLIEACKVNPFAKDRWGNIPLDDAVQFNHLEVVKLLQDYQDSYTLSETQAEAAAEALSKENLESMV

SEQ ID NO: 23363 - protein, 373 aa, Homo sapiens
MAEVLRTLAGKPKCHALRPMILFLIMLVLVLFGYGVLSPRSLMPGSLERGFCMAVREPDHLQRVSLPRMVYPQPKVLTPCRKDVLVTPWLAPIVWEGTFNIDILNEQFRLQNTTIGLTVFAIKKYVAFLKLFLETAEKHFMVGHRVHYYVFTDQPAAVPRVTLGTGRQLSVLEVRAYKRWQDVSMRRMEMISDFCERRFLSEVDYLVCVDVDMEFRDHVGVEILTPLFGTLHPGFYGSSREAFTYERRPQSQAYIPKDEGDFYYLGGFFGGSVQEVQRLTRACHQAMMVDQANGIEAVWHDESHLNKYLLRHKPTKVLSPEYLWDQQLLGWPAVLRKLRFTAVPKNHQAVRRERLPGALGGLPAAPSPSRPWF

SEQ ID NO: 23364 - protein, 823 aa, Homo sapiens
MAALQKLPHCRKLVLLCFLLATLWEARAGQIRYSVREEIDRGSFVGNIAKDLGLEPLALAEQGVRIVSRGRSQLFALNPRSGSLVTANRIDREELCAQSAPCLLNFNILLEDKLTIYSVEVEITDINDNAPRFGVEELELKISETTTPGFRIPLKNAHDADVGENALQKYALNPNDHFSLDVRRGADGNKYPELVLERSLDREEEAVHHLVLVASDGGDPVLSGTSRICVKVLDANDNAPVFTQPEYRISIPENTLVGTRILTVTATDADEGYYAQVVYFLEKSPGETSEVFELKSTSGELTIIKDLDYEDATFHEIDIEAQDGPGLLTRAKVIVTVLDVNDNAPEFYMTSATSSVSEDSLPGTIIGLFNVHDRDSGQNAFTTCSLPEDLPFKLEKSVDNYYRLVTTRALDREQFSFYNITLTAKDGGNPSLSTDAHILLQVADINDNAPAFSRTSYSTYIPENNPRGASVFSVTAHDPDSNDNAHVTYSFAEDTVQGAPLSSYISINSDTGVLYALRSFDYEQLRDLQVWVIARDSGNPPLSSNVSLSLFVLDQNDNAPEILYPAFPTDGSTGVELAPRSAEPGYLVTKVVAVDRDSGQNAWLSYHLLKASEPGLFSVGLHTGEVRTARALLDRDALKQSLVVAIQDHGQPPLSATVTLTVAVADRIPDILADLGSLEPSAIPNDSDLTLYLVVAVAAVSCVFLAFVIVLLAHRLRRWHKSRLLQASGGSLTGMQSSHFVGVDGVRAFLQTYSHEVSLTADSRKSHLIFPQPNYADTLISQESCEKKDFLSAPQSLLEEEREETFSQVIYLFTTYVLASLLK

SEQ ID NO: 23365 - protein, 725 aa, Homo sapiens
MPINKSEKPESCDNVKVVVRCRPLNEREKSMCYKQAVSVDEMRGTITVHKTDSSNEPPKTFTFDTVFGPESKQLDVYNLTARPIIDSVLEGYNGTIFAYGQTGTGKTFTMEGVRAIPELRGIIPNSFAHIFGHIAKAEGDTRFLVRVSYLEIYNEEVRDLLGKDQTQRLEVKERPDVGVYIKDLSAYVVNNADDMDRIMTLGHKNRSVGATNMNEHSSRSHAIFTITIECSEKGIDGNMHVRMGKLHLVDLAGSERQAKTGATGQRLKEATKINLSLSTLGNVISALVDGKSTHVPYRNSKLTRLLQDSLGGNSKTMMCANIGPADYNYDETISTLRYANRAKNIKNKARINEDPKDALLRQFQKEIEELKKKLEEEEISGSDISGSEEDDDEEGEVGEDGEKRKKRRGNSSSSSSDSTCSVIEKPLDKFLPNQAGKKKVSPDKMIEMQAKIDEERKALETKLDMEEEERNKARAELEKREKDLLKAQQEHQSLLEKLSALEKKVIVGGVDLLAKAEEQEKLLEESNMELEERRKRAEQLRRELEEKEQERLDIEEKYTSLQEEAQGKTKKLKKVWTMLMAAKSEMADLQQEHQREIEGLLENIRQLSRELRLQMLIIDNFIPRDYQEMIENYVHWNEDIGEWQLKCVAYTGNNMRKQTPVPDKKEKDPFEVDLSHVYLAYTEESLRQSLMKLERPRTSKGKARPKTGRRKRSAKPETVIDSLLQ

SEQ ID NO: 23366 - protein, 1124 aa, Homo sapiens
RLKELKQREFARNVASKSRKDERKQEKALQRLHKLAELRKETVCAPGSGPMFKSTTVTVRENCNEISQRVVVDSVNNQQDFKYTLIHSEENTKDATTVAEDPESANNYTAKNNQVGDQAQGIHRHKIGFSFAFPKKASVKLESSAAAFSEYSDDASVGKGFSRKSRFVPSACHLQQSSPTDVLLSSEEKTNSFHPPEAMCRDKETVQTQEIKEVSSEKDALLLPSFCKFQLQLSSDADNCQNSVPLADQIPLESVVINEDIPVSGNSFELLGNKSTVLDMSNDCISVQATTEENVKHNEASTTEVENKNGPETLAPSNTEEVNITIHKKTNFCKRQCEPFVPVLNKHRSTVLQWPSEMLVYTTTKPSISYSCNPLCFDFKSTKVNNNLDKNKPDLKDLCSQQKQEDICMGPLSDYKDVSTEGLTDYEIGSSKNKCSQVTPLLADDILSSSCDSGKNENTGQRYKNISCKIRETEKYNFTKSQIKQDTLDEKYNKIRLKETHEYWFHKSRRKKKRKKLCQHHHMEKTKESETRCKMEAENSYTENAGKYLLEPISEKQYLAAEQLLDSHQLLDKRPKSESISLSDNEEMCKTWNTEYNTYDTISSKNHCKKNTILLNGQSNATMIHSGKHNLTYSRTYCCWKTKMSSCSQDHRSLVLQNDMKHMSQNQAVKRGYNSVMNESERFYRKRRQHSHSYSSDESLNRQNHLPEEFLRPPSTSVAPCKPKKKRRRKRGRFHPGFETLELKENTDYPVKDNSSLNPLDRLISEDKKEKMKPQEVAKIERNSEQTNQLRNKLSFHPNNLLPSETNGETEHLEMETTSGELSDVSNDPTTSVCVASAPTKEAIDNTLLEHKERSENINLNEKQIPFQVPNIERNFRQSQPKSYLCHYELAEALPQGKMNETPTEWLRYNSGILNTQPPLPFKEAHVSGHTFVTAEQILAPLALPEQALLIPLENHDKFKNVPCEVYQHILQPNMLANKVKFTFPPAALPPPSTPLQPLPLQQSLCSTSVTTIHHTVLQQHAAAAAAAAAAAAAGTFKVLQPHQQFLSQIPALTRTSLPQLSVGPVGPRLCPGNQPTFVAPPQMPIIPASVLHPSHLAFPSLPHALFPSLLSPHPTVIPLQPLF

SEQ ID NO: 23367 - protein, 307 aa, Homo sapiens
MNSKRMLLLVLFAFSLMLVERYFRNHQVEELRLSDWFHPRKRPDVITKTDWLAPVLWEGTFDRRVLEKHYRRRNITVGLAVFATGRFAEEYLRPFLHSANKHFMTGYRVIFYIMVDAFFKLPDIEPSPLRTFKAFKVGTERWWLDGPLVHVKSLGEHIASHIQDEVDFLFSMAANQVFQNEFGVETLGPLVAQLHAWWYFRNTKNFPYERRPTSAACIPFGQGDFYYGNLMVGGTPHNILDFIKEYLNGVIHDIKNGLNSTYEKHLNKYFYLNKPTLLSPAYSWDLAFSPPPQIQYVKVAHDSQRKL

SEQ ID NO: 23368 - protein, 535 aa, Homo sapiens
MEDELEPSLRPRTQIQGRILLLTICAAGIGGTFQFGYNLSIINAPTLHIQEFTNETWQARTGEPLPDHLVLLMWSLIVSLYPLGGLFGALLAGPLAITLGRKKSLLVNNIFVVSAAILFGFSRKAGSFEMIMLGRLLVGVNAGVSMNIQPMYLGESAPKELRGAVAMSSAIFTALGIVMGQVVGLRELLGGPQAWPLLLASCLVPGALQLASLPLLPESPRYLLIDCGDTEACLAALRRLRGSGDLAGELEELEEERAACQGCRARRPWELFQHRALRRQVTSLVVLGSAMELCGNDSVYAYASSVFRKAGVPEAKIQYAIIGTGSCELLTAVVSVAGVDEGWGVQAGLTSTSPPPRPRQSSFPWTLYLAMACIFAFILSFGIGPAGVTGILATELFDQMARPAACMVCGALMWIMLILVGLGFPFIMVLGSFLIRRRPCPTSSMSLSLVSVSVGPSTLACSFLRPKARPSKRSPRNYTDSTSPGGPRAPRGGAWRLSSQQNSSPKGVARAKASYCPVLCFLPGPWSSLPPAFLI

SEQ ID NO: 23369 - protein, 702 aa, Homo sapiens
METASTGVAGVSSAMDHTFSTTSKDGEGSCYTSLISDICYPPQEDSTYFTGILQKENGHVTISESPEELGTPGPSLPDVPGIESRGLFSSDSGIEMTPAESTEVNKILADPLDQMKAEAYKYIDITRPEEVKHQEQHHPELEDKDLDFKNKDTDISIKPEGVREPDKPAPVEGKIIKDHLLEESTFAPYIDDLSEEQRRAPQITTPVKITLTEIEPSVETTTQEKTPEKQDICLKPSPDTVPTVTVSEPEDDSPGSITPPSSGTEPSAAESQGKGSISEDELITAIKEAKGLSYETAENPRPVGQLADRPEVKARSGPPTIPSPLDHEASSAESGDSEIELVSEDPMAAEDALPSGYVSFGHVGGPPPSPASPSIQYSILREEREAELDSELIIESCDASSASEESPKREQDSPPMKPSALDAIREETGVRAEERAPSRRGLAEPGSFLDYPSTEPQPGPELPPGDGALEPETPMLPRKPEEDSSSNQSPAATKGPGPLGPGAPPPLLFLNKQKAIDLLYWRDIKQTGIVFGSFLLLLFSLTQFSVVSVVAYLALAALSATISFRIYKSVLQAVQKTDEGHPFKAYLELEITLSQEQIQKYTDCLQFYVNSTLKELRRLFLVQDLVDSLKFAVLMWLLTYVGALFNGLTLLLMAVVSMFTLPVVYVKHQAQIDQYLGLVRTHINAVVAKIQAKIPGAKRHAE

SEQ ID NO: 23370 - protein, 250 aa, Homo sapiens [sequence omitted]

SEQ ID NO: 23371 - protein, 292 aa, Homo sapiens
MAPKRQSPLPLQKKKPRPPPALGLEETSASAGLPKKGEKEQQEAIEHIDEVQNEIDRLNEQDSEEILKVEQKYNKLRQPFFQKRSELIAKIPNFGVTTFVNHPQVSSLLGEEDEEALHYLTKVEVTEFEDIKSGYRIDFYFDENPYFENKVFSKEFHLNESGDPSSKSTKIKWKSGKDVTKRSSQTQNKASRKRQHEEPESFFTWFTDHSDAGADELEEVIKDDIWPNPLQYYLVPDMDDEEGGEDDDDDDDDGDEGEEELEDIDEGDEDEGEEDEDDDEGEEGEEDEGEDD

SEQ ID NO: 23372 - protein, 521 aa, Homo sapiens
KKMLCSKDSLGLKEELTDEDREKVAVHEGINSGTAMSRGLYQPATIFMGRQMSAILSMRDFSTEHKSPQPTKNFSIPDPHSHRQTAQSSNVTDSCVVQTSNDTQCLNKSDNIDGKASLQIGEKMPVTASVLSEEEQTHCLEIGSNTRHGKSNLSEGKKSAELNSPLRERLSPENRTTDLKCDSSSGSEGEILTREHIEVEEKRASPPVSPIPVSEYCESENKWSQEKHSPWEGVSDHLAHREPKSQKPFRKMQEEEEESWSTSSDLTISISEDDLILESPEPQPNPGGKMEGEDGIEALKLIHAEQERVALSTEKNCILQTLSSPDSEKESSTNAPTREPGQTPDSDVPRAQVGQHVATLKEHDNSVKEEATALLRKALTEECGRRSAIHSSESSCSLPSILNDNSGIKEAKPAVWLNSVPTREQETEAYQLLKKATLQDNTNQTENRFQKTDASVSHLSGLNIGSGAFETKTANKIASEASFSSSEGSPLSRHENKKKPVINLKSNGERDNRTLDFLFLF

SEQ ID NO: 23373 - protein, 153 aa, Homo sapiens
ALLFHKMMFETIPMFSGGTCNPQFVVCQLKVKIYSSNSGPTRREDKFMYFEFPQPLPVCGDIKVEFFHKQNKMLKKDKMFHFWVNTFFIPGPEETSEKVENGSLCDQEIDSICSIERADNDKEYLVLTLTKNDLDKANKDKANRYFSPNFKVS

SEQ ID NO: 23374 - protein, 926 aa, Homo sapiens
ACELMNQGILALVSSIGCTSAGSLQSLADAMHIPHLFIQRSTAGTPRSGCGLTRSNRNDDYTLSVRPPVYLHDVILRVVTEYAWQKFIIFYDSEYDIRGIQEFLDKVSQQGMDVALQKVENNINKMITTLFDTMRIEELNRYRDTLRRAILVMNPATAKSFITEVVETNLVAFDCHWIIINEEINDVDVQELVRRSIGRLTIIRQTFPVPQNISQRCFRGNHRISSTLCDPKDPFAQNMEISNLYIYDTVLLLANAFHKKLEDRKWHSMASLSCIRKNSKPWQGGRSMLETIKKGGVSGLTGELEFGENGGNPNVHFEILGTNYGEELGRGVRKLGCWNPVTGLNGSLTDKKLENNMRGVVLRVVTVLEEPFVMVSENVLGKPKKYQGFSIDVLDALSNYLGFNYEIYVAPDHKYGSPQEDGTWNGLVGELVFKRADIGISALTITPDRENVVDFTTRYMDYSVGVLLRRAEKTVDMFACLAPFDLSLWACIAGTVLLVGLLVYLLNWLNPPRLQMGSMTSTTLYNSMWFVYGSFVQQGGEVPYTTLATRMMMGAWWLFALIVISSYTANLAAFLTITRIESSIQSLQDLSKQTEIPYGTVLDSAVYEHVRMKGLNPFERDSMYSQMWRMINRSNGSENNVLESQAGIQKVKYGNYAFVWDAAVLEYVAINDPDCSFYTIGNTVADRGYGIALQHGSPYRDVFSQRILELQQNGDMDILKHKWWPKNGQCDLYSSVDTKQKGGALDIKSFAGVFCILAAGIVLSCFIAMLETWWNKRKGSRVPSKEDDKEIDLEHLHRRVNSLCTDDDSPHKQFSTSSIDLTPLDIDTLPTRQALEQISDFRNTHITTTTFIPEQIQTLSRTLSAKAASGFTFGNVPEHRTGPFRHRAPNGGFFRSPIKTMSSIPYQPTPTLGLNLGNDPDRGTSI

SEQ ID NO: 23375 - protein, 351 aa, Homo sapiens
DAFVNSQEWTLSRSVPELKVGIVGNLASGKSALVHRYLTGTYVQEESPEGGRFKKEIVVDGQSYLLLIRDEGGPPEAQFAMWVDAVIFVFSLEDEISFQTVYHYYSRMANYRNTSEIPLVLVGTQDAISSANPRVIDDARARKLSNDLKRCTYYETCATYGLNVERVFQDVAQKIVATRKKQQLSIGPCKSLPNSPSHSSVCSAQVSAVHISQTSNGGGSLSDYSSSVPSTPSTSQKELRIDVPPTANTPTPVRKQSKRRSNLFTSRKGSDPDKEKKGLESRADSIGSGRAIPIKQGLPFFVLALTASTYLRPAGARARQSSPWPGPRGGQTSPHCAEGPQSAQLSGAMMN

SEQ ID NO: 23376 - protein, 755 aa, Homo sapiens
MEPIDLSIPKNFRKGDKDLATPSEAKKPEEEAGSSEQPSPCPAPGPSLPVTLGPSGILESPMAPAPAATPEPPAQPLQGPVQLAVPIYSSALVSSPPLVGSSALLSGTALLRPLRPKPPLLLPKPPVTEELPPLASIAQIISSVSSAPTLLKTKVADPGPASTGSNTTASDSLGGSVPKAATTATPAATTSPKESSEPPAPASSPEAASPTEQGPAGTSKKRGRKRGMRSRPRANSGGVDLDSSGEFASIEKMLATTDTNKFSPFLQTAEDNTQDEVAGAPADHHGPSDEEQGSPPEDKLLRAKRNSYTNCLQKITCPHCPRVFPWASSLQRHMLTHTDSQSDAETAAAAGEVLDLTSRDREQPSEGATELRQVAGDAPVEQATAETASPVHREEHGRGESHEPEEEHGTEESTGDADGGRGRVEQPEPGPGLRHQAHGLQAGGGRRRGRAGGAASQEQKLACDTCGKSFKFLGTLSRHRKAHGRQEPKDEKGDGASTAEEGPQPAPEQEEKPPETPAEVVESAPGAGEAPAEKLAEETEGPSDGESAAEKRSSEKSDDDKKPKTDSPKSVASKADKRKKVCSVCNKRFWSLQDLTRHMRSHTGERPYKCQTCERTFTLKHSLVRHQRIHQKARHAKHHGKDSDKEERGEEDSENESTHSGNNAVSENEAELAPNASNHMAVTRSRKEGLASATKDCSHREEKVTAGWPSEPGQGDLNPESPAALGQDLLEPRSKRPAHPILATADGASQLVGME

SEQ ID NO: 23377 - protein, 544 aa, Homo sapiens
MPGRCQSDAAMRVNGPASRAPAGWTSGSLHTGPRAGRPRAQARGVRGRGLLLRPRPAKELPLPRKGGAWAPAGNPGPLHPLGVAVGMAGSGRLVLRPWIRELILGSETPSSPRAGQLLEVLQDAEAAVAGPSHAPDTSDVGATLLVSDGTHSVRCLVTREALDTSDWEEKEFGFRGTEGRLLLLQDCGVHVQVAEGGAPAEFYLQVDRFSLLPTEQPRLRVPGCNQDLDVQKKLYDCLEEHLSESTSSNAGLSLSQLLDEMREDQEHQGALVCLAESCLTLEGPCTAPPVTHWAASRCKATGEAVYTVPSSMLCISENDQLILSSLGPCQRTQGPELPPPDPALQDLSLTLIASPPSSPSSSGTPALPGHMSSEESGTSISLLPALSLAAPDPGQRSSSQPSPAICSAPATLTPRSPHASRTPSSPLQSCTPSLSPRSHVPSPHQALVTRPQKPSLEFKEFVGLPCKNRPPFPRTGATRGAQEPCSVWEPPKRHRDGSAFQYEYEPPCTSLCARVQAVRLPPQLMAWALHFLMDAQPGSEPTPM

SEQ ID NO: 23378 - protein, 274 aa, Homo sapiens
VKDRKKKKKKGQEAGGFFEDASQYDENLSFQDMNLSRPLLKAITAMGFKQPTPIQKACIPVGLLGKDICACAATGTGKTAAFALPVLERLIYKPRQAPVTRVLVLVPTRELGIQVHSVTRQLAQFCNITTCLAVGGLDVKSQEAALRAAPDILIATPGRLIDHLHNCPSFHLSSIEVLILDEADSPPVDTAWPHAPTLWLLHLPFPQPGAISCPFRMLDEYFEEQMKEIIRMCSHHRQTMLFSATMTDEVKDLASVSLKNPVRIFVNSNTDVAP

SEQ ID NO: 23379 - protein, 694 aa, Homo sapiens
MVSVEGRAMSFQSIIHLSLDSPVHAVCVLGTEICLDLSGCAPQKCQCFTIHGSGRVLIDVANTVISEKEDATIWWPLSDPTYATVKMTSPSPSVDADKVSVTYYGPNEDAPVGTAVLYLTGIEVSLEVDIYRNGQVEMSSDKQAKKKWIWGPSGWGAILLVNCNPADVGQQLEDKKTKKVIFSEEITNLSQMTLNVQGPSCILKKYRLVLHTSKEESKKARVYWPQKDNSSTFELVLGPDQHAYTLALLGNHLKETFYVEAIAFPSAEFSGLISYSVSLVEESQDPSIPETVLYKDTVVFRVAPCVFIPCTQVPLEVYLCRELQLQGFVDTVTKLSEKSNSQVASVYEDPNRLGRWLQDEMAFCYTQAPHKTTSLILDTPQAADLDEFPMKYSLSPGIGYMIQDTEDHKVASMDSIGNLMVSPPVKVQGKEYPLGRVLIGSSFYPSAEGRAMSKTLRDFLYAQQVQAPVELYSDWLMTGHVDEFMCFIPTDDKNEGKKGFLLLLASPSACYKLFREKQKEGYGDALLFDELRADQLLSNGREAKTIDQLLADESLKKQNEYVEKCIHLNRDILKTELGLVEQDIIEIPQLFCLEKLTNIPSDQQPKRSFARPYFPDLLRMIVMGKNLGIPKPFGPQIKGTCCLEEKICCLLEPLGFKCTFINDFDCYLTEVGDICACANIRRVPFAFKWWKMVP

SEQ ID NO: 23380 - protein, 508 aa, Homo sapiens
MVVEVDSMPAASSVKKPFGLRSKMGKWCCRCFPCYRESGKSNVGTSGDHDDSAMKTLRSKMGKWCHHCFPCCRGSGKSNVGASGDHDDSAMKTLRNKMGKWCCHCFPCCRGSGKSKVGAWGDYDDSAFMEPRYHVRGEDLDKLHRAAWWGKVPRKDLIVMLRDTDVNKKDKQKRTALHLASANGNSEVVKLLLDRRCQLNVLDNKKRTALIKAVQCQEDECALMLLEHGTDPNIPDEYGNTTLHYAIYNEDKLMAKALLLYGADIESKNKHGLTPLLLGVHEQKQQVVKFLIKKKANLNALDRYGRTALILAVCCGSASIVSLLLEQNIDVSSQDLSGQTAREYAVSSHHHVICQLLSDYKEKQMLKISSENSNPEQELKLTSEEESQRFKGSENSQPEKMSQELEINKDGDRKVEEEMKKHGSTHVGFPENLTNGATAGNGDDGLIPPRKSRTPESQQFPDTENEEYHSDEQNDTQKQFCEEQNTGILHDEILIHEEKQIEVVENEF

SEQ ID NO: 23381 - protein, 357 aa, Homo sapiens
MDRRNDYGYRVPLFQSKHLNGDERSGSNYRRIPWGRRPAPPRDVAILQERANKLVKYLLVKDQTKIPIKRSDMLRDVIQEYDEYFPEIIERASYTLEKMFRVNLKEIDKQSSLYILISTQESSAGILGTTKDTPKLGLLMVILSVIFMNGNKASEAVIWEVLRKLGLRPGVRHSLFGEVRKLITDEFVKQKYLEYKRVPNSRPPEYEFFWGLRSYHETSKMKVLKFACRVQKKDPKDWAVQYREAVEMEVQLQLWLWLRLKPGLSGSNTSTGFTGEPSTSTGFSSGPSSIVGFSGGPSTGVGFCSGPSTSGFSGGPSTGAGFGGGPNTGAGFGGGPSTSAGFGSGAASLGACGFSYG

SEQ ID NO: 23382 - protein, 630 aa, Homo sapiens
GSTFICNTHIIPVKNQEGVAMMFIINFEYVTDNENAATPERVNPILPIKTVNRKFFGFKFPGLRVLTYRKQSLPQEDPDVVVIDSSKHSDDSVAMKHFKSPTKESCSPSEADDTKALIQPSKCSPLVNISGPLDHSSPKRQWDRLYPDMLQSSSQLSHSRSRESLCSIRRASSVHDIEGFGVHPKNIFRDRHASEGPFNHIKSSLLGSTSDSNLNKYSTINKIPQLTLNFSEVKTEKKNSSPPSSDKTIIAPKVKDRTHNVTEKVTQVLSLGADVLPEYKLQTPRINKFTILHYSPFKAVWDWLILLLVIYTAIFTPYSAAFLLNDREEQKRRECGYSCSPLNVVDLIVDIMFIIDILINFRTTYVNQNEEVVSDPAKIAIHYFKGWFLIDMVAAIPFDLLIFGSGSDETTTLIGLLKTARLLRLVRVARKLDRYSEYGAAVLMLLMCIFALIAHWLACIWYAIGNVERPYLTDKIGWLDSLGQQIGKRYNDSDSSSGPSIKDKYVTALYFTFSSLTSVGFGNVSPNTNSEKIFSICVMLIGSLMYASIFGNVSAIIQRLYSGTARYHMQMLRVKEFIRFHQIPNPLRQRLEEYFQHAWTYTNGIDMNMVCMSVFQNESAAGIIVIAKME

SEQ ID NO: 23383 - protein, 1155 aa, Homo sapiens
MAASRDLLKEFPQPKNLLNSVIGRALGISHAKDKLVYVHTNGPKKKKVTLHIKWPKSVEVEGYGSKKIDAERQAAAAACQLFKGWGLLGPRNELFDAAKYRVLADRFGSPADSWWRPEPTMPPTSWRQLNPESIRPGGPGGLSRSLGREEEEDEEEELEEGTIDVTDFLSMTQQDSHAPLRDSRGSSFEMTDDDSAIRALTQFPLPKNLLAKVIQIATSSSTAKNLMQFHTVGTKTKLSTLTLLWPCPMTFVAKGRRKAEAENKAAALACKKLKSLGLVDRNNEPLTHAMYNLASLRELGETQRRPCTIQVPEPILRKIETFLNHYPVESSWIAPELRLQSDDILPLGKDSGPLSDPITGKPYVPLLEAEEVRLSQSLLELWRRRGPVWQEAPQLPVDPHRDTILNAIEQHPVVVISGDTGCGKTTRIPQLLLERYVTEGRGARCNVIITQPRRISAVSVAQRVSHELGPSLRRNVGFQVRLESKPPSRGGALLFCTVGILLRKLQSNPSLEGVSHVIVDEVHERDVNTDFLLILLKGLQRLNPALRLVLMSATGDNERFSRYFGGCPVIKVPGFMYPVKEHYLEDILAKLGKHQYLHRHRHHESEDECALDLDLVTDLVLHIDARGEPGGILCFLPGWQEIKGVQQRLQEALGMHESKYLILPVHSNIPMMDQKAIFQQPPVGVRKIVLATNIAETSITINDIVHVVDSGLHKEERYDLKTKVSCLETVWVSRANVIQRRGRAGRCQSGFAYHLFPRSRLEKMVPFQVPEILRTPLENLVLQAKIHMPEKTAVEFLSKAVDSPNIKAVDEAVILLQEIGVLDQREYLTTLGQRLAHISTDPRLAKAIVLAAIFRCLHPLLVVVSCLTRDPFSSSLQNRAEVDKVKALLSHDSGSDHLAFVRAVAGWEEVLRWQDRSSRENYLEENLLYAPSLRFIHGLIKQFSENIYEAFLVGKPSDCTLASAQCNEYSEEEELVKGVLMAGLYPNLIQVRQGKVTRQGKFKPNSVTYRTKSGNILLHKSTINREATRLRSRWLTYFMAVKSNGSVFVRDSSQVHPLAVLLLTDGDVHIRDDGRRATISLSDSDLLRLEGDSRTVRLLKELRRALGRMVERSLRSELAALPPSVQEEHGQLLALLAELLRGPCGSFDVRKTADD

SEQ ID NO: 23384 - protein, 820 aa, Homo sapiens
MAAPQSRPRRGELILLCALLGTLWEIGRGQIRYSVPEETDKGSFVGNISKDLGLDPRKLAKHGVRIVSRGRTQLFALNPRSGSLITAGRIDREELCAQSPRCLININTLVEDKGKLFGVEIEIIDINDNNPKFQVEDLEVKINEIAVPGARYPLPEAVDPDVGVNSLQSYQLSPNHHFSLDVQTGDNGAINPELVLERALDREEEAAHHLVLTASDGGKPPRSSTVRIHVTVLDTNDNAPVFPHPIYRVKVLENMPPGTRLLTVTASDPDEGINGKVAYKFRKINEKQTPLFQLNENTGEISIAKSLDYEECSFYEMEIQAEDVGALLGRTKLLISVEDVNDNRPEVIITSLFSPVLENSLPGTVIAFLSVHDQDSGKNGQVVCYTRDNLPFKLEKSIGNYYRLVTRKYLDRENVSIYNITVMASDLGTPPLSTETQIALHVADINDNPPTFPHASYSAYILENNLRGASIFSLTAHDPDSQENAQVTYSVTEDTLQGAPLSSYISINSDTGVLYALQSFDYEQIRDLQLLVTASDSGDPPLSSNMSLSLFVLDQNDNAPEILYPALPTDGSTGVELAPRSAERGYLVTKVVAVDRDSGQNAWLSYRLLKASEPGLFSVGLHTGEVRTARALLDRDALKQSLVVAVQDHGQPPLSATVTLTVAVADSIPEVLTELGSLKPSVDPNDSSLTLYLVVAVAAISCVFLAFVAVLLGLRLRRWHKSRLLQDSGGRLVGVPASHFVGVEEVQAFLQTYSQEVSLTADSRKSHLIFPQPNYADMLISQEGCEKNDSLLTSVDFHEYKNEADHGQVSLVLCLLLISR

SEQ ID NO: 23385 - protein, 4873 aa, Homo sapiens
MAEGGEGGEDEIQFLRTEDEVVLQCIATIHKEQRKFCLAAEGLGNRLCFLEPTSEAKYIPPDLCVCNFVLEQSLSVRALQEMLANTGENGGEGAAQGGGHRTLLYGHAVLLRHSFSGMYLTCLTTSRSQTDKLAFDVGLREHATGEACWWTIHPASKQRSEGEKVRIGDDLILVSVSSERYLHLSVSNGNIQVDASFMQTLWNVHPTCSGSSIEEGYLLGGHVVRLFHGHDECLTIPSTDQNDSQHRRIFYEAGGAGTRARSLWRVEPLRISWSGSNIRWGQAFRLRHLTTGHYLALTEDQGLILQDRAKSDTKSTAFSFRASKELKEKLDSSHKRDIEGMGVPEIKYGDSVCFVQHIASGLWVTYKAQDAKTSRLGPLKRKVILHQEGHMDDGLTLQRCQREESQAARIIRNTTALFSQFVSGNNRTAAPITLPIEEVLQTLQDLIAYFQPPEEEMRHEDKQNKLRSLKNRQNLFKEEGMLALVLNCIDRLNVYNSVAHFAGIAREESGMAWKEILNLLYKLLAALIRGNRNNCAQFSNNLDWLISKLDRLESSSGILEVLHCILTESPEALNLIAEGHIKSIISLLDKHGRNHKVLDILCSLCLCNGVAVRANQNLICDNLLPRRNLLLQTRLINDVTSIRPNIFLGVAEGSAQYKKWYFELIIDQVDPFLTAEPTHLRVGWASSSGYAPYPGGGEGWGGNGVGDDLYSYGFDGLHLWSGRIPRAVASINQHLLRSDDVVSCCLDLGVPSISFRINGQPVQGMFENFNTDGLFFPVMSFSAGVKVRFLMGGRHGEFKFLPPSGYAPCYEALLPKEKMRLEPVKEYKRDADGIRDLLGTTQFLSQASFIPCPVDTSQVILPPHLEKIRDRLAENIHELWGMNKIELGWTFGKIRDDNKRQHPCLVEFSKLPETEKNYNLQMSTETLKTLLALGCHIAHVNPAAEEDLKKVKLPKNYMMSNGYKPAPLDLSDVKLLPPQEILVDKLAENAHNVWAKDRIKQGWTYGIQQDLKNKRNPRLVPYALLDERTKKSNRDSLREAVRTFVGYGYNIEPSDQELADSAVEKVSIDKIRFFRVERSYAVRSGKWYFEFEVVTGGDMRVGWARPGCRPDVELGADDQAFVFEGNRGQRWHQGSGYFGRTWQPGDVVGCMINLDDASMIFTLNGELLITNKGSELAFADYEIENGFVPICCLGLSQIGRMNLGTDASTFKFYTMCGLQEGFEPFAVNMNRDVAMWFSKRLPTFVNVPKDHPHIEVMRIDGTMDSPPCLKVTHKTFGTQNSNADMIYCRLSMPVECHSSFSHSPCLDSEAFQKRKQMQEILSHTTTQCYYAIRIFAGQDPSCVWVGWVTPDYHLYSEKFDLNKNCTVTVTLGDERGRVHESVKRSNCYMVWGGDIVASSQRSNRSNVDLEIGCLVDLAMGMLSFSANGKELGTCYQVEPNTKVFPAVFLQPTSTSLFQFELGKLKNAMPLSAAIFRSEEKNPVPQCPPRLDVQTIQPVLWSRMPNSFLKVETERVSERHGWVVQCLEPLQMMALHIPEENRCVDILELCEQEDLMRFHYHTLRLYSAVCALGNSRVAYALCSHVDLSQLFYAIDNKYLPGLLRSGFYDLLISIHLASAKERKLMMKNEYIIPITSTTRNIRLFPDESKRHGLPGVGLRTCLKPGFRFSTPCFVVTGEDHQKQSPEIPLESLRTKALSMLTEAVQCSGAHIRDPVGGSVEFQFVPVLKLIGTLLVMGVFDDDDVRQILLLIDPSVFGEHSAGTEEGAEKEEVTQVEEKAVEAGEKAGKEAPVKGLLQTRLPESVKLQMCELLSYLCDCELQHRVEAIVAFGDIYVSKLQANQKFRYNELMQALNMSAALTARKTKEFRSPPQEQINMLLNFQLGENCPCPEEIREELYDFHEDLLLHCGVPLEEEEEEEEDTSWTGKLCALVYKIKGPPKPEKEQPTEEEERCPTTLKELISQTMICWAQEDQIQDSELVRMMFNLLRRQYDSIGELLQALRKTYTISHTSVSDTINLLAALGQIRSLLSVRMGKEEELLMINGLGDIMNNKVFYQHPNLMRVLGMHETVMEVMVNVLGTEKSQIAFPKMVASCCRFLCYFCRISRQNQKAMFEHLSYLLENSSVGLASPSMRGSTPLDVAASSVMDNNELALSLEEPDLEKVVTYLAGCGLQSCPMLLAKGYPDVGWNPIEGERYLSFLRFAVFVNSESVEENASVVVKLLIRRPECFGPALRGEGGNGLLAAMQGAIKISENPALDLPSQGYKREVSTGDDEEEEEIVHMGNAIMSFYSALIDLLGRCAPEMHLIQTGKGEAIRIRSILRSLVPTEDLVGIISIPLKLPSLNKDGSVSEPDMAANFCPDHKAPMVLFLDRVYGIKDQTFLLHLLEVGFLPDLRASASLDTVSLSTTEAALALNRYICSAVLPLLTRCAPLFAGTEHCTSLIDSTLQTIYRLSKGRSLTKAQRDTIEECLLAICNHLRPSMLQQLLRRLVFDVPQLNEYCKMPLKLLTNHYEQCWKYYCLPSGWGSYGLAVEEELHLTEKLFWGIFDSLSHKKYDPDLFRMALPCLSAIAGALPPDYLDTRITATLEKQISVDADGNFDPKPINTMNFSLPEKLEYIVTKYAEHSHDKWACDKSQSGWKYGISLDENVKTHPLIRPFKTLTEKEKEIYRWPARESLKTMLAVGWTVERTKEGEALVQQRENEKLRSVSQANQGNSYSPAPLDLSNVVLSRELQGMVEVVAENYHNIWAKKKKLELESKGGGSHPLLVPYDTLTAKEKFKDREKAQDLFKFLQVNGIIVSRGMKDMELDASSMEKRFAYKFLKKILKYVDSAQEFIAHLEAIVSSGKTEKSPRDQEIKFFAKVLLPLVDQYFTSHCLYFLSSPLKPLSSSGYASHKEKEMVAGLFCKLAALVRHRISLFGNDSTTMVSCLHILAQTLDTRTVMKSGSELVKAGLRAFFENAAEDLEKTSENLKLGKFTHSRTQIKGVSQNINYTTVALLPILTSIFEHVTQHQFGMDLLLGDVQISCYHILCSLYSLGTGKNIYVERQRPALGECLASLAAAIPVAFLEPTLNRYNPLSVFNTKTPRERSILGMPDTVEDMCPDIPQLEGLMKEINDLAESGARYTEMPHVIEVILPMLCNYLSYWWERGPENLPPSTGPCCTKVTSEHLSLILGNILKIINNNLGIDEASWMKRIAVYAQPIISKARPDLLRSHFIPTLEKLKKKAVKTVQEEEQLKADGKGDTQEAELLILDEFAVLCRDLYAFYPMLIRYVDNNRSNWLKSPDADSDQLFRMVAEVFILWCKSHNFKREEQNFVIQNEINNLAFLTGDSKSKMSKAMQVKSGGQDQERKKTKRRGDLYSIQTSLIVAALKKMLPIGLNMCTPGDQELISLAKSRYSHRDTDEEVREHLRNNLHLQEKSDDPAVKWQLNLYKDVLKSEEPFNPEKTVERVQRISAAVFHLEQVEQPLRSKKAVWHKLLSKQRKRAVVACFRMAPLYNLPRQHMHRSINLFLHGYQRFWIETEEYSFEEKLVQDLAKSPKVEEEEEEETEKQPDPLHQIILYFSRNALTERSKLEDDPLYTSYSSMMAKSCQSGEDEEEDEDKEKTFEEKEMEKQKTLYQQARLHERGAAEMVLQMISASKGEMSPMVVETLKLGIAILNGGNAGVQQKMLDYLKEKKDAGFFQSLSGLMQSCSVLDLNAFERQNKAEGLGMVTEEGTLIVRERGEKVLQNDEFTRDLFRFLQLLCEGHNSDFQNFLRTQMGNTTTVNVIISTVDYLLRLQESISDFYWYYSGKDIIDESGQHNFSKALAVTKQIFNSLTEYIQGPCIGNQQSLAHSRLWDAVVGFLHVFANMQMKLSQDSSQIELLKELLDLLQDMVVMLLSLLEGNVVNGTIGKQMVDTLVESSTNVEMILKFFDMFLKLKDLTSSDTFKEYDPDGKGIISKKEFQKAMEGQKQYTQSEIDFLLSCAEADENDMFNYVDFVDRFHEPAKDIGFNVAVLLTNLSEHMPNDSRLKCLLDPAESVLNYFEPYLGRIEIMGGAKKIERVYFEISESSRTQWEKPQVKESKRQFIFDVVNEGGEQEKMELFVNFCEDTIFEMQLASQISESDSADRPEEEEEDEDSSYVLEIAGEEEEDGSLEPASAFAMACASVKRNVTDFLKRATLKNLRKQYRNVKKMTAKELVKVLFSFFWMLFVGLFQLLFTILGGIFQILWSTVFGGGLVEGAKNIRVTKILGDMPDPTQFGIHDDTMEAERAEVMEPGITTELVHFIKGEKGDTDIMSDLFGLHPKKEGSLKHGPEVGLGDLSEIIGKDEPPTLESTVQKKRKAQAAEMKAANEAEGKVESEKADMEDGEKEDKDKEEEQAEYLWTEVTKKKKRRCGQKVEKPEAFTANFFKGLEIYQTKLLHYLARNFYNLRFLALFVAFAINFILLFYKVTEEPLEEETEDVANLWNSFNDEEEEEAMVFFVLQESTGYMAPTLRALAIIHTIISLVCVVGYYCLKVPLVVFKREKEIARKLEFDGLYITEQPSEDDIKGQWDRLVINTPSFPNNYWDKFVKRKVINKYGDLYGAERIAELLGLDKNALDFSPVEETKAEAASLVSWLSSIDMKYHIWKLGVVFTDNSFLYLAWYTTMSVLGHYNNFFFAAHLLDIAMGFKTLRTILSSVTHNGKQLVLTVGLLAVVVYLYTVVAFNFFRKFYNKSEDDDEPDMKCDDMMTCYLFHMYVGVRAGGGIGDEIEDPAGDPYEMYRIVFDITFFFFVIVILLAIIQGLIIDAFGELRDQQEQVREDMETKCFICGIGNDYFDTTPHGFETHTLQEHNLANYLFFLMYLINKDETEHTGQESYVWKMYQERCWDFFPAGDCFRKQYEDQLG

SEQ ID NO: 23386 - protein, 335 aa, Homo sapiens
MSVKWTSVILLIQLSFCFSSGNCGKVLVWAAEYSHWMNIKTILDELIQRGHEVTVLASSASILFDPNNSSALKIEIYPTSLTKTELENFIMQQIKRWSDLPKDTFWLYFSQVQEIMSIFGDITRKFCKDVVSNKKFMKKVQESRFDVIFADAIFPCSELLAELFNIPFVYSLSFSPGYTFEKHSGGFIFPPSYVPVVMSELTDQMTFMERVKNMIYVLYFDFWFEIFDMKKWDQFYSEVLGRPTTLSETMGKADVWLIRNSWNFQFPYPLLPNVDFVGGLHCKPAKPLPKEMEDFVQSSGENGVVVFSLGSMVSNMTEERANVIASALAQIPQKI

SEQ ID NO: 23387 - protein, 152 aa, Homo sapiens [sequence omitted]

SEQ ID NO: 23388 - protein, 3354 aa, Homo sapiens
MGRHVATSCHVAWLLVLISGCWGQVNRLPFFTNHFFDTYLLISEDTPVGSSVTQLLAQDMDNDPLVFGVSGEEASRFFAVEPDTGVVWLRQPLDRETKSEFTVEFSVSDHQGVITRKVNIQVGDVNDNAPTFHNQPYSVRIPENTPVGTPIFIVNATDPDLGAGGSVLYSFQPPSQFFAIDSARGIVTVIRELDYETTQAYQLTVNATDQDKTRPLSTLANLAIIITDVQDMDPIFINLPYSTNIYEHSPPGTTVRIITAIDQDKGRPRGIGYTIVSGNTNSIFALDYISGVLTLNGLLDRENPLYSHGFILTVKGTELNDDRTPSDATVTTTFNILVIDINDNAPEFNSSEYSVAITELAQVGFALPLFIQVVDKDETQGLNSMFEVYLVGNNSHHFIISPTSVQGKADIRIRVAIPLDYETVDRYDFDLFANESVPDHVGYAKVKITLINENDNRPIFSQPLYNISLYENVTVGTSVLTVLATDNDAGTFGEVSYFFSDDPDRFSLDKDTGLIMLIARLDYELIQRFTLTIIARDGGGEETTGRVRINVLDVNDNVPTFQKDAYVGALRENEPSVTQLVRLRATDEDSPPNNQITYSIVSASAFGSYFDISLYEGYGVISVSRPLDYEQISNGLIYLTVMAMDAGNPPLNSTVPVTIEVFDENDNPPTFSKPAYFVSVVENIMAGATVLFLNATDLDRSREYGQESIIYSLEGSTQFRINARSGEITTTSLLDRETKSEYILIVRAVDGGVGHNQKTGIATVNITLLDINDNHPTWKDAPYYINLVEMTPPDSDVTTVVAVDPDLGENGTLVYSIQPPNKFYSLNSTTGKIRTTHAMLDRENPDPHEAELMRKIVVSVTDCGRPPLKATSSATVFVNLLDLNDNDPTFQNLPFVAEVLEGIPAGVSIYQVVAIDLDEGLNGLVSYRMPVGMPRMDFLINSSSGVVVTTTELDRERIAEYQLRVVASDAGTPTKSSTSTLTIHVLDVNDETPTFFPAVYNVSVSEDVPREFRVVWLNCTDNDVGLNAELSYFITGGNVDGKFSVGYRDAVVRTVVGLDRETTAAYMLILEAIDNGPVGKRHTGTATVFVTVLDVNDNRPIFLQSSYEASVPEDIPEGHSILQLKATDADEGEFGRVWYRILHGNHGNNFRIHVSNGLLMRGPRPLDRERNSSHVLIVEAYNHDLGPMRSSVRVIVYVEDINDEAPVFTQQQYSRLGLRETAGIGTSVIVVQATDRDSGDGGLVNYRILSGAEGKFEIDESTGLIITVNYLDYETKTSYMMNVSATDQAPPFNQGFCSVYITLLNELDEAVQFSNASYEAAILENLALGTEIVRVQAYSIDNLNQITYRFNAYTSTQAKALFKIDAITGVITVQGLVDREKGDFYTLTVVADDGGPKVDSTVQVYITVLDENDNSPRFDFTSDSAVSIPEDCPVGQRVATVKAWDPDAGSNGQVVFSLASGNIAGAFEIVTTNDSIGEVFVARPLDREELDHYILQVVASDRGTPPRKKDHILQVTILDINDNPPVIESPFGYNVSVNENVGGGTAVVQVRATDRDIGINSVLSYYITEGNKDMAFRMDRISGEIATRPAPPDRERQSFYHLVATVEDEGTPTLSATTHVYVTIVDENDNAPMFQQPHYEVLLDEGPDTLNTSLITIQALDLDEGPNGTVTYAIVAGNIVNTFRIDRHMGVITAAKELDYEISHGRYTLIVTATDQCPILSHRLTSTTTVLVNVNDINDNVPTFPRDYEGPFEVTEGQPGPRVWTFLAHDRDSGPNGQVEYSIMDGDPLGEFVISPVEGVLRVRKDVELDRETIAFYNLTICARDRGMPPLSSTMLVGIRVLDINDNDPVLLNLPMNITISENSPVSSFVAHVLASDADSGCNARLTFNITAGNRERAFFINATTGIVTVNRPLDRERIPEYKLTISVKDNPENPRIARRDYDLLLIFLSDENDNHPLFTKSTYQAEVMENSPAGTPLTVLNGPILALDADQDIYAVVTYQLLGAQSGLFDINSSTGVVTVRSGVIIDREAFSPPILELLLLAEDIGLLNSTAHLLITILDDNDNRPTFSPATLTVHLLENCPPGFSVLQVTATDEDSGLNGELVYRIEAGAQDRFLIHLVTGVIRVGNATIDREEQESYRLTVVATDRGTVPLSGTAIVTILIDDINDSRPEFLNPIQTVSVLESAEPGTVIANITAIDHDLNPKLEYHIVGIVAKDDTDRLVPNQEDAFAVNINTGSVMVKSPMNRELVATYEVTLSVIDNASDLPERSVSVPNAKLTVNVLDVNDNTPQFKPFGITYYMERILEGATPGTTLIAVAAVDPDKGLNGLVTYTLLDLVPPGYVQLEDSSAGKVIANRTVDYEEVHWLNFTVRASDNGSPPRAAEIPVYLEIVDINDNNPIFDQPSYQEAVFEDVPVGTIILTVTATDADSGNFALIEYSLGDGESKFAINPTTGDIYVLSSLDREKKDHYILTALAKDNPGDVASNRRENSVQVVIQVLDVNDCRPQFSKPQFSTSVYENEPAGTSVITMMATDQDEGPNGELTYSLEGPGVEAFHVDMDSGLVTTQRPLQSYEKFSLTVVATDGGEPPLWGTTMLLVEVIDVNDNRPVFVRPPNGTILHIREEIPLRSNVYEVYATDKDEGLNGAVRYSFLKTAGNRDWEFFIIDPISGLIQTAQRLDRESQAVYSLILVASDLGQPVPYETMQPLQVALEDIDDNEPLFVRPPKGSPQYQLLTVPEHSPRGTLVGNVTGAVDADEGPNAIVYYFIAAGNEEKNFHLQPDGCLLVLRDLDREREAIFSFIVKASSNRSWTPPRGPSPTLDLVADLTLQEVRVVLEDINDQPPRFTKAEYTAGVATDAKVGSELIQVLALDADIGNNSLVFYSILAIHYFRALANDSEDVGQVFTMGSMDGILRTFDLFMAYSPGYFVVDIVARDLAGHNDTAIIGIYILRDDQRVKIVINEIPDRVRGFEEEFIHLLSNITGAIVNTDNVQFHVDKKGRVNFAQTELLIHVVNRDTNRILDVDRVIQMIDENKEQLRNLFRNYNVLDVQPAISVRLPDDMSALQMAIIVLAILLFLAAMLFVLMNWYYRTVHKRKLKAIVAGSAGNRGFIDIMDMPNTNKYSFDGANPVWLDPFCRNLELAAQAEHEDDLPENLSEIADLWNSPTRTHGTFGREPAAVKPDDDRYLRAAIQEYDNIAKLGQIIREGPIKGSLLKVVLEDYLRLKKLFAQRMVQKASSCHSSISELIQTELDEEPGDHSPGQGSLRFRHKPPVELKGPDGIHVVHGSTGTLLATDLNSLPEEDQKGLGRSLETLTAAEATAFERNARTESAKSTPLHKLRDVIMETPLEITEL

SEQ ID NO: 23389 - protein, 411 aa, Homo sapiens
MTRPAFQPPATPAKHSSSTSSKGAKASNPEPSFKANENGLPPSSIFLSPNEAFRSPPIPYPRSYLPYPAPEGIAVSPLSLHGKGPVYPHPVLLPNGSLFPGHLAPKPGLPYGLPTGRPEFVTYQDALGLGMVHPMLIPHTPIEITKEEKPERRSRSHERARYEDPTLRNRFSEILETSSTKLHPDVPTDKNLKPNPNWNQGKTVVKSDKLVYVDLLREEPDAKTDTNVSKPSFAAESVGQSAEPPKPSVEPALQQHRDFIALREELGRISDFHETYTFKQPVFTVSKDSVLAGTNKENLGLPVSTPFLEPPLGSDGPAVTFGKTQEDPKPFCVGSAPPSVDVTPTYTKDGADEAESNDGKVLKPKPSKLAKRIANSAGYVGDRFKCVTTELYADSSQLSREQRALQVSPPT

SEQ ID NO: 23390 - protein, 586 aa, Homo sapiens
MKRHEMVDEPPGMCPHFAQDLWPEQGMEDSFQKAILRRYGKYGHENLQLRKGCKSVDEYKVNKEGYNGLNQCFTTAQSKVFQCDKYLKVFYKFLNSNRPKIRHTEKKSFKCKKRVKLFCMLSHKTQHKSIYHREKSYKCKECGKTFNWSSTLTNHRKIYTEEKPYKCEEYNKSPKQLSTLTTHEIIHAGEKLYKCEECGEAFNRSSNLTTHKIIHTGEKPYKCEECGKAFIWSSTLTEHKKIHTRKKPYKCEECGKAFIWSSTLTRHKRMHTGEKPYKCEECGKAFSQSSTLTTHKIIHTGEKRYKCLECGKAFKQLSTLTTHKIIHVGEKLYKCEECGKGFNRSSNLTTHKIIHTGEKPYKCEECGKAFIWSSTLTKHKRIHTREKPYKCEECGKAFIWSSTLTRHKRMHTGEKPYKCEECGKSFSQSSTLTTHKIIHTGEKPYKCEECGKAFNWSSTLTKHKIIHTEEKPYKCEKCGKAFKQSSILTNHKRIHTGEKPYKCEECGKSFNRSSTFTKHKVIHTGVKPYKCEECGKAFFWSSTLTKHKRIHTGEQPYKWEKFGKAFNRSSHLTTDKITHWREILQV

SEQ ID NO: 23391 - protein, 397 aa, Homo sapiens
MATVIPGPLSLGEDFYREAIEHCRSYNARLCAERSLRLPFLDSQTGVAQNNCYIWMEKTHRGPGLAPGQIYTYPARCWRKKRRLNILEDPRLRPCEYKIDCEAPLKKEGGLPEGPVLEALLCAETGEKKIELKEEETIMDCQKQQLLEFPHDLEVEDLEDDIPRRKNRAKGKAYGIGGLRKRQDTASLEDRDKPYVCDICGKRYKNRPGLSYHYTHTHLAEEEGEENAERHALPFHRKNNHKQFYKELAWVPEAQRKHTAKKAPDGTVIPNGYCDFCLGGSKKTGCPEDLISCADCGRSGHPSCLQFTVNMTAAVRTYRWQCIECKSCSLCGTSENDGASWAGLTPQDQLLFCDDCDRGYHMYCLSPPMAEPPEGSWSCHLCLRHLKEKASAYITLT

SEQ ID NO: 23392 - protein, 537 aa, Homo sapiens
MPRAPHFMPLLLLLLLLSLPHTQAAFPQDPLPLLISDLQGTSPLSWFRGLEDDAVAAELGLDFQRFLTLNRTLLVAARDHVFSFDLQAEEEGEGLVPNKYLTWRSQDVENCAVRGKLTDECYNYIRVLVPWDSQTLLACGTNSFSPVCRSYGITSLQQEGEELSGQARCPFDATQSNVAIFAEGSLYSATAADFQASDAVVYRSLGPQPPLRSAKYDSKWLREPHFVQALEHGDHVYFFFREVSVEDARLGRVQFSRVARVCKRDMGGSPRALDRHWTSFLKLRLNCSVPGDSTFYFDVLQALTGPVNLHGRSALFGVFTTQTNSIPGSAVCAFYLDEIERGFEGKFKEQRSLDGAWTPVSEDRVPSPRPGSCPAHSSPLGRSLQVLRGSREAPPVPGPARGLPGPRPEKGGRREAPVVPEASPRRALLPPGRPERRPFQLLKGAAHGLQRGERPSPLGHELDALQDVSPPPRPAPPAFPTRRVSRGPFSPRVYLLTVFPPVLDRRVGGEKPVSSVSQHFRGSWRTPTPRSLPAKLP

SEQ ID NO: 23393 - protein, 849 aa, Homo sapiens
MSDTRRRVKVYTLNEDRQWDDRGTGHVSSTYVEELKGMSLLVRAESDGSLLLESKINPNTAYQKQQDTLIVWSEAENYDLALSFQEKAGCDEIWEKICQVQGKDPSVEVTQDLIDESEEERFEEMPETSHLIDLPTCELNKLEEIADLVTSVLSSPIRREKLALALENEGYIKKLLQLFQACENLENTEGLHHLYEIIRGILFLNKATLFEVMFSDECIMDVVGCLEYDPALAQPKRHREFLTKTAKFKEVIPITDSELRQKIHQTYRVQYIQDIILPTPSVFEENFLSTLTSFIFFNKVEIVSMLQEDEKFLSEVFAQLTDEATDDDKRRELVNFFKEFCAFSQTLQPQNRDAFFKTLAKLGILPALEIVMGMDDLQVRSAATDIFSYLVEFSPSMVREFVMQEAQQSDDDILLINVVIEQMICDTDPELGGAVQLMGLLRTLIDPENMLATTNKTEKSEFLNFFYNHCMHVLTAPLLTNTSEDKCEKDFFLKHYRYSWSFICTPSHSHSHSTPSSSISQDNIVGSNKNNTICPDNYQTAQLLALILELLTFCVEHHTYHIKNYIMNKDLLRRVLVLMNSKHTFLALCALRFMRRIIGLKDEFYNRYITKGNLFEPVINALLDNGTRYNLLNSAVIELFEFIRVEDIKSLTAHIVENFYKALESIEYVQTFKGLKTKYEQEKDRQNQKLNSVPSILRSNRFRRDAKALEEDEEMWFNEDEEEEGKAVVAPVEKPKPEDDFPDNYEKFMETKKAKESEDKENLPKRTSPGGFKFTFSHSASAANGTNSKSVVAQIPPATSNGSSSKTTNLPTSVTATKGSLVGLVDYPDDEEEDEEEESSPRKRPRLGS

SEQ ID NO: 23394 - protein, 1874 aa, Homo sapiens
MECLTRAEADIVLLVDGSWSIGRANFRTVRSFISRIVEVFDIGPKRVQIALAQYSGDPRTEWQLNAHRDKKSLLQAVANLPYKGGNTLTGMALNFIRQQNFRTQAGMRPRARKIGVLITDGKSQDDVEAPSKKLKDEGVELFAIGIKNADEVELKMIATDPDDTHAYNVADFESLSRIVDDLTINLCNSVKGPGDLEAPSNLVISERTHRSFRVSWTPPSDSVDRYKVEYYPVSGGKRQEFYVSRMETSTVLKDLKPETEYVVNVYSVVEDEYSEPLKGTEKTLPVPVVSLNIYDVGPTTMHVQWQPVGGATGYILSYKPVKDTEPTRPKEVRLGPTVNDMQLTDLVPNTEYAVTVQAVLHDLTSEPVTVREVTLPLPRPQDLKLRDVTHSTMNVFWEPVPGKVRKYIVRYKTPEEDVKEVEVDRSETSTSLKDLFSQTLYTVSVSAVHDEGESPPVTAQETTRPVPAPTNLKITEVTSEGFRGTWDHGASDVSLYRITWAPFGSSDKMETILNGDENTLVFENLNPNTIYEVSITAIYPDESESDDLIGSERTLPILTTQAPKSGPRNLQVYNATSNSLTVKWDPASGRVQKYRITYQPSTGEGNEQTTTIGGRQNSVVLQKLKPDTPYTITVSSLYPDGEGGRMTGRGKTKPLNTVRNLRVYDPSTSTLNVRWDHAEGNPRQYKLFYAPAAGGPEELVPIPGNTNYAILRNLQPDTSYTVTVVPVYTEGDGGRTSDTGRTLMRGLARNVQVYNPTPNSLDVRWDPAPGPVLQYRVVYSPVDGTRPSESIVVPGNTRMVHLERLIPDTLYSVNLVALYSDGEGNPSPAQGRTLPRSGPRNLRVFGETTNSLSVAWDHADGPVQQYRIIYSPTVGDPIDEYTTVPGRRNNVILQPLQPDTPYKITVIAVYEDGDGGHLTGNGRTVGLLPPQNIHISDEWYTRFRVSWDPSPSPVLGYKIVYKPVGSNEPMEAFVGEMTSYTLHNLNPSTTYDVNVYAQYDSGLSVPLTDQGTTLYLNVTDLKTYQIGWDTFCVKWSPHRAATSYRLKLSPADGTRGQEITVRGSETSHCFTGLSPDTDYGVTVFVQTPNLEGPGVSVKEHTTVKPTEAPTEPPTPPPPPTIPPARDVCKGAKADIVFLTDASWSIGDDNFNKVVKFIFNTVGGFDEISPAGIQVSFVQYSDEVKSEFKLNTYNDKALALGALQNIRYRGGNTRTGKALTFIKEKVLTWESGMRKNVPKVLVVVTDGRSQDEVKKAALVIQHSRFSVFVVGVADVDYNELANIASKPSERHVFIVDDFESFEKIEDNLITFVCETATSSCPLIYLDGYTSPGFKMLEAYNLTEKNFASVQGVSLESGSFPSYSAYRIQKNAFVNQPTADLHPNGLPPSYTIILLFRLLPETPSDPFAIWQITDRDYKPQVGVIADPSSKTLSFFNKDTRGEVQTVTFDTEEVKTLFYGSFHKVHIVVTSKSVKIYIDCYEIIEKDIKEAGNITTDGYEILGKLLKGERKSAAFQIQSFDIVCSPVWTSRDRCCDIPSRRDEGKCPAFPNSCTCTQDSVGPPGPPGPAGGPGAKGPRGERGISGAIGPPGPRGDIGPPGPQGPPGPQGPNGLSIPGEQGRQGMKGDAGEPGLPGRTGTPGLPGPPGPMGPPGDRGFTGKDGAMGPRGPPGPPGSPGSPGVTGPSGKPGKPGDHGRPGPSGLKGEKGDRGDIASQNMMRAVARQVCEQLISGQMNRFNQMLNQIPNDYQSSRNQPGPPGPPGPPGSAGARGEPGPGGRPGFPGTPGMQGPPGERGLPGEKGERGTGSSGPRGLPGPPGPQGESRTGPPGSTGSRGPPGPPGRPGNSGIRGPPGPPGYCDSSQCASIPYNGQGYPGSG

SEQ ID NO: 23395 - protein, 126 aa, Homo sapiens; identical to SEQ ID NO: 4990

SEQ ID NO: 23396 - protein, 313 aa, Homo sapiens
METANYTKVTEFVLTGLSQTPEVQLVLFVIFLSFYLFILPGNILIICTISLDPHLTSPMYFLLANLAFLDIWYSSITAPEMLIDFFVERKIISFDGCIAQLFFLHFAGASEMFLLTVMAFDLYTAICRPLHYATIMNQRLCCILVALSWRGGFIHSIIQVALIVRLPFCGPNELDSYFCDITQVVRIACANTFPEELVMICSSGLISVVCLIALLMSYAFLLALFKKLSGSGENTNRAMSTCYSHITIVVLMFGPSIYIYARPFDSFSLDKVVSVFNTLIFPLRNPIIYTLRNKEVKAAMRKLVTKYILCKEK

SEQ ID NO: 23397 - protein, 450 aa, Homo sapiens
MSEEPKEKNAKPAHRKRKGKKSDANASYLRAARAGHLEKALDYIKNGVDINICNQNGLNALHLASKEGHVEVVSELLQREANVDAATKKGNTALHIASLAGQAEVVKVLVTNGANVNAQSQNGFTPLYMAAQENHLEVVKFLLDNGASQSLATEDGFTPLAVALQQGHDQVVSLLLENDTKGKVRLPALHIAARKDDTKAAALLLQNDNNADVESKSGFTPLHIAAHYGNINVATLLLNRAAAVDFTARNDITPLHVASKRGNANMVKLLLDRGAKIDAKTRDGLTPLHCGARSGHEQVVEMLLDRAAPILSKTKNGLSPLHMATQGDHLNCVQLLLQHNVPVDDVTNDYLTALHVAAHCGHYKVAKVLLDKKANPNAKALNGFTPLHIACKKNRIKVMELLLKHGASIQAVTESGLTPIHVAAFMGHVNIVSQLMHHGASPNTTNVSCS

SEQ ID NO: 23398 - protein, 2332 aa, Homo sapiens
MKKVPIKPEQPEKLRAFNISTHSFSLHWSLPSGHVERYQVDLVPDSGFVTIRDLGGGEYQVDVSNVVPGTRYDITISSISTTYTSPVTRIVTTNVTKPGPPVFLAGERVGSAGILLSWNTPPNPNGRIISYIVKYKEVCPWMQTVYTQVRSKPDSLEVLLTNLNPGTTYEIKVAAENSAGIGVFSDPFLFQTAESAPGKVVNLTVEAYNASAVKLIWYLPRQPNGKITSFKISVKHARSGIVVKDVSIRVEDILTGKLPECNENSESFLWSTASPSPTLGRVTPPSRTTHSSSTLTQNEISSVWKEPISFVVTHLRPYTTYLFEVSAATTEAGYIDSTIVRTPESVPEGPPQNCVTGNITGKSFSILWDPPTIVTGKFSYRVELYGPSGRILDNSTKDLKFAFTNLTPFTMYDVYIAAETSAGTGPKSNISVFTPPDVPGAVFDLQLAEVESTQVRITWKKPRQPNGIINQYRVKVLVPETGIILENTLLTGNNEYINDPMAPEIVNIVEPMVGLYEGSAEMSSDLHSLATFIYNSHPDKNFPARNRAEDQTSPVVTTRNQYITDIAAEQLSYVIRRLVPFTEHMISVSAFTIMGEGPPTVLSVRTRQQVPSSIKIINYKNISSSSILLYWDPPEYPNGKITHYTIYAMELDTNRAFQITTIDNSFLITGLKKYTKYKMRVAASTHVGESSLSEENDIFVRTSEDEPESSPQDVEVIDVTADEIRLKWSPPEKPNGIIIAYEVLYKNIDTLYMKNTSTTDIILRNLRPHTLYNISVRSYTRFGHGNQVSSLLSVRTSETVPDSAPENITYKNISSGEIELSFLPPSSPNGIIQKYTIYLKRSNGNEERTINTTSLTQNIKVLKKYTQYIIEVSASTLKGEGVRSAPISILTEEDAPDSPPQDFSVKQLSGVTVKLSWQPPLEPNGIILYYTVYVWNRSSLKTINVTETSLELSDLDYNVEYSAYVTASTRFGDGKTRSNIISFQTPEGAPSDPPKDVYYANLSSSSIILFWTPPSKPNGIIQYYSVYYRNTSGTFMQNFTLHEVTNDFDNMTVSTIIDKLTIFSYYTFWLTASTSVGNGNKSSDIIEVYTDQDIPEGFVGNLTYESISSTAINVSWVPPAQPNGLVFYYVSLILQQTPRHVRPPLVTYERSIYFDNLEKYTDYILKITPSTEKGFSDTYTAQLYIKTEEDVPETSPIINTFKNLSSTSVLLSWDPPVKPNGAIISYDLTLQGPNENYSFITSDNYIILEELSPFTLYSFFAAARTRKGLGPSSILFFYTDESVPLAPPQNLTLINCTSDFVWLKWSPSPLPGGIVKVYSFKIHEHETDTIYYKNISGFKTEAKLVGLEPVSTYSIRVSAFTKVGNGNQFSNVVKFTTQESVPDVVQNMQCMATSWQSVLVKWDPPKKANGIITQYMVTVERNSTKVSPQDHMYTFIKLLANTSYVFKVRASTSAGEGDESTCHVSTLPETVPSVPTNIAFSDVQSTSATLTWIRPDTILGYFQNYKITTQLRAQKCKEWESEECVEYQKIQYLYEAHLTEETVYGLKKFRWYRFQVAASTNAGYGNASNWISTKTLPGPPDGPPENVHVVATSPFSISISWSEPAVITGPTCYLIDVKSVDNDEFNISFIKSNEENKTIEIKDLEIFTRYSVVITAFTGNISAAYVEGKSSAEMIVTTLESAPKDPPNNMTFQKIPDEVTKFQLTFLPPSQPNGNIQVYQALVYREDDPTAVQIHNLSIIQKTNTFVIAMLEGLKGGHTYNISVYAVNSAGAGPKVPMRITMDIKAPARPKTKPTPIYDATGKLLVTSTTITIRMPICYYSDDHGPIKNVQVLVTETGAQHDGNVTKWYDAYFNKARPYFTNEGFPNPPCTEGKTKFSGNEEIYIIGADNACMIPGNEDKICNGPLKPKKQYLFKFRATNIMGQFTDSDYSDPVKTLGEGLSERTVEIILSVTLCILSIILLGTAIFAFARIRQKQKEGGTYSPQDAEIIDTKLKLDQLITVADLELKDERLTRPISKKSFLQHVEELCTNNNLKFQEEFSELPKFLQDLSSTDADLPWNRAKNRFPNIKPYNNNRVKLIADASVPGSDYINASYISGYLCPNEFIATQGPLPGTVGDFWRMVWETRAKTLVMLTQCFEKGRIRCHQYWPEDNKPVTVFGDIVITKLMEDVQIDWTIRDLKIERHGDCMTVRQCNFTAWPEHGVPENSAPLIHFVKLVRASRAHDTTPMIVHCSAGVGRTGVFIALDHLTQHINDHDFVDIYGLVAELRSERMCMVQNLAQYIFLHQCILDLLSNKGSNQPICFVNYSALQKMDSLDAMEGDVELEWEETTM

SEQ ID NO: 23399 - protein, 538 aa, Homo sapiens
MDVDKELGMESVKAGASGKPEMRLGTQEETSEGDANESSLLVLSSNVPLLALEFLEIAQAKEKAFLPMVSHTFHMRTEESDASQEGDDLPKSSANTSHPKQDDSPKSSEETIQPKEGDIPKAPEETIQSKKEDLPKSSEKAIQPKESNIPKSSAKPIQPKLGNIPKASVKPSQPKEGDIPKAPEETIQSKKEDLPKSSEEAIQPKEGDIPKSSAKPIQPKLGNIAKTSVKPSQPKESDIPKSPEETIQPKEGDIPKSSAKPIQPKLGNIPKASVKPSQPKEGDISKSPEEAIQPKEGDLPKSLEEAIQPKEGDIPKSLEEAIQPKEGDIPKSPEETIQPKKGDIPKSPEEAIQPKEGDIPKSPKQAIQPKEGDIPKSLEEAIPPKEIDIPKSPEETIQPKEDDSPKSLEEATPSKEGDILKPEEETMEFPEGDKVKVILSKEDFEASLKEAGERLVAVDFSATWCGPCRTIRPFFHALSVKHEDVVFLEVDADNCEEVVRECAIMCVPTFQFYKKEEKVDELCGALKEKLEAVIAELK

SEQ ID NO: 23400 - protein, 732 aa, Homo sapiens
MDPPSLDTAIQHALAGLYPPFEATAPTVLGQVFRLLDSGFQGDGLSFLLDFLIPAKRLCEQVREAACAPYSHCLFLHEGWPLCLRDEVVVHLAPLNPLLLRQGDFYLQVEPQEEQSVCIMIKCLSLDLCTVDKKPVPEPAYPILFTQEWLEAINSDFEGNPLHNCLVASENGIAPVPWTKITSPEFVDDRPQVVNALCQAWGPLPLEALDLSSPQELHQASSPDNQVLPAQSLAKGKGRTYGSKYPGLIKVEQARCGEVAFRMDEVVSQDFEGDYVALLGFSQESRGESPSREAGTSSGCTSGALEEIAGTKETPLFQKILPLSEANEGPSLGNRACTKPESSEERPYNLGFRRKVNLKAPTHNSERPPQGSYMNVLEDALDCASGLRAGVSQEPAASKMQGPLGNPENMVQLRPGPRQASSPRLSPASPAAAASETKIEVKTKERNGRLPKPMPCPSRNTSSPEPPTPGLKFSFLRGQRQPSVTPEKASLQHNGPWKVLCSLYSPKPNRAKSLGKAGTTQTKTSGPATAPSPLTEEKAALPEASAGSPERGPTLEEEPPGPEPRIGALGVKVFRSRIACLPGGRDRAGRPLLLVSTTEGAWEAPWCTVSEVTKLLSYLCTIPRPEDKAKGLAVLIDARRQPPQPGLVSALQATQAQVPASIRAILFLGEKEAALQLQTLPDVQVEVLTSLKALSHHVDPSQLPAVLEGPFPYCHTEWVHFFQVFTVTAFSP

SEQ ID NO: 23401 - protein, 353 aa, Homo sapiens
MAEVLRTLAGKPKCHALRPMILFLIMLVLVLFGYGVLSPRSLMPGSLERGFCMAVREPDHLQRVSLPRMVYPQPKVLTPCRKDVLVTPWLAPIVWEGTFNIDILNEQFRLQNTTIGLTVFAIKKYVAFLKLFLETAEKHFMVGHRVHYYVFTDQPAAVPRVTLGTGRQLSVLEVRAYKRWQDVSMRRMEMISDFCERRFLSEVDYLVCVDVDMEFRDHVGVEILTPLFGTLHPGFYGSSREAFTYERRPQSQAYIPKDEGDFYYLGGFFGGSVQEVQRLTRACHQAMMVDQANGIEAVWHDESHLNKYLLRHKPTKVLSPEYLWDQQLLGWPAVLRKLRFTAVPKNHQAVRNP

SEQ ID NO: 23402 - protein, 308 aa, Homo sapiens
GRVNQTTVSDFLLLGLSEWPEEQPLLFGIFLGMYLVTMVGNLLIILAISSDPHLHTPMYFFLANLSLTDACFTSASIPKMLANIHTQSQIISYSGCLAQLYFLLMFGGLDNCLLAVMAYDRYVAICQPLHYSTSMSPQLCALMLGVCWVLTNCPALMHTLLLTRVAFCAQKAIPHFYCDPSALLKLACSDTHVNELMIITMGLLFLTVPLLLIVFSYVRIFWAVFVISSPGGRWKAFSTCGSHLTVVLLFYGSLMGVYLLPPSTYSTERESRAAVLYMVIIPTLNPFIYSLRNRDMKEALGKLFRKRS

SEQ ID NO: 23403 - protein, 742 aa, Homo sapiens
MPAGGKGSHPSSTPQRVPNRLIHEKSPYLLQHAYNPVDWYPWGQEAFDKARKENKPIFLSVGYSTCHWCHMMEEESFQNEEIGRLLSEDFVSVKVDREERPDVDKVYMTFVQATSSGGGWPMNVWLTPNLQPFVGGTYFPPEDGLTRVGFRTVLLRIREQWKQNKNTLLENSQRVTTALLARSEISVGDRQLPPSAATVNNRCFQQLDEGYDEEYGGFAEAPKFPTPVILSFLFSYWLSHRLTQDGSRAQQMALHTLKMMANGGIRDHVGQGFHRYSTDRQWHVPHFEKMLYDQAQLAVAYSQAFQLSGDEFYSDVAKGILQYVARSLSHRSGGFYSAEDADSPPERGQRPKEGAYYVWTVKEVQQLLPEPVLGATEPLTSGQLLMKHYGLTEAGNISPSQDPKGELQGQNVLTVRYSLELTAARFGLDVEAVRTLLNSGLEKLFQARKHRPKPHLDSKMLAAWNGLMVSGYAVTGAVLGQDRLINYATNGAKFLKRHMFDVASGRLMRTCYTGPGGTVEHSNPPCWGFLEDYAFVVRGLLDLYEASQESAWLEWALRLQDTQDKLFWDSQGGGYFCSEAELGAGLPLRLKDDQDGAEPSANSVSAHNLLRLHGFTGHKDWMDKCVCLLTAFSERMRRVPVALPEMVRALSAQQQTLKQIVICGDRQAKDTKALVQCVHSVYIPNKVLILADGDPSSFLSRQLPFLSTLRRLEDQATAYVCENQACSVPITDPCELRKLLHP

SEQ ID NO: 23404 - protein, 323 aa, Homo sapiens
MWATLPLLCAAELCVNSLEKFHFKSWMSKHRKTYSTEEYHHRLQTFASNWRKINAHNNGNHTFKMALNQFSDMSFAEIKHKYLWSEPQNCSATKSNYLRGTGPYPPSVDWRKKGNFVSPVKNQGACGSCWTFSTTGALESAIAIATGKMLSLAEQQLVDCAQDFNNHGCQGGLPSQAFEYILYNKGIMGEDTYPYQGKDGYCKFQPGKAIGFVKDVANITIYDEEAMVEAVALYNPVSFAFEVTQDFMMYRTGIYSSTSCHKTPDKVNHAVLAVGYGEKNGIPYWIVKNSWGPQWGMNGYFLIERGKNMCGLAACASYPIPLV

SEQ ID NO: 23405 - protein, 1609 aa, Homo sapiens
TIEVEEQQEGNDAEAQRREIELLRREGELPLEELLRSLPPQLLEGPSSPSQTPSSHDSDTRDGPEEGAEEEPPQVLEIKPPPSAVTQRNKQPWHPDEDDEEFTANEEEAEDEEDTIAAEEQLEGEVDHAMELSELAREGELSMEELLQQYAGAYAPGSGSSEDEDEDEVDANSSDCEPEGPVEAEEPPQEDSSSQSDSVEDRSEDEEDEHSEEEETSGSSASEESESEESEDAQSQSQADEEEEDDDFGVEYLLARDEEQSEADAGSGPPTPGPTTLGPKKEITDIAAAAESLQPKGYTLATTQVKTPIPLLLRGQLREYQHIGLDWLVTMYEKKLNGILADEMGLGKTIQTISLLAHLACEKGNWGPHLIIVPTSVMLNWEMELKRWCPSFKILTYYGAQKERKLKRQGWTKPNAFHVCITSYKLVLQDHQAFRRKNWRYLILDEAQNIKNFKSQRWQSLLNFNSQRRLLLTGTPLQNSLMELWSLMHFLMPHVFQSHREFKEWFSNPLTGMIEGSQEYNEGLVKRLHKVLRPFLLRRVKVDVEKQMPKKYEHVIRCRLSKRQRCLYDDFMAQTTTKETLATGHFMSVINILMQLRKVCNHPNLFDPRPVTSPFITPGICFSTASLVLRATDVHPLQRIDMGRFDLIGLEGRVSRYEADTFLPRHRLSRRVLLEVATAPDPPPRPKPVKMKVNRMLQPVPKQEGRTVVVVNNPRAPLGPVPVRPPPGPELSAQPTPGPVPQVLPASLMVSASPAGPPLIPASRPPGPVLLPPLQPNSGSLPQVLPSPLGVLSGTSRPPTPTLSLKPTPPAPVRLSPAPPPGSSSLLKPLTVPPGYTFPPAAATTTSTTTATATTTAVPAPTPAPQRLILSPDMQARLPSGEVVSIGQLASLAQRPVANAGGSKPLTFQIQGNKLTLTGAQVRQLAVGQPRPLQRNVVHLVSAGGQHHLISQPAHVALIQAVAPTPGPTPVSVLPSSTPSTTPAPTGLSLPLAANQVPPTMVNNTGVVKIVVRQAPRDGLTPVPPLAPAPRPPSSGLPAVLNPRPTLTPGRLPTPTLGTARAPMPTPTLVRPLLKLVHSPSPEVSASAPGAAPLTISSPLHVPSSLPGPASSPMPIPNSSPLASPVSSTVSVPLSSSLPISVPTTLPAPASAPLTIPISAPLTVSASGPALLTSVTPPLAPVVPAAPGPPSLAPSGASPSASALTLGLATAPSLSSSQTPGHPLLLAPTSSHVPGLNSTVAPACSPVLVPASALASPFPSAPNPAPAQASLLAPASSASQALATPLAPMAAPQTAILAPSPAPPLAPLPVLAPSPGAAPVLASSQTPVPVMAPSSTPGTSLASASPVPAPTPVLAPSSTQTMLPAPVPSPLPSPASTQTLALAPALAPTLGGSSPSQTLSLGTGNPQGPFPTQTLSLTPASSLVPTPAQTLSLAPGPPLGPTQTLSLAPAPPLAPASPVGPAPAHTLTLAPASSSASLLAPASVQTLTLSPAPVPTLGPAAAQTLALAPASTQSPASQASSLVVSASGAAPLPVTMVSRLPVSKDEPDTLTLRSGPPSPPSTATSFGGPRPRRQPPPPPRSPFYLVSFTSSRGNRKLSFFGVLVGWMEQ

SEQ ID NO: 23406 - protein, 814 aa, Homo sapiens
MGNSSGWRGPAGQRRMLFLFLLSLLDQALSEPIRYAIPEELDRGSLVGNLAKDLGFGVGDLPTRNLRVIAEKKFFTVSPENGNLLVSDRIDREEICGKKSTCVLEFEMVAEKPLNFFHVTVLIQDINDNPPTFSQNITELEISELALTGATFALESAQDPDVGVNSLQQYYLSPDPHFSLIQKENLDGSRYPELVLKAPLDREEQPHHHLVLTAVDGGEPSRSCTTQIRVIVADANDNPPVFTQDMYRVNVAENLPAGSSVLKVMAIDMDEGINAEIIYAFINIGKEVRQLFKLDSKTGELTTIGELDFEERDSYTIGVEAKDGGHHTAYCKVQIDISDENDNAPEITLASESQHIQEDAELGTAVALIKTHDLDSGFNGEILCQLKGNFPFKIVQDTKNTYRLVTDGALDREQIPEYNVTITATDKGNPPLSSSKTITLHILDVNDNVPVFHQASYTVHVAENNPPGASIAHVRASDPDLGPNGLVSYYIVASDLEPRELSSYVSVSARSGVVFAQRAFDHEQLRAFELTLQARDQGSPTLSANVSLRVLVDDRNDNAPLVLYPALGPEGSALFDMVPRSAEPGYLVTKVVAVDADSGYNAWLSYHIVQASEPGLFSLGLRTGEVRTARTLGDREAARQRLLVTVRDGGQQPLSATVMLHLIFADSLQEIQPDLSDRPTPSDPQAELQFHLVVALALISVLFLLAVILAISLRLRCSSRPATEGYFQPGVCFKTVPGVLPTYSERTLPYSYNPCAASHSSNTEFKFLNIKAENAAPQDLLCDEASWFESNDNPEMPSNSGNLQKVSFFKPFLP

SEQ ID NO: 23407 - protein, 1035 aa, Homo sapiens
MFPYDSRLDDKKFLYSAPRNKSHIDTCLHAYIFRPEVYQLPICKLKELFEENRKLQQFSPLSDYEGQEEEMNGTKMKFGKRNNSRGEAIISGKQRSSHSLDYDKDRVKELINLIQCRKKSVGGDSDTEDMRSKTVLKRKLEDLPENMRKLAKTSNLSENCHLYEESPQPIGSLGHDADLRRQQQDTCNSGIADIHRLFNWLSETLANARHSDASLTDTVNKALGLSTDDAYEELRQKHEYELNSTPDKKDYEQPTCAKVENAQFKGTQSLLLEVDATSKYSVAISTSEVGTDHKLHLKEDPNLISVNNFEDCSLCPSVPIEHGFRRQQSKSNNVEETEIHWKLIPITDTLKGTTEDDVLTGQVEEQCVPAAEAEPPAVSETTERTVLGEYNLFSRKIEEILKQKNVSYVSTVSTPIFSTQEKMKRLSEFIYSKTSKAGVQEFVDGLHEKLNTIIIKASAKGGNLPPVSPNDSGAKIASNPLERHVIPVSSSDFNNKHLLEPLCSDPLKDTNSDEQHSTSALTEVEMNQPQHATELMVTSDHIVPGDMAREPVEETTKSPSDVNISAQPALSNFISQLEPEVFNSLVKIMKDVQKNTVKFYIHEEEESVLCKEIKEYLIKLGNTECHPEQFLERRSKLDKLLIIIQNEDIAGFIHKIPGLVTLKKLPCVSFAGVDSLDDVKNHTYNELFVSGGFIVSDESILNPEVVTVENLKNFLTFLEELSTPEGKWQWKVHCKFQKKLKELGRLNAKALSLLTLLNVYQKKHLVEILSYHNCDSQTRNAPELDCLIRLQAQNIQQRHIVFLTEKNIKMLSSYTDNGIVVATAEDFMQNFKNLVGYHNSITEENLPQLGANENLESQSALLENDEKDEEDMSLDSGDEISHIEVCSNFHSEIWEKETKGSRGTDQKKNTQIELQSSPDVQNSLLEDKTYLDSEERTSIDIVCSEGENSNSTEQDSYSNFQVYHSQLNMSHQFSHFNVLTHQTFLGTPYALSSSQSQENENYFLSAYTESLDRDKSPPPLSWGKSDSSRPYSQEK

SEQ ID NO: 23408 - protein, 671 aa, Homo sapiens
MPHAFKPGDLVFAKMKGYPHWPARIDDIADGAVKPPPNKYPIFFFGTHETAFLGPKDLFPYDKCKDKYGKPNKRKGFNEGLWEIQNNPHASYSAPPPVSSSDSEAPEANPADGSDADEDDEDRGVMAVTAVTATAASDRMESDSDSDKSSDNSGLKRKTPALKMSVSKRARKASSDLDQASVSPSEEENSESSSESEKTSDQDFTPEKKAAVRAPRRGPLGGRKKKKAPSASDSDSKADSDGAKPEPVAMARSASSSSSSSSSSDSDVSVKKPPRGRKPAEKPLPKPRGRKPKPERPPSSSSSDSDSDEVDRISEWKRRDEARRRELEARRRREQEEELRRLREQEKEEKERRRERADRGEAERGSGGSSGDELREDDEPVKKRGRKGRGRGPPSSSDSEPEAELEREAKKSAKKPQSSSTEPARKPGQKEKRVRPEEKQQAKPVKVERTRKRSEGFSMDRKVEKKKEPSVEEKLQKLHSEIKFALKVDSPDVKRCLNALEELGTLQVTSQILQKNTDVVATLKKIRRYKANKDVMEKAAEVYTRLKSRVLGPKIEAVQKVNKAGMEKEKAEEKLAGEELAGEEAPQEKAEDKPSTDLSAPVNGEATSQKGESAEDKEHEEGRDSEEGPRCGSSEDLHDSVREGPDLDRPGSDRQERERARGDSEALDEES

SEQ ID NO: 23409 - protein, 309 aa, Homo sapiens
NNTNVPDFILTGLSDSEEVQMALFILFLLIYLITMLGNVGMILIIRLDLQLHTPMYFFLTHLSFIDLSYSTVITPKTLANLLTSNYISFMGCFAQMFFFVFLGAAECFLLSSMAYDRYVAICSPLRYPVIMSKRLCCALVTGPYVISFINSFVNVVWMSRLHFCDSNVVRHFFCDTSPILALSCMDTYDIEIMIHILAGSTLMVSLITISASYVSILSTILKINSTSGKQKALSTCASHLLGVTIFYGTMIFTYLKPRKSYSLGRDQVASVFYTIVIPMLNPLIYSLRNKEVKNALIRVMQRIWYVLGL

SEQ ID NO: 23410 - protein, 556 aa, Homo sapiens
MRMSPPSASPPSSSGGRTSSSTTTAGEPFWAGVLFAIRPHPGLSGRIVWTAGCPGEGADGDFAVTHLTKAHLFHDGRVQWTPPAIYKSSCSIDVTFFPFDQQNCTMKFGSWTYDKAKIDLVNMHSRVDQLDFWESGEWVIVDAVGTYNTRKYECCAEIYPDITYAFVIRRLPLFYTINLIIPCLLISCLTVLVFYLPSECGEKITLCISVLLSLTVFLLLITEIIPSTSLVIPLIGEYLLFTMIFVTLSIVITVFVLNVHHRSPRTHTMPTWVRRVFLDIVPRLLLMKRPSVVKDNCRRLIESMHKMASAPRFWPEPEGEPPATSGTQSLHPPSPSFCVPLDVPAEPGPSCKSPSDQLPPQQPLEAEKASPHPSPGPCRPPHGTQAPGLAKARSLSVQHMSSPGEAVEGGVRCRSRSIQYCVPRDDAAPEADGQAAGALASRNTHSAELPPPDQPSPCKCTCKKEPSSVSPSATVKTRSTKAPPPHLPLSPALTRAVEGVQYIADHLKAEDTDFSVKEDWKYVAMVIDRIFLWMFIIVCLLGTVGLFLPPWLAGMI

SEQ ID NO: 23411 - protein, 645 aa, Homo sapiens
MNWGPTGMDLWQLLLTLALAGSSDAFSGSEATAAILSRAPWSLQSVNPGLKTNSSKEPKFTKCRSPERETFSCHWTDEVHHGTKNLGPIQLFYTRRNTQEWTQEWKECPDYVSAGENSCYFNSSFTSIWIPYCIKLTSNGGTVDEKCFSVDEIVQPDPPIALNWTLLNVSLTGIHADIQVRWEAPRNADIQKGWMVLEYELQYKEVNETKWKMMDPILTTSVPVYSLKVDKEYEVRVRSKQRNSGNYGEFSEVLYVTLPQMSQFTCEEDFYFPWLLIIIFGIFGLTVMLFVFLFSKQQRIKMLILPPVPVPKIKGIDPDLLKEGKLEEVNTILAIHDSYKPEFHSDDSWVEFIELDIDEPDEKTEESDTDRLLSSDHEKSHSNLGVKDGDSGRTSCCEPDILETDFNANDIHEGTSEVAQPQRLKGEADLLCLDQKNQNNSPYHDACPATQQPSVIQAEKNKPQPLPTEGAESTHQAAHIQLSNPSSLSNIDFYAQVSDITPAGSVVLSPGQKNKAGMSQCDMHPEMVSLCQENFLMDNAYFCEADAKKCIPVAPHIKVESHIQPSLNQEDIYITTESLTTAAGRPGTGEHVPGSEMPVPDYTSIHIVQSPQGLILNATALPLPDKEFLSSCGYVSTDQLNKIMP

SEQ ID NO: 23412 - protein, 771 aa, Homo sapiens
MNYPGRGSPRSPEHNGRGGGGGAWELGSDARPAFGGGVCCFEHLPGGDPDDGDVPLALLRGEPGLHLAPGTDDHNHHLALDPCLSDENYDFSSAESGSSLRYYSEGESGGGGSSLSLHPPQQPPLVPTNSGGGLYEVDVTQGECYPVYWNQADKIPVMRGQWFIDGTWQPLEEEESNLIEQEHLNCFRGQQMQENFDIEVSKSIDGKDAVHSFKLSRNHVDWHSVDEVYLYSDATTSKIARTVTQKLGFSKASSSGTRLHRGYVEEATLEDKPSQTTHIVFVVHGIGQKMDQGRIIKNTAMMREAARKIEERHFSNHATHVEFLPVEWRSKLTLDGDTVDSITPDKVRGLRDMLNSSAMDIMYYTSPLYRDELVKGLQQELNRLYSLFCSRNPDFEEKGGKVSIVSHSLGCVITYDIMTGWNPVRLYEQLLQKEEELPDERWMSYEERHLLDELYITKRRLKEIEERLHGLKASSMTQTPALKFKVENFFCMGSPLAVFLALRGIRPGNTGSQDHILPREICNRLLNIFHPTDPVAYRLEPLILKHYSNISPVQIHWYNTSNPLPYEHMKPSFLNPAKEPTSVSENEGISTIPSPVTSPVLSRRHYGESITNIGKASILGAASIGKGLGGMLFSRFGRSSTTQSSETSKDSMEDEKKPVASPSATTVGTQTLPHSSSGFLDSAYFRLQESFFNLPQLLFPENVMQNKDNALVELDHRIDFELREGLVESRYWSAVTSHTAYWSSLDVALFLLTFMYKHEHDDDAKPNLDPI

SEQ ID NO: 23413 - protein, 1009 aa, Homo sapiens
MVSKMIIENFEALKSWLSKTLEPICDADPSALAKYVLALVKKDKSEKELKALCIDQLDVFLQKETQIFVEKLFDAVNTKSYLPPPEQPSSGSLKVEFFPHQEKDIKKEEITKEEEREKKFSRRLNHSPPQSSSRYRENRSRDERKKDDRSRKRDYDRNPPRRDSYRDRYNRRRGRSRSYSRSRSRSWSKERLRERDRDRSRTRSRSRTRSRERDLVKPKYDLDRTDPLENNYTPVSSVPSISSGHYPVPTLSSTITVIAPTHHGNNTTESWSEFHEDQVDHNSYVRPPMPKKRCRDYDEKGFCMRGDMCPFDHGSDPVVVEDVNLPGMLPFPAQPPVVEGPPPPGLPPPPPILTPPPVNLRPPVPPPGPLPPSLPPVTGPPPPLPPLQPSGMDAPPNSATSSVPTVVTTGIHHQPPPAPPSLFTAVFVLPDTYDTDGYNPEAPSITNTSRPMYRHRVHAQRPNLIGLTSGDMDLPPREKPPNKSSMRIVVDSESRKRTIGSGEPGVPTKKTWFDKPNFNRTNSPGFQKKVQFGNENTKLELRKVPPELNNISKLNEHFSRFGTLVNLQVAYNGDPEGALIQFATYEEAKKAISSTEAVLNNRFIKVYWHREGSTQQLQTTSPKPLVQQPILPVVKQSVKERLGPVPSSTIEPAEAQSASSDLPQNVTKLSVKDRLGFVSKPSVSATEKVLSTSTGLTKTVYNPAALKAAQKTLLVSTSAVDNNEAQKKKQEALKLQQDVRKRKQEILEKHIETQKMLISKLEKNKTMKSEDKAEIMKTLEVLTKNITKLKDEVKAASPGRCLPKSIKTKTQMQKELLDTELDLYKKMQAGEEVTELRRKYTELQLEAAKRGILSSGRGRGIHSRGRGAVHGRGRGRGRGRGVPGHAVVDHRPRALEISAFTESDREDLLPHFAQYGEIEDCQIDDSSLHAVITFKTRAEAEAAAVHGARFKGQDLKLAWNKPVTNISAVETEEVEPDEEEFQEESLVDDSLLQDDDEEEEDNESRSWRR

SEQ ID NO: 23414 - protein, 1962 aa, Homo sapiens
APGKDEEMAPASTEPPTPEPPIKPRLEELTVTDATPDSLSLSWTVPEGQFDHFLVQYKNGDGQPKATRVPGHEDRVTISGLEPDNKYKMNLYGFHGGQRVGPVSAIGVTAAEEETPSPTEPSMEAPEPPEEPLLGELTVTGSSPDSLSLSWTVPQGRFDSFTVQYKDRDGRPQVVRVGGEESEVTVGGLEPGRKYKMHLYGLHEGRRVGPVSTVGVTAPQEDVDETPSPTEPGTEAPGPPEEPLLGELTVTGSSPDSLSLSWTVPQGRFDSFTVQYKDRDGRPQAVRVGGQESKVTVRGLEPGRKYKMHLYGLHEGRRLGPVSAVGVTEDEAETTQAVPTMTPEPPIKPRLGELTMTDATPDSLSLSWTVPEGQFDHFLVQYRNGDGQPKAVRVPGHEDGVTISGLEPDHKYKMNLYGFHGGQRVGPISVIGVTAAEEETPSPTELSTEAPEPPEEPLLGELTVTGSSPDSLSLSWTIPQGHFDSFTVQYKDRDGRPQVMRVRGEESEVTVGGLEPGRKYKMHLYGLHEGRRVGPVSTVGVTEDEAETTQAVPTTTPEPPNKPRLGELTVTDATPDSLSLSWMVPEGQFDHFLVQYRNGDGQPKVVRVPGHEDGVTISGLEPDHKYKMNLYGFHGGQRVGPISVIGVTAAEEETPAPTEPSTEAPEPPEEPLLGELTVTGSSPDSLSLSWTIPQGRFDSFTVQYKDRDGRPQVVRVRGEESEVTVGGLEPGCKYKMHLYGLHEGQRVGPVSAVGVTAPKDEAETTQAVPTMTPEPPIKPRLGELTVTDATPDSLSLSWMVPEGQFDHFLVQYRNGDGQPKAVRVPGHEDGVTISGLEPDHKYKMNLYGFHGGQRVGPVSAIGVTEEETPSPTEPSTEAPEAPEEPLLGELTVTGSSPDSLSLSWTVPQGRFDSFTVQYKDRDGQPQVVRVRGEESEVTVGGLEPGRKYKMHLYGLHEGQRVGPVSTVGITAPLPTPLPVEPRLGELAVAAVTSDSVGLSWTVAQGPFDSFLVQYRDAQGQPQAVPVSGDLRAVAVSGLDPARKYKFLLFGLQNGKRHGPVPVEARTAPDTKPSPRLGELTVTDATPDSVGLSWTVPEGEFDSFVVQYKDKDGRLQVVPVAANQREVTVQGLEPSRKYRFLLYGLSGRKRLGPISADSTTAPLEKELPPHLGELTVAEETSSSLRLSWTVAQGPFDSFVVQYRDTDGQPRAVPVAADQRTVTVEDLEPGKKYKFLLYGLLGGKRLGPVSALGMTAPEEDTPAPELAPEAPEPPEEPRLGVLTVTDTTPDSMRLSWSVAQGPFDSFVVQYEDTNGQPQALLVDGDQSKILISGLEPSTPYRFLLYGLHEGKRLGPLSAEGTTGLAPAGQTSEESRPRLSQLSVTDVTTSSLRLNWEAPPGAFDSFLLRFGVPSPSTLEPHPRPLLQRELMVPGTRHSAVLRDLRSGTLYSLTLYGLRGPHKADSIQGTARTLSPVLESPRDLQFSEIRETSAKVNWMPPPSRADSFKVSYQLADGGEPQSVQVDGQARTQKLQGLIPGARYEVTVVSVRGFEESEPLTGFLTTVPDGPTQLRALNLTEGFAVLHWKPPQNPVDTYDVQVTAPGAPPLQAETPGSAVDYPLHDLVLHTNYTATVRGLRGPNLTSPASITFTTGLEAPRDLEAKEVTPRTALLTWTEPPVRPAGYLLSFHTPGGQNQEILLPGGITSHQLLGLFPSTSYNARLQAMWGQSLLPPVSTSFTTGGLRIPFPRDCGEEMQNGAGASRTSTIFLNGNRERPLNVFCDMETDGGGWLVFQRRMDGQTDFWRDWEDYAHGFGNISGEFWLGNEALHSLTQAGDYSMRVDLRAGDEAVFAQYDSFHVDSAAEYYRLHLEGYHGTAGDSMSYHSGSVFSARDRDPNSLLISCAVSYRGAWWYRNCHYANLNGLYGSTVDHQGVSWYHWKGFEFSVPFTEMKLRPRNFRSPAGGG

SEQ ID NO: 23415 - protein, 378 aa, Homo sapiens
MKLLHVFLLFLCFHLRFCKVTYTSQEDLVEKKCLAKKYTHLSCDKVFCQPWQRCIEGTCVCKLPYQCPKNGTAVCATNRRSFPTYCQQKSLECLHPGTKFLNNGTCTAEGKFSVSLKHGNTDSEGIVEVKLVDQDKTMFICKSSWSMREANVACLDLGFQQGADTQRRFKLSDLSINSTECLHVHCRGLETSLAECTFTKRRTMGYQDFADVVCYTQKADSPMDDFFQCVNGKYISQMKACDGINDCGDQSDELCCKACQGKGFHCKSGVCIPSQYQCNGEVDCITGEDEVGCAGFASVTQEETEILTADMDAERRRIKSLLPKLSCGVKNRMHIRRKRIVGGKRAQLGGKMKQISLDIFKGLHRVYAILEFCCIILK

SEQ ID NO: 23416 - protein, 396 aa, Homo sapiens
MKWVTFISLLFLFSSAYSRGVFRRDAHKSEVAHRFKDLGEENFKALVLIAFAQYLQQCPFEDHVKLVNEVTEFAKTCVADESAENCDKSLHTLFGDKLCTVATLRETYGEMADCCAKQEPERNECFLQHKDDNPNLPRLVRPEVDVMCTAFHDNEETFLKKYLYETTLEKCCAAADPHECYAKVFDEFKPLVEEPQNLIKQNCELFEQLGEYKFQNALLVRYTKKVPQVSTPTLVEVSRNLGKVGSKCCKHPEAKRMPCAEDYLSVVLNQLCVLHEKTPVSDRVTKCCTESLVNRRPCFSALEVDETYVPKEFNAETFTFHADICTLSEKERQIKKQTALVELVKHKPKATKEQLKAVMDDFAAFVEKCCKADDKETCFAEEGKKLVAASQAALGL

SEQ ID NO: 23417 - protein, 796 aa, Homo sapiens
MSARTPLPTVNERDTENHTSVDGYTEPHIQPTKSSSRQNIPRCRNSITSATDEQPHIGNYRLQKTIGKGNFAKVKLARHVLTGREVAVKIIDKTQLNPTSLQKLFREVRIMKILNHPNIVKLFEVIETEKTLYLVMEYASGGEVFDYLVAHGRMKEKEARAKFRQIVSAVQYCHQKYIVHRDLKAENLLLDGDMNIKIADFGFSNEFTVGNKLDTFCGSPPYAAPELFQGKKYDGPEVDVWSLGVILYTLVSGSLPFDGQNLKELRERVLRGKYRIPFYMSTDCENLLKKLLVLNPIKRGSLEQIMKDRWMNVGHEEEELKPYTEPDPDFNDTKRIDIMVTMGFARDEINDALINQKYDEVMATYILLGRKPPEFEGGESLSSGNLCQRSRPSSDLNNSTLQSPAHLKVQRSISANQKQRRFSDHAGPSIPPAVSYTKRPQANSVESEQKEEWDKDVARKLGSTTVGSKSEMTASPLVGPERKKSSTIPSNNVYSGGSMARRNTYVCERTTDRYVALQNGKDSSLTEMSVSSISSAGSSVASAVPSARPRHQKSMSTSGHPIKVTLPTIKDGSEAYRPGSTTQRVPAASPSAHSISTATPDRTRFPRGSSSRSTFHGEQLRERRSVAYNGPPASPSHETGAFAHARRGTSTGIISKITSKFVRRDPSEGEASGRTDTSRSTSGEPKERDKEEGKDSKPRSLRFTWSMKTTSSMDPNDMMREIRKVLDANNCDYEQKERFLLFCVHGDARQDSLVQWEMEVCKLPRLSLNGVRFKRISGTSIAFKNIASKIANELKL

SEQ ID NO: 23418 - protein, 726 aa, Homo sapiens
MAAVLQQVLERTELNKLPKSVQNKLEKFLADQQSEIDGLKGRHEKFKVESEQQYFEIEKRLSHSQERLVNETRECQSLRLELEKLNNQLKALTEKNKELEIAQDRNIAIQSQFTRTKEELEAEKRDLIRTNERLSQELEYLTEDVKRLNEKLKESNTTKGELQLKLDELQASDVSVKYREKRLEQEKELLHSQNTWLNTELKTKTDELLALGREKGNEILELKCNLENKKEEVSRLEEQMNGLKTSNEHLQKHVEDLLTKLKEAKEQQASMEEKFHNELNAHIKLSNLYKSAADDSEAKSNELTRAVEELHKLLKEAGEANKAIQDHLLEVEQSKDQMEKEMLEKIGRLEKELENANDLLSATKRKGAILSEEELAAMSPTAAAVAKIVKPGMKLTELYNAYVETQDQLLLEKLENKRINKYLDEIVKEVEAKAPILKRQREEYERAQKAVASLSVKLEQAMKEIQRLQEDTDKANKQSSVLERDNRRMEIQVKDLSQQIRVLLMELEEARGNHVIRDEEVSSADISSSSEVISQHLVSYRNIEELQQQNQRLLVALRELGETREREEQETTSSKITELQLKLESALTELEQLRKSRQHQMQLVDSIVRQRDMYRILLSQTTGVAIPLHASSLDDVSLASTPKRPSTSQTVSTPAPVPVIESTEAIEAKAALKQLQEIFENYKKEKAENEKIQNEQLEKLQEQVTDLRSQNTKISTQLDFASKRYL

SEQ ID NO: 23419 - protein, 670 aa, Homo sapiens [sequence omitted]

SEQ ID NO: 23420 - protein, 196 aa, Homo sapiens
MASQKQMEVVTKGTGFRRRPKTITYTPGTCELLRGGDALPLQCSPTSSQRVLPSKQIASPIYLPPILAARPHLRPANMCQANGAYSREQFKPQATRDLEKEKQRLQNIFATGKDMEERKRKAPPARQKAPAPELDRFEELVKEIQERKEFLADMEALGQGKQYRGIILAEISQKLREMEDIDHRRSEELRKGLATT

SEQ ID NO: 23421 - protein, 418 aa, Homo sapiens [sequence omitted]

SEQ ID NO: 23422 - protein, 1374 aa, Homo sapiens
MLLSVSTPLPAVTQTRGATETASQGHLDLTQLIGVPLPSSVSFVTGYGGFPAYSFGPGANVGRPARTLIPSTFFRDFAISVVVKPSSTRGGVLFAITDAFQKVIYLGLRLSGVEDGHQRIILYYTEPGSHVSQEAAAFSVPVMTHRWNRFAMIVQGEEVTLLVNCEEHSRIPFQRSSQALAFESSAGIFMGNAGATGLERFTGSLQQLTVHPDPRTPEELCDPEESSASGETSGLQEADGVAEILEAVTYTQASPKEAKVEPINTPPTPSSPFEDMELSGEPVPEGTLETTNMSIIQHSSPKQGKGAILNDTLEGVHSVDGDPITDSGSGAGAFLDIAEEKNLAATAAGLAEVPISTAGEAEASSVPTGGPTLSMSTENPEEGVTPGPDNEERLAATAAGEAEALASMPGEVEASGVAPGELDLSMSAQSLGEEATVGPSSEDSLTTAAAATEVSLSTFEDEEASGVPTDGLAPLTATMAPERAVTSGPGDEEDLAAATTEEPLITAGGEESGSPPPDGPPLPLPTVAPERWITPAQREHVGMKGQAGPKGEKGDAGEELPGPPEPSGPVGPTAGAEAEGSGLGWGSDVGSGSGDLVGSEQLLRGPPGPPGPPGLPGIPGKPGTDVFMGPPGSPGEDGPAGEPGPPGPEGQPGVDGATGLPGMKGEKGARGPNGSVGEKGDPGNRGLPGPPGKKGQAGPPGVMGPPGPPGPPGPPGPGCTMGLGFEDTEGSGSTQLLNEPKLSRPTAAIGLKGEKGDRGPKGERGMDGASIVGPPGPRGPPGHIKVLSNSLINITHGFMNFSDIPELVGPPGPDGLPGLPGFPGPRGPKGDTGLPGFPGLKGEQGEKGEPGAILTEDIPLERLMGKKGEPGMHGAPGPMGPKGPPGHKGEFGLPGRPGRPGLNGLKGTKGDPGVIMQGPPGLPGPPGPPGPPGAVINIKGAIFPIPVRPHCKMPVDTAHPGSPELITFHGVKGEKGSWGLPGSKGEKGDQGAQGPPGPPLDLAYLRHFLNNLKGENGDKGFKGEKGEKGDINGSFLMSGPPGLPGNPGPAGQKGETVVGPQGPPGAPGLPGPPGFGRPGDPGPPGPPGPPGPPAILGAAVALPGPPGPPGQPGLPGSRNLVTAFSNMDDMLQKAHLVIEGTFIYLRDSTEFFIRVRDGWKKLQLGELIPIPADSPPPPALSSNPHQLLPPPNPISSANYEKPALHLAALNMPFSGDIRADFQCFKQARAAGLLSTYRAFLSSHLQDLSTIVRKAERYSLPIVNLKGQVLFNNWDSIFSGHGGQFNMHIPIYSFDGRDIMTDPSWPQKVIWHGSSPHGVRLVDNYCEAWRTADTAVTGLASPLSTGKILDQKAYSCANRLIVLCIENSFMTDARK

SEQ ID NO: 23423 - protein, 220 aa, Homo sapiens
MFQQFQASCLVLFFLVGFAQQTLKPQNRKVDCNKGVTGTIYEYGALTLNGEEYIQFKQFAGKHVLFVNVAAYGLAAQYPELNALQEELKNFGVIVLAFPCNQFGKQEPGTNSEILLGLKYVCPGSGFVPSFQLFEKGDVNGEKEQKVFTFLKNSCPPTSDLLGSSSQLFWEPMKVHDIRWNFEKFLVGPDGVPVMHWFHQAPVSTVKSDILEYLKQFNTH

SEQ ID NO: 23424 - protein, 3591 aa, Homo sapiens
MRLISIAPGPRWQVQSHHPRSAGQNCTFQLHGPNGTVESPGFPYGYPNYANCTWTITAEEQHRIQLVFQSFALEEDFDVLSVFDGPPQPENLRTRLTGFQLPATIVSAATTLSLRLISDYAVSAQGFHATYEVLPSHTCGNPGRLPNGIQQGSTFNLGDKVRYSCNLGFFLEGHAVLTCHAGSENSATWDFPLPSCRADDACGGTLRGQSGIISSPHFPSEYHNNADCTWTILAELGDTIALVFIDFQLEDGYDFLEVTGTEGSSLWFTGASLPAPVISSKNWLRLHFTSDGNHRQRGFSAQYQVKKQIELKSRGVKLMPSKDNSQKTSVLTQVGVSQGHNMCPDPGIPERGKRLGSDFRLGSSVQFTCNEGYDLQGSKRITCMKVSDMFAAWSDHRPVCRARMCDAHLRGPSGIITSPNFPIQYDNNAHCVWIITALNPSKVIKLAFEEFDLERGYDTLTVGDGGQDGDQKTVLYILTGTSVPDLIVSTNHQMWLLFQTDGSGSSLGFKASYEEIEQGSCGDPGIPAYGRREGSRFHHGDTLKFECQPAFELVGQKAITCQKNNQWSAKKPGCVFSCFFNFTSPSGVVLSPNYPEDYGNHLHCVWLILARPESRIHLAFNDIDVEPQFDFLVIKDGATAEAPVLGTFSGNQLPSSITSSGHVARLEFQTDHSTGKRGFNITFTTFRHNECPDPGVPVNGKRFGDSLQLGSSISFLCDEGFLGTQGSETITCVLKEGSVVWNSAVLRCEAPCGGHLTSPSGTILSPGWPGFYKDALSCAWVIEAQPGYPIKITFDRFKTEVNYDTLEVRDGRTYSAPLIGVYHGTQVPQFLISTSNYLYLLFSTDKSHSDIGFQLRYETITLQSDHCLDPGIPVNGQRHGNDFYVGALVTFSCDSGYTLSDGEPLECEPNFQWSRALPSCEALCGGFIQGSSGTILSPGFPDFYPNNLNCTWIIETSHGKGVFFTFHTFHLESGHDYLLITENGSFTQPLRQLTGSRLPAPISAGLYGNFTAQVRFISDFSMSYEGFNITFSEYDLEPCEEPEVPAYSIRKGLQFGVGDTLTFSCFPGYRLEGTARITCLGGRRRLWSSPLPRCVAECGNSVTGTQGTLLSPNFPVNYNNNHECIYSIQTQPGKGIQLKARAFELSEGDVLKVYDGNNNSARLLGVFSHSEMMGVTLNSTSSSLWLDFITDAENTSKGFELHFSSFELIKCEDPGTPKFGYKVHDEGHFAGSSVSFSCDPGYSLRGSEELLCLSGERRTWDRPLPTCVAECGGTVRGEVSGQVLSPGYPAPYEHNLNCIWTIEAEAGCTIGLHFLVFDTEEVHDVLRIWDGPVESGVLLKELSGPALPKDLHSTFNSVVLQFSTDFFTSKQGFAIQFSVSTATSCNDPGIPQNGSRSGDSWEAGDSTVFQCDPGYALQGSAEISCVKIENRFFWQPSPPTCIAPCGGDLTGPSGVILSPNYPEPYPPGKECDWKVTVSPDYVIALVFNIFNLEPGYDFLHIYDGRDSLSPLIGSFYGSQLPGRIESSSNSLFLAFRSDASVSNAGFVIDYTENPRESCFDPGSIKNGTRVGSDLKLGSSVTYYCHGGYEVEGTSTLSCILGPDGKPVWNNPRPVCTAPCGGQYVGSDGVVLSPNYPQNYTSGQICLYFVTVPKDYVVFGQFAFFHTALNDVVEVHDGHSQHSRLLSSLSGSHTGESLPLATSNQVLIKFSAKGLAPARGFHFVYQAVPRTSATQCSSVPEPRYGKRLGSDFSVGAIVRFECNSGYALQGSPEIECLPVPGALAQWNVSAPTCVVPCGGNLTERRGTILSPGFPEPYLNSLNCVWKIVVPEGAGIQIQVVSFVTEQNWDSLEVFDGADNTVTMLGSFSGTTVPALLNSTSNQLYLHFYSDISVSAAGFHLEYKTVGLSSCPEPAVPSNGVKTGERYLVNDVVSFQCEPGYALQGHAHISCMPGTVRRWNYPPPLCIAQCGGTVEEMEGVILSPGFPGNYPSNMDCSWKIALPVGFGAHIQFLNFSTEPNHDYIEIRNGPYETSRMMGRFSGSELPSSLLSTSHETTVYFHSDHSQNRPGFKLEYQAYELQECPDPEPFANGIVRGAGYNVGQSVTFECLPGYQLTGHPVLTCQHGTNRNWDHPLPKCEVPCGGNITSSNGTVYSPGFPSPYSSSQDCVWLITVPIGHGVRLNLSLLQTEPSGDFITIWDGPQQTAPRLGVFTRSMAKKTVQSSSNQVLLKFHRDAATGGIFAIAFSAYPLTKCPPPTILPNAEVVTENEEFNIGDIVRYRCLPGFTLVGNEILTCKLGTYLQFEGPPPICEVHCPTNELLTDSTGVILSQSYPGSYPQFQTCSWLVRVEPDYNISLTVEYFLSEKQYDEFEIFDGPSGQSPLLKALSGNYSAPLIVTSSSNSVYLRWSSDHAYNRKGFKIRYSAPYCSLPRAPLHGFILGQTSTQPGGSIHFGCNAGYRLVGHSMAICTRHPQGYHLWSEAIPLCQALSCGLPEAPKNGMVFGKEYTVGTKAMYSCSEGYHLQAGAEATAECLDTGLWSNRNVPPQCVPVTCPDVSSISVEHGRWRLIFETQYQFQAQLMLICDPGYYYTGQRVIRCQANGKWSLGDSTPTCRIISCGELPIPPNGHRIGTLSVYGATAIFSCNSGYTLVGSRVRECMANGLWSGSEVRCLATQTKLHSIFYKLLFDVLSSPSLTKAGHCGTPEPIVNGHINGENYSYRGSVVYQCNAGFRLIGMSVRICQQDHHWSGKTPFCVPITCGHPGNPVNGLTQGNQFNLNDVVKFVCNPGYMAEGAARSQCLASGQWSDMLPTCRIINCTDPGHQENSVRQVHASGPHRFSFGTTVSYRCNHGFYLLGTPVLSCQGDGTWDRPRPQCLLVSCGHPGSPPHSQMSGDSYTVGAVVRYSCIGKRTLVGNSTRMCGLDGHWTGSLPHCSGTSVGVCGDPGIPAHGIRLGDSFDPGTVMRFSCEAGHVLRGSSERTCQANGSWSGSQPECGVISCGNPGTPSNARVVFSDGLVFSSSIVYECREGYYATGLLSRHCSVNGTWTGSDPECLVINCGDPGIPANGLRLGNDFRYNKTVTYQCVPGYMMESHRVSVLSCTKDRTWNGTKPVCKALMCKPPPLIPNGKVVGSDFMWGSSVTYACLEGYQLSLPAVFTCEGNGSWTGELPQCFPVFCGDPGVPSRGRREDRGFSYRSSVSFSCHPPLVLVGSPRRFCQSDGTWSGTQPSCIDPTLTTCADPGVPQFGIQNNSQGYQVGSTVLFRCQKGYLLQGSTTRTCLPNLTWSGTPPDCVPHHCRQPETPTHANVGALDLPSMGYTLIYSCQEGFSLKGGSEHRTCKADGSWTGKPPICLEVRPSGRPINTAREPPLTQALIPGDVFAKNSLWKGAYEYQGKKQPAMLRVTGFQVANSKVNATMIDHSGVELHLAGTYKKEDFHLLLQVYQITGPVEIFMNKFKDDHWALDGHVSSESSGATFIYQGSVKGQGFGQFGFQRLDLRLLESDPESIGRHFASNSSSVAAAILVPFIALIIAGFVLYLYKHRRRPKVPFNGYAGHENTNVRATFENPMYDRNIQPTDIMASEAEFTVSTVCTAV

SEQ ID NO: 23425 - protein, 359 aa, Homo sapiens
MERRASETPEDGDPEEDTATALQRLVELTTSRVTPVRSLRDQYHLIRKLGSGSYGRVLLAQPHQGGPAVALKLLRRDLVLRSTFLREFCVGRCVSAHPGLLQTLAGPLQTPRYFAFAQEYAPCGDLSGMLQERGLPELLVKRVVAQLAGALDFLHSRGLVHADVKPDNVLVFDPVCSRVALGDLGLTRPEGSPTPAPPVPLPTAPPELCLLLPPDTLPLRPAVDSWGLGVLLFCAATACFPWDVALAPNPEFEAFAGWVTTKPQPPQPPPPWDQFAPPALALLQGLLDLDPETRSPPLAVLDFLGDDWGLQGNREGPGVLGSAVSYEDREEGGSSLEEWTDEGDDSKSGGRTGTDGGAP

SEQ ID NO: 23426 - protein, 1676 aa, Homo sapiens
MEETAIWEQHTVTLHRAPGFGFGIAISGGRDNPHFQSGETSIVISDVLKGGPAEGQLQENDRVAMVNGVSMDNVEHAFAVQQLRKSGKNAKITIRRKKKVQIPVSRPDPEPVSDNEEDSYDEEIHDPRSGRSGVVNRRSEKIWPRDRSASRERSLSPRSDRRSVASSQPAKPTKVTLVKSRKNEEYGLRLASHIFVKEISQDSLAARDGNIQEGDVVLKINGTVTENMSLTDAKTLIERSKGKLKMVVQRDERATLLNVPDLSDSIHSANASERDDISEIQSLASDHSGRSHDRPPRRSRSRSPDQRSEPSDHSRHSPQQPSNGSLRSRDEERISKPGAVSTPVKHADDHTPKTVEEVTVERNEKQTPSLPEPKPVYAQVGQPDVDLPVSPSDGVLPNSTHEDGILRPSMKLVKFRKGDSVGLRLAGGNDVGIFVAGVLEDSPAAKEGLEEGDQILRVNNVDFTNIIREEAVLFLLDLPKGEEVTILAQKKKDVYRRIVESDVGDSFYIRTHFEYEKESPYGLSFNKGEVFRVVDTLYNGKLGSWLAIRIGKNHKEVERGIIPNKNRAEQLASVQYTLPKTAGGDRADFWRFRGLRSSKRNLRKSREDLSAQPVQTKFPAYERVVLREAGFLRPVTIFGPIADVAREKLAREEPDIYQIAKSEPRDAGTDQRSSGIIRLHTIKQIIDQDKHALLDVTPNAVDRLNYAQWYPIVVFLNPDSKQGVKTMRMRLCPESRKSARKLYERSHKLRKNNHHLFTTTINLNSMNDGWYGALKEAIQQQQNQLVWVSEGKADGATSDDLDLHDDRLSYLSAPGSEYSMYSTDSRHTSDYEDTDTEGGAYTDQELDETLNDEVGTPPESAITRSSEPVREDSSGMHHENQTYPPYSPQAQPQPIHRIDSPGFKPASQQVYRKDPYPEEMMRQNHVLKQPAVSHPGHRPDKEPNLTYEPQLPYVEKQASRDLEQPTYRYESSSYTDQFSRNYEHRLRYEDRVPMYEEQWSYYDDKQPYPSRPPFDNQHSQDLDSRQHPEESSERGYFPRFEEPAPLSYDSRPRYEQAPRASALRHEEQPAPGYDTHGRLRPEAQPHPSAGPKPAESKQYFEQYSRSYEQVPPQGFTSRAGHFEPLHGAAAVPPLIPSSQHKPEALPSNTKPLPPPPTQTEEEEDPAMKPQSVLTRVKMFENKRSASLETKKDVNDTGSFKPPEVASKPSGAPIIGPKPTSQNQFSEHDKTLYRIPEPQKPQLKPPEDIVRSNHYDPEEDEEYYRKQLSYFDRRSFENKPPAHIAASHLSEPAKPAHSQNQSNFSSYSSKGKPPEADGVDRSFGEKRYEPIQATPPPPPLPSQYAQPSQPVTSASLHIHSKGAHGEGNSVSLDFQNSLVSKPDPPPSQNKPATFRPPNREDTAQAAFYPQKSFPDKAPVNGTEQTQKTVTPAYNRFTPKPYTSSARPFERKFESPKFNHNLLPSETAHKPDLSSKTPTSPKTLVKSHSLAQPPEFDSGVETFSIHAEKPKYQINNISTVPKAIPVSPSAVEEDEDEDGHTVVATARGIFNSNGGVLSSIETGVSIIIPQGAIPEGVEQEIYFKVCRDNSILPPLDKEKGETLLSPLVMCGPHGLKFLKPVELRLPHCASMTPDGWSFALKSSDSSSGDPKTWQNKCLPGDPNYLVGANCVSVLIDHF

SEQ ID NO: 23427 - protein, 792 aa, Homo sapiens
MQQESERCRVRARRPDMALYVPKARRGAVLLKTGDEEESCGSPNSVVKEKQKESSLSQKEVFKDKPEARRLNINPDRKEHNCREEKKSSTKLRMDTCLQKTNRVCSKRGTTESKEVLSQGQQQGAPNAGVITNAPLQRHFKPKKVECLEVETTDVTGHERILLSQACLEISEAQVPSKPFQNVEFCDFSRHEPDGEAFEDKDLEGRIETDTKVLEILYEFPRVFSSVMKPENMIVPIKLSSDSEIVQQSMQTSDGILNPSSGGITTTSVPGSPDGVFDQTCVDFEVESVGGIANSTGFILDQKDTDSIPATMGHISLSESTNDTVSPVMIRECEKNDSTADELHVKHEPPDTAVLAHETHRDSGFKNVGDITNKACMMDTTGMSCSDHVTVDSPYVVAVRIADETSINTRSFSKFVGMSADATPLHVARSGNDTEDFSNPSACSDIYGESISSHFTESTGKLIESLSDCASSLPIKKIAGSNYNTFLDSELSMLNGTKVLSDSAVGIDLGSTGDTTEALHELRTAEEFKTEEQDDSGSIEFGVSFPDRESSSMETSIEPKATETSHTEGITAIEESWESMFNDDGDCLDPRLLQEGILMHIKPENHCSKLSGNTKSRESIQEPRSDYYNHEVPDIDLSDCEFPHVIEIYDFPQEFHTEDLLRVFCSYQKKGFDIKWVDDTHALGVFSSPITARDALGIKHTMVKIRPLSQATRAAKAKARAYAEFLQPAKERPETSAALARRLVISALGVRSKQSKTEREAELKKLQEARERKRLEAKQREDIWEGRDQSTV

SEQ ID NO: 23428 - protein, 286 aa, Homo sapiens
MTCSGKSCALARSSLTSSQGIVAASGSETEDEDSMDIPLDLSSSAGSGKRRRRGNLPKESVQILRDWLYEHRYNAYPSEQEKALLSQQTHLSTLQVCNWFINARRRLLPDMLRKDGKDPNQFTISRRGAKISETSSVESVMGIKNFMPALEETPFHSCTAGPNPTLGRPLSPKPSSPGSVLARPSVICHTTVTALKDVPFSLCQSVGVGQNTDIQQIAAKNFTDTSLMYPEDTCKSGPSTNTQSGLFNTPPPTPPDLNQDFSGFQLLVDVALKRAAEMELQAKLTA

SEQ ID NO: 23429 - protein, 159 aa, Homo sapiens
MAQASPPRPERVLGASSPEARPAQEALLLPTGVFQVAEKMEKRTCALCPKDVEYNVLYFAQSENIAAHENCLLYSSGLVECEDQDPLNPDRSFDVESVKKEIQRGRKLKCKFCHKRGATVGCDLKNCNKNYHFFCAKKDDAVPQSDGVRGIYKYLIKHF

SEQ ID NO: 23430 - protein, 1058 aa, Homo sapiens
MNMEGLVMFQDLSIDFSQEEWECLDAAQKDLYRDVMMENYSSLVSLDSEFRCKTKDSCLPKEIYEVTSSQWVRMEKCHSLVGSSVRDDWECKGQFQHQDINQERYLEKAIMTYETTPTFCLQTSLTLHHRIHPGEKLYKSTECMAFKYGSELTQQQETHTGEKLYKCKECGKAFHHFSYLVKHQRIHTGEKPCACKEYGKAFISGSHLIQHQKMYTDERPHECQESVKAFRPSAHLIQHWRIHTGDKPYECKECGKSFTSGSTLNQHQQIHTGEKPYHCKQCGKSFTVGSTLIRHQQIHTGEKPYDCKECGKSFASGSALIRHQRIHTGEKPYDCKECGKSFTFHSALIRHQRIHTGEKPYDCKECGKSFTFRSGLIGHQAIHTGEKPYDCKECGKSFTAGSTLIQHQRIHTGEKPYDCKECGKSFASGSALLQHQRIHTGEKPYCCKECGKSFTFRSTRNRHQRIHTGEKPYNCKECGKSFASGSALLQHQRIHTGEKPYHCKECGKSFTFRSGLIGHQAVHTGEKPYDCKECGKSFTSRSALIQHQRIHTGEKPYHCKECGKSFTVGSTLLQHQQIHTGEKPYDCKECGKAFRLRLRLTQHQQIHTGEKPYQCQECGKAFVSVSGLTQHHRIHTGEKPYECPDCGKAFRQRTYLNQHRRIHTGEKPYECKECGKSFTFCSGLIQHQQNHTDEKPYDGKECGKSFTSHSTLIQHQQIHTGEKPYDCKECGKSFTSHSTLIQHQQIHTGEKLYDCKECGKSFTSHSTLIQHQPLHTGEKPYHCKECGKSFTLRSALIQHRPVHTGEKRYSCKECGKSFTSRSTLIEHQRIHTGEKPYHCKECGKSFAFRSAIIQHRRIHTGEKPYDCKECGKAFRRRSKLTQHQRIHTGEKPYRCHECGKAFVRFSGLTKHHSIHTGEKPYECKTCGKSFRQRTHLTLHQRIHTGDRPYECKECGKSFTCGSELIRHQRTHTGEKPYDCKECGKAFRCPSQLSQHKRIHTGEKTYQCPECGKAFFYASGLSRHQSVHTGEKPYECKTCGKAFKQLTQLTRHQRIHDLT

SEQ ID NO: 23431 - protein, 606 aa, Homo sapiens
MFSCFCFSLQDNSFSSTTVTECDEDPVSLHEDQTDCSSLRDENNKENYPDAGALVEEHAPPSWEPQQQNVEATVLVDSVLRPSMGNFKSRKPKSIFKAESGRSHGESQETEHVVSSQSECQVRAGTPAHESPQNNAFKCQETVRLQPRIDQRTAISPKDAFETRQDLNENSLLKLQALESDLCSAFLTNQEEAAQVHGVKDPAPASTQSVLADGTDSADPSPVHKDGQNEADSAPEDLHSVGTSRLLYHITDGDNPLLSPRCSIFSQSQRFNLDPESAPSPPSTQQFMMPRSSSRCSCGDGKEPQTITQLTKHIQSLKRKIRKFEEKFEQEKKYRPSHGDKTSNPEVLKWMNDLAKGRKQLKELKLKLSEEQGSAPKGPPRNLLCEQPTVPRENGKPEAAGPEPSSSGEETPDAALTCLKERREQLPPQEDSKVTKQDKNLIKPLYDRYRIIKQILSTPSLIPTIQEEEDSDEDRPQGSQQPSLADPASHLPVGDHLTYSNETEPVRALLPDEKKEVKPPALSMSNLHEATMPVLLDHLRETRADKKRLRKALREFEEQFFKQTGRSPQKEDRIPMADEYYEYKHIKAKLRLLEVLISKQDVAKTI

SEQ ID NO: 23432 - protein, 655 aa, Homo sapiens
MAELGAGGDGHRGGDGAVRSETAPDSYKVQDKKNASSRPASAISGQNNNHSGNKPDPPPVLRVDDRQRLARERREEREKQLDPDRRSVSTMNLSKYVDPVISKRLSSSSATLLNSPDRARRLQLSPWESSVVNRLLTPTHSFLARSKSTAALSGEAASCSPIIMPYKAAHSRNSMDRPKLFVTPPEGSSRRRIIHGTASYKKERERENVLFLTSGTRRAVSPSNPKARQPARSRLWLPSKSLPHLPGTPRPTSSLPPGSVKAAPAQVRPPSPGNIRPVKREVKVEPEKKDPEKEPQKVANEPSLKGRAPLVKVEEATVEERTPAEPEVGPAAPAMAPAPASAPAPASAPAPAPVPTPAMVSAPSSTVNASASVKTSAGTTDPEEATRLLAEKRRLAREQREKEERERREQEELERQKREELAQRVAEERTTRREEESRRLEAEQAREKEEQLQRQAEERALREREEAERAQRQKEEEARVREEAERVRQEREKHFQREEQERLERKKRLEEIMKRTRRTEATDKKTSDQRNGDIAKGALTGGTEVSALPCTTNAPGNGKPVGSPHVVTSHQSKVTVESTPDLEKQPNENGVSVQNENFEEIINLPIGSKPSRLDVTNSESPEIPLNPILAFDDEGTLGPLPQVDGVQTQQTAEVI

SEQ ID NO: 23433 - protein, 1171 aa, Homo sapiens
MEPLLLGRGLIVYLMFLLLKFSKAIEIPSSVQQVPTIIKQSKVQVAFPFDEYFQIECEAKGNPEPTFSWTKDGNPFYFTDHRIIPSNNSGTFRIPNEGHISHFQGKYRCFASNKLGIAMSEEIEFIVPSVPKFPKEKIDPLEVEEGDPIVLPCNPPKGLPPLHIYWMNIELEHIEQDERVYMSQKGDLYFANVEEKDSRNDYCCFAAFPRLRTIVQKMPMKLTVNSLKHANDSSSSTEIGSKANSIKQRKPKLLLPPTESGSESSITILKGEILLLECFAEGLPTPQVDWNKIGGDLPKGRETKENYGKTLKIENVSYQDKGNYRCTASNFLGTATHDFHVIVEEPPRWTKKPQSAVYSTGSNGILLCEAEGEPQPTIKWRVNGSPVDNHPFAGDVVFPREISFTNLQPNHTAVYQCEASNVHGTILANANIDVVDVRPLIQTKDGENYATVVGYSAFLHCEFFASPEAVVSWQKVEEVKPLEGRRYHIYENGTLQINRTTEEDAGSYSCWVENAIGKTAVTANLDIRNATKLRVSPKNPRIPKLHMLELHCESKCDSHLKHSLKLSWSKDGEAFEINGTEDGRIIIDGANLTISNVTLEDQGIYCCSAHTALDSAADITQVTVLDVPDPPENLHLSERQNRSVRLTWEAGADHNSNISEYIVEFEGNKEEPGRWEELTRVQGKKTTVILPLAPFVRYQFRVIAVNEVGRSQPSQPSDHHETPPAAPDRNPQNIRVQASQPKEMIIKWEPLKSMEQNGPGLEYRVTWKPQGAPVEWEEETVTNHTLRVMTPAVYAPYDVKVQAINQLGSGPDPQSVTLYSGEDYPDTAPVIHGVDVINSTLVKVTWSTVPKDRVHGRLKGYQINWWKTKSLLDGRTHPKEVNILRFSGQRNSGMVPSLDAFSEFHLTVLAYNSKGAGPESEPYIFQTPEGVPEQPTFLKVIKVDKDTATLSWGLPKKLNGNLTGYLLQYQIINDTYEIGELNDINITTPSKPSWHLSNLNATTKYKFYLRACTSQGCGKPITEESSTLGEGKYAGLYDDISTQGWFIGLMCAIALLTLLLLTVCFVKRNRGGKYSVKEKEDLHPDPEIQSVKDETFGEYSDSDEKPLKGSLRSLNRDMQPTESADSLVEYGEGDHGLFSEDGSFIGAYAGSKEKGSVESNGSSTATFPLRA

SEQ ID NO: 23434 - protein, 220 aa, Homo sapiens
MWVPVVFLTLSVTWIGAAPLILSRIVGGWECEKHSQPWQVLVASRGRAVCGGVLVHPQWVLTAAHCIRNKSVILLGRHSLFHPEDTGQVFQVSHSFPHPLYDMSLLKNRFLRPGDDSSIEPEEFLTPKKLQCVDLHVISNDVCAQVHPQKVTKFMLCAGRWTGGKSTCSGDSGGPLVCNGVLQGITSWGSEPCALPERPSLYTKVVHYRKWIKDTIVANP

SEQ ID NO: 23435 - protein, 670 aa, Homo sapiens
MQKFIEADYYELDWYYEECSDVLCAERVGQMTKTYNDIDAVTRLLEEKERDLELAARIGQSLLKKNKTLTERNELLEEQVEHIREEVSQLRHELSMKDELLQFYTSAAEESEPESVCSTPLKRNESSSSVQNYFHLDSLQKKLKDLEEENVVLRSEASQLKTETITYEEKEQQLVNDCVKELRDANVQIASISEELAKKTEDAARQQEEITHLLSQIVDLQKKAKACAVENEELVQHLGAAKDAQRQLTAELRELEDKYAECMEMLHEAQEELKNLRNKTMPNTTSRRYHSLGLFPMDSLAAEIEGTMRKELQLEEAESPDITHQKRVFETVRNINQVVKQRSLTPSPMNIPGSNQSSAMNSLLSSCVSTPRSSFYGSDIGNVVLDNKTNSIILETEAADLGNDERSKKPGTPGTPGSHDLETALRRLSLRRENYLSERRFFEEEQERKLQELAEKGELRSGSLTPTESIMSLGTHSRFSEFTGFSGMSFSSRSYLPEKLQIVKPLEGSATLHHWQQLAQPHLGGILDPRPGVVTKGFRTLDVDLDEVYCLNDFEEDDTGDHISLPRLATSTPVQHPETSGERSQARVTVSGSRSYPSRPQASPEEMQEPPAATEEEEEEEEEEGSGEGTTISPVNLAPFPEAEFWAILTSVPGTIRSGSLSVASARLCG

SEQ ID NO: 23436 - protein, 680 aa, Homo sapiens
MPKPTLLLRGGWERERSPGDSELGRQFRDWCLRTYGDSAKTKTVTRSKYQRIAEVLQGGGGTGAGSGPAAGEKGKFQFWVRSKGFRLGSGREPKMGQVVYVPVKTGSGADGLSEPEGISLKRVAVVEDFFDIIYSMHVESSAEPGKAPKHAGQKKTYRAIAETYAFLPREAVTRFLMSCTECQKRMHFNSNGLEPKENEPPSPLVSGIIDYNMPLTSTYLKQMKLRVMNSQEQDETSVSSEDFDMSDSTWMSADPHLASSLSPSQDERMRSPQNLHSQEDDDSSSESGSGNGSSTLNPSTSSSTQGDPAFPEMNGNGAVAPMDFTTAAEDQPINLCDKLPPATALGTASYPSDGCGADGLRSRVKYGVKTTPESPPYSSGSYDSIKTEVSGCPEDLTVGRAPTADDDDDDHDDHEDNDKMNDSEGMDPERLKAFNMFVRLFVDENLDRMVPISKQPKEKIQAIIESCSRQFPEFQERARKRIRTYLKSCRRMKKNGMEMTRPTPPHLTSAMAENILAAACESETRKAAKRMRLEIYQSSQDEPIALDKQHSRDSAAITHSTYSLPASSYSQDPVYANGGLNYSYRGYGALSSNLQPPASLQTGNHSNGPTDLSMKGGASTTSTTPTPTPSSTSTSRPVPTAQLSPTEISAVRQLIAGYRESAAFLLRSADELENLILQQN

SEQ ID NO: 23437 - protein, 551 aa, Homo sapiens
MSRSLLLWFLLFLLLLPPLPVLLADPGAPTPVNPCCYYPCQHQGICVRFGLDRYQCDCTRTGYSGPNCTIPGLWTWLRNSLRPSPSFTHFLLTHGRWFWEFVNATFIREMLMRLVLTGKKQLPDAQLLARRFLLRRKFIPDPQGTNLMFAFFAQHFTHQFFKTSGKMGPGFTKALGHGVDLGHIYGDNLERQYQLRLFKDGKLKYQVLDGEMYPPSVEEAPVLMHYPRGIPPQSQMAVGQEVFGLLPGLMLYATLWLREHNRVCDLLKAEHPTWGDEQLFQTTRLILIGETIKIVIEEYVQQLSGYFLQLKFDPELLFGVQFQYRNRIAMEFNHLYHWHPLMPDSFKVGSQEYSYEQFLFNTSMLVDYGVEALVDAFSRQIAGRIGGGRNMDHHILHVAVDVIRESREMRLQPFNEYRKRFGMKPYTSFQELVGEKEMAAELEELYGDIDALEFYPGLLLEKCHPNSIFGESMIEIGAPFSLKGLLGNPICSPEYWKPSTFGGEVGFNIVKTATLKKLVCLNTKTCPYVSFRVPDASQDDGPAVERPSTEL

SEQ ID NO: 23438 - protein, 3265 aa, Homo sapiens
MQLLGLLGLLWMLKASPWATGTLSTATSISQVPFPRAEAASAVLSNSPHSRDLAGWPLGVPQLASPAPGHRENAPMTLTTSPHDTLISETLLNSPVSSNTSTTPTSKFAFKVETTPPTVLVYSATTECVYPTSFIITISHPTSICVTTTQVAFTSSYTSTPVTQKPVTTVTSTYSMTTTEKGTSAMTSSPSTTTARETPIVTVTPSSVSATDTTFHTTISSTTRTTERTPLPTGSIHTTTSPTPVFTTLKTAVTSTSPITSSITSTNTVTSMTTTASQPTATNTLSSPTRTILSSTPVLSTETITSGITNTTPLSTLVTTLPTTISRSTPTSETTYTTSPTSTVTDSTTKIAYSTSMTGTLSTETSLPPTSSSLPTTETATTPMTNLVTTTTEISSHSTPSFSSSTIYSTVSTSTTAISSLPPTSGTMVTSTTMTPSSLSTDIPFTTPTTITHHSVGSTGFLTTATDLTSTFTVSSSSAMSTSVIPSSPSIQNTETSSLVSMTSATTPNVRPTFVSTLSTPTSSLLTTFPATYSFSSSMSASSAGTTHTESISSPPASTSTLHTTAESTLAPTTTTSFTTSTTMEPPSTTAATTGTGQTTFTSSTATFPETTTPTPTTDMSTESLTTAMTSPPITSSVTSTNTVTSMTTTTSPPTTTNSFTSLTSMPLSSTPVPSTEVVTSGTINTIPPSILVTTLPTPNASSMTTSETTYPNSPTGPGTNSTTEITYPTTMTETSSTATSLPPTSPLVSTAKTAKTPTTNLVTTTTKTTSHSTTSFTSSTVYSTASTYTTAITSVPTTLGTMVTSTSMISSTVSTGIPTSQPTTITPSSVGISGSLPMMTDLTSVYTVSNMSARPTTVIPSSPTVQNTEISISVSMTSATTPSGGPTFTSTENTPTRSLLTSFPMTHSFSSSMSESSAGTTHTESISSPRGTTSTLHTTVESTPSPTTTTSFTTSTMMEPPSSTVSTTGRGQTTFPSSTATFPETTTLTPTTDISTVSLTTAMTSPPPVSSSITPTNTMTSMRTTTYWPTATNTLSPLTSSILSSTPVPSTEMITSHTTNTTPLSTLVTTLLTTITRSTPTSETTYPTSPTSIVSDSTTEITYSTSITGTLSTATTLPPTSSSLPTTETATMTPTTTLITTTPNTTSLSTPSFTSSTIYSTVSTSTTAISSASPTSGTMVTSTTMTPSSLSTDTPSTTPTTITYPSVGSTGFLTTATDLTSTFTVSSSSAMSTSVIPSSPSIQNTETSSLVSMTSATTPSLRPTITSTDSTLTSSLLTTFPSTYSFSSSMSASSAGTTHTETISSLPASTNTIHTTAESALAPTTTTSFTTSPTMEPPSTTVATTGTGQTTFPSSTATFLETTTLTPTTDFSTESLTTAMTSTPPITSSITPTDTMTSMRTTTSWPTATNTLSPLTSSILSSTPVPSTEVTTSHTTNTNPVSTLVTTLPITITRSTLTSETAYPSSPTSTVTESTTEITYPTTMTETSSTATSLPPTSSLVSTAETAKTPTTNLVTTTTKTTSHSTTSFTSSTIYSTASTPTTAITSVPTTLGTMVTSTSMIPSTVSTGIPTSQPTTITPSSVGISGSLPMMTDLTSVYTVSSMSARPTSVIPSSPTVQNTETSIFVSMMSATTPSGGPTFTSTENTPTRSLLTSFPVTHSFSSSMSASSVGTTHTQSISSPPAITSTLHTTAESTPSPTTTMSFTTFTKMETPSSTVATTGTGQTTFTSSTATSPKTTTLTPTSDISTGSFKTAVSSTPPITSSITSTYTVTSMTTTTPLGPTATNTLPSFTSSVSSSTPVPSTEAITSGTTNTTPLSTLVTTFSNSDTSSTPTSETTYPTSLTSALTDSTTRTTYSTNMTGTLSTVTSLRPTSSSLLTTVTATVPTTNLVTTTTKITSHSTPSFTSSIATTETPSHSTPRFTSSITTTETPSHSTPRFTSSITNTKTTSHSSPSFTSSITTTETTSHNTPSLTSSITTTKTTSHSTPSYTSLITTTTTTSHSTPSFTSSITTTETTSHNTPSLTSSITTTETTSHSTPSFTSSITTETTSHSTPSFTSLITITEITSHSTLSYTTSITTTETPSHSTLSFTSSITTTETTSHSTPSFTSSITTSEMPSHSTPSFTSSITTTENATHSTPNFTSSITTTETTSHSTPSFTSLITTTETTSHRWGTTETTSYSTPSFTSSNTITETTSHSTPSYITSITTTETPSSSTPSFSSSITTTETTSHSTPGFTSSITTTETTSHSTPSFTSSITTTETTSHDTPSFTSSITTSETPSHSTPSSTSLITTTKTTSHSTPSFTSSITTTETTSHSAHSFTSSITTTETTSHNTRSFTSSITTTETNSHSTTSFTSSITTTETTSHSTPSFSSSITTTETPLHSTPGLTSWVTTTKTTSHITPGLTSSITTTETTSHSTPGFTSSITTTETTSESTPSLSSSTIYSTVSTSTTAITSHFTTSETAVTPTPVTPSSLSTDIPTTSLRTLTPSSVGTSTSLTTTTDFPSIPTDISTLPTRTHIISSSPSIQSTETSSLVGTTSPTMSTVRMTLRITENTPISSFSTSIVVIPETPTQTPPVLTSATGTQTSPAPTTVTFGSTDSSTSTLHTLTPSTALSTIVSTSQVPIPSTHSSTLQTTPSTPSLQTSLTSTSEFTTESFTRGSTSTNAILTSFSTIIWSSTPTIIMSSSPSSASITPVFSTTIHSVPSSPYIFSTENVGSASITGFPSLSSSATTSTSSTSSSLTTALTEITPFSYISLPSTTPCPGTITITIVPASPTDPCVEMDPSTEATSPPTTPLTVFPFTTEMVTCPTSISIQTTLTTYMDTSSMMPESESSISPNASSSTGTGTVPTNTVFTSTRLPTSETWLSNSSVIPLPLPGVSTIPLTMKPSSSLPTILRTSSKSTHPSPPTTRTSETPVATTQTPTTLTSRRTTRITSQMTTQSTLTTTAGTCDNGGTWEQGQCACLPGFSGDRCQLQTRCQNGGQWDGLKCQCPSTFYGSSCEFAVEQVDLDVVETEVGMEVSVDQQFSPDLNDNTSQAYRDFNKTFWNQMQKIFADMQGFTFKGVEILSLRNGSIVVDYLVLLEMPFSPQLESEYEQVKTTLKEGLQNASQDVNSCQDSQTLCFKPDSIKVNNNSKTELTPAAICRRAAPTGYEEFYFPLVEATRLRCVTKCTSGVDNAIDCHQGQCVLETSGPTCRSWDQDRKWFETWDEEVVGTFSNWGFEDDGTDKDTNFYVALENVDTTMKVHIKRPEMTSSSV

SEQ ID NO: 23439 - protein, 2664 aa, Homo sapiens
MAEEGAVAVCVRVRPLNSREESLGETAQVYWKTDNNVIYQVDGSKSFNFDRVFHGNETTKNVYEEIAAPIIDSAIQGYNGTIFAYGQTASGKTYTMMGSEDHLGVIPRAIHDIFQKIKKFPDREFLLRVSYMEIYNETITDLLCGTQKMKPLIIREDVNRNVYVADLTEEVVYTSEMALKWITKGEKSRHYGETKMNQRSSRSHTIFRMILESREKGEPSNCEGSVKVSHLNLVDLAGSERAAQTGAAGVRLKEGCNINRSLFILGQVIKKLSDGQVGGFINYRDSKLTRILQNSLGGNAKTRIICTITPVSFDETLTALQFASTAKYMKNTPYVNEVSTDEALLKRYRKEIMDLKKQLEEVSLETRAQAMEKDQLAQLLEEKDLLQKVQNEKIENLTRMLVTSSSLTLQQELKAKRKRRVTWCLGKINKMKNSNYADQFNIPTNITTKTHKLSINLLREIDESVCSESDVFSNTLDTLSEIEWNPATKLLNQENIESELNSLRADYDNLVLDYEQLRTEKEEMELKLKEKNDLDEFEALERKTKKDQEMQLIHEISNLKNLVKHAEVYNQDLENELSSKVELLREKEDQIKKLQEYIDSQKLENIKMDLSYSLESIEDPKQMKQTLFDAETVALDAKRESAFLRSENLELKEKMKELATTYKQMENDIQLYQSQLEAKKKMQVDLEKELQSAFNEITKLTSLIDGKVPKDLLCNLELEGKITDLQKELNKEVEENEALREEVILLSELKSLPSEVERLRKEIQDKSEELHIITSEKDKLFSEVVHKESRVQGLLEEIGKTKDDLATTQSNYKSTDQEFQNFKTLHMDFEQKYKMVLEENERMNQEIVNLSKEAQKFDSSLGALKTELSYKTQELQEKTREVQERLNEMEQLKEQLENRDSTLQTVEREKTLITEKLQQTLEEVKTLTQEKDDLKQLQESLQIERDQLKSDIHDTVNMNIDTQEQLRNALESLKQHQETINTLKSKISEEVSRNLHMEENTGETKDEFQQKMVGIDKKQDLEAKNTQTLTADVKDNEIIEQQRKIFSLIQEKNELQQMLESVIAEKEQLKTDLKENIEMTIENQEELRLLGDELKKQQEIVAQEKNHAIKKEGELSRTCDRLAEVEEKLKEKSQQLQEKQQQLLNVQEEMSEMQKKINEIENLKNELKNKELTLEHMETERLELAQKLNENYEEVKSITKERKVLKELQKSFETERDHLRGYIREIEATGLQTKEELKIAHIHLKEHQETIDELRRSVSEKTAQIINTQDLEKSHTKLQEEIPVLHEEQELLPNVKEVSETQETMNELELLTEQSTTKDSTTLARIEMERLRLNEKFQESQEEIKSLTKERDNLKTIKEALEVKHDQLKEHIRETLAKIQESQSKQEQSLNMKEKDNETTKIVSEMEQFKPKDSALLRIEIEMLGLSKRLQESHDEMKSVAKEKDDLQRLQEVLQSESDQLKENIKEIVAKHLETEEELKVAHCCLKEQEETINELRVNLSEKETEISTIQKQLEAINDKLQNKIQEIYEKEEQFNIKQISEVQEKVNELKQFKEHRKAKDSALQSIESKMLELTNRLQESQEEIQIMIKEKEEMKRVQEALQIERDQLKENTKEIVAKMKESQEKEYQFLKMTAVNETQEKMCEIEHLKEQFETQKLNLENIETENIRLTQILHENLEEMRSVTKERDDLRSVEETLKVERDQLKENLRETITRDLEKQEELKIVHMHLKEHQETIDKLRGIVSEKTNEISNMQKDLEHSNDALKAQDLKIQEELRIAHMHLKEQQETIDKLRGIVSEKTDKLSNMQKDLENSNAKLQEKIQELKANEHQLITLKKDVNETQKKVSEMEQLKKQIKDQSLTLSKLEIENLNLAQKLHENLEEMKSVMKERDNLRRVEETLKLERDQLKESLQETKARDLEIQQELKTARMLSKEHKETVDKLREKISEKTIQISDIQKDLDKSKDELQKKIQELQKKELQLLRVKEDVNMSHKKINEMEQLKKQFEAQNYLCKCEMDNFQLTKKLHESLEEIRIVAKERDELRRIKESLKMERDQFIATLREMIARDRQNHQVKPEKRLLSDGQQHLTESLREKCSRIKELLKRYSEMDDHYECLNRLSLDLEKEMEFHRIMKKLKYVLSYVTKIKEEQHESINKFEMDFIDEVEKQKELLIKIQHLQQDCDVPSRELRDLKLNQNMDLHIEEILKDFSESEFPSIKTEFQQVLSNRKEMTQFLEEWLNTRFDIEKLKNGIQKENDRICQVNNFFNNRIIAIMNESTEFEERSATISKEWEQDLKSLKEKNEKLFKNYQTLKTSLASGAQVNPTTQDNKNPHVTSRATQLTTEKIRELENSLHEAKESAMHKESKIIKMQKELEVTNDIIAKLQAKVHESNKCLEKTKETIQVLQDKVALGAKPYKEEIEDLKMKLVKIDLEKMKNAKEFEKEISATKATVEYQKEVIRLLRENLRRSQQAQDTSVISEHTDPQPSNKPLTCGGGSGIVQNTKALILKSEHIRLEKEISKLKQQNEQLIKQKNELLSNNQHLSNEVKTWKERTLKREAHKQVTCENSPKSPKVTGTASKKKQITPSQCKERNLQDPVPKESPKSCFFDSRSKSLPSPHPVRYFDNSSLGLCPEVQNAGAESVDSQPGPWHASSGKDVPECKTQ

SEQ ID NO: 23440 - protein, 630 aa, Homo sapiens
MPWEEPAGEKPSCSHSQKAFHMEPAQKPCFTTDMVTWALLCISAETVRGEAPSQPRGIPHRSPVSVDDLWLEKTQRKKLQKQAHVERRLHIGAVHKDGVKCWRKTIITSPESLNLPRRSHPLSQSAPTGLNHMGWPEHTPGTAMPDGALDTAVCADEVGSEEDLYDDLHSSSHHYSHPGGGGEQLAINELISDGSVVCAEALWDHVTMDDQELGFKAGDVIEVMDATNREWWWGRVADGEGWFPASFVRLRVNQDEPADDDAPLAGNSGAEDGGAEAQSSKDQMRTNVINEILSTERDYIKHLRDICEQADFQIYSEYCNNHPNACVELSRLTKLSKYVYFFEACRLLQKMIDISLDGFLLTPVQKICKYPLQLAELLKYTHPQHRDFKDVEAALHAMKNVAQLINERKRRLENIDKIAQWQSSIEDWEGEDLLVRSSELIYSGELTRVTQPQAKSQQRMFFLFDHQLIYCKKDLLRRDVLYYKGRLDMDGLEVVDLEDGKDRDLHVSIKNAFRLHRGATGDSHLLCTRKPEQKQRWLKAFAREREQVQLDQETGFSITELQRKQAMLNASKQQVTGKPKAVGRPCYLTRQKHPALPSNRPQQQVLVLAEPRRKPSTFWHSISRLAPFRK

SEQ ID NO: 23441 - protein, 871 aa, Homo sapiens
MGDSDDEYDRRRRDKFRRERSDYDRSRERDERRRGDDWNDREWDRGRERRSRGEYRDYDRNRRERFSPPRHELSPPQKRMRRDWDEHSSDPYHSGYEMPYAGGGGGPTYGPPQPWGHPDVHIMQHHVLPIQARLGSIAEIDLGVPPPVMKTFKEFLLSLDDSVDETEAVKRYNDYKLDFRRQQMQDFFLAHKDEEWFRSKYHPDEVGKRRQEARGALQNRLRVFLSLMETGWFDNLLLDIDKADAIVKMLDAAVIKMEGGTENDLRILEQEEEEEQAGKPGEPSKKEEGRAGAGLGDGERKTNDKDEKKEDGKQAENDSSNDDKTKKSEGDGDKEEKKEDSEKEAKKSSKKRNRKHSGDDSFDEGSVSESESESESGQAEEEKEEAEALKEKEKPKEEEWEKPKDAAGLECKPRPLHKTCSLFMRNIAPNISRAEIISLCKRYPGFMRVALSEPQPERRFFRRGWVTFDRSVNIKEICWNLQNIRLRECELSPGVNRDLTRRVRNINGITQHKQIVRNDIKLAAKLIHTLDDRTQLWASEPGTPPLPTSLPSQNPILKNITDYLIEEVSAEEEELLGSSGGAPPEEPPKEGNPAEINVERDEKLIKVLDKLLLYLRIVHSLDYYNTCEYPNEDEMPNRCGIIHVRGPMPPNRISHGEVLEWQKTFEEKLTPLLSVRESLSEEEAQKMGRKDPEQEVEKFVTSNTQELGKDKWLCPLSGKKFKGPEFVRKHIFNKHAEKIEEVKKEVAFFNNFLTDAKRPALPEIKPAQPPGPAQSLTPGLPYPHQTPQGLMPYGQPRPPILGYGAGAVRPAVPTGGPPYPHAPYGAGRGNYDAFRGQGGYPGKPRNRMVRGDPRAIVEYRDLDAPDDVDFF

SEQ ID NO: 23442 - protein, 1007 aa, Homo sapiens
MSRRKQRKPQQLISDCEGPSASENGDASEEDHPQVCAKCCAQFTDPTEFLAHQNACSTDPPVMVIIGGQENPNNSSASSEPRPEGHNNPQVMDTEHSNPPDSGSSVPTDPTWGPERRGEESSGHFLVAATGTAAGGGGGLILASPKLGATPLPPESTPAPPPPPPPPPPPGVGSGHLNIPLILEELRVLQQRQIHQMQMTEQICRQVLLLGSLGQTVGAPASPSELPGTGTASSTKPLLPLFSPIKPVQTSKTLASSSSSSSSSSGAETPKQAFFHLYHPLGSQHPFSAGGVGRSHKPTPAPSPALPGSTDQLIASPHLAFPSTTGLLAAQCLGAARGLEATASPGLLKPKNGSGELSYGEVMGPLEKPGGRHKCRFCAKVFGSDSALQIHLRSHTGERPYKCNVCGNRFTTRGNLKVHFHRHREKYPHVQMNPHPVPEHLDYVITSSGLPYGMSVPPEKAEEEAATPGGGVERKPLVASTTALSATESLTLLSTSAGTATAPGLPAFNKFVLMKAVEPKNKADENTPPGSEGSAISGVAESSTATRMQLSKLVTSLPSWALLTNHFKSTGSFPFPYVLEPLGASPSETSKLQQLVEKIDRQGAVAVTSAASGAPTTSAPAPSSSASSGPNQCVICLRVLSCPRALRLHYGQHGGERPFKCKVCGRAFSTRGNLRAHFVGHKASPAARAQNSCPICQKKFTNAVTLQQHVRMHLGGQIPNGGTALPEGGGAAQENGSEQSTVSGARSFPQQQSQQPSPEEELSEEEEEEDEEEEEDVTDEDSLAGRGSESGGEKAISVRGDSEEASGAEEEVGTVAAAATAGKEMDSNEKTTQQSSLPPPPPPDSLDQPQPMEQGSSGVLGGKEEGGKPERSSSPASALTPEGEATSVTLVEELSLQEAMRKEPGESSSRKACEVCGQAFPSQAALEEHQKTHPKEGPLFTCVFCRQGFLERATLKKHMLLAHHQVQPFAPHGPQNIAALSLVPGCSPSITSTGLSPFPRKDDPTIP

SEQ ID NO: 23443 - protein, 693 aa, Homo sapiens
MASWSIQQMVIGCPLCGRHCSGGEHTGELQKEEAMAAVILESIFLKRSQQKKKTSPLNFKKRLFLLTVHKLSYYEYDFERGRRGSKKGSIDVEKITCVETVVPEKNPPPERQIPRRGEESSEMEQISIIERFPYPFQVVYDEGPLYVFSPTEELRKRWIHQLKNVIRYNSDLVQKYHPCFWIDGQYLCCSQTAKNAMGCQILENRNGSLKPGSSHRKTKKPLPPTPEEDQILKKPLPPEPAAAPVSTSELKKVVALYDYMPMNANDLQLRKGDEYFILEESNLPWWRARDKNGQEGYIPSNYVTEAEDSIEMYEWYSKHMTRSQAEQLLKQEGKEGGFIVRDSSKAGKYTVSVFAKSTGDPQGVIRHYVVCSTPQSQYYLAEKHLFSTIPELINYHQHNSAGLISRLKYPVSQQNKNAPSTAGLGYGSWEIDPKDLTFLKELGTGQFGVVKYGKWRGQYDVAIKMIKEGSMSEDEFIEEAKVMMNLSHEKLVQLYGVCTKQRPIFIITEYMANGCLLNYLREMRHRFQTQQLLEMCKDVCEAMEYLESKQFLHRDLAARNCLVNDQGVVKVSDFGLSRYVLDDEYTSSVGSKFPVRWSPPEVLMYSKFSSKSDIWAFGVLMWEIYSLGKMPYERFTNSETAEHIAQGLRLYRPHLASEKVYTIMYSCWHEKADERPTFKILLSNILDVMDEES

SEQ ID NO: 23444 - protein, 208 aa, Homo sapiens
ESAAQKTSEGLERAAENNVFHLVATVCSQEEPVQPLLREVLRPSRDSQQRVRRNLRASAREVRQEGRYRVLSSRRSLGTTSSGQESEYTPGNPEAAGNSGFQLLDLVHEEGEPEAASAGSCKTSDPDVILCNSVELIRERLTVSEDGPGVRRQEEQKHDDYVYDIYYLETATPGWIENILSVQPYSQEWELVRGPMSRRGMRHPKLLI

SEQ ID NO: 23445 - protein, 583 aa, Homo sapiens
MSATSVDQRPKGQGNKVQNGSIHQKDAVNDDDFEPYLSSQTNQSNSYPPMSDPYMPSYYAPSIGFPYSLGEAAWSTAGDQPMPYLTTYGQMSNGEHHYIPDGVFSQPGALGNTPPFLGQHGFNFFPGNADFSTWGTSGSQGQSTQSSAYSSSYGYPPSSLGRAITDGQAGFGNDTLSKVPGISSIEQGMTGLKIGGDLTAAVTKTVGTALSSSGMTSIATNSVPPVSSAAPKPTSWAAIARKPAKPQPKLKPKGNVGIGGSAVPPPPIKHNMNIGTWDEKGSVVKAPPTQPVLPPQTIIQQPQPLIQPPPLVQSQLPQQQPQPPQPQQQQGPQPQAQPHQVQPQQQQLQNRWVAPRNRGAGFNQNNGAGSENFGLGVVPVSASPSSVEVHPVLEKLKAINNYNPKDFDWNLKNGRVFIIKSYSEDDIHRSIKYSIWCSTEHGNKRLDAAYRSLNGKGPLYLLFSVNGSGHFCGVAEMKSVVDYNAYAGVWSQDKWKGKFEVKWIFVKDVPNNQLRHIRLENNDNKPVTNSRDTQEVPLEKAKQVLKIIATFKHTTSIFDDFAHYEKRQEEEEAMRRERNRNKQ

SEQ ID NO: 23446 - protein, 213 aa, Homo sapiens
MTPGTQSPFFLLLLLTVLTGSGHASSTPGGEKETSATQRSSVPSSTEKNAVSMTSSVLSSHSPGSGSSTTQGQDVTLAPATEPASGSAATWGQDVTSVPVTRPALGSTTPPAGVPGWGIALLVLVCVLVALAIVYLIALAVCQCRRKNYGQLDIFPARDTYHPMSEYPTYHTHGRYVPPSSTDRSPYEKVSAGNGGSSLSYTNPAVAATSANL

SEQ ID NO: 23447 - protein, 466 aa, Homo sapiens [sequence omitted]

SEQ ID NO: 23448 - protein, 491 aa, Homo sapiens
MLFPTSAQESSRGLPDANDLCLGLQSLSLTGWDRPWSTQDSDSSAQSSTHSVLSMLHNPLGNVLGKPPLSFLPLDPLGSDLVDKFPAPSVRGSRLDTRPILDSRSSSPSDSDTSGFSSGSDHLSDLISSLRISPPLPFLSLSGGGPRDPLKMGVGSRMDQEQAALAAVTPSPTSASKRWPGASVWPSWDLLEAPKDPFSIEREARLHRQAAAVNEATCTWSGQLPPRNYKNPIYSCKVFLGGVPWDITEAGLVNTFRVFGSLSVEWPGKDGKHPRCPPKGNMPKGYVYLVFELEKSVRSLLQACSHDPLSPDGLSEYYFKMSSRRMRCKEVQVIPWVLADSNFVRSPSQRLDPSRTVFVGALHGMLNAEALAAILNDLFGGVVYAGIDTDKHKYPIGSGRVTFNNQRSYLKAVSAAFVEIKTTKFTKKVQIDPYLEDSLCHICSSQPGPFFCRDQVCFKYFCRSCWHWRHSMEGLRHHSPLMRNQKNRDSS

SEQ ID NO: 23449 - protein, 668 aa, Homo sapiens
MAVYRAALGASLAAARLLPLGRCSPSPAPRSTLSGAAMEPAPRWLAGLRFDNRALRALPVEAPPPGPEGAPSAPRPVPGACFTRVQPTPLRQPRLVALSEPALALLGLGAPPAREAEAEAALFFSGNALLPGAEPAAHCYCGHQFGQFAGQLGDGAAMYLGEVCTATGERWELQLKGAGPTPFSRQADGRKVLRSSIREFLCSEAMFHLGVPTTRAGACVTSESTVVRDVFYDGNPKYEQCTVVLRVASTFIRFGSFEIFKSADEHTGRAGPSVGRNDIRVQLLDYVISSFYPEIQAAHASDSVQRNAAFFREVTRRTARMVAEWQCVGFCHGVLNTDNMSILGLTIDYGPFGFLDRYDPDHVCNASDNTGRYAYSKQPEVCRWNLRKLAEALQPELPLELGEAILAEEFDAEFQRHYLQKMRRKLGLVQVELEEDGALVSKLLETMHLTGADFTNTFYLLSSFPVELESPGLAEFLARLMEQCASLEELRLAFRPQMDPRQLSMMLMLAQSNPQLFALMGTRAGIARELERVEQQSRLEQLSAAELQSRNQGHWADWLQAYRARLDKDLEGAGDAAAWQAEHVRVMHANNPKYVLRNYIAQNAIEAAERGDFSEVRRVLKLLETPYHCEAGAATDAEATEADGADGRQRSYSSKPPLWAAELCVTSS

SEQ ID NO: 23450 - protein, 1453 aa, Homo sapiens
MKSCGVSLATAAAAAAAFGDEEKKMAAGKASGESEEASPSLTAEEREALGGLDSRLFGFVRFHEDGARTKALLGKAVRCYESLILKAEGKVESDFFCQLGHFNLLLEDYPKALSAYQRYYSLQSDYWKNAAFLYGLGLVYFHYNAFQWAIKAFQEVLYVDPSFCRAKEIHLRLGLMFKVNTDYESSLKHFQLALVDCNPCTLSNAEIQFHIAHLYETQRKYHSAKEAYEQLLQTENLSAQVKATVLQQLGWMHHTVDLLGDKATKESYAIQYLQKSLEADPNSGQSWYFLGRCYSSIGKVQDAFISYRQSIDKSEASADTWCSIGVLYQQQNQPMDALQAYICAVQLDHGHAAAWMDLGTLYESCNQPQDAIKCYLNATRSKSCSNTSALAARIKYLQAQLCNLPQGSLQNKTKLLPSIEEAWSLPIPAELTSRQGAMNTAQQACKPHHPNTEPVLGLSQTPISQQSLPLHMIPSSQVDDLSSPAKRKRTSSPTKNTSDNWSGGHAVSHPPVQQQAHSWCLTPQKLQHLEQLRANRNNLNPAQKLMLEQLESQFVLMQQHQMRPTGVAQVRSTGIPNGPTADSSLPTNSVSGQQPQLALTRVPSVSQPGVRPACPGQPLANGPFSAGHVPCSTSRTLGSTDTILIGNNHITGSGSNGNVPYLQRNALTLPHNRTNLTSSAEEPWKNQLSNSTQGLHKGQSSHSAGPNGERPLSSTGPSQHLQAAGSGIQNQNGHPTLPSNSVTQGAALNHLSSHTATSGGQQGITLTKESKPSGNILTVPETSRHTGETPNSTASVEGLPNHVHQMTADAVCSPSHGDSKSPGLLSSDNPQLSALLMGKANNNVGTGTCDKVNNIHPAVHTKTDNSVASSPSSAISTATPSPKSTEQTTTNSVTSLNSPHSGLHTINGEGMEESQSPMKTDLLLVNHKPSPQIIPSMSVSIYPSSAEVLKACRNLGKNGLSNSSILLDKCPPPRPPSSPYPPLPKDKLNPPTPSIYLENKRDAFFPPLHQFCTNPNNPVTVIRGLAGALKLDLGLFSTKTLVEANNEHMVEVRTQLLQPADENWDPTGTKKIWHCESNRSHTTIAKYAQYQASSFQESLREENEKRSHHKDHSDSESTSSDNSGRRRKGPFKTIKFGTNIDLSDDKKWKLQLHELTKLPAFVRVVSAGNLLSHVGHTILGMNTVQLYMKVPGSRTPGHQENNNFCSVNINIGPGDCEWFVVPEGYWGVLNDFCEKNNLNFLMGSWWPNLEDLYEANVPVYRFIQRPGDLVWINAGTVHWVQAIGWCNNIAWNVGPLTACQYKLAVERYEWNKLQSVKSIVPMVHLSWNMARNIKVSDPKLFEMIKYCLLRTLKQCQTLREALIAAGKEIIWHGRTKEEPAHYCSICEVEVFDLLFVTNESNSRKTYIVHCQDCARKTSGNLENFVVLEQYKMEDLMQVYDQFTLAPPLPSASS

SEQ ID NO: 23451 - protein, 494 aa, Homo sapiens
MSGRGAGGFPLPPLSPGGGAAFRPMGPAGPAAQYQRPGMSPGNRMPMAGLQVGPPAGSPFGAAAPLRPGMPPTMMDPFRKRLLVPQAQPPMPAQRRGLKRRKMADKVLPQRIRELVPESQAYMDLLAFERKLDQTIARKRMEIQEAIKKPLTQKRKLRIYISNTFSPSKAEGDSAGTAGTPGGTPAGDKVASWELRVEGKLLDDPSKQKRKFSSFFKSLVIELDKELYGPDNHLVEWHRMPTTQETDGFQVKRPGDLNVKCTLLLMLDHQPPQYKLDPRLARLLGVHTQTRAAIMQALWLYIKHNQLQDGHEREYINCNRYFRQIFSCGRLRFSEIPMKLAGLLQHPDPIVINHVISVDPNDQKKTACYDIDVEVDDPLKAQMSNFLASTTNQQEIASLDVKIHETIESINQLKTQRDFMLSFSTDPQDFIQEWLRSQRRDLKIITDVIGNPEEERRAAFYHQPWAQEAVGRHIFAKVQQRRQELEQVLGIRLT

SEQ ID NO: 23452 - protein, 672 aa, Homo sapiens; identical to SEQ ID NO: 18140

SEQ ID NO: 23453 - protein, 552 aa, Homo sapiens
MAEDKSKRDSIEMSMKGCQTNNGFVHNEDILEQTPDPGSSTDNLKHSTRGILGSQEPDFKGVQPYAGMPKEVLFQFSGQARYRIPREILFWLTVASVLVLIAATIAIIALSPKCLDWWQEGPMYQIYPRSFKDSNKDGNGDLKGIQDKLDYITALNIKTVWITSFYKSSLKDFRYGVEDFREVDPIFGTMEDFENLVAAIHDKGLKLIIDFIPNHTSDKHIWFQLSRTRTGKYTDYYIWHDCTHENGKTIPPNNWLSVYGNSSWHFDEVRNQCYFHQFMKEQPDLNFRNPDVQEEIKEILRFWLTKGVDGFSLDAVKFLLEAKHLRDEIQVNKTQIPDTVTQYSELYHDFTTTQVGMHDIVRSFRQTMDQYSTEPGRYRFMGTEAYAESIDRTVMYYGLPFIQEADFPFNNYLSMLDTVSGNSVYEVITSWMENMPEGKWPNWMIGGPDSSRLTSRLGNQYVNVMNMLLFTLPGTPITYYGEEIGMGNIVAANLNESYDINTLRSKSPMQWDNSSNAGFSEASNTWLPTNSDYHTVNVDVILLRHPCSSAVA

SEQ ID NO: 23454 - protein, 1026 aa, Homo sapiens [sequence omitted]

SEQ ID NO: 23455 - protein, 438 aa, Homo sapiens
MCKDYVYDKDIEQIAKEEQGEALKLQASTSTEVSHQQCSVPGLGEKFPTWETTKPELELLGHNPRRRRITSSFTIGLRGLINLGNTCFMNCIVQALTHTPILRDFFLSDRHRCEMPSPELCLVCEMSSLFRELYSGNPSPHVPYKLLHLVWIHARHLAGYRQQDAHEFLIAALDVLHRHCKGDDVGKAANNPNHCNCIIDQIFTGGLQSDVTCQACHGVSTTIDPCWDISLDLPGSCTSFWPMSPGRESSVNGESHIPGITTLTDCLRRFTRPEHLGSSAKIKCGSCQSYQESTKQLTMNKLPVVACFHFKRFEHSAKQRRKITTYISFPLELDMTPFMASSKESRMNGQLQLPTNSGNNENKYSLFAVVNHQGTLESGHYTSFIRHHKDQWFKCDDAVITKASIKDVLDSEGYLLFYHKQVLEHESEKVKEMNTQAY

SEQ ID NO: 23456 - protein, 521 aa, Homo sapiens
MEATSREAAPAKSSASGPNAPPALFELCGRAVSAHMGVLESGVWALPGPILQSILPLLNIYYLERIEETALKKGLSTQAIWRRLWDELMKTRPSSLESVTCWRAKFMEAFFSHVLRGTIDVSSDRRLCDQRFSPLLHSSRHVRQLTICNMLQGATELVAEPNRRVLETLASSLHTLKFRHLLFSDVAAQQSLRQLLHQLIHHGAVSQVSLYSWPVPESALFILILTMSAGFWQPGPGGPPCRLCGEASRGRAPSRDEGSLLLGSRRPRRDAAERCAAALMASRRKSEAKQMPRAAPATRVTRRSTQESLTAGGTDLKRELHPPATSHEAPGTKRSPSAPAATSSASSSTSSYKRAPASSAPQPKPLKRFKRAAGKKGARTRQGPGAESEDLYDFVFIVAGEKEDGEEMEIGEVACGALDGSDPSCLGLPALEASQRFRSISTLELFTVPLSTEAALTLCHLLSSWVSLESLTLSYNGEHPGVAGIGLRLPSSTSCVPNSREVGGANWGYDQEVREEGLYAS

SEQ ID NO: 23457 - protein, 198 aa, Homo sapiens
MAAENDANIAIVGNVRLVGEVPSSMTTESTATAMQSEMSTSIMETTTTLATSTARRGKPPTKEPISQTTDDILVASAECPSDDEDIDPCEPSSGGLANPTRAGGREPYPGSAEVIRESSSTTGMVVGIVAAAALCILILLYAMYKYRNRDEGSYHVDESRNYISNSAQSNGAVVKEKQPSSAKSSNKNKKNKDKEYYV

SEQ ID NO: 23458 - protein, 584 aa, Homo sapiens
MGPADSWGHHWMGILLSASLCTVWSPPAAAQLTLNANPLDATQSEDVVLPVFGTPRTPQIHGRSRELAKPSIAVSPGTAIEQKDMVTFYCTTKDVNITIHWVSNNLSIVFHERMQLSKDGKILTILIVQREDSGTYQCEARDALLSQRSDPIFLDVKYGPDPVEIKLESGVASGEVVEVMEGSSMTFLAETKSHPPCAYTWFLLDSILSHTTRTFTIHAVSREHEGLYRCLVSNSATHLSSLGTLKVRVLETLTMPQVVPSSLNLVENARSVDLTCQTVNQSVNVQWFLSGQPLLPSEHLQLSADNRTLIIHGLQRNDTGPYACEVWNWGSRARSEPLELTINYGPDQVHITRESASEMISTIEAELNSSLTLQCWAESKPGAEYRWTLEHSTGEHLGEQLIIRALTWEHDGIYNCTASNSLTGLARSTSVLVKVVGPQSSSLSSGAIAGIVIGILAVIAVASELGYFLCIRNARRPSRKTTEDPSHETSQPIPKEEHPTEPSSESLSPEYRNISQLQGRIRVELMQPPDLPEETYETKLPSASRRGNSFSPWKPPPKPLMPPLRLVSTVPKNMESIYEVFMPH

SEQ ID NO: 23459 - protein, 1982 aa, Homo sapiens [sequence omitted]

SEQ ID NO: 23460 - protein, 205 aa, Homo sapiens
MNSIKSFSDHAQCGRLEVHLVGGFSDDRQLSQKLTHQLLSEFDRQEDDIHLVTLCVTELNDREENENHFPVIYGIAVNIKTAEIYRASFQDRGPEEQLRAARTLAGGPMISIYDAETEQLRIGPYSWTPFPHVDFWLHQDDKQILENLSTSPLAEPPHFVEHIRSTLMFLKKHPSPAHTLFSGNKALLYKKNEDGLWEKISSPGS

SEQ ID NO: 23461 - protein, 623 aa, Homo sapiens
VGRSPSATPAERPPRGCAELAQRQQHEPDPRIGRAPVESRLLREAGPTPARAAGQLEYETQIKKMLCSKDSLGLKEELTDEDREKVAVHEGINSGTAMSRGLYQPATIFMGRQMSAILSMRDFSTEHKSPQPTKNFSIPDPHSHRQTAQSSNVTDSCVVQTSNDTQCLNKSDNIDGKASLQIGEKMPVTASVLSEEEQTHCLEIGSNTRHGKSNLSEGKKSAELNSPLRERLSPENRTTDLKCDSSSGSEGEILTREHIEVEEKRASPPVSPIPVSEYCESENKWSQEKHSPWEGVSDHLAHREPKSQKPFRKMQEEEEESWSTSSDLTISISEDDLILESPEPQPNPGGKMEGEDGIEALKLIHAEQERVALSTEKNCILQTLSSPDSEKESSTNAPTREPGQTPDSDVPRAQVGQHVATLKEHDNSVKEEATALLRKALTEECGRRSAIHSSESSCSLPSILNDNSGIKEAKPAVWLNSVPTREQEVSSGCGDKSKKENVAADIPITETEAYQLLKKATLQDNTNQTENRFQKTDASVSHLSGLNIGSGAFETKTANKIASEASFSSSEGSPLSRHENKKKPVINLKSNALWDESDDSNSEIEAALRPRNHNTDDSDDFYD

SEQ ID NO: 23462 - protein, 556 aa, Homo sapiens
MKADLLRARNMKRYINQLTVAKKQCEKRIRILGGPAYDQQEDGALDEGEGPQSQKILQFEDILANTFYREHFGMYMERMDKRALISFWESVEHLKNANKNEIPQLVGEIYQNFFVESKEISVEKSLYKEIQQCLVGNKGIEVFYKIQEDVYETLKDRYYPSFIVSDLYEKLLIKEEEKHASQMISNKDEMGPRDEAGEEAVDDGTNQINEQASFAVNKLRELNEKLEYKRQALNSIQNAPKPDKKIVSKLKDEIILIEKERTDLQLHMARTDWWCENLGMWKASITSGEVTEENGEQLPCYFVMVSLQEVGGVETKNWTVPRRLSEFQNLHRKLSECVPSLKKVQLPSLSKLPFKSIDQKFMEKSKNQLNKFLQEETEEDSDLSDYGDDVDGRKDALAEPCFMLIGEIFELRGMFKWVRRTLIALVQVTFGRTINKQIRDTVSWIFSEQMLVYYINIFRDAFWPNGKLAPPTTIRSKEQSQETKQRAQQKLLENIPDMLQSLVGQQNARHGIIKIFNALQETRANKHLLYALMELLLIELCPELRVHLDQLKAGQV

SEQ ID NO: 23463 - protein, 430 aa, Homo sapiens
MTKSNGEEPKMGGRMERFQQGVRKRTLLAKKKVQNITKEDVKSYLFRNAFVLLTVTAVIVGTILGFTLRPYRMSYREVKYFSFPGELLMRMLQMLVLPLIISSLVTGMAALDSKASGKMGMRAVVYYMTTTIIAVVIGIIIVIIIHPGKGTKENMHREGKIVRVTAADAFLDLIRYAPVGILFLIAGKIVEMEDMGVIGGQLAMYTVTVIVGLLIHAVIVLPLLYFLVTRKNPWVFIGGLLQALITALGTSSSSATLPITFKCLEENNGVDKRVTRFVLPVGATINMDGTALYEALAAIFIAQVNNFELNFGQIITISITATAASIGAAGIPQAGLVTMVIVLTSVGLPTDDITLIIAVDWFLDRLRTTTNVLGDSLGAGIVEHLSRHELKNRDVEMGNSVIEENEMKKPYQLIAQDNETEKPIDSETKM

SEQ ID NO: 23464 - protein, 451 aa, Homo sapiens [sequence omitted]

SEQ ID NO: 23465 - protein, 670 aa, Homo sapiens
MPHAFKPGDLVFAKMKGYPHWPARIDDIADGAVKPPPNKYPIFFFGTHETAFLGPKDLFPYDKCKDKYGKPNKRKGFNEGLWEIQNNPHASYSAPPPVSSSDSEAPEANPADGSDADEDDEDRGVMAVTAVTATAASDRMESDSDSDKSSDNSGLKRKTPALKMSVSKRARKASSDLDQASVSPSEEENSESSSESEKTSDQDFTPEKKAAVRAPRRGPLGGRKKKKAPSASDSDSKADSDGAKPEPVAMARSASSSSSSSSSSDSDVSVKKPPRGRKPAEKPLPKPRGRKPKPERPPSSSSSDSDSDEVDRISEWKRRDEARRRELEARRRREQEEELRRLREQEKEEKERRRERADRGEAERGSGGSSGDELREDDEPVKKRGRKGRGRGPPSSSDSEPEAELEREAKKSAKKPQSSSTEPARKPGQKEKRVRPEEKQQAKPVKVERTRKRSEGFSMDRKVEKKKEPSVEEKLQKLHSEIKFALKVDSPDVKRCLNALEELGTLQVTSQILQKNTDVVATLKKIRRYKANKDVMEKAAEVYTRLKSRVLGPKIEAVQKVNKAGMEKEKAEEKLAGEELAGEEAPQEKAEDKPSTDLSAPVNGEATSQKGESAEDKEHEEGRDSEEGPRCGSSEDLHDVREGPDLDRPGSDRQERERARGDSEALDEES

SEQ ID NO: 23466 - protein, 720 aa, Homo sapiens
MELGCWTQLGLTFLQLLLISSLPREYTVINEACPGAEWNIMCRECCEYDQIECVCPGKREVVGYTIPCCRNEENECDSCLIHPGCTIFENCKSCRNGSWGGTLDDFYVKGFYCAECRAGWYGGDCMRCGQVLRAPKGQILLESYPLNAHCEWTIHAKPGFVIQLRFVMLSLEFDYMCQYDYVEVRDGDNRDGQIIKRVCGNERPAPIQSIGSSLHVLFHSDGSKNFDGFHAIYEEITACSSSPCFHDGTCVLDKAGSYKCACLAGYTGQRCENLLEERNCSDPGGPVNGYQKITGGPGLINGRHAKIGTVVSFFCNNSYVLSGNEKRTCQQNGEWSGKQPICIKACREPKISDLVRRRVLPMQVQSRETPLHQLYSAAFSKQKLQSAPTKKPALPFGDLPMGYQHLHTQLQYECISPFYRRLGSSRRTCLRTGKWSGRAPSCIPICGKIENITAPKTQGLRWPWQAAIYRRTSGVHDGSLHKGAWFLVCSGALVNERTVVVAAHCVTDLGKVTMIKTADLKVVLGKFYRDDDRDEKTIQSLQISAIILHPNYDPILLDADIAILKLLDKARISTRVQPICLAASRDLSTSFQESHITVAGWNVLADVRSPGFKNDTLRSGVVSVVDSLLCEEQHEDHGIPVSVTDNMFCASWEPTAPSDICTAETGGIAAVSFPGRASPEPRWHLMGLVSWSYDKTCSHRLSTAFTKVLPFKDWIERNMK

SEQ ID NO: 23467 - protein, 448 aa, Homo sapiens
MDELFPLIFPAEPAQASGPYVEIIEQPKQRGMRFRYKCEGRSAGSIPGERSTDTTKTHPTIKINGYTGPGTVRISLVTKDPPHRPHPHELVGKDCRDGFYEAELCPDRCIHSFQNLGIQCVKKRDLEQAISQRIQTNNNPFQVPIEEQRGDYDLNAVRLCFQVTVRDPSGRPLRLPPVLSHPIFDNRAPNTAELKICRVNRNSGSCLGGDEIFLLCDKVQKEDIEVYFTGPGWEARGSFSQADVHRQVAIVFRTPPYADPSLQAPVRVSMQLRRPSDRELSEPMEFQYLPDTDDRHRIEEKRKRTYETFKSIMKKSPFSGPTDPRPPPRRIAVPSRSSASVPKPAPQPYPFTSSLSTINYDEFPTMVFPSGQISQASALAPAPPQVLPQAPAPAPAPAMVSALAQRPPDPAPAPLGAPGLPNGLLSGDEDFSSIADMDFSALLSQISS

SEQ ID NO: 23468 - protein, 228 aa, Homo sapiens
METLESELTCPICLELFEDPLLLPCAHSLCFNCAHRILVSHCATNESVESITAFQCPTCRHVITLSQRGLDGLKRNVTLQNIIDRFQKASVSGPNSPSETRRERAFDANTMTSAEKVLCQFCDQDPAQDAVKTCVTCEVSYCDECLKATHPNKKPFTGHRLIEPIPDSHIRGLMCLEHEDEKQNLESNLTNLIKRNTELETLLAKLIQTCQHVELECSVLFPRVAQWG

SEQ ID NO: 23469 - protein, 730 aa, Homo sapiens [sequence omitted]

SEQ ID NO: 23470 - protein, 852 aa, Homo sapiens
MEPLTFKDVAIEFSLEEWQCLDTAQRDLYRNVLLENYRNLVFLGIAVSKPYLITCLEQKKEPWNIKRHEMVAKPPVMSFHFAQDLWPEQNIKDSFQKVTLRRYGKCEYENLQLRKGCKHVDECTGHKGGHNTVNQCLTATPSKIFQCNKYVKVFDKFSNSNRYKRRHTGNKHFKCKECSKSFCVLSQLTQHRRIHTRVNSYKCEECGKAFNWFSTLTKHKRIHTGEKPYKCEECGKAFNQSSQLTRHKIIHTEEKPNKCEECGKAFKQASHLTIHKIIHTGEKPYKYEECGKVFSQSSHLTTQKILHTGENLYKCKECGKAFNLFSNLTNHKRIHAGEKPYKCKECGRAFNISSNLNKQEKIHTGGKLNKCEECDKAFNRSLKLTAHKKILMEEKPYKCEECGKVFNQFSTLTRHKIIHTGEKPYKCKECGKAFNQSSNLTEHKKIHTAEKSYKCEECGKAFNQHSNLINHRKIYSGEKPYKCEECGKAFNRSSTLTRHKKIHTGEKPYKCEECDRAFSQSSNLTEHKKIHTGEKPYKCEECGKAFNRFSTLTKHKRIHTGEKPYKCEECGKAFNQSYQLTRHKIVHTKEKLNKCEEFGKAFKQSSHRTIHKIIHTGEKPYKCEEHGKVFNQSSNLTTQKIIHTGENLYKFEEHGKAFNLFSNITNHKIIYTGEKPHKCEECGKAYNRFSNLTIHKRIHTGEKPYQCAECGKAFNCSSTLNRHKIIHTGEKPYKCKECGKAFNLSSTLTAHKKIHTGEKPYKCEECGKAFNQSSNLTTHKKIHTSEKPYKCEECGKSFNQFSSLNIHKIIHTGEKPYKCGDYGRAFNLSSNLTTHKKIHTGEKPYKCEYGKT

SEQ ID NO: 23471 - protein, 500 aa, Homo sapiens
MCPRHPEPVPLAHPLPVLKEALEKVDQILRQAMSAPGVAAMSAVVIHNDTVLWTGNFGKKNGSDPASGAPNEYTMYRISSISKIFPVLMLYRLWEEGIVASLDDPLERYASTFTINNPLGLASAEQQGLILRRMASQLSGLPRRLRSTSLLWKGSTQEALNLLKDDVLVVDPGTRCHYSTLAFSLLAHVLAAHTAQGDYQRWVSENVLEPLGMADTGFDLTPDVRARLAAGFYGSGRPAPLYDLGWYRPSGQMYSTAADLAKLAVALLGGGPRRLLRPDAAKTLLAPLLACPGAYFANETGTPWEFHAQRGYRVVRKDGDLDGYAATFSLVPPLRLGLVLLLAGPRPPGPDLVARAYDELLPALERALREAEPGPAPPPTAHPFAGYFTFANLTFYEVRAGPAGELRLRQFGPRVEALVPPAFRTLALRHLHGRVFQLHVAHEFPCALPLGDAWLSLEAQHGQLVNFYPLDHHGLSPGFDVPGLNTYRVLRLRGKPVFKT

SEQ ID NO: 23472 - protein, 1369 aa, Homo sapiens
MSVPVAPKKSCYTQLRDNRNAARNNNESILSLGDTNANQIMLEVSSSHDESKTCDLGDEIGNTNSSEPENRTHFHKEFHQLQGFGKGSQAGSASLKDFRLSSTIQRELNEEHTVERGTDSLQTTRSIQGPSLSSWRNVMSEASLDVLAKRDAEIPRHVPKDKLAKTLDNEELRRHSLERASSSVAAVGSLTPQHPQPLSLDSREARGQIPGGGEGPQKTLPDHAVPAAFPATDSTSEGKSVRHPKPSTSESKQSTPSETQTVGAHVLQVCSEHTSHSAHPEPALNLTLASKEIPSKLEAQLGQGKGEAKLDLKYVPPRRVEQEGKAAQEGYLGCHKEENLSALEGRDPCGEAHPEATDALGHLLNSDLHHLGVGRGNCEEKRGVNPGEQDSLHTTPKQGSASLGGADNQPTGKISPCAGEKLGERTSSSFSPGDSHVAFIPNNLTDSKPLDVIEEERRLGSGNKDSVMVLVFNPSVGENKTEVPEPLDPQSGRSEARESKEVTTSVAENRNLLENADKIESTSARADSVLNIPAPLHPETTVNMTYQPTTPSSSFQDVSVFGMDAGSPLVVPPPTDSARLLNTSPKVPDKNTCPSGIPKPVFTHSKDTPSSQEGMENYQVEKTEERTETKPIIMPKPKHVRPKIITYIRRNPQALGQVDASLVPVGLPYAPPTCTMPLPHEEKAAGGDLKPSANLYEKFKPDLQKPRVFSSGLMVSGIKPPGHPFSQMSEKFLQEVTDHPGKEEFCSPPYAHYEVPPTFYRSAMLLKPQLGLGAMSRLPSAKSRILIASQRSSASAIHPPGPITTATSLYSSDPSADLKKASSSNAAKSNLPKSGLRPPGYSRLPAAKLAAFGFVRSSSVSSVSSTQSGDSAQPEQGRPATRSTFGNEEQPVLKASLPSKDTPKGAGRVAPPASSSVTAPRRSLLPAPKSTSTPAGTKKDAQKDQDTNKPAVSSPKRVAASTTKLHSPGYPKQRTAAARNGFPPKPDPQAREAERQLVLRLKERCEQQTRQLGVAQGELKRAICGFDALAVATQHFFRKNESALVKEKELSIELANIRDEVAFHTAKCEKLQKEKEELERRFEDEVKRLGWQQQAELQELEERLQLQFEAEMARLQEEHGDQLLSIRCQHQEQVEDLTASHDAALLEMENNHTVAITILQDDHDHKVQELMSTHELEKKELEENFEKLRLSLQDQVDTLTFQSQSLRDRARRFEEALRKNTEEQLEIALAPYQHLEEDMKSLKQVLEMKNQQIHEQEKKILELEKLAEKNIILEEKIQVLQQQNEDLKARIDQNTVVTRQLSEENANLQEYVEKETQEKKRLSRTNEELLWKLQTGDPTSPIKLSPTSPVYRGSSSGPSSPARVSTTPR

SEQ ID NO: 23473 - protein, 1675 aa, Homo sapiens
MFRQFYLWTCLASGIILGSLFEICLGQYDDDCKLARGGPPATIVAIDEESRNGTILVDNMLIKGTAGGPDPTIELSLKDNVDYWVLMDPVKQMLFLNSTGRVLDRDPPMNIHSIVVQVQCINKKVGTIIYHEVRIVVRDRNDNSPTFKHESYYATVNELTPVGTTIFTGFSGDNGATDIDDGPNGQIEYVIQYNPDDPTSNDTFEIPLMLTGNIVLRKRLNYEDKTRYFVIIQANDRAQNLNERRTTTTTLTVDVLDGDDLGPMFLPCVLVPNTRDCRPLTYQAAIPELRTPEELNPIIVTPPIQAIDQDRNIQPPSDRPGILYSILVGTPEDYPRFFHMHPRTAELSLLEPVNRDFHQKFDLVIKAEQDNGHPLPAFAGLHIEILDENNQSPYFTMPSYQGYILESAPVGATISDSLNLTSPLRIVALDKDIEDTKDPELHLFLNDYTSVFTVTQTGITRYLTLLQPVDREEQQTYTFSITAFDGVQESEPVIVNIQVMDANDNTPTFPEISYDVYVYTDMRPGDSVIQLTAVDADEGSNGEITYEILVGAQGDFIINKTTGLITIAPGVEMIVGRTYALTVQAADNAPPAERRNSICTVYIEVLPPNNQSPPRFPQLMYSLEISEAMRVGAVLLNLQATDREGDSITYAIENGDPQRVFNLSETTGILTLGKALDRESTDRYILIITASDGRPDGTSTATVNIVVTDVNDNAPVFDPYLPRNLSVVEEEANAFVGQVKATDPDAGINGQVHYSLGNFNNLFRITSNGSIYTAVKLNREVRDYYELVVVATDGAVHPRHSTLTLAIKVLDIDDNSPVFTNSTYTVLVEENLPAGTTILQIEAKDVDLGANVSYRIRSPEVKHFFALHPFTGELSLLRSLDYEAFPDQEASITFLVEAFDIYGTMPPGIATVTVIVKDMNDYPPVFSKRIYKGMVAPDAVKGTPITTVYAEDADPPGLPASRVRYRVDDVQFPYPASIFEVEEDSGRVITRVNLNEEPTTIFKLVVVAFDDGEPVMSSSATVKILVLHPGEIPRFTQEEYRPPPVSELATKGTMVGVISAAAINQSIVYSIVSGNEEDTFGINNITGVIYVNGPLDYETRTSYVLRVQADSLEVVLANLRVPSKSNTAKVYIEIQDENNHPPVFQKKFYIGGVSEDARMFTSVLRVKATDKDTGNYSVMAYRLIIPPIKEGKEGFVVETYTGLIKTAMLFHNMRRSYFKFQVIATDDYGKGLSGKADVLVSVVNQLDMQVIVSNVPPTLVEKKIEDLTEILDRYVQEQIPGAKVVVESIGARRHGDAFSLEDYTKCDLTVYAIDPQTNRAIDRNELFKFLDGKLLDINKDFQPYYGEGGRILEIRTPEAVTSIKKRGESLGYTEGALLALAFIIILCCIPAILVVLVSYRQFKVRQAECTKTARIQAALPAAKPAVPAPAPVAAPPPPPPPPPGAHLYEELGDSSMYEMPQYGSRRRLLPPAGQEEYGEVVGEAEEEYEEEEWARKRMIKLVVDREYETSSTGEDSAPECQRNRLHHPSIHSNINGNIYIAQNGSVVRTRRACLTDNLKVASPVRLGGPFKKLDKLAVTHEENVPLNTLSKGPFSTEKMNARPTLVTFAPCPVGTDNTAVKPLRNRLKSTVEQESMIDSKNIKEALEFHSDHTQSDDEELWMGPWNNLHIPMTKL

SEQ ID NO: 23474 - protein, 176 aa, Homo sapiens [sequence omitted]

SEQ ID NO: 23475 - protein, 417 aa, Homo sapiens
EHLKDKLEEYMARFSKVRIVRTKKREGLIRTRLLGASMARGEVLTFLDSHCEVNVNWLPPLLNQIALNHKTIVCPMIDVIDHNHFGYEAQAGDAMRGAFDWEMYYKRIPIPPELQRADPSDPFESPVMAGGLFAVDRKWFWELGGYDPGLEIWGGEQYEISFKVWMCGGEMFDVPCSRVGHIYRKYVPYKVPSGTSLARNLKRVAETWMDEFAEYIYQRRPEYRHLSTGDISAQKELRKQLKCKDFKWFMAAVAWDVPKYYPPVEPPPAAWGEIRNVAANLCVDSKHGATGTELRLDICVKDGSERTWSHEQLFTFGWREDIRPGEPLHTRKFCFDAISHNSPVTLYDCHGMKGNQLWGYRKDRTLFHPVSNSCMDCNPAEKKIFMARCDPLSETQQWIFEHINMTVLEKFNHHANS

SEQ ID NO: 23476 - protein, 871 aa, Homo sapiens
MLRKVRSWTEIWRWATLLFLFYHLGYVCGQIRYPVPEESQEGTFVGNVAQDFLLDTDSLSARRLQVAGEVNQRHFRVDLDSGALLIKNPIDREALCGLSASCIVPLEFVTEGPLEMYRAEVEIVDVNDHAPRFPRQQLDLEIGEAAPPGQRFPLEKAQDADVGSNSISSYRLSSNEHFALDVKKRSDGSLVPELLLEKPLDREKQSDYRLVLTAVDGGNPPRSGTAELRVSVLDVNDNAPAFQQSSYRISVLESAPAGMVLIQLNASDPDLGPSGNVTFYFSGHTPDRVRNLFSLHPTTGKLTLLGPLDFESENYYEFDVRARDGGSPAMEQHCSLRVDLLDVNDNAPYITVTSELGTLPESAEPGTVVALISVQDPDSGSNGDVSLRIPDHLPFALKSAFRNQFSLVTAGPLDREAKSSYDIMVTASDAGNPPLSTHRTIFLNISDVNDNPPSFFQRSHEVFVPENNRPGDLLCSLAASDPDSGLNALISYSLLEPRNRDVSASSFISLNPQTGAVHATRSFDYEQTQTLQFEVQARDRGNPPLSSTVTVRLFVLDLNDNAPAVLRPRARPGSLCPQALPPSVGAGHLITKVTAVDLDSGYNAWVSYQLLEAPDPSLFAVSRYAGEVRTAVPIPADLPPQKLVIVVKDSGSPPLSTSVTLLVSLEEDTHPVVPDLRESSAPREGESRLTLYLAVSLVAICFVSFGSFVALLSKCLRGAACGVTCFPAGTCACLTRSRRREGLPPSNGILRIQLGSDDPIKFVDVGGHSHGCTPLASAPTRSDSFMMVKSPSAPMAGEPVRPSCPPSDLLYGLEVRPLQAQQMLEGYSDPGIWLGHVLESTGLSVSAHSDVTIFVRGNYVVDAVLCNCFVN

SEQ ID NO: 23477 - protein, 162 aa, Homo sapiens
MDPFVVLVLCLSCLLLLSIWRQSSGRGKLPPGPTPLPVIGNILQIDIKDVSKSLTNLSKIYGPVFTLYFGLERMVVLHGYEVVKEALIDLGEEFSGRGHFPLAERANRGFGIVFSNGKRWKEIRRFSLMTLRNFGMGKRSIEDRVQEEARCLVEELRKTKGG

SEQ ID NO: 23478 - protein, 923 aa, Homo sapiens
MNSMNPMKPALPPAPHGDGSFAYESVPWQQSATQPAGSLSVVTTVWGVGNATQSQVLGNPMGPAGSPSGSSMMPGVAGGSSALTSPQCLGQQAFAEGGANKGYVQQGVYSRGGYPGAPGFTTGYAGGPGGLGLPSHAARPSTDFTQAAAAAAVAAAAATATATATATVAALQEKQSQELSQYGAMGAGQSFNSQFLQHGGPRGPSVPAGMNPTGIGGVMGPSGLSPLAMNPTRAAGMTPLYAGQRLPQHGYPGPPQAQPLPRQGVKRTYSEVYPGQQYLQGGQYAPSTAQFAPSPGQPPAPSPSYPGHRLPLQQGMTQSLSVPGPTGLHYKPTEQFNGQGASFNGGSVSYSQPGLSGPTRSIPGYPSSPLPGNPTPPMTPSSSVPYMSPNQEVKSPFLPDLKPNLNSLHSSPSGSGPCDELRLTFPVRDGVVLEPFRLQHNLAVSNHVFQLRDSVYKTLIMRPDLELQFKCYHHEDRQMNTNWPASVQVSVNATPLTIERGDNKTSHKPLYLKHVCARPQHHPSPSPPAAACVSCSHLFVLQLVHRPSVRSVLQGLLKKRLLPAEHCITKIKRNFSSGTIPGTPGPNGEDGVEQTAIKVSLKCPITFRRIQLPARGHDCRHIQCFDLESYLQLNCERGTWRCPVCNKTALLEGLEVDQYMLGILIYIQNSDYEEITIDPTCSWKPVPVKPDMHIKEEPDGPALKRCRTVSPAHVLMPSVMEMIAALGPGAAPFAPLQPPSVPAPSDYPGQGSSFLGPGTFPESFPPTTPSTPTLAEFTPGPPPISYQSDIPSSLLTSEKSTACLPSQMAPAGHLDPTHNPGTPGLHTSNLGAPPGPQLHHSNPPPASRQSLGQASLGPTGELAFSPATGVMGPPSMSGAGEAPEPALDLLPELTNPDELLSYLGPPDLPTNNNDDLLSLFENN

SEQ ID NO: 23479 - protein, 717 aa, Homo sapiens
MVWCLGLAVLSLVISQGADGRGKPEVVSVVGRAGESVVLGCDLLPPAGRPPLHVIEWLRFGFLLPIFIQFGLYSPRIDPDYVGRVRLQKGASLQIEGLRVEDQGWYECRVFFLDQHIPEDDFANGSWVHLTVNSPPQFQETPPAVLEVQELEPVTLRCVARGSPLPHVTWKLRGKDLGQGQGQVQVQNGTLRIRRVERGSSGVYTCQASSTEGSATHATQLLVLGPPVIVVPPKNSTVNASQDVSLACHAEAYPANLTYSWFQDNINVFHISRLQPRVRILVDGSLRLLATQPDDAGCYTCVPSNGLLHPPSASAYLTVLYPAQVTAMPPETPLPIGMPGVIRCPVRANPPLLFVSWTKDGKALQLDKFPGWSQGTEGSLIIALGNEDALGEYSCTPYNSLGTAGPSPVTRVLLKAPPAFIERPKEEYFQEVGRELLIPCSAQGDPPPAAPPSPLPGPGPLLQYLSLPFFREMNVDGDWPPLEEPSPAAPPDYMDTRRCPTSSFLRSPETPPVSPRESLPGAVVGAGATAEPPYTALADWTLRERLLPGLLPAAPRGSLTSQSSGRGSASFLRPPSTAPSAGGSYLSPAPGDTSSWASGPERWPRREHVVTVSKRRNTSVDENYEWDSEFPGDMELLETLHLGLASSRLRPEAEPELGVKTPEEGCLLNTAHVTGPEARCAALREEFLAFRRRRDATRARLPAYRQPVPHPEQATLL

SEQ ID NO: 23480 - protein, 181 aa, Homo sapiens
MTRTRAALLLFTALATSLGFNLDTEELTAFRVDSAGFGDSVVQYANSWVVVGAPQKITAANQTGGLYQCGYSTGACEPIGLQVPPEAVNMSLGLSLASTTSPSQLLLTQRLPVSRQGECRDHQGFEELTHIQLGVRWARDSLARVDQKEGIWKKSYHVLQWFLTLLPAHPADRPHAAGPFL

SEQ ID NO: 23481 - protein, 326 aa, Homo sapiens
MVLSQEEPDSARGTSEAQPLGPAPTGAAPPPGPGPSDSPEAAVEKVEVELAGPATAEPHEPPEPPEGGWGWLVMLAAMWCNGSVFGIQNACGVLFVSMLETFGSKDDDKMVFKTAWVGSLSMGMIFFCCPIVSVFTDLFGCRKTAVVGAAVGFVGLMSSSFVSSIEPLYLTYGIIFACGCSFAYQPSLVILGHYFKKRLGLVNGIVTAGSSVFTILLPLLLRVLIDSVGLFYTLRVLCIFMFVLFLAGFTYRPLATSTKDKESGGSGSSLFSRKKFSPPKNFQFCHLQGDSLCSVGSWNTTCTFWILCALCSLGEYAPSLIMNITI

SEQ ID NO: 23482 - protein, 686 aa, Homo sapiens
MHARLLGLSALLQAAEQSARLYTVAYYFTTGRLLWGWLALAVLLPGFLVQALSYLWFRADGHPGHCSLMMLHLLQLGVWKRHWDAALTSLQKELEAPHRGWLQLQEADLSALRLLEALLQTGPHLLLQTYVFLASDFTDIVPGVSTLFSWSSLSWALVSYTRFMGFMKPGHLAMPWAALFCQQLWRMGMLGTRVLSLVLFYKAYHFWVFVVAGAHWLVMTFWLVAQQSDIIDSTCHWRLFNLLVGAVYILCYLSFWDSPSRNRMVTFYMVMLLENIILLLLATDFLQGASWTSLQTIAGVLSGFLIGSVSLVIYYSLLHPKSTDIWQGCLRKSCGIAGGDKTERRDSPRATDLAGKRTESSGSCQGASYEPTILGKPPTPEQVPPEAGLGTQVAVEDSFLSHHHWLWVKLALKTGNVSKINAAFGDNSPAYCPPAWGLSQQDYLQRKALSAQQELPSSSRDPSTLENSSAFEGVPKAEADPLETSSYVSFASDQQDEAPTQNPAATQGEGTPKEGADAVSGTQGKGTGGQQRGGEGQQSSTLYFSATAEVATSSQQEGSPATLQTAHSGRRLGKSSPAQPASPHPVGLAPFPDTMADISPILGTGPCRGFCPSAGFPGRTLSISELEEPLEPKRELSHHAAVGVWVSLPQLRTAHEPCLTSTPKSESIQTDCSCREQMKQEPSFFI

SEQ ID NO: 23483 - protein, 745 aa, Homo sapiens
MGLSTSAIWKNTRVEIVNPYEVKRKVKVNGLKMVDEPMEEGEADSCHDEGVVKEIPITHHVKEGYEKADPAQFELLKVLGQGSFGKVFLVRKKTGPDAGQLYAMKVLKKASLKVRDRVRTKMERDILVEVNHPFIVKLHYAFQTEGKLYLILDFLRGGDVFTRLSKEVLFTEEDVKFYLAELALALDHLHQLGIVYRDLKPENILLDEIGHIKLTDFGLSKESVDQEKKAYSFCGTVEYMAPEVVNRRGHSQSADWWSYGVLMFEMLTGTLPFQGKDRNETMNMILKAKLGMPQFLSAEAQSLLRMLFKRNPANRLGSEGVEEIKRHLFFANIDWDKLYKREVQPPFKPASGKPDDTFCFDPEFTAKTPKDSPGLPASANAHQLFKGFSFVATSIAEEYKITPITSANVLPIVQINGNAAQFGEVYELKEDIGVGSYSVCKRCIHATTNMEFAVKIIDKSKRDPSEEIEILMRYGQHPNIITLKDVFDDGRYVYLVTDLMKGGELLDRILKQKCFSEREASDILYVISKTVDYLHCQGVVHRDLKPSNILYMDESASADSIRICDFGFAKQLRGENGLLLTPCYTANFVAPEVLMQQGYDAACDIWSLGVLFYTMLAGYTPFANGPNDTPEEILLRIGNGKFSLSGGNWDNISDGAKDLLSHMLHMDPHQRYTAEQILKHSWITHRDQLPNDQPKRNDVSHVVKGAMVATYSALTHKTFQPVLEPVAASSLAQRRSMKKRTSTGL

SEQ ID NO: 23484 - protein, 890 aa, Homo sapiens
DDDFFHELPETFPSDPPEPLPHFLIEPEEAYIVKNKPVNLYCKASPATQIYFKCNSEWVHQKDHIVDERVDETSGLIVREVSIEISRQQVEELFGPEDYWCQCVAWSSAGTTKSRKAYVRIAYLRKTFEQEPLGKEVSLEQEVLLQCRPPEGIPVAEVEWLKNEDIIDPVEDRNFYITIDHNLIIKQARLSDTANYTCVAKNIVAKRKSTTATVIVYVNGGWSTWTEWSVCNSRCGRGYQKRTRTCTNPAPLNGGAFCEGQSVQKIACTTLCPVDGRWTPWSKWSTCGTECTHWRRRECTAPAPKNGGKDCDGLVLQSKNCTDGLCMQTAPDSDDVALYVGIVIAVIVCLAISVVVALFVYRKNHRDFESDIIDSSALNGGFQPVNIKAARQDLLAVPPDLTSAAAMYRGPVYALHDVSDKIPMTNSPILDPLPNLKIKVYNTSGAVTPQDDLSEFTSKLSPQMTQSLLENEALSLKNQSLARQTDPSCTAFGSFNSLGGHLIVPNSGVSLLIPAGAIPQGRVYEMYVTVHRKETMRPPMDDSQTLLTPVVSCGPPGALLTRPVVLTMHHCADPNTEDWKILLKNQAAQGQWEDVVVVGEENFTTPCYIQLDAEACHILTENLSTYALVGHSTTKAAAKRLKLAIFGPLCCSSLEYSIRVYCLDDTQDALKEILHLERQMGGQLLEEPKALHFKGSTHNLRLSIHDIAHSLWKSKLLAKYQEIPFYHVWSGSQRNLHCTFTLERFSLNTVELVCKLCVRQVEGEGQIFQLNCTVSEEPTGIDLPLLDPANTITTVTGPSAFSIPLPIRQKLCSSLDAPQTRGHDWRMLAHKLNLDRYLNYFATKSSPTGVILDLWEAQNFPDGNLSMLAAVLEEMGRHETVVSLAAEGQY

SEQ ID NO: 23485 - protein, 584 aa, Homo sapiens
MGPADSWGHHWMGILLSASLCTVWSPPAAAQLTLNANPLDATQSEDVVLPVFGTPRTPQIHGRSRELAKPSIAVSPGTAIEQKDMVTFYCTTKDVNITIHWVSNNLSIVFHERMQLSKDGKILTILIVQREDSGTYQCEARDALLSQRSDPIFLDVKYGPDPVEIKLESGVASGEVVEVMEGSSMTFLAETKSHPPCAYTWFLLDSILSHTTRTFTIHAVSREHEGLYRCLVSNSATHLSSLGTLKVRVLETLTMPQVVPSSLNLVENARSVDLTCQTVNQSVNVQWFLSGQPLLPSEHLQLSADNRTLIIHGLQRNDTGPYACEVWNWGSRARSEPLELTINYGPDQVHITRESASEMISTIEAELNSSLTLQCWAESKPGAEYRWTLEHSTGEHLGEQLIIRALTWEHDGIYNCTASNSLTGLARSTSVLVKVVGPQSSSLSSGAIAGIVIGILAVIAVASELGYFLCIRNARRPSRKTTEDPSHETSQPIPKEEHPTEPSSESLSPEYRNISQLQGRIRVELTKLPSASRRGNSFSPWKPPPKPLMPPLRLVSTVPKNMESIYEELVNPEPNTYIQINPSV

SEQ ID NO: 23486 - protein, 2313 aa, Homo sapiens; identical to SEQ ID NO: 8434

SEQ ID NO: 23487 - protein, 258 aa, Homo sapiens
MKSLLNAFTKKEVPFREAPAYSNRRRRPPNTLAAPRVLLRSNSDNNLNASAPDWAVCSTATSHRSLSPQLLQQMPSKPEGAAKTIGSYVPGPRSRSPSLNRLGGAGEDGKRPQPLWHVGSPFALGANKDSLSAFEYPGPKRKLYSAVPGRLFVAVKPYQPQVDGEIPLHRGDRVKVLSIGEGGFWEGSARGHIGWFPAECVEEVQCKPRDSQAETRADRSKKLFRHYTVGSYDSFDTSRLQTHLGVPATLGDSWSLDL

SEQ ID NO: 23488 - protein, 369 aa, Homo sapiens
MYGKGKSNSSAVPSDSQAREKLALYVYEYLLHVGAQKSAQTFLSEIRWEKNITLGEPPGFLHSWWCVFWDLYCAAPERRETCEHSSEAKAFHDYSAAAAPSPVLGNIPPGDGMPVGPVPPGFFQPFMSPRYPGGPRPPLRIPNQALGGVPGSQPLLPSGMDPTRQQGHPNMGGPMQRMTPPRGMVPLGPQSDPWLSLQNYGGAMRPPLNALGGPGMPGMNMGPGGGRPWPNPTNANSIPYSSASPGNYVGPPGGGGPPGTPIMPSPADSTNSGDNMYTLMNAVPPGPNRPNFPMGPGSDGPMGGLGGMESHHMNGSLGSGDMDSISKNSPNNMSLSNQPGTPRDDGEMGGNFLNPFQSESYSPSMTMSV

SEQ ID NO: 23489 - protein, 295 aa, Homo sapiens
MDLWQLLLTLALAGSSDAFSGSEATAAILSRAPWSLQSVNPGLKTNSSKEPKFTKCRSPERETFSCHWTDEVHHGTKNLGPIQLFYTRRNTQEWTQEWKECPDYVSAGENSCYFNSSFTSIWIPYCIKLTSNGGTVDEKCFSVDEIVQPDPPIALNWTLLNVSLTGIHADIQVRWEAPRNADIQKGWMVLEYELQYKEVNETKWKMMDPILTTSVPVYSLKVDKEYEVRVRSKQRNSGNYGEFSEVLYVTLPQMSQFTCEEDFYFPWLLIIIFGIFGLTVMLFVFLFSKQQRKEN

SEQ ID NO: 23490 - protein, 230 aa, Homo sapiens
MDVGFQGRCSRWSRALRGRYSSAERKRRARQPREPREQAPRVSAPPGRLPAFFPQFALLPQSGPRLILCTCEWAHTSSPGTILSSISLGESTFLTINLLATAGKVAGCEWGGEGRFTRSEAPKLAASAKRLCFLRFLTNKWGGMLAWPPAAPARALGSLSSLMPSFRRSPAALTPGLLRPLAKVCSPMDAGRGLSLSALTQLRLKPQSSHLLPPVYPPAPLPPPKDVPLQ

SEQ ID NO: 23491 - protein, 775 aa, Homo sapiens
MSHHTWPSPALNLDFATYLLRDLGAHFFLEIEGFEPNPTVAKTSPPVFSKPMDSNIRQCISGNCDDMDSPQSPQDDVTETPSNPNSPSAQLAKEEQRRKKRRLKKRIFAAVSEGCVEELVELLVELQELCRRRHDEDVPDFLMHKLTASDTGKTCLMKALLNINPNTKEIVRILLAFAEENDILGRFINAEYTEEAYEGQTALNIAIERRQGDIAALLIAAGADVNAHAKGAFFNPKYQHEGFYFGETPLALAACTNQPEIVQLLMEHEQTDITSRDSRGNNILHALVTVAEDFKTQNDFVKRMYDMILLRSGNWELETTRNNDGLTPLQLAAKMGKAEILKYILSREIKEKRLRSLSRKFTDWAYGPVSSSLYDLTNVDTTTDNSVLEITVYNTNIDNRHEMLTLEPLHTLLHMKWKKFAKHMFFLSFCFYFFYNITLTLVSYYRPREEEAIPHPLALTHKMGWLQLLGRMFVLIWAMCISVKEGIAIFLLRPSDLQSILSDAWFHFVFFIQAVLVILSVFLYLFAYKEYLACLVLAMALGWANMLYYTRGFQSMGMYSVMIQKVILHDVLKFLFVYIVFLLGFGVALASLIEKCPKDNKDCSSYGSFSDAVLELFKLTIGLGDLNIQQNSKYPILFLFLLITYVILTFVLLLNMLIALMGETVENVSKESERIWRLQRARTILEFEKMLPEWLRSRFRMGELCKVAEDDFRLCLRINEVKWTEWKTHVSFLNEDPGPVRRTADFNKIQDSSRNNSKTTLNAFEEVEEFPETSV

SEQ ID NO: 23492 - protein, 561 aa, Homo sapiens
MALSLEEEAGRIKDCWDNQEAPALSTCSNANIFRRINAILDNSLDFSRVCTTPINRGIHDHLPDFQDSEETVTSRMLFPTSAQESSRGLPDANDLCLGLQSLSLTGWDRPWSTQDSDSSAQSSTHSVLSMLHNPLGNVLGKPPLSFLPLDPLGSDLVDKFPAPSVRGSRLDTRPILDSRSSSPSDSDTSGFSSGSDHLSDLISSLRISPPLPFLSLSGGGPRDPLKMGVGSRMDQEQAALAAVTPSPTSASKRWPGASVWPSWDLLEAPKDPFSIEREARLHRQAAAVNEATCTWSGQLPPRNYKNPIYSCKVFLGGVPWDITEAGLVNTFRVFGSLSVEWPGKDGKHPRCPPKGYVYLVFELEKSVRSLLQACSHDPLSPDGLSEYYFKMSSRRMRCKEVQVIPWVLADSNFVRSPSQRLDPSRTVFVGALHGMLNAEALAAILNDLFGGVVYAGIDTDKHKYPIGSGRVTFNNQRSYLKAVSAAFVEIKTTKFTKKVQIDPYLEDSLCHICSSQPGPFFCRDQVCFKYFCRSCWHWRHSMEGLRHHSPLMRNQKNRDSS

SEQ ID NO: 23493 - protein, 92 aa, Homo sapiens
GITTCNGKEQVKRKKSSKSEAKGTVSKVTGKKITKIISLGKKKPSTDEQTSSAEEDVPTCGKTALPGDEQRAPKWVSFSPAVVSVPSSSKAR

SEQ ID NO: 23494 - protein, 431 aa, Homo sapiens
MPLSTAGILSSSSAASNRSRNKARYRTKAVSSEVDESLFGDIKSPAQGQSDSPIVLLRDKHTLQKTLTALGLDRKPETIQLITRDMVRELIVPTEDPSGESLIISPEEFERIKWASHVLTREELEARDQAFKKEKEATMDAVMTRKKIMKQKEMVWNNNKKLSDLEEVAKERAQNLLQRANKLRMEQEEELKDMSKIILNAKCHAIRDAQILEKQQIQKELDTEEKRLDQMMEVERQKSIQRQEELERKRREERIRGRRQIVEQMEKNQEERSLLAEQREQEKEQMLEYMEQLQEEDLKDMERRQQQKLKMQAEIKRINDENQKQKAELLAQEKLADQMVMEFTKKKMAREAEFEAEQERIRREKEKEIARLRAMQEKAQDYQAEQLFCALTGPLPTFPGCLAGQAQPGGCRQRVAQKGKGKCAEEDGNRG

SEQ ID NO: 23495 - protein, 401 aa, Homo sapiens
MEFQAVVMAVGGGSRMTDLTSSIPKPLLPVGNKPLIWYPLNLLERVGFEEVIVVTTRDVQKALCAEFKMKMKPDIVCIPDDADMGTADSLRYIYPKLKTDVLVLSCDLITDVALHEVVDLFRAYDASLAMLMRKGQDSIEPVPGQKGKKKAVEQRDFIGVDSTGKRLLFMANEADLDEELVIKGSILQKHPRIRFHTGLVDAHLYCLKKYIVDFLMENGSITSIRSELIPYLVRKQFSSASSQQGQEEKEEDLKKKELKSLDIYSFIKEANTLNLAPYDACWNACRGDRWEDLSRSQVRCYVHIMKEGLCSRVSTLGLYMEANRQVPKLLSALCPEEPPVHSSAQIVSKHLVGVDSLIGPETQIGEKSSIKRSVIGSSCLIKDRVTITNCLLMNSVTVEEG

SEQ ID NO: 23496 - protein, 142 aa, Homo sapiens [sequence omitted]

SEQ ID NO: 23497 - protein, 396 aa, Homo sapiens
MAPVPLGPLGETYCEEHGEKIYFFCENDAEFLCVFCREGPTHQAHTVGFLDEAIQPYRDRLRSRLEALSTERDEIEDVKCQEDQKLQVLLTQIESKKHQVETAFERLQQELEQQRCLLLARLRELEQQIWKERDEYITKVSEEVTRLGAQVKELEEKCQQPASELLQDVRGTIVTCEMKTFVSPEAISPDLVKKIRDFHRKILTLPEMMRMFSENLAHHLEIDSGVITLDPQTASRSLVLSEDRKSVRYTRQKKSLPDSPLRFDGLPAVLGFPGFSSGRHRWQVDLQLGDGGGCTVGVAGEGVRRKGEMGLSAEDGVWAVIISHQQCWASTSPGTDLPLSEIPRGVRVALDYEAGQVTLHNAQTQEPIFTFTASFSGKVFPFFAVWKKGSCLTLKG

SEQ ID NO: 23498 - protein, 493 aa, Homo sapiens [sequence omitted]

SEQ ID NO: 23499 - protein, 737 aa, Homo sapiens
MQLLQQQQQEAVSEGSSSGRAREASGAPTSSKDNYLGGTSTISDNAKELCKAVSVSMGLGVEALEHLSPGEQLRGDCMYAPLLGVPPAVRPTPCAPLAECKGSLLDDSAGKSTEDTAEYSPFKGGYTKGLEGESLGCSGSAAAGSSGTLELPSTLSLYKSGALDEAAAYQSRDYYNFPLALAGPPPPPPPPHPHARIKLENPLDYGSAWAAAAAQCRYGDLASLHGAGAAGPGSGSPSAAASSSWHTLFTAEEGQLYGPCGGGGGGGGGGGGGGGGGGGGGGGEAGAVAPYGYTRPPQGLAGQESDFTAPDVWYPGGMVSRVPYPSPTCVKSEMGPWMDSYSGPYGDMRLETARDHVLPIDYYFPPQKTCLICGDEASGCHYGALTCGSCKVFFKRAAEGKQKYLCASRNDCTIDKFRRKNCPSCRLRKCYEAGMTLGARKLKKLGNLKLQEEGEASSTTSPTEETTQKLTVSHIEGYECQPIFLNVLEAIEPGVVCAGHDNNQPDSFAALLSSLNELGERQLVHVVKWAKALPGFRNLHVDDQMAVIQYSWMGLMVFAMGWRSFTNVNSRMLYFAPDLVFNEYRMHKSRMYSQCVRMRHLSQEFGWLQITPQEFLCMKALLLFSIKANLFARIPVDGLKNQKFFDELRMNYIKELDRIIACKRKNPTSCSRRFYQLTKLLDSVQPIARELHQFTFDLLIKSHMVSVDFPEMMAEIISVQVPKILSGKVKPIYFHTQ

SEQ ID NO: 23500 - protein, 687 aa, Homo sapiens
MVSYWDTGVLLCALLSCLLLTGSSSGSKLKDPELSLKGTQHIMQAGQTLHLQCRGEAAHKWSLPEMVSKESERLSITKSACGRNGKQFCSTLTLNTAQANHTGFYSCKYLAVPTSKKKETESAIYIFISDTGRPFVEMYSEIPEIIHMTEGRELVIPCRVTSPNITVTLKKFPLDTLIPDGKRIIWDSRKGFIISNATYKEIGLLTCEATVNGHLYKTNYLTHRQTNTIIDVQISTPRPVKLLRGHTLVLNCTATTPLNTRVQMTWSYPDEKNKRASVRRRIDQSNSHANIFYSVLTIDKMQNKDKGLYTCRVRSGPSFKSVNTSVHIYDKAFITVKHRKQQVLETVAGKRSYRLSMKVKAFPSPEVVWLKDGLPATEKSARYLTRGYSLIIKDVTEEDAGNYTILLSIKQSNVFKNLTATLIVNVKPQIYEKAVSSFPDPALYPLGSRQILTCTAYGIPQPTIKWFWHPCNHNHSEARCDFCSNNEESFILDADSNMGNRIESITQRMAIIEGKNKMASTLVVADSRISGIYICIASNKVGTVGRNISFYITDVPNGFHVNLEKMPTEGEDLKLSCTVNKFLYRDVTWILLRTVNNRTMHYSISKQKMAITKEHSITLNLTIMNVSLQDSGTYACRARNVYTGEEILQKKEITIRGEHCNKKAVFSRISKFKSTRNDCTTQSNVKH

SEQ ID NO: 23501 - protein, 174 aa, Homo sapiens
AVHPVKNWMDMKRRVGPYRRCYFFSHCSTPGEPLVVLHVALTGDISSNIQAIVKEHPPSETEEKNKITAAIFYSISLTQQGLQGVELGTFLIKRVVKELQFTHSKPLGSHRPGTVGWGSGDREAAAGEICSADKRFLLLSPHQSCFLPGTSPSPSPSPCWQMLRYPGLWLPGCA

SEQ ID NO: 23502 - protein, 187 aa, Homo sapiens
MSLLAKPMSFETTAITFFIILLICLICILLLLVVFLYKCFQGRKGKETKKVPCTDANGGVDCAAAKVVTSNPEDHERRVWCRMPGILVQRQSKEVLATPLENRRDMEAEEENQINEKQEPENAGETGQEEDDGLQKIHTSVTRTPSVVESQKRPLKGVTFSREVIVVDLGNEYPTPRSYTREHKERK

SEQ ID NO: 23503 - protein, 515 aa, Homo sapiens
MGLEALVPLAMIVAIFLLLVDLMHRHQRWAARYPPGPLPLPGLGNLLHVDFQNTPYCFDQLRRRFGDVFSLQLAWTPVVVLNGLAAVREAMVTRGEDTADRPPAPIYQVLGFGPRSQGVILSRYGPAWREQRRFSVSTLRNLGLGKKSLEQWVTEEAACLCAAFADQAGRPFRPNGLLDKAVSNVIASLTCGRRFEYDDPRFLRLLDLAQEGLKEESGFLREVLNAVPVLPHIPALAGKVLRFQKAFLTQLDELLTEHRMTWDPAQPPRDLTEAFLAKKEKAKGSPESSFNDENLRIVVGNLFLAGMVTTSTTLAWGLLLMILHLDVQRGRRVSPGCPIVGTHVCPVRVQQEIDDVIGQVRRPEMGDQAHMPCTTAVIHEVQHFGDIVPLGVTHMTSRDIEVQGFRIPKGTTLITNLSSVLKDEAVWKKPFRFHPEHFLDAQGHFVKPEAFLPFSAGRRACLGEPLARMELFLFFTSLLQHFSFSVAAGQPRPSHSRVVSFLVTPSPYELCAVPR

SEQ ID NO: 23504 - protein, 153 aa, Homo sapiens
MAAGTAVGAWVLVLSLWGAVVGAQNITARIGEPLVLKCKGAPKKPPQRLEWKLNTGRTEAWKVLSPQGGGPWDSVARVLPNGSLFLPAVGIQDEGILGGLGTAALLIGVILWQRRQRRGEERKAPENQEEEEERAELNQSEEPEAGESSTGGP

SEQ ID NO: 23505 - protein, 3184 aa, Homo sapiens
MEFNNTTQEDVQERLAYAEQLVVELKDIIRQKDVQLQQKDEALQEERKAADNKIKKLKLHAKAKLTSLNKYIEEMKAQGGTVLPTEPQSEEQLSKHDKSSTEEEMEIEKIKHKLQEKEELISTLQAQLTQAQAEQPAQSSTEMEEFVMMKQQLQEKEEFISTLQAQLSQTQAEQAAQKLRVLQRKLEEHEESLVGRAQVVDLLQQELTAAEQRNQILSQQLQQMEAEHNTLRNTVETEREESKILLEKMELEVAERKLSFHNLQEEMHHLLEQFEQAGQAQAELESRYSALEQKHKAEMEEKTSHILSLQKTGQELQSACDALKDQNSKLLQDKNEQAVQSAQTIQQLEDQLQQKSKEISQFLNRLPLQQHETASQTSFPDVYNEGTQAVTEENIASLQKRVVELENEKGALLLSSIELEELKAENEKLSSQITLLEAQNRTGEADREVSEISIVDIANKRSSSAEESGQDVLENTFSQKHKELSVLLLEMKEAQEEIAFLKLQLQGKRAEEADHEVLDQKEMKQMEGEGIAPIKMKVFLEDTGQDFPLMPNEESSLPAVEKEQASTEHQSRTSEEISLNDAGVELKSTKQDGDKSLSAVPDIGQCHQDELERLKSQILELELNFHKAQEIYEKNLDEKAKEISNLNQLIEEFKKNADNNSSAFTALSEERDQLLSQVKELSMVTELRAQVKQLEMNLAEAERQRRLDYESQTAHDNLLTEQIHSLSIEAKSKDVKIEVLQNELDDVQLQFSEQSTLIRSLQSQLQNKESEVLEGAERVRHISSKVEELSQALSQKELEITKMDQLLLEKKRDVETLQQTIEEKDQQVTEISFSMTEKMVQLNEEKFSLGVEIKTLKEQLNLLSRAEEAKKEQVEEDNEVSSGLKQNYDEMSPAGQISKEELQHEFDLLKKENEQRKRKLQAALINRKELLQRVSRLEEELANLKDESKKEIPLSETERGEVEEDKENKEYSEKCVTSKCQEIEIYLKQTISEKEVELQHIRKDLEEKLAAEEQFQALVKQMNQTLQDKTNQIDLLQAEISENQAIIQKLITSNTDASDGDSVALVKETVVISPPCTGSSEHWKPELEEKILALEKEKEQLQKKLQEALTSRKAILKKAQEKERHLREELKQQKDDYNRLQEQFDEQSKENENIGDQLRQLQIQVRESIDGKLPSTDQQESCSSTPGLEEPLFKATEQHHTQPVLESNLCPDWPSHSEDASALQGGTSVAQIKAQLKEIEAEKVELELKVSSTTSELTKKSEEVFQLQEQINKQGLEIESLKTVSHEAEVHAESLQQKLESSQLQIAGLEHLRELQPKLDELQKLISKKEEDVSYLSGQLSEKEAALTKIQTEIIEQEDLIKALHTQLEMQAKEHDERIKQLQVELCEMKQKPEEIGEESRAKQQIQRKLQAALISRKEALKENKSLQEELSLARGTIERLTKSLADVESQVSAQNKEKDTVLGRLALLQEERDKLITEMDRSLLENQSLSSSCESLKLALEGLTEDKEKLVKEIESLKSSKIAESTEWQEKHKELQKEYEILLQSYENVSNEAERIQHVVEAVRQEKQELYGKLRSTEANKKETEKQLQEAEQEMEEMKEKMRKFAKSKQQKILELEEENDRLRAEVHPAGDTAKECMETLLSSNASMKEELERVKMEYETLSKKFQSLMSEKDSLSEEVQDLKHQIEGNVSKQANLEATEKHDNQTNVTEEGTQSIPGETEEQDSLSMSTRPTCSESVPSAKSANPAVSKDFSSHDEINNYLQQIDQLKERIAGLEEEKQKNKEFSQTLENEKNTLLSQISTKDGELKMLQEEVTKMNLLNQQIQEELSRVTKLKETAEEEKDDLEERLMNQLAELNGSIGNYCQDVTDAQIKNELLESEMKNLKKCVSELEEEKQQLVKEKTKVESEIRKEYLEKIQGAQKEPGNKSHAKELQELLKEKQQEVKQLQKDCIRYQEKISALERTVKALEFVQTESQKDLEITKENLAQAVEHRKKAQAELASFKVLLDDTQSEAARVLADNLKLKKELQSNKESVKSQMKQKDEDLERRLEQAEEKHLKEKKNMQEKLDALRREKVHLEETIGEIQVTLNKKDKEVQQLQENLDSTVTQLAAFTKSMSSLQDDRDRVIDEAKKWERKFSDAIQSKEEEIRLKEDNCSVLKDQLRQMSIHMEELKINISRLEHDKQIWESKAQTEVQLQQKVCDTLQGENKELLSQLEETRHLYHSSQNELAKLESELKSLKDQLTDLSNSLEKCKEQKGNLEGIIRQQEADIQNSKFSYEQLETDLQASRELTSRLHEEINMKEQKIISLLSGKEEAIQVAIAELRQQHDKEIKELENLLSQEEEENIVLEEENKKAVDKTNQLMETLKTIKKENIQQKAQLDSFVKSMSSLQNDRDRIVGDYQQLEERHLSIILEKDQLIQEAAAENNKLKEEIRGLRSHMDDLNSENAKLDAELIQYREDLNQVITIKDSQQKQLLEVQLQQNKELENKYAKLEEKLKESEEANEDLRRSFNALQEEKQDLSKEIESLKVSISQLTRQVTALQEEGTLGLYHAQLKVKEEEVHRLSALFSSSQKRIAELEEELVCVQKEAAKKVGEIEDKLKKELKHLHHDAGIMRNETETAEERVAELARDLVEMEQKLLMVTKENKGLTAQIQSFGRSMSSLQNSRDHANEELDELKRKYDASLKELAQLKEQGLLNRERDALLSETAFSMNSTEENSLSHLEKLNQQLLSKDEQLLHLSSQLEDSYNQVQSFSKAMASLQNERDHLWNELEKFRKSEEGKQRSAAQPSTSPAEVQSLKKAMSSLQNDRDRLLKELKNLQQQYLQINQEITELHPLKAQLQEYQDKTKAFQIMQEELRQENLSWQHELHQLRMEKSSWEIHERRMKEQYLMAISDKDQQLSHLQNLIRELRSSSSQTQPLKVQYQRQASPETSASPDGSQNLVYETELLRTQLNDSLKEIHQKELRIQQLNSNFSQLLEEKNTLSIQLCDTSQSLRENQQHYGDLLNHCAVLEKQVQELQAGPLNIDVAPGAPQEKNGVHRKSDPEELREPQQSFSEAQQQLCNTRQEVNELRKLLEEERDQRVAAENALSVAEEQIRRLEHSEWDSSRTPIIGSCGTQEQALLIDLTSNSCRRTRSGVGWKRVLRSLCHSRTRVPLLAAIYFLMIHVLLILCFTGHL

SEQ ID NO: 23506 - protein, 938 aa, Homo sapiens
MKQSPALAPEERCRRAGSPKPVLRADDNNMGNGCSQKLATANLLRFLLLVLIPCICALVLLLVILLSYVGACMNITHSQCQMLPYHATLTPLLSVVRNMEMEKFLKFFTYLHRLSCYQHIMLFGCTLAFPECIIDGDDSHGLLPCRSFCEAAKEGCESVLGMVNYSWPDFLRCSQFRNQTESSNVSRICFSPQQENGKQLLCGRGENFLCASGICIPGKLQCNGYNDCDDWSDEAHCNCSENLFHCHTGKCLNYSLVCDGYDDCGDLSDEQNCACHSQGLVECRNGQCIPSTFQCDGDEDCKDGSDEENCSVIQTSCQEGDQRCLYNPCLDSCGGSSLCDPNNSLNNCSQCEPITLELCMNLPYNSTSYPNYFGHRTQKEASISWESSLFPALVQTNCYKYLMFFSCTILVPKCDVNTGEHIPPCRALCEHSKERCESVLGIVGLQWPEDTDCSQFPEENSDNQTCLMPDEYVEECSPSHFKCRSGQCVLASRRCDGQADCDDDSDEENCGCKERDLWECPSNKQCLKHTVICDGFPDCPDYMDEKNCSFCQDDELECANHACVSRDLWCDGEADCSDSSDEWDCVTLSINVNSSSFLMVHRAATEHHVCADGWQEILSQLACKQMGLGEPSVTKLIQEQEKEPRWLTLHSNWESLNGTTLHELLVNGQSCESRSKISLLCTKQDCGRRPAARMNKRILGGRTSRPGRWPWQCSLQSEPSGHICGCVLIAKKWVLTVAHCFEGRENAAVWKVVLGINNLDHPSVFMQTRFVKTIILHPRYSRAVVDYDISIVELSEDISETGYVRPVCLPNPEQWLEPDTYCYITGWGHMGNKMPFKLQEGEVRIISLEHCQSYFDMKTITTRMICAGYESGTVDSCMGDSGGPLVCEKPGGRWTLFGLTSWGSVCFSKVLGPGVYSNVSYFVEWIKRQIYIQTFLLN

SEQ ID NO: 23507 - protein, 136 aa, Homo sapiens
MARTKQTARKSTGGKAPRKQLATKAARKSAPATGGVKKPHRYRPGTVALREIRRYQKSTELLIRKLPFQRLVREIAQDFKTDLRFQSSAVMALQEACEAYLVGLFEDTNLCAIHAKRVTIMPKDIQLARRIRGERA

SEQ ID NO: 23508 - protein, 509 aa, Homo sapiens
MEFSGRKWRKLRLAGDQRNASYPHCLQFYLQPPSENISLIEFENLAIDRVKLLKSVENLGVSYVKGTEQYQSKLESELRKLKFSYRENLEDEYEPRRRDHISHFILRLAYCQSEELRRWFIQQEMDLLRFRFSILPKDKIQDFLKDSQLQFEAISDEEKTLREQEIVASSPSLSGLKLGFESIYKIPFADALDLFRGRKVYLEDGFAYVPLKDIVAIILNEFRAKLSKALALTARSLPAVQSDERLQPLLNHLSHSYTGQDYSTQGNVGKISLDQIDLLSTKSFPPCMRQLHKALRENHHLRHGGRMQYGLFLKGIGLTLEQALQFWKQEFIKGKMDPDKFDKGYSYNIRHSFGKEGKRTDYTPFSCLKIILSNPPSQGDYHGCPFRHSDPELLKQKLQSYKISPGGISQILDLVKGTHYQVACQKYFEMIHNVDDCGFSLNHPNQFFCESQRILNGGKDIKKEPIQPETPQPKPSVQKTKDASSALASLNSSLEMDMEGLEDYFSEDS

SEQ ID NO: 23509 - protein, 817 aa, Homo sapiens
MSDTRRRVKVYTLNEDRQWDDRGTGHVSSTYVEELKGMSLLVRAESDGSLLLESKINPNTAYQKQQDTLIVWSEAENYDLALSFQEKAGCDEIWEKICQVQGKDPSVEVTQDLIDESEEERFEEMPETSHLIDLPTCELNKLEEIADLVTSVLSSPIRREKLALALENEGYIKKLLQLFQACENLENTEGLHHLYEIIRGILFLNKATLFEVMFSDECIMDVVGCLEYDPALAQPKRHREFLTKTAKFKEVIPITDSELRQKIHQTYRVQYIQDIILPTPSVFEENFLSTLTSFIFFNKVEIVSMLQEDEKFLSEVFAQLTDEATDDDKRRELVNFFKEFCAFSQTLQPQNRDAFFKTLAKLGILPALEIVMGMDDLQVRSAATDIFSYLVEFSPSMVREFVMQEAQQSDDDILLINVVIEQMICDTDPELGGAVQLMGLLRTLIDPENMLATTNKTEKSEFLNFFYNHCMHVLTAPLLTNTSEDKCEKDNIVGSNKNNTICPDNYQTAQLLALILELLTFCVEHHTYHIKNYIMNKDLLRRVLVLMNSKHTFLALCALRFMRRIIGLKDEFYNRYITKGNLFEPVINALLDNGTRYNLLNSAVIELFEFIRVEDIKSLTAHIVENFYKALESIEYVQTFKGLKTKYEQEKDRQNQKLNSVPSILRSNRFRRDAKALEEDEEMWFNEDEEEEGKAVVAPVEKPKPEDDFPDNYEKFMETKKAKESEDKENLPKRTSPGGFKFTFSHSASAANGTNSKSVVAQIPPATSNGSSSKTTNLPTSVTATKGSLVGLVDYPDDEEEDEEEESSPRKRPRLGS

SEQ ID NO: 23510 - protein, 816 aa, Homo sapiens
MVYSRRGSLGSRLLLLWLLLAYWKAGSGQLHYSIPEEAKHGTFVGRIAQDLGLELAELVPRLFRVASKGRGDLLEVNLQNGILFVNSRIDREELCRRRAECSIHLEVIVDRPLQVFHVEVAVKDINDNPPRFSRQEQRLFILESRMPDSRFPLEGASDLDIGANAQLRYRLNPNEYFDLDVKTNEEETNFLELVLRKSLDREETQEHRLLVIATDGGKPELTGTVQLLINVLDANDNAPEFDKSIYNVRLLENAPSGTLVIKLNASDADEGINKEIVYFFSNLVLDDVKSKFIINSNTGEIKVNGELDYEDYNSYEINIDAMDKSTFPLSGHCKVVVKLLDVNDNTPEMAITTLFLPVKEDAPLSTVIALISVSDRDSGANGQVTCSLMPHVPFKLVSTFKNYYSLVLDSALDRESVSVYELVVTARDGGSPSLWATASVSVEVADVNDNAPAFAQPQYTVFVKENNPPGCHIFTVSARDADAQENALVSYSLVERRVGERPLSSYVSVHAESGKVYALQPLDHEEVELLQFQVSARDAGVPPLGSNVTLQVFVLDENDNAPALLVPRVGGTGGAVSELVPRSVGAGHVVAKVRAVDPDSGYNAWLSYELQPAPGSARIPFRVGLYTGEISTTRSLDETEAPRHRLLVLVKDHGEPPLTATATVLVSLVESGQAPKASSRASAGAVGPEAALVDVNVYLIIAICAVSSLLVLTLLLYTALRCSAQPTEAVCTRGKPTLLCSSAVGSWSYSQQRRQRVCSGEAPPKTDLMAFSPSLPQGPTSTDNVSFLILTSIFPSQFSNIKCHIHPLFLYLKIMS

SEQ ID NO: 23511 - protein, 732 aa, Homo sapiens
MVSWGRFICLVVVTMATLSLARPSFSLVEDTTLEPEDAISSGDDEDDTDGAEDFVSENSNNKRAPYWTNTEKMEKRLHAVPAANTVKFRCPAGGNPMPTMRWLKNGKEFKQEHRIGGYKVRNQHWSLIMESVVPSDKGNYTCVVENEYGSINHTYHLDVVERSPHRPILQAGLPANASTVVGGDVEFVCKVYSDAQPHIQWIKHVEKNGSKYGPDGLPYLKVLKAAGVNTTDKEIEVLYIRNVTFEDAGEYTCLAGNSIGISFHSAWLTVLPAPGREKEITASPDYLEIAIYCIGVFLIACMVVTVILCRMKNTTKKPDFSSQPAVHKLTKRIPLRRQVTVSAESSSSMNSNTPLVRITTRLSSTADTPMLAGVSEYELPEDPKWEFPRDKLTLGKPLGEGCFGQVVMAEAVGIDKDKPKEAVTVAVKMLKDDATEKDLSDLVSEMEMMKMIGKHKNIINLLGACTQDGPLYVIVEYASKGNLREYLRARRPPGMEYSYDINRVPEEQMTFKDLVSCTYQLARGMEYLASQKCIHRDLAARNVLVTENNVMKIADFGLARDINNIDYYKKTTNGRLPVKWMAPEALFDRVYTHQSDVWSFGVLMWEIFTLGGSPYPGIPVEELFKLLKEGHRMDKPANCTNELYMMMRDCWHAVPSQRPTFKQLVEDLDRILTLTTNEEYLDLSQPLEQYSPSYPDTRSSCSSGDDSVFSPDPMPYEPCLPQYPHINGSVKT

SEQ ID NO: 23512 - protein, 241 aa, Homo sapiens
MSLYCGIACRRKFFWCYRLLSTYVTKTRYLFELKEDDDACKKAQQTGAFYLFHSLAPLLQTSAHQYLAPRHSLLELERLLGKFGQDAQRIEDSVLIGCSEQQEAWFALDLGLDSSFSISASLHKPEMETELKGSFIELRKALFQLNARDASLLSTAQALLRWHDAHQFCSRSGQPTKKNVAGSKRVCPSNNIIYYPQMAPVAITLVSDGTRCLLARQSSFPKGMYSALAGFCDIAYRAVLN

SEQ ID NO: 23513 - protein, 611 aa, Homo sapiens
MASRGARQRLKGSGASSGDTAPAADKLRELLGSREAGGAEHRTELSGNKAGQVWAPEGSTAFKCLLSARLCAALLSNISDCDETFNYWEPTHYLIYGEGFQTWEYSPAYAIRSYAYLLLHAWPAAFHARILQTNKILVFYFLRCLLAFVSCICELYFYKAVCKKFGLHVSRMMLAFLVLSTGMFCSSSAFLPSSFCMYTTLIAMTGWYMDKTSIAVLGVAAGAILGWPFSAALGLPIAFDLLVMKHRWKSFFHWSLMALILFLVPVVVIDSYYYGKLVIAPLNIVLYNVFTPHGPDLYGTEPWYFYLINGFLNFNVAFALALLVLPLTSLMEYLLQRFHVQNLGHPYWLTLAPMYIWFIIFFIQPHKEERFLFPVYPLICLCGAVALSALQKCYHFVFQRYRLEHYTVTSNWLALGTVFLFGLLSFSRSVALFRGYHGPLDLYPEFYRIATDPTIHTVPEGRPVNVCVGKEWYRFPSSFLLPDNWQLQFIPSEFRGQLPKPFAEGPLATRIVPTDMNDQNLEEPSRYIDISKCHYLVDLDTMRETPREPKYSSNKEEWISLAYRPFLDASRSSKLLRAFYVPFLSDQYTVYVNYTILKPRKAKQIRKKSGG

SEQ ID NO: 23514 - protein, 961 aa, Homo sapiens
MKGLSGSRTQPPLCSGHTCGLAPPEDCEHLHHGPDARPPYLLSPADSCPGGRHRCSPRSSVHSECVMMPVVLGDHVSSSTFPRMHYSSHYDTRDDCAVAHAGAKINRIPANLLDQFEKQLPLHRDGFHTLQYQRTSAAAEQRSESPGRIRHLVHSVQKLFTKSHSLEGSSKSNANGTKADGRADDHHHAHHAKHSKRSKSKERKPEGKPRPGMSSWWSSDDNLDSDSTYRTPSVLNRHHLGPVAHCYPDALQSPFGDLSLKTSKSNNDVKCSACEGLALTPDAKYLKRSSWSTLTVSQAKEAYRKSSLNLDKPLLHQDAKPALRPCHYLQVPQDEWGGYPTGGKDEEIPCRRMRSGSYIKAMGDEESGESDSSPKTSPKSAILPEPLLKSIGQRPLGEHQTQTYLQAASDVPVGHSLDPAANYNSPKFRSRNQSYMRAVSTLSQASCVSQVSEAEINGQFESVCESVFSEVESQAMDALDLPGCFRTRSHSYLRAIQAGYSQDDECIPMMTPSDITSTIRSTAAVSYTNYKKTPPPVPPRTTSKPLISVTAQSSTESTQDAYQDSRAQRMSPWPQDSRGLYNSTDSLDSNKAMNLALETAAAQRHLPESQSSSVRTSDKAILVSKAEELLKSRCSSIGIQVETATDSDTESRGLREYHSVGVQVEDEKRHGRFKRSNSVTAAVQADLELEGFPGHITTEDKGLQFGSSFQRHSEPSTPTQYSAVRTVRTQGLFSYREDYRTQVDTSTLPPPDPWLEPAIDTVETGRMSPCRRDGSWFLKLLHAETKRMEGWCKEMEREAEENDLSEEILGKIRSAVGSAQLLMSQKFQQFYWLCQQNMDPSAMPRPTSQDLAGYWDMLQLSIEDVSMKFDELQRLRLNDWKMMESPERKEERKVPPPIPKKPPKGKFPITREKSLDLPDRQRQEARRRLMAAKRAASFRQNSASERADSIEIYIPEAQTRL

SEQ ID NO: 23515 - protein, 117 aa, Homo sapiens
MSRRKQSNPRQIKRSLGDMEAREEVQLVGASHMEQKATAPEAPSPPSADELEPVVQDGQRRIRARLSLATGLSWGPFHGSVQTRASSPRQAEPMRKLRLQDVKSIAQIPRIKQQREK

SEQ ID NO: 23516 - protein, 540 aa, Homo sapiens
MGPLQFRDVAIEFSLEEWHCLDTAQRNLYRNVMLENYSNLVFLGITVSKPDLITCLEQGRKPLTMKRNEMIAKPSVMCSHFAQDLWPEQSMKDSFQKVVLRRYEKCEHDNLQLKKGCISVDECKVHKEGYNELNQCLTTTPRKICQCDKYVKVLHQFPNSNGQKRGHTGKKPFKYIECGKAFKQFSTLTTHKKIHTGGKPYKCEECGKAFNHSCSLTRHKKIHTGEKPYKCEECGKAFKHSSTLTTHKRNHTGEKPYKCDKCGKAFMSSSTLSKHEIIHTEKKPYKCEECGKAFNRSSTLTTHKIIHTGEKPYKCEECDKAFKYSYTLTTHKRIHTEDKPYKCEECGKAFKYSSTLTTHKRIHTGEKPYKCEECGKAFKRSSDLTTHKIIHTGEKPYKCEECGKAFKYSSNLTTHKKIHTGERPYKCEECGKAFNQSSILTTHRRIHTGEKFYKCEECGKAFKRSSHLTTHKIIHTGEKFYKCEECDKAFKHFSNLTTHKKIHTGKKPYRCEECGKAFKHSSKLTTHKRFHTGEKPYRCE

SEQ ID NO: 23517 - protein, 818 aa, Homo sapiens
MGDILAHESELLGLVKEYLDFAEFEDTLKTFSKECKIKGKPLCKTVGGSFRDSKSLTIQKDLVAAFDNGDQKVFFDLWEEHISSSIRDGDSFAQKLEFYLHIHFAIYLLKYSVGRPDKEELDEKISYFKTYLETKGAALSQTTEFLPFYALPFVPNPMVHPSFKELFQDSWTPELKLKLIKFLALISKASNTPKLLTIYKENGQSNKEILQQLHQQLVEAERRSVTYLKRYNKIQADYHNLIGVTAELVDSLEATVSGKMITPEYLQSVCVRLFSNQMRQSLAHSVDFTRPGTASTMLRASLAPVKLKDVPLLPSLDYEKLKKDLILGSDRLKAFLLQALRWRLTTSHPGEQRETVLQAYISNDLLDCYSHNQRSVLQLLHSTSDVVRQYMARLINAFASLAEGRLYLAQNTKVLQMLEGRLKEEDKDIITRENVLGALQKFSLRRPLQTAMIQDGLIFWLVDVLKDPDCLSDYTLEYSVALLMNLCLRSTGKNMCAKVAGLVLKVLSDLLGHENHEIQPYVNGALYSILSVPSIREEARAMGMEDILRCFIKEGNAEMIRQIEFIIKQLNSEELPDGVLESDDDEDEDDEEDHDIMEADLDKDELIQPQLGELSGEKLLTTEYLGIMTNTGKTRRKGLANVQWSGDEPLQRPVTPGGHRNGYPVVEDQHTPPQTAQHARNGHPQALPAAHEAVYREGKPSTPESCVSSSSAIIAKPGEWLPRGRQEEPRPAPTGTPRQPREAPQDPGNGVTTRECASAFTCKPRAPCTPEMLDWNPPKAKASVLAPLFSSCGPQQASRPGSTASSTRGLPSSQSHRK

SEQ ID NO: 23518 - protein, 556 aa, Homo sapiens
MGQDTDMLNTYQQLVRTPSVRPGQDVRLQAPGTRTGLLKLLSTVSQDKQGCLGSGDGVPNQDLQQRSQSSRQTAKKDRKPRGQSKKGQGSEESEDHFPLLPRKPSFPFQWAWESIATDVRAVLQPSSPTPGHQALPMPSSFSQRQSRRKSTANLPEAHGCCWKTEAQNLKARQQLGAWGGVSIPTGKGELGSEPPSGLQLPGRRPGSGSASDKQVQLQSLGAEEAERGLSSGVLPQRPRRGSISEEEQFSEATEEAEEGEHRTPCRRRAGCQRKGQISGEEASDEGEVQGQSQGSSPSFNNLRRRQWRKTRAKELQGPWDLEKLHRQLQRDLDCGPQKLPWKTLRAAFQASKRNGKAYASGYDETFVSANLPNRTFHKRQEATRSLLQAWERQRQEERQQAELRRARTQHVQRQVAHCLAAYAPRGSRGPGAAQRKLEELRRQERQRFAEYQAELQGIQHRVQARPFLFQQAMQANARLTVTRRFSQVLSALGLDEEQLLSEAGKVDREGTPRKPRSHRSMGVRMEHSPQRPPRTEPTGSQPDRHYNPSLDPECSP

SEQ ID NO: 23519 - protein, 573 aa, Homo sapiens [sequence omitted]

SEQ ID NO: 23520 - protein, 619 aa, Homo sapiens
MSKGILQVHPPICDCPGCRISSPVNRGRLADKRTVALPAARNLKKERTPSFSASDGDSDGSGPTCGRRPGLKQEDGPHIRIMKRRVHTHWDVNISFREASCSQDGNLPTLISSVHRSRHLVMPEHQSRCEFQRGSLEIGLRPAGDLLGKRLGRSPRISSDCFSEKRARSESPQDLLRVRQEVAAAALRGPSGLEAHLPSSTAGQRRKQGLAQHREGAAPAAAPSFSERELPQPPPLLSPQNAPHVALGPHLRPPFLGVPSALCQTPGYGFLPPAQAEMFAWQQELLRKQNLARLELPADLLRQKELESARPQLLAPETALRPNDGAEELQRRGALLVLNHGAAPLLALPPQGPPGSGPPTPSRDSARRAPRKGGPGPASARPSESKEMTGARLWAQDGSEDEPPKDSDGEDPETAAVGCRGPTPGQAPAGGAGAEGKGLFPGSTLPLGFPYAVSPYFHTGAVGGLSMDGEEAPAPEDVTKWTVDDVCSFVGGLSGCGEYTRVFREQGIDGETLPLLTEEHLLTNMGLKLGPALKIRAQVARRLGRVFYVASFPVALPLQPPTLRAPERELGTGEQPLSPTTATSPYGGGHALAGQTSPKQENGTLALLPGAPDPSQPLC

SEQ ID NO: 23521 - protein, 673 aa, Homo sapiens
MKPGGFWLHLTLLGASLPAALGWMDPGTSRGPDVGVGESQAEEPRSFEVTRREGLSSHNELLASCGKKFCSRGSRCVLSLAPEDRVSVTTVTVGLSTVLTCAVHGDLRPPIIWKRNGLTLNFLDLEDINDFGEDDSLYITKVTTIHMGNYTCHASGHEQLFQTHVLQVNVPPVIRVYPESQAQEPGVAASLRCHAEGIPMPRITWLKNGVDVSTQMSKQLSLLANGSELHISSVRYEDTGAYTCIAKNEVGVDEDISSLFIEDSARKTLANILWREEGLSVGNMFYVFSDDGIIVIHPVDCEIQRHLKPTEKIFMSYEEICPQREKNATQPCQWVSAVNVRNRYIYVAQPALSRVLVVDIQAQKVLQSIGVDPLPAKLSYDKSHDQVWVLSWGDVHKSRPSLQVITEASTGQSQHLIRTPFAGVDDFFIPPTNLIINHIRFGFIFNKSDPAVHKVDLETMMPLKTIGLHHHGCVPQAMAHTHLGGYFFIQCRQDSPASAARQLLVDSVTDSVLGPNGDVTGTPHTSPDGRFIVSAAADSPWLHVQEITVRGEIQTLYDLQINSGISDLAFQRSFTESNQYNIYAALHTEPDLLFLELSTGKVGMLKNLKEPPAGPAQPWGGTHRIMRDSGLFGQYLLTPARESLFLINGRQNTLRCEVSGIKGGTTVVWVGEV

SEQ ID NO: 23522 - protein, 307 aa, Homo sapiens
MDKNQTEVMREFFLSGFSQTPSIEAGLFVLFLFFYMSIWVGNVLIMVTVASDKYLNSSPMYFLLGNLSFLDLCYSTVTTPKLLADFFNHEKLISYDQCIVQLFFLHFVGAAEMFLLTVMAYDRYVAICRPLHYTTVMSRGLCCVLVAASWMGGFVHSTVQTILTVHLPFCGPNQVTFFCDVPPVIKLACADTFVIELLMVSNSGLISTISFVVLISSYTTILVKIRSKEGRRKALSTCASHLMVVTLFFGPCIFIYARPFSTFSVDKMVSVLYNVITPMLNPLIYTLRNKEVKSAMQKLWVKIITFQ

SEQ ID NO: 23523 - protein, 1504 aa, Homo sapiens
MAGVGAAALSLLLHLGALALAAGAEGGAVPREPPGQQTTAHSSVLAGNSQEQWHPLREWLGRLEAAVMELREQNKDLQTRVRQLESCECHPASPQCWGLGRAWPEGARWEPDACTACVCQDGAAHCGPQAHLPHCRGCSQNGQTYGNGETFSPDACTTCRCLTGAVQCQGPSCSELNCLESCTPPGECCPICRCTEGGSHWEHGQEWTTPGDPCRICRCLEGHIQCRQRECASLCPYPARPLPGTCCPVCDGCFLNGREHRSGEPVGSGDPCSHCRCANGSVQCEPLPCPPVPCRHPGKIPGQCCPVCDGCEYQGHQYQSQETFRLQERGLCVRCSCQAGEVSCEEQECPVTPCALPASGRQLCPACELDGEEFAEGVQWEPDGRPCTACVCQDGVPKCGAVLCPPAPCQHPTQPPGACCPSCDSCTYHSQVYANGQNFTDADSPCHACHCQDGTVTCSLVDCPPTTCARPQSGPGQCCPRCPDCILEEEVFVDGESFSHPRDPCQECRCQEGHAHCQPRPCPRAPCAHPLPGTCCPNDCSGCAFGGKEYPSGADFPHPSDPCRLCRCLSGNVQCLARRCVPLPCPEPVLLPGECCPQCPAPAGCPRPGAAHARHQEYFSPPGDPCRRCLCLDGSVSCQRLPCPPAPCAHPRQGPCCPSCDGCLYQGKEFASGERFPSPTAACHLCLCWEGSVSCEPKACAPALCPFPARGDCCPDCDGCEYLGESYLSNQEFPDPREPCNLCTCLGGFVTCGRRPCEPPGCSHPLIPSGHCCPTCQGCRYHGVTTASGETLPDPLDPTCSLCTCQEGSMRCQKKPCPPALCPHPSPGPCFCPVCHSCLSQGREHQDGEEFEGPAGSCEWCRCQAGQVSCVRLQCPPLPCKLQVTERGSCCPRCRGCLAHGEEHPEGSRWVPPDSACSSCVCHEGVVTCARIQCISSCAQPRQGPHDCCPQCSDCEHEGRKYEPGESFQPGADPCEVCICEPQPEGPPSLRCHRRQCPSLVGCPPSQLLPPGPQHCCPTCAEALSNCSEGLLGSELAPPDPCYTCQCQDLTWLCIHQACPELSCPLSERHTPPGSCCPVCRAPTQSCVHQGREVASGERWTVDTCTSCSCMAGTVRCQSQRCSPLSCGPDKAPALSPGSCCPRCLPRPASCMAFGDPHYRTFDGRLLHFQGSCSYVLAKDCHSGDFSVHVTNDDRGRSGVAWTQEVAVLLGDMAVRLLQDGAVTVDGHPVALPFLQEPLLYVELRGHTVILHAQPGLQVLWDGQSQVEVSVPGSYQGRTCGLCGNFNGFAQDDLQGPEGLLLPSEAAFGNSWQVSEGLWPGRPCSAGREVDPCRAAGYRARREANARCGVLKSSPFSRCHAVVPPEPFFAACVYDLCACGPGSSADACLCDALEAYASHCRQAGVTPTWRGPTLCVVGCPLERGFVFDECGPPCPRTCFNQHIPLGELAAHCVRPCVPGCQCPAGLVEHEAHCIPPEACPQVLLTGDQPLGARPSPSREPQETP

SEQ ID NO: 23524 - protein, 297 aa, Homo sapiens
MYKQAQASFWTAEEVDLSKDLPHWNKLKADEKYFISHILAFFAASDGIVNENLVERFSQEVQVPEARCFYGFQILIENVHSEMYSLLIDTYIRDPKKREFLFNAIETMPYVKKKADWALRWIADRKSTFGERVVAFAAVEGVFFSGSFAAIFWLKKRGLMPGLTFSNELISRDEGLHCDFACLMFQYLVNKPSEERVREIIVDAVKIEQEFLTEALPVGLIGMNCILMKQYIEFVADRLLVELGFSKVFQAENPFDFMENISLEGKTNFFEKRVSEYQRFAVMAETTDNVFTLDADF

SEQ ID NO: 23525 - protein, 531 aa, Homo sapiens
MAEQVLPQALYLSNMRKAVKIRERTPEDIFKPTNGIIHHFKTMHRYTLEMFRTCQFCPQFREIIHKALIDRNIQATLESQKKLNWCREVRKLVALKTNGDGNCLMHATSQYMWGVQDTDLVLRKALFSTLKETDTRNFKFRWQLESLKSQEFVETGLCYDTRNWNDEWDNLIKMASTDTPMARSGLQYNSLEEIHIFVLCNILRRPIIVISDKMLRSLESGSNFAPLKVGGIYLPLHWPAQECYRYPIVLGYDSHHFVPLVTLKDSGPEIRAVPLVNRDRGRFEDLKVHFLTDPENEMKEKLLKEYLMVIEIPVQGWDHGTTHLINAAKLDEANLPKEINLVDDYFELVQHEYKKWQENSEQGRREGHAQNPMEPSVPQLSLMDVKCETPNCPFFMSVNTQPLCHECSERRQKNQNKLPKLNSKPGPEGLPGMALGASRGEAYEPLAWNPEESTGGPHSAPPTAPSPFLFSETTAMKCRSPGCPFTLNVQHNGFCERCHNARQLRQPRPRPHKALGSREVPSLPPGCYQDI

SEQ ID NO: 23526 - protein, 8560 aa, Homo sapiens
MADDEDYEEVVEYYTEEVVYEEVPGETITKIYETTTTRTSDYEQSETSKPALAQPALAQPASAKPVERRKVIRKKVDPSKFMTPYIAHSQKMQDLFSPNKYKEKFEKTKGQPYASTTDTPELRRIKKVQDQLSEVKYRMDGDVAKTICHVDEKAKDIEHAKKVSQQVSKVLYKQNWEDTKDKYLLPPDAPELVQAVKNTAMFSKKLYTEDWEADKSLFYPYNDSPELRRVAQAQKALSDVAYKKGLAEQQAQFTPLADPPDIEFAKKVTNQVSKQKYKEDYENKIKGKWSETPCFEVANARMNADNISTRKYQEDFENMKDQIYFMQTETPEYKMNKKAGVAASKVKYKEDYEKNKGKADYNVLPASENPQLRQLKAAGDALSDKLYKENYEKTKAKSINYCETPKFKLDTVLQNFSSDKKYKDSYLKDILGHYVGSFEDPYHSHCMKVTAQNSDKNYKAEYEEDRGKGFFPQTITQEYEAIKKLDQCKDHTYKVHPDKTKFTQVTDSPVLLQAQVNSKQLSDLNYKAKHESEKFKCHIPPDTPAFIQHKVNAYNLSDNLYKQDWEKSKAKKFDIKVDAIPLLAAKANTKNTSDVMYKKDYEKNKGKMIGVLSINDDPKMLHSLKVAKNQSDRLYKENYEKTKAKSMNYCETPKYQLDTQLKNFSEARYKDLYVKDVLGHYVGSMEDPYHTHCMKVAAQNSDKSYKAEYEEDKGKCYFPQTITQEYEAIKKLDQCKDHTYKVHPDKTKFTAVTDSPVLLQAQLNTKQLSDLNYKAKHEGEKFKCHIPADAPQFIQHRVNAYNLSDNVYKQDWEKSKAKKFDIKVDAIPLLAAKANTKNTSDVMYKKDYEKSKGKMIGALSINDDPKMLHSLKTAKNQSDREYRKDYEKSKTIYTAPLDMLQVTQAKKSQAIASDVDYKHILHSYSYPPDSINVDLAKKAYALQSDVEYKADYNSWMKGCGWVPFGSLEMEKAKRASDILNEKKYRQHPDTLKFTSIEDAPITVQSKINQAQRSDIAYKAKGEEIIHKYNLPPDLPQFIQAKVNAYNISENMYKADLKDLSKKGYDLRTDAIPIRAAKAARQAASDVQYKKDYEKAKGKMVGFQSLQDDPKLVHYMNVAKIQSDREYKKDYEKTKSKYNTPHDMFNVVAAKKAQDVVSNVNYKHSLHHYTYLPDAMDLELSKNMMQIQSDNVYKEDYNNWMKGIGWIPIGSLDVEKVKKAGDALNEKKYRQHPDTLKFTSIVDSPVMVQAKQNTKQVSDILYKAKGEDVKHKYTMSPDLPQFLQAKCNAYNISDVCYKRDWYDLIAKGNNVLGDAIPITAAKASRNIASDYKYKEAYEKSKGKHVGFRSLQDDPKLVHYMNVAKLQSDREYKKNYENTKTSYHTPGDMVSITAAKMAQDVATNVNYKQPLHHYTYLPDAMSLEHTRNVNQIQSDNVYKDEYNSFLKGIGWIPIGSLEVEKVKKAGDALNERKYRQHPDTVKFTSVPDSMGMVLAQHNTKQLSDLNYKVEGEKLKHKYTIDPELPQFIQAKVNALNMSDAHYKADWKKTIAKGYDLRPDAIPIVAAKSSRNIASDCKYKEAYEKAKGKQVGFLSLQDDPKLVHYMNVAKIQSDREYKKGYEASKTKYHTPLDMVSVTAAKKSQEVATNANYRQSYHHYTLLPDALNVEHSRNAMQIQSDNLYKSDFTNWMKGIGWVPIESLEVEKAKKAGEILSEKKYRQHPEKLKFTYAMDTMEQALNKSNKLNMDKRLYTEKWNKDKTTIHVMPDTPDILLSRVNQITMSDKLYKAGWEEEKKKGYDLRPDAIAIKAARASRDIASDYKYKKAYEQAKGKHIGFRSLEDDPKLVHFMQVAKMQSDREYKKGYEKSKTSFHTPVDMLSVVAAKKSQEVATNANYRNVIHTYNMLPDAMSFELAKNMMQIQSDNQYKADYADFMKGIGWLPLGSLEAEKNKKAMEIISEKKYRQHPDTLKYSTLMDSMNMVLAQNNAKIMNEHLYKQAWEADKTKVHIMPDIPQIILAKANAINMSDKLYKLSLEESKKKGYDLRPDAIPIKAAKASRDIASDYKYKYNYEKGKGKMVGFRSLEDDPKLVHSMQVAKMQSDREYKKNYENTKTSYHTPADMLSVTAAKDAQANITNTNYKHLIHKYILLPDAMNIELTRNMNRIQSDNEYKQDYNEWYKGLGWSPAGSLEVEKAKKATEYASDQKYRQHPSNFQFKKLTDSMDMVLAKQNAHTMNKHLYTIDWNKDKTKIHVMPDTPDILQAKQNQTLYSQKLYKLGWEEALKKGYDLPVDAISVQLAKASRDIASDYKYKQGYRKQLGHHVGFRSLQDDPKLVLSMNVAKMQSEREYKKDFEKWKTKFSSPVDMLGVVLAKKCQELVSDVDYKNYLHQWTCLPDQNDVVQAKKVYELQSENLYKSDLEWLRGIGWSPLGSLEAEKNKRASEIISEKKYRQPPDRNKFTSIPDAMDIVLAKTNAKNRSDRLYREAWDKDKTQIHIMPDTPDIVLAKANLINTSDKLYRMGYEELKRKGYDLPVDAIPIKAAKASREIASEYKYKEGFRKQLGHHIGARNIEDDPKMMWSMHVAKIQSDREYKKDFEKWKTKFSSPVDMLGVVLAKKCQTLVSDVDYKNYLHQWTCLPDQSDVIHARQAYDLQSDNLYKSDLQWLKGIGWMTSGSLEDEKNKRATQILSDHVYRQHPDQFKFSSLMDSIPMVLAKNNAITMNHRLYTEAWDKDKTTVHIMPDTPEVLLAKQNKVNYSEKLYKLGLEEAKRKGYDMRVDAIPIKAAKASRDIASEFKYKEGYRKQLGHHIGARAIRDDPKMMWSMHVAKIQSDREYKKDFEKWKTKFSSPVDMLGVVLAKKCQTLVSDVDYKNYLHQWTCLPDQSDVIHARQAYDLQSDNMYKSDLQWMRGIGWVSIGSLDVEKCKRATEILSDKIYRQPPDRFKFTSVTDSLEQVLAKNNAITMNKRLYTEAWDKDKTQIHIMPDTPEIMLARMNKINYSESLYKLANEEAKKKGYDLRSDAIPIVAAKASRDIISDYKYKDGYCKQLGHHIGARNIEDDPKMMWSMHVAKIQSDREYKKDFEKWKTKFSSPVDMLGVVLAKKCQTLVSDVDYKNYLHEWTCLPDQSDVIHARQAYDLQSDNIYKSDLQWLRGIGWVPIGSMDVVKCKRATEILSDNIYRQPPDKLKFTSVTDSLEQVLAKNNALNMNKRLYTEAWDKDKTQIHIMPDTPEIMLARQNKINYSETLYKLANEEAKKKGYDLRSDAIPIVAAKASRDVISDYKYKDGYRKQLGHHIGARNIEDDPKMMWSMHVAKIQSDREYKKDFEKWKTKFSSPVDMLGVVLAKKCQTLVSDVDYKNYLHEWTCLPDQNDVIHARQAYDLQSDNIYKSDLQWLRGIGWVPIGSMDVVKCKRAAEILSDNIYRQPPDKLKFTSVTDSLEQVLAKNNALNMNKRLYTEAWDKDKTQVHIMPDTPEIMLARQNKINYSESLYRQAMEEAKKEGYDLRSDAIPIVAAKASRDIASDYKYKEAYRKQLGHHIGARAVHDDPKIMWSLHIAKVQSDREYKKDFEKYKTRYSSPVDMLGIVLAKKCQTLVSDVDYKHPLHEWICLPDQNDIIHARKAYDLQSDNLYKSDLEWMKGIGWVPIDSLEVVRAKRAGELLSDTIYRQRPETLKFTSITDTPEQVLAKNNALNMNKRLYTEAWDNDKKTIHVMPDTPEIMLAKLNRINYSDKLYKLALEESKKEGYDLRLDAIPIQAAKASRDIASDYKYKEGYRKQLGHHIGARNIKDDPKMMWSIHVAKIQSDREYKKEFEKWKTKFSSPVDMLGVVLAKKCQILVSDIDYKHPLHEWTCLPDQNDVIQARKAYDLQSDAIYKSDLEWLRGIGWVPIGSVEVEKVKRAGEILSDRKYRQPADQLKFTCITDTPEIVLAKNNALTMSKHLYTEAWDADKTSIHVMPDTPDILLAKSNSANISQKLYTKGWDESKMKDYDLRADAISIKSAKASRDIASDYKYKEAYEKQKGHHIGAQSIEDDPKIMCAIHAGKIQSEREYKKEFQKWKTKFSSPVDMLSILLAKKCQTLVTDIDYRNYLHEWTCMPDQNDIIQAKKAYDLQSDSVYKADLEWLRGIGWMPEGSVEMNRVKVAQDLVNERLYRTRPEALSFTSIVDTPEVVLAKANSLQISEKLYQEAWNKDKSNITIPSDTPEMLQAHINALQISNKLYQKDWNDAKQKGYDIRADAIEIKHAKASREIASEYKYKEGYRKQLGHHMGFRTLQDDPKSVWAIHAAKIQSDREYKKAYEKSKGIHNTPLDMMSIVQAKKCQVLVSDIDYRNYLHQWTCLPDQNDVIQAKKAYDLQSDNLYKSDLEWLKGIGWLPEGSVEVMRVKNAQNLLNERLYRIKPEALKFTSIVDTPEVIQAKINAVQISEPLYRDAWEKEKANVNVPADTPLMLQSKINALQISNKRYQQAWEDVKMTGYDLRADAIGIQHAKASRDIASDYLYKTAYEKQKGHYIGCRSAKEDPKLVWAANVLKMQNDRLYKKAYNDHKAKISIPVDMVSISAAKEGQALASDVDYRHYLHHWSCFPDQNDVIQARKAYDLQSDSVYKADLEWLRGIGWMPEGSVEMNRVKVAQDLVNERLYRTRPEALSFTSIVDTPEVVLAKANSLQISEKLYQEAWNKDKSNITIPSDTPEMLQAHINALQISNKLYQKDWNDTKQKGYDIRADAIEIKHAKASREIASEYKYKEGYRKQLGHHMGFRTLQDDPKSVWAIHAAKIQSDREYKKAYEKSKGIHNTPLDMMSIVQAKKCQVLVSDIDYRNYLHQWTCLPDQNDVIQAKKAYDLQSDNLYKSDLEWLKGIGWLPEGSVEVMRVKNAQNLLNERLYRIKPEALKFTSIVDTPEVIQAKINAVQISEPLYRNAWEKEKANVNVPADTPLMLQSKINALQISNKRYQQAWEDVKMTGYDLRADAIGIQHAKASRDIASDYLYKTAYEKQKGHYIGCRSAKEDPKLVWAANVLKMQNDRLYKKAYNDHKAKISIPVDMVSISAAKEGQALASDVDYRHYLHHWSCFPDQNDVIQARKAYDLQSDSVYKADLEWLRGIGWMPEGSVEMNRVKVAQDLVNERLYRTRPEALSFTSIVDTPEVVLAKANSLQISEKLYQEAWNKDKSNITIPSDTPEMLQAHINALQISNKLYQKDWNDTKQKGYDIRADAIEIKHAKASREIASEYKYKEGYRKQLGHHMGFRTLQDDPKSVWAIHAAKIQSDREYKKAYEKSKGIHNTPLDMMSIVQAKKCQVLVSDIDYRNYLHQWTCLPDQNDVIQAKKAYDLQSDNLYKSDLEWLKGIGWLPEGSVEVMRVKNAQNLLNERLYRIKPEALKFTSIVDTPEVIQAKINAVQISEPLYRDAWEKEKANVNVPADTPLMLQSKINALQISNKRYQQAWEDVKMTGYDLRADAIGIQHAKASRDIASDYLYKTAYEKQKGHYIGCRSAKEDPKLVWAANVLKMQNDRLYKKAYNDHKAKISIPVDMVSISAAKEGQALASDVDYRHYLHRWSCFPDQNDVIQARKAYDLQSDALYKADLEWLRGIGWMPQGSPEVLRVKNAQNIFCDSVYRTPVVNLKYTSIVDTPEVVLAKSNAENISIPKYREVWDKDKTSIHIMPDTPEINLARANALNVSNKLYREGWDEMKAGCDVRLDAIPIQAAKASREIASDYKYKLDHEKQKGHYVGTLTARDDNKIRWALIADKLQNEREYRLDWAKWKAKIQSPVDMLSILHSKNSQALVSDMDYRNYLHQWTCMPDQNDVIQAKKAYELQSDNVYKADLEWLRGIGWMPNDSVSVNHAKHAADIFSEKKYRTKIETLNFTPVDDRVDYVTAKQSGEILDDIKYRKDWNATKSKYTLTETPLLHTAQEAARILDQYLYKEGWERQKATGYILPPDAVPFVHAHHCNDVQSELKYKAEHVKQKGHYVGVPTMRDDPKLVWFEHAGQIQNERLYKEDYHKTKAKINIPADMVSVLAAKQGQTLVSDIDYRNYLHQWMCHPDQNDVIQARKAYDLQSDNVYRADLEWLRGIGWIPLDSVDHVRVTKNQEMMSQIKYKKNALENYPNFRSVVDPPEIVLAKINSVNQSDVKYKETFNKAKGKYTFSPDTPHISHSKDMGKLYSTILYKGAWEGTKAYGYTLDERYIPIVGAKHADLVNSELKYKETYEKQKGHYLAGKVIGEFPGVVHCLDFQKMRSALNYRKHYEDTKANVHIPNDMMNHVLAKRCQYILSDLEYRHYFHQWTSLLEEPNVIRVRNAQEILSDNVYKDDLNWLKGIGCYVWDTPQILHAKKSYDLQSQLQYTAAGKENLQNYNLVTDTPLYVTAVQSGINASEVKYKENYHQIKDKYTTVLETVDYDRTRNLKNLYSSNLYKEAWDRVKATSYILPSSTLSLTHAKNQKHLASHIKYREEYEKFKALYTLPRSVDDDPNTARCLRVGKLNIDRLYRSVYEKNKMKIHIVPDMVEMVTAKDSQKKVSEIDYRLRLHEWICHPDLQVNDHVRKVTDQISDIVYKDDLNWLKGIGCYVWDTPEILHAKHAYDLRDDIKYKAHMLKTRNDYKLVTDTPVYVQAVKSGKQLSDAVYHYDYVHSVRGKVAPTTKTVDLDRALHAYKLQSSNLYKTSLRTLPTGYRLPGDTPHFKHIKDTRYMSSYFKYKEAYEHTKAYGYTLGPKDVPFVHVRRVNNVTSERLYRELYHKLKDKIHTTPDTPEIRQVKKTQEAVSELIYKSDFFKMQGHMISLPYTPQVIHCRYVGDITSDIKYKEDLQVLKGFGCFLYDTPDMVRSRHLRKLWSNYLYTDKARKMRDKYKVVLDTPEYRKVQELKTHLSELVYRAAGKKQKSIFTSVPDTPDLLRAKRGQKLQSQYLYVELATKERPHHHAGNQTTALKHAKDVKDMVSEKKYKIQYEKMKDKYTPVPDTPILIRAKRAYWNASDLRYKETFQKTKGKYHTVKDALDIVYHRKVTDDISKIKYKENYMSQLGIWRSIPDRPEHFHHRAVTDTVSDVKYKEDLTWLKGIGCYAYDTPDFTLAEKNKTLYSKYKYKEVFERTKSDFKYVADSPINRHFKYATQLMNEKKYRADYEQRKDKYHLVVDEPRHLLAKTAGDQISQRKYKSSAKMFLQHGCNEILRPDMLTALYNSHMWSQIKYRKNYEKSKDKFTSIVDTPEHLRTTKVNKQISDILYKLEYNKAKPRGYTTIHDTPMLLHVRKVKDEVSDLKYKEVYQRNKSNCTIEPDAVHIKAAKDAYKVNTNLDYKKQYEANKAHWKWTPDRPDFLQAAKSSLQQSDFEYKLDREFLKGCKLSVTDDKNTVLALRNTLIESDLKYKEKHVKERGTCHAVPDTPQILLAKTVSNLVSENKYKDHVKKHLAQGSYTTLPETRDTVHVKEVTKHVSDTNYKKKFVKEKGKSNYSIMLEPPEVKHAMEVAKKQSDVAYRKDAKENLHYTTVADRPDIKKATQAAKQASEVEYRAKHRKEGSHGLSMLGRPDIEMAKKAAKLSSQVKYRENFDKEKGKTPKYNPKDSQLYKVMKDANNLASEVKYKADLKKLHKPVTDMKESLIMNHVLNTSQLASSYQYKKKYEKSKGHYHTIPDNLEQLHLKEATELQSIVKYKEKYEKERGKPMLDFETPTYITAKESQQMQSGKEYRKDYEESIKGRNLTGLEVTPALLHVKYATKIASEKEYRKDLEESIRGKGLTEMEDTPDMLRAKNATQILNEKEYKRDLELEVKGRGLNAMANETPDFMRARNATDIASQIKYKQSAEMEKANFTSVVDTPEIIHAQQVKNLSSQKKYKEDAEKSMSYYETVLDTPEIQRVRENQKNFSLLQYQCDLKNSKGKITVVQDTPEILRVKENQKNFSSVLYKEDVSPGTAIGKTPEMMRVKQTQDHISSVKYKEAIGQGTPIPDLPEVKRVKETQKHISSVMYKENLGTGIPTTVTPEIERVKRNQENFSSVLYKENLGKGIPTPITPEMERVKRNQENFSSILYKENLSKGTPLPVTPEMERVKLNQENFSSVLYKENVGKGIPIPITPEMERVKHNQENFSSVLYKENLGTGIPIPITPEMQRVKHNQENLSSVLYKENMGKGTPLPVTPEMERVKHNQENISSVLYKENMGKGTPLPVTPEMERVKHNQENISSVLYKENMGKGTPLAVTPEMERVKHNQENISSVLYKENVGKATATPVTPEMQRVKRNQENISSVLYKENLGKATPTPFTPEMERVKRNQENFSSVLYKENMRKATPTPVTPEMERAKRNQENISSVLYSDSFRKQIQGKAAYVLDTPEMRRVRETQRHISTVKYHEDFEKHKGCFTPVVTDPITERVKKNMQDFSDINYRGIQRKVVEMEQKRNDQDQETITGLRVWRTNPGSVFDYDPAEDNIQSRSLHMINVQAQRRSREQSRSASALSISGGEEKSEHSEAPDHHLSTYSDGGVFAVSTAYKHAKTTELPQQRSSSVATQQTTVSSIPSHPSTAGKIFRAMYDYMAADADEVSFKDGDAIINVQAIDEGWMYGTVQRTGRTGMLPANYVEAI

SEQ ID NO: 23527 - protein, 484 aa, Homo sapiens; identical to SEQ ID NO: 20187

SEQ ID NO: 23528 - protein, 1301 aa, Homo sapiens [sequence omitted]

SEQ ID NO: 23529 - protein, 679 aa, Homo sapiens
MENEKEIPVSFQDLTVNFTQEEWQQLDPAQRLLYRDVMLENYSNLVSVGYHVSKPDVIFKLEQGEEPWIVEEFSNQNYPDIDDALEKNKEIQDKHLTQTVFFSNKTLITERENVFGKTLNLGMNSVPSRKMPYKCNPGGNSLKTNSEVIVAKKSKENRKIPDGYSGFGKHEKSHLGMKKYRYNPMRKASNQNENLILHQNIQILKQPFDYNKCGKTFFKRAILITQKGRQTERKPNECNECRKTFSKRSTLIVHQRIHTGEKPYVCSDCRKTFRVKTSLTRHRRIHTGERPYECSECRKTFIDKSALIVHQKIHGGEKSYECNECGKTFFRKSALAEHFRSHTGEKPYECKECGNAFSKKSYLVVHQRTHRGEKPNECKECGKTFFCQSALTAHQRIHTGEKPYECSECEKTFFCQSALNVHRRSHTGEKPYECSQCGKFLCTKSALIAHQITHRGKKSYECNECGKFFCHKSTLTIHQRTHTGEKHGVFNKCGRISIVKSNCSQCKRMNTKENLYECSEHGHAVSKNSHLIVHQRTIWERPYECNECGRTYCRKSALTHHQRTHTGQRPYECNECGKTFCQKFSFVEHQRTHTGEKPYECNECGKSFCHKSAFRVHRRIHTGEKPYECNQCGKTYRRLWTLTEHQKIHTGEKPYECNKCEKTFRHKSNFLLHQKSHKE

SEQ ID NO: 23530 - protein, 1344 aa, Homo sapiens
MLDPSSSEEESDEIVEEESGKEVLGSAPSGARLSPSRTSEGSAGSAGLGGGGAGAGAGVGAGGGGGSGASSGGGAGGLQPSSRAGGGRPSSPSPSVVSEKEKEELERLQKEEEERKKRLQLYVFVMRCIAYPFNAKQPTDMARRQQKISKQQLQTVKDRFQAFLNGETQIMADEAFMNAVQSYYEVFLKSDRVARMVQSGGCSANDSREVFKKHIEKRVRSLPEIDGLSKETVLSSWMAKFDAIYRGEEDPRKQQARMTASAASELILSKEQLYEMFQNILGIKKFEHQLLYNACQLDNPDEQAAQIRRELDGRLQMADQIARERKFPKFVSKEMENMYIEELKSSVNLLMANLESMPVSKGGEFKLQKLKRSHNASIIDMGEESENQLSKSDVVLSFSLEVVIMEVQGLKSLAPNRIVYCTMEVEGGEKLQTDQAEASKPTWGTQGDFSTTHALPAVKVKLFTESTGVLALEDKELGRVILHPTPNSPKQSEWHKMTVSKNCPDQDLKIKLAVRMDKPQNMKHSGYLWAIGKNVWKRWKKRFFVLVQVSQYTFAMCSYREKKAEPQELLQLDGYTVDYTDPQPGLEGGRAFFNAVKEGDTVIFASDDEQDRILWVQAMYRATGQSHKPVPPTQVQKLNAKGGNVPQLDAPISQFYADRAQKHGMDEFISSNPCNFDHASLFEMVQRLTLDHRLNDSYSCLGWFSPGQVFVLDEYCARNGVRGCHRHLCYLRDLLERAENGAMIDPTLLHYSFAFCASHVHGNSQQMHVYLSGLPPNTDPEGSKTPSPPEPEAKKDTKKESKKRKDSKTQANQELKRPDGIGTVTVEEKERFEEIKERLRVLLENQITHFRYCFPFGRPEGALKATLSLLERVLMKDIVTPVPQEEVKTVIRKCLEQAALVNYSRLSEYAKIEENVGRLITPAKKLEDTIRLAELVIEVLQQNEEHHAEAFAWWSDLMVEHAETFLSLFAVDMDAALEVQPPDTWDSFPLFQLLNDFLRTDYNLCNGKFHKHLQDLFAPLVVRYVDLMESSIAQSIHRGFERESWEPVNNGSGTSEDLFWKLDALQTFIRDLHWPEEEFGKHLEQRLKLMASDMIESCVKRTRIAFEVKLQKTSRSTDFRVPQSICTMFNVMVDAKAQSTKLCSMEMGQEHQYHSKIDELIEETVKEMITLLVAKFVTILEGVLAKLSRYDEGTLFSSFLSFTVKAASKYVDVPKPGMDVADAYVTFVRHSQDVLRDKVNEEMYIERLFDQWYNSSMNVICTWLTDRMDLQLHIYQLKTLIRMVKKTYRDFRLQGVLDSTLNSKTYETIRNRLTVEEATASVSEGGGLQGISMKDSDEEDEEDD

SEQ ID NO: 23531 - protein, 234 aa, Homo sapiens
MAIYKQSQHMTEVVRRCPHHERCSDSDGLAPPQHLIRVEGNLRVEYLDDRNTFRHSVVVPYEPPEVGSDCTTIHYNYMCNSSCMGGMNRRPILTIITLEDSSGNLLGRNSFEVRVCACPGRDRRTEEENLRKKGEPHHELPPGSTKRALPNNTSSSPQPKKKPLDGEYFTLQIRGRERFEMFRELNEALELKDAQAGKEPGGSRAHSSHLKSKKGQSTSRHKKLMFKTEGPDSD

SEQ ID NO: 23532 - protein, 433 aa, Homo sapiens
MVIVEYCKYGNLSNYLKSKRDLFFLNKDAALHMEPKKEKMEPGLEQGKKPRLDSVTSSESFASSGFQEDKSLSDVEEEEDSDGFYKEPITMEDLISYSFQVARGMEFLSSRKCIHRDLAARNILLSENNVVKICDFGLARDIYKNPDYVRKGDTRLPLKWMAPESIFDKIYSTKSDVWSYGVLLWEIFSLGGSPYPGVQMDEDFCSRLREGMRMRAPEYSTPEIYQIMLDCWHRDPKERPRFAELVEKLGDLLQANVQQDGKDYIPINAILTGNSGFTYSTPAFSEDFFKESISAPKFNSGSSDDVRYVNAFKFMSLERIKTFEELLPNATSMFDDYQGDSSTLLASPMLKRFTWTDSKPKASLKIDLRVTSKSKESGLSDVSRPSFCHSSCGHVSEGKRRFTYDHAELERKIACCSPPPDYNSVVLYSTPPI

SEQ ID NO: 23533 - protein, 406 aa, Homo sapiens
MSKQVSLPEMIKDWTKEHVKKWVNEDLKINEQYGQILLSEEVTGLVLQELTEKDLVEMGLPWGPALLIKRSYNKLNSKSPESDNHDPGQLDNSKPSKTEHQKNPKHTKKEEENSMSSNIDYDPREIRDIKQEESILMKENVLDEVANAKHKKKLEALRADRFAGLLEYLNPNYKDATTMESIVNEYAFLLQQNSKKPMTNEKQNSILANIILSCLKPNSKLIQPLTTLKKQLREVLQFVGLSHQYPGPYFLACLLFWPENQELDQDSKLIEKYVSSLNRSFRGQYKRMCRSKQASTLFYLGKRKGLNSIVHKAKIEQYFDKAQNTNSLWHSGDVWKKNEVKDLLRRLTGQAEGKLISVEYGTEEKIKIPVISVYSGPLRSGRNIERVSFYLGFSIEGPLAYDIEVI

SEQ ID NO: 23534 - protein, 1002 aa, Homo sapiens
MRVHPRPHSRLAAKLAGLEPETPYPGFEFSELVTGATGTGDLTRKEPTELGASEMADEALAGLDEGALRKLLEVTADLAERRRIRSAIRELQRQELEREEEALASKRFRAERQDNKENWLHSQQREAEQRAALARLAGQLESMNDVEELTALLRSAGEYEERKLIRAAIRRVRAQEIEAATLAGRLYSGRPNSGSREDSKGLAAHRLEQCEVPEREEQEQQAEVSKPTPTPEGTSQDVTTVTLLLRAPPGSTSSSPASPSSSPTPASPEPPLEPAEAQCLTAEVPGSPEPPPSPPKTTSPEPQESPTLPSTEGQVVNKLLSGPKETPAAQSPTRGPSDTKRADVAGPRPCQRSLSVLSPRQPAQNRESTPLASGPSSFQRAGSVRDRVHKFTSDSPMAARLQDGTPQAALSPLTPARLLGPSLTSTTPASSSSGSSSRGPSDTSSRFSKEQRGVAQPLAQLRSCPQEEGPRGRGLAARPLENRAGGPVARSEEPGAPLPVAVGTAEPGGSMKTTFTIEIKDGRGQASTGRVLLPTGNQRAELTLGLRAPPTLLSTSSGGKSTITRVNSPGTLARLGSVTHVTSFSHAPPSSRGGCSIKAAEDAGTPVAHPPAFSTRRRSSTGTTRSTSLMEAEPAEPLAAAVEAANGAEQTRVNKAPEGRSPLSAEELMTIEDEGVLDKMLDQSTDFEERKLIRAALRELRQRKRDQRDKERERRLQEARGRPGEGRGNTATETTTRHSQRAADGSAVSTVTKTERLVHSNDGTRTARTTTVESSFVRRSENGSGSTMMQTKTFSSSSSSKKMGSIFDREDQASPRAGSLAALEKRQAEKKKELMKAQSLPKTSASQARKAMIEKLEKEGAAGSPGGPRAAVQRSTSFGVPNANSIKQMLLDWCRAKTRGYEHVDIQNFSSSWSDGMAFCALVHNFFPEAFDYGQLSPQNRRQNFEVAFSSAEMLVDCVPLVEVDDMMIMGKKPDPKCVFTYVQSLYNHLRRHELRLRGKNV

SEQ ID NO: 23535 - protein, 1032 aa, Homo sapiens
MGGGKSGTVSSQKQPASKTASDKTDSALNTATEIKDGLQCGTVSSQKQQALKATTDEEGSVSNIATEIKDGEKSGTVSSQKKPALKATSDEKDSFSNITREKKDGEISRTVSSQKPPALKATSVKEDSVLNIAREKKDGEKSRTVSFEQPPGLKATRDEKDSLLNIARGKKDGEKTRRVRVDKKFSSLNKSAGGSLKLHILIQHKGGRRKRGMSSHKQPSLKATSDKEDSVPNMATETKDEQISGTVSCQKQPALKATSDKKDSVSNIPTEIKDGQQSGTVSSQKQPAWKATSVKKDSVSNIATEIKDGQIRGTGILEYTFNVMFDQIEEKFTSPNKSAGGVSPQKQSAQKVIFKKKVSLLNIATRITGGGKSGTEYPENLRTLKATIENKDSVLNTATKMKEVQTSTPAEQDLEMASEGEQKRLEEYENNQPQVKNQIHSRDDLDDIIQSSQTVSEDGDSLCCNCKNVILLIDQHEMKCKDCVHLLKIKNTFCLWKRLIKLKDNHCEQLRVKIRKLKNKASVLQKRISEKEEIKSQLKHEILELEKELCSLRFAIQQEKKKRRNVEELHQKVREKLRITEEQYRIEADVTKPIKPALKSAEVELKTGGNNSNQVSETDEKEDLLHENRLMQDEIARLRLEKDTIKNQNLEKKYLKDFEIVKRKHEDLQKALKRNGETLAKTIACYSGQLAALTDENTTLRSKLEKQRESRQRLETEMQSYRCRLNAARCDHDQSHSSKRDQELAFQGTVDKCRHLQENLNSHVLILSLQLSKAESKSRVLKTELHYTGEALKEKALVFEHVQSELKQKQSQMKDIEKMYKSGYNTMEKCIEKQERFCQLKKQNMLLQQQLDDARNKADNQEKAILNIQARCDARVQNLQAECRKHRLLLEEDNKMLVNELNHSKEKECQYEKEKAEREVAVRQLQQKRDDVLNKGSATKALLDASSRHCTYLENGMQDSRKKLDQMRSQFQEIQDQLTATIRCTKEMEGDTQKLEVEHVMMRKIIKKQDDQIERLEKILQHSSLMLQVFES

SEQ ID NO: 23536 - protein, 214 aa, Homo sapiens
MFCQLAKTCPVQLWVDSTPPPGTRVRAMAIYKQSQHMTEVVRRCPHHERCSDSDGLAPPQHLIRVEGNLRVEYLDDRNTFRHSVVVPYEPPEVGSDCTTIHYNYMCNSSCMGGMNRRPILTIITLEDSSGNLLGRNSFEVRVCACPGRDRRTEEENLRKKGEPHHELPPGSTKRALPNNTSSSPQPKKKPLDGEYFTLQMLLDLRWCYFLINSS

SEQ ID NO: 23537 - protein, 459 aa, Homo sapiens
MEGVLYKWTNYLSGWQPRWFLLCGGILSYYDSPEDAWKGCKGSIQMAVCEIQVHSVDNTRMDLIIPGEQYFYLKARSVAERQRWLVALGSAKACLTDSRTQKEKEFAENTENLKTKMSELRLYCDLLVQQVDKTKEVTTTGVSNSEEGIDVGTLLKSTCNTFLKTLEECMQIANAAFTSELLYRTPPGSPQLAMLKSSKMKHPIIPIHNSLERQMELSTCENGSLNMEINGEEEILMKNKNSLYLKSAEIDCSISSEENTDDNITVQGEIRKEDGMENLKNHDNNLTQSGSDSSCSPECLWEEGKEVIPTFFSTMNTSFSDIELLEDSGIPTEAFLASCYAVVPVLDKLGPTVFAPVKMDLVGNIKKVNQKYITNKEEFTTLQKIVLHEVEADVAQVRNSATEALLWLKRGLKFLKGFLTEVKNGEKDIQTALNNAYGKTLRQHHGWVVRGVFAGHTNV

SEQ ID NO: 23538 - protein, 252 aa, Homo sapiens
MCSRGWDSCLALELLLLPLSLLVTSIQGHLVHMTVVSGSNVTLNISESLPENYKQLTWFYTFDQKIVEWDSRKSKYFESKFKGRVRLDPQSGALYISKVQKEDNSTYIMRVLKKTGNEQEWKIKLQVLDPVPKPVIKIEKIEDMDDNCYLKLSCVIPGESVNYTWYGDKRPFPKELQNSVLETTLMPHNYSRCYTCQVSNSVSSKNGTVCLSPPCTLGKKDPWELRGAQGNWSCFEQRKAGGPIQPPCTVWW

SEQ ID NO: 23539 - protein, 1197 aa, Homo sapiens
MPDLRRKKPLPLVSDLAMSLVQSRKAGITSAMATRTSLKDEELKSHVYKKTLQALIYPISCTTPHNFEVWTATTPTYCYECEGLLWGIARQGMRCSECGVKCHEKCQDLLNADCLQRAAEKSCKHGAEDRTQNIIMAMKDRMKIRERNKPEIFEVIRDVFTVNKAAHVQQMKTVKQSVLDGTSKWSAKITITVVCAQGLQAKDKTGSSDPYVTVQVSKTKKRTKTIFGNLNPVWEEKFHFECHNSSDRIKVRVWDEDDDIKSRVKQRLKRESDDFLGQTIIEVRTLSGEMDVWYNLEKRTDKSAVSGAIRLQISVEIKGEEKVAPYHVQYTCLHENLFHYLTDIQGSGGVRIPEARGDDAWKVYFDETAQEIVDEFAMRYGIESIYQAMTHFACLSSKYMCPGVPAVMSTLLANINAYYAHTTASTNVSASDRFAASNFGKERFVKLLDQLHNSLRIDLSTYRNNFPAGSPERLQDLKSTVDLLTSITFFRMKVQELQSPPRASQVVKDCVKACLNSTYEYIFNNCHDLYSRQYQLKQELPPEEQGPSIRNLDFWPKLITLIVSIIEEDKNSYTPVLNQFPQELNVGKVSAEVMWHLFAQDMKYALEEHEKDHLCKSADYMNLHFKVKWLHNEYVRDLPVLQGQVPEYPAWFEQFVLQWLDENEDVSLEFLRGALERDKKDGFQQTSEHALFSCSVVDVFTQLNQSFEIIRKLECPDPSILAHYMRRFAKTIGKVLMQYADILSKDFPAYCTKEKLPCILMNNVQQLRVQLEKMFEAMGGKELDLEAADSLKELQVKLNTVLDELSMVFGNSFQVRIDECVRQMADILGQVRGTGNASPDARASAAQDADSVLRPLMDFLDGNLTLFATVCEKTVLKRVLKELWRVVMNTMERMIVLPPLTDQTGTQLIFTAAKELSHLSKLKDHMVREETRNLTPKQCAVLDLALDTIKQYFHAGGNGLKKTFLEKSPDLQSLRYALSLYTQTTDTLIKTFVRSQTTQVHDGKGIRFTANEDIRPEKGSGVDDPVGEVSIQVDLFTHPGTGEHKVTVKVVAANDLKWQTAGMFRPFVEVTMVGPHQSDKKRKFTTKSKSNNWAPKYNETFHFLLGNEEGPESYELQICVKDYCFAREDRVLGLAVMPLRDVTAKGSCACWCPLGRKIHMDETGLTILRILSQRSNDEVAREFVKLKSESRSTEEGS

SEQ ID NO: 23540 - protein, 1069 aa, Homo sapiens
LIAVFEEQEPLHKIESPSGNPADRQSPDAFETEVAAQLAAFKPIGGEIEVTPSALKLGTPLLVRRSSDPVPGPPADTQPSASHPGGQSLKLVVPDSTQNLEDREVLNGVQTELLTSPRTKDTLSDMTRTVEISGEGGPLGIHVVPFFSSLSGRILGLFIRGIEDNSRSKREGLFHENECIVKINNVDLVDKTFAQAQDVFRQAMKSPSVLLHVLPPQNREQYEKSVIGSLNIFGNNDGVLKTKVPPPVHGKSGLKTANLTGTDSPETDASASLQQNKSPRVPRLGGKPSSPSLSPLMGFGSNKNAKKIKIDLKKGPEGLGFTVVTRDSSIHGPGPIFVKNILPKGAAIKDGRLQSGDRILEVNGRDVTGRTQEELVAMLRSTKQGETASLVIARQEGHFLPRELDGRLRMNDQLIAVNGESLLGKSNHEAMETLRRSMSMEGNIRGMIQLVILRRPERPMEDPAECGAFSKPCFENCQNAVTTSRRNDNSILHPLGTCSPQDKQKGLLLPNDGWAESEVPPSPTPHSALGLGLEDYSHSSGVDSAVYFPDQHINFRSVTPARQPESINLKASKSMDLVPDESKVHSLAGQKSESPSKDFGPTLGLKKSSSLESLQTAVAEVRKNDLPFHRPRPHMVRGRGCNESFRAAIDKSYDGPEEIEADGLSDKSSHSGQGALNCESAPQGNSELEDMENKARKVKKTKEKEKKKEKGKLKVKEKKRKEENEDPERKIKKKGFGAMLRFGKKKEDKGGKAEQKGTLKHGGLREEELEKMKEERERIGAKHQELREKQARGLLDYATGAIGSVYDMDDDEMDPNYARVNHFREPCTSANVFRSPSPPRAGPFGYPRDGHPLSPERDHLEGLYAKVNKPYHPLVPADSGRPTGGSTDRIQKLRKEYYQARREGFPLYEDDEGRARPSEYDLLWVPGRGPDGNAHNLRFEGMERQYASLPRGGPADPVDYLPAAPRGLYKERELPYYPGAHPMHPPKGSYPRPTELRVADLRYPQHYPPPPAPQHKGPFRQDVPPSPPQHQRMPAYQETGRPGPRGGSPDQYPYRTQDSRQKNPMTAAV

SEQ ID NO: 23541 - protein, 626 aa, Homo sapiens
MPLLLLLLLLPSPLHPHPICEVSKVASHLEVNCDKRNLTALPPDLPKDTTILHLSENLLYTFSLATLMPYTRLTQLNLDRCELTKLQVDGTLPVLGTLDLSHNQLQSLPLLGQTLPALTVLDVSFNRLTSLPLGALRGLGELQELYLKGNELKTLPPGLLTPTPKLEKLSLANNNLTELPAGLLNGLENLDTLLLQENSLYTIPKGFFGSHLLPFAFLHGNPWLCNCEILYFRRWLQDNAENVYVWKQGVDVKAMTSNVASVQCDNSDKFPVYKYPGKGCPTLGDEGDTDLYDYYPEEDTEGDKVRATRTVVKFPTKAHTTPWGLFYSWSTASLDSQMPSSLHPTQESTKEQTTFPPRWTPNFTLHMESITFSKTPKSTTEPTPSPTTSEPVPEPAPNMTTLEPTPSPTTPEPTSEPAPSPTTPEPTPIPTIATSPTILVSATSLITPKSTFLTTTKPVSLLESTKKTIPELDQPPKLRGVLQGHLESSRNDPFLHPDFCCLLPLGFYVLGLFWLLFASVVLILLLSWVGHVKPQALDSGQGAALTTATQTTHLELQRGRQVTVPRAWLLFLRGSLPTFRSSLFLWVRPNGRVGPLVAGRRPSALSQGRGQDLLSTVSIRYSGHSL

SEQ ID NO: 23542 - protein, 654 aa, Homo sapiens
MLQFVSNQVGEFPDLFSEQLCSSFPGSGGSGSSSGSSGSSSSSSNGRGSSSGAVDPSVQRSFTQVTLPSFSPSAASPQAPTLQVKVSPTSVPTTPRATPILQPRPQPQPQPQTQLQQQTVMITPTFSTTPQTRIIQQPLIYQNAATSFQVLQPQVQSLVTSSQVQPVTIQQQVQTVQAQRVLTQTANGTLQTLAPATVQTVAAPQVQQVPVLVQPQIIKTDSLVLTTLKTDGSPVMAAVQNPALTALTTPIQTAALQVPTLVGSSGTILTTMPVMMGQEKVPIKQVPGGVKQLEPPKEGERRTTHNIIEKRYRSSINDKIIELKDLVMGTDAKMHKSGVLRKAIDYIKYLQQVNHKLRQENMVLKLANQKNKLLKGIDLGSLVDNEVDLKIEDFNQNVLLMSPPASDSGSQAGFSPYSIDSEPGSPLLDDAKVKDEPDSPPVALGMVDRSRILLCVLTFLCLSFNPLTSLLQWGGAHDSDQHPHSGSGRSVLSFESGSGGWFDWMMPTLLLWLVNGVIVLSVFVKLLVHGEPVIRPHSRSSVTFWRHRKQADLDLARGVYGKKSGATHSIEEELNIHISRGTRTRTLLSSRRFCSCCRQPTNLPGSFGPGTAHLPPGPGLQPLLERDPLQPAEATPGALAAQESLPVPAGHASH

SEQ ID NO: 23543 - protein, 422 aa, Homo sapiens
MLELIEVNGTPGSQLSTPRSGKSPSPSPTSPGSLRKQRSSQHGGSSTSLASTKVCSSMDENDGPGEEVSEEGFQIPATITERYKVGRTIGDGNFAVVKECVERSTAREYALKIIKKSKCRGKEHMIQNEVSILRRVKHPNIVLLIEEMDVPTELYLVMELVKGGDLFDAITSTNKYTERDASGMLYNLASAIKYLHSLNIVHRDIKPENLLVYEHQDGSKSLKLGDFGLATIVDGPLYTVCGTPTYVAPEIIAETGYGLKVDIWAAGVITYILLCGFPPFRGSGDDQEVLFDQILMGQVDFPSPYWDNVSDSAKELITMMLLVDVDQRFSAVQVLEHPWVNDDGLPENEHQLSVAGKIKKHFNTGPKPNSTAAGVSVIALDHGFTIKRSGSLDYYQQPGMYWIRPPLLIRRGRFSDEDATRM

SEQ ID NO: 23544 - protein, 1682 aa, Homo sapiens
MFRQFYLWTCLASGIILGSLFEICLGQYDDDWQYEDCKLARGGPPATIVAIDEESRNGTILVDNMLIKGTAGGPDPTIELSLKDNVDYWVLMDPVKQMLFLNSTGRVLDRDPPMNIHSIVVQVQCINKKVGTIIYHEVRIVVRDRNDNSPTFKHESYYATVNELTPVGTTIFTGFSGDNGATDIDDGPNGQIEYVIQYNPDDPTSNDTFEIPLMLTGNIVLRKRLNYEDKTRYFVIIQANDRAQNLNERRTTTTTLTVDVLDGDDLGPMFLPCVLVPNTRDCRPLTYQAAIPELRTPEELNPIIVTPPIQAIDQDRNIQPPSDRPGILYSILVGTPEDYPRFFHMHPRTAELSLLEPVNRDFHQKFDLVIKAEQDNGHPLPAFAGLHIEILDENNQSPYFTMPSYQGYILESAPVGATISDSLNLTSPLRIVALDKDIEDTKDPELHLFLNDYTSVFTVTQTGITRYLTLLQPVDREEQQTYTFSITAFDGVQESEPVIVNIQVMDANDNTPTFPEISYDVYVYTDMRPGDSVIQLTAVDADEGSNGEITYEILVGAQGDFIINKTTGLITIAPGVEMIVGRTYALTVQAADNAPPAERRNSICTVYIEVLPPNNQSPPRFPQLMYSLEISEAMRVGAVLLNLQATDREGDSITYAIENGDPQRVFNLSETTGILTLGKALDRESTDRYILIITASDGRPDGTSTATVNIVVTDVNDNAPVFDPYLPRNLSVVEEEANAFVGQVKATDPDAGINGQVHYSLGNFNNLFRITSNGSIYTAVKLNREVRDYYELVVVATDGAVHPRHSTLTLAIKVLDIDDNSPVFTNSTYTVLVEENLPAGTTILQIEAKDVDLGANVSYRIRSPEVKHFFALHPFTGELSLLRSLDYEAFPDQEASITFLVEAFDIYGTMPPGIATVTVIVKDMNDYPPVFSKRIYKGMVAPDAVKGTPITTVYAEDADPPGLPASRVRYRVDDVQFPYPASIFEVEEDSGRVITRVNLNEEPTTIFKLVVVAFDDGEPVMSSSATVKILVLHPGEIPRFTQEEYRPPPVSELATKGTMVGVISAAAINQSIVYSIVSGNEEDTFGINNITGVIYVNGPLDYETRTSYVLRVQADSLEVVLANLRVPSKSNTAKVYIEIQDENNHPPVFQKKFYIGGVSEDARMFTSVLRVKATDKDTGNYSVMAYRLIIPPIKEGKEGFVVETYTGLIKTAMLFHNMRRSYFKFQVIATDDYGKGLSGKADVLVSVVNQLDMQVIVSNVPPTLVEKKIEDLTEILDRYVQEQIPGAKVVVESIGARRHGDAFSLEDYTKCDLTVYAIDPQTNRAIDRNELFKFLDGKLLDINKDFQPYYGEGGRILEIRTPEAVTSIKKRGESLGYTEGALLALAFIIILCCIPAILVVLVSYRQFKVRQAECTKTARIQAALPAAKPAVPAPAPVAAPPPPPPPPPGAHLYEELGDSSMHKYEMPQYGSRRRLLPPAGQEEYGEVVGEAEEEYEEEEWARKRMIKLVVDREYETSSTGEDSAPECQRNRLHHPSIHSNINGNIYIAQNGSVVRTRRACLTDNLKVASPVRLGGPFKKLDKLAVTHEENVPLNTLSKGPFSTEKMNARPTLVTFAPCPVGTDNTAVKPLRNRLKSTVEQESMIDSKNIKEALEFHSDHTQSDDEELWMGPWNNLHIPMTKL

SEQ ID NO: 23545 - protein, 2473 aa, Homo sapiens
MTTLLWVFVTLRVITAAVTVETSDHDNSLSVSIPQPSPLRVLLGTSLTIPCYFIDPMHPVTTAPSTAPLAPRIKWSRVSKEKEVVLLVATEGRVRVNSAYQDKVSLPNYPAIPSDATLEVQSLRSNDSGVYRCEVMHGIEDSEATLEVVVKGIVFHYRAISTRYTLDFDRAQRACLQNSAIIATPEQLQAAYEDGFHQCDAGWLADQTVRYPIHTPREGCYGDKDEFPGVRTYGIRDTNETYDVYCFAEEMEGEVFYATSPEKFTFQEAANECRRLGARLATTGQLYLAWQAGMDMCSAGWLADRSVRYPISKARPNCGGNLLGVRTVYVHANQTGYPDPSSRYDAICYTGEDFVDIPENFFGVGGEEDITVQTVTWPDMELPLPRNITEGEARGSVILTVKPIFEVSPSPLEPEEPFTFAPEIGATAFAEVENETGEATRPWGFPTPGLGPATAFTSEDLVVQVTAVPGQPHLPGGVVFHYRPGPTRYSLTFEEAQQACLRTGAVIASPEQLQAAYEAGYEQCDAGWLRDQTVRYPIVSPRTPCVGDKDSSPGVRTYGVRPSTETYDVYCFVDRLEGEVFFATRLEQFTFQEALEFCESHNATLATTGQLYAAWSRGLDKCYAGWLADGSLRYPIVTPRPACGGDKPGVRTVYLYPNQTGLPDPLSRHHAFCFRGISAVPSPGEEEGGTPTSPSGVEEWIVTQVVPGVAAVPVEEETTAVPSGETTAILEFTTEPENQTEWEPAYTPVGTSPLPGILPTWPPTGAATEESTEGPSATEVPSASEEPSPSEVPFPSEEPSPSEEPFPSVRPFPSVELFPSEEPFPSKEPSPSEEPSASEEPYTPSPPVPSWTELPSSGEESGAPDVSGDFTGSGDVSGHLDFSGQLSGDRASGLPSGDLDSSGLTSTVGSGLPVESGLPSGDEERIEWPSTPTVGELPSGAEILEGSASGVGDLSGLPSGEVLETSASGVGDLSGLPSGEVLETTAPGVEDISGLPSGEVLETTAPGVEDISGLPSGEVLETTAPGVEDISGLPSGEVLETTAPGVEDISGLPSGEVLETTAPGVEDISGLPSGEVLETAAPGVEDISGLPSGEVLETAAPGVEDISGLPSGEVLETAAPGVEDISGLPSGEVLETAAPGVEDISGLPSGEVLETAAPGVEDISGLPSGEVLETAAPGVEDISGLPSGEVLETAAPGVEDISGLPSGEVLETAAPGVEDISGLPSGEVLETAAPGVEDISGLPSGEVLETAAPGVEDISGLPSGEVLETAAPGVEDISGLPSGEVLETAAPGVEDISGLPSGEVLETAAPGVEDISGLPSGEVLETAAPGVEDISGLPSGEVLETAAPGVEDISGLPSGEVLETAAPGVEDISGLPSGEVLETTAPGVEEISGLPSGEVLETTAPGVDEISGLPSGEVLETTAPGVEEISGLPSGEVLETSTSAVGDLSGLPSGGEVLEISVSGVEDISGLPSGEVVETSASGIEDVSELPSGEGLETSASGVEDLSRLPSGEEVLEISASGFGDLSGLPSGGEGLETSASEVGTDLSGLPSGREGLETSASGAEDLSGLPSGKEDLVGSASGDLDLGKLPSGTLGSGQAPETSGLPSGFSGEYSGVDLGSGPPSGLPDFSGLPSGFPTVSLVDSTLVEVVTASTASELEGRGTIGISGAGEISGLPSSELDISGRASGLPSGTELSGQASGSPDVSGEIPGLFGVSGQPSGFPDTSGETSGVTELSGLSSGQPGISGEASGVLYGTSQPFGITDLSGETSGVPDLSGQPSGLPGFSGATSGVPDLVSGTTSGSGESSGITFVDTSLVEVAPTTFKEEEGLGSVELSGLPSGEADLSGKSGMVDVSGQFSGTVDSSGFTSQTPEFSGLPSGIAEVSGESSRAEIGSSLPSGAYYGSGTPSSFPTVSLVDRTLVESVTQAPTAQEAGEGPSGILELSGAHSGAPDMSGEHSGFLDLSGLQSGLIEPSGEPPGTPYFSGDFASTTNVSGESSVAMGTSGEASGLPEVTLITSEFVEGVTEPTISQELGQRPPVTHTPQLFESSGKVSTAGDISGATPVLPGSGVEVSSVPESSSETSAYPEAGFGASAAPEASREDSGSPDLSETTSAFHEANLERSSGLGVSGSTLTFQEGEASAAPEVSGESTTTSDVGTEAPGLPSATPTASGDRTEISGDLSGHTSQLGVVISTSIPESEWTQQTQRPAETHLEIESSSLLYSGEETHTVETATSPTDASIPASPEWKRESESTAADQEVCEEGWNKYQGHCYRHFPDRETWVDAERRCREQQSHLSSIVTPEEQEFVNNNAQDYQWIGLNDRTIEGDFRWSDGHPMQFENWRPNQPDNFFAAGEDCVVMIWHEKGEWNDVPCNYHLPFTCKKGTVACGEPPVVEHARTFGQKKDRYEINSLVRYQCTEGFVQRHMPTIRCQPSGHWEEPQITCTDPTTYKRRLQKRSSRHPRRSRPSTAH

SEQ ID NO: 23546 - protein, 750 aa, Homo sapiens
DAFVNSQEWTLSRSVPELKVGIVGNLASGKSALVHRYLTGTYVQEESPEGGRFKKEIVVDGQSYLLLIRDEGGPPEAQFAMWVDAVIFVFSLEDEISFQTVYHYYSRMANYRNTSEIPLVLVGTQDAISSANPRVIDDARARKLSNDLKRCTYYETCATYGLNVERVFQDVAQKIVATRKKQQLSIGPCKSLPNSPSHSSVCSAQVSAVHISQTSNGGGSLSDYSSSVPSTPSTSQKELRIDVPPTANTPTPVRKQSKRRSNLFTSRKGSDPDKEKKGLESRADSIGSGRAIPIKQGMLLKRSGKSLNKEWKKKYVTLCDNGVLTYHPSLHDYMQNVHGKEIDLLRTTVKVPGKRPPRATSACAPISSPKTNGLSKDMSSLHISPNSDTGLGDSVCSSPSISSTTSPKLDPPPSPHANRKKHRRKKSTSNFKADGLSGTAEEQEENFEFIIVSLTGQTWHFEATTYEERDAWVQAIESQILASLQSCESSKNKSRLTSQSEAMALQSIRNMRGNSHCVDCETQNPNWASLNLGALMCIECSGIHRNLGTHLSRVRSLDLDDWPVELIKVMSSIGNELANSVWEESSQGRTKPSVDSTREEKERWIRAKYEQKLFLAPLPCTELSLGQHLLRATADEDLRTAILLLAHGSRDEVNETCGEGDGRTALHLACRKGNVVLAQLLIWYGVDVTARDAHGNTALAYARQASSQECIDVLLQYGCPDERFVLMATPNLSRRNNNRNNSSGRVPTII

SEQ ID NO: 23547 - protein, 5088 aa, Homo sapiens
MSGHTLPPLPVPGTNSTEQASVPRAMAATLGAGTPPRPQARSIAGVYVEASGQAQSVYAAMEQGLLPAGLGQALLEAQAATGGLVDLARGQLLPVSKALQQGLVGLELKEKLLAAERATTGYPDPYGGEKLALFQAIGKEVVDRALGQSWLEVQLATGGLVDPAQGVLVAPEPACHQGLLDRETWHKLSELEPGTGDLRFLDPNTLERLTYHQLLERCVRAPGSGLALLPLKITFRSMGGAVSAAELLEVGILDEQAVQGLREGRLAAVDVSARAEVRRYLEGTGSVAGVVLLPEGHKKSFFQAATEHLLPMGTALPLLEAQAATHTLVDPITGQRLWVDEAVRAGLVSPELHEQLLVAEQAVTGHHDPFSGSQIPLFQAMKKGLVDRPLALRLLDAQLATGGLVCPARRLRLPLEAALRCGCLDEDTQRQLSQAGSFSDGTHGGLRYEQLLALCVTDPETGLAFLPLSGGPRGGEPQGPPFIKYSTRQALSTATATVSVGKFRGRPVSLWELLFSEAISSEQRAMLAQQYQEGTLSVEKLAAKLSATLEQAAATARVTFSGLRDTVTPGELLKAEIIDQDLYERLEHGQATAKDVGSLASVQRYLQGTGCIAGLLLPGSQERLSIYEARCKGLLRPGTALILLEAQAATGFIIDPKANKGHSVEEALRAAVIGPDVFAKLLSAERAVTGYTDPYTGQQISLFQAMQKGLIVREHGIRLLEAQIATGGVIDPVHSHRVPVDVAYRRGYFDQMLNLILLDPSDDTKGFFDPNTHENLTYLQLLERCVRDPETGLYLLPLSSTQSPLVDSATQQAFQNLLLSVKYGRFQGQRVSAWELINSEYFSEGRRRQLLRRYRQREVTLGQVAKLLEAETQRQADIMLPALRSRVTVHQLLEAGIIDQQLLDQVLAGTISPEALLLMDGVRRYLCGLGAVGGVRLLPSGQRLSLYQAMRQKLLGPRVALALLEAQAATGTIMDPHSPESLSVDEAVRRGVVGPELYGRLKRAEGAIAGFRDPFSGKQVSVFQAMKKGLIPWEQAARLLEAQVATGGIIDPTSHHHLPMPVAIQRGYVDQEMETALSSSSETFPTPDGQGRTSYAQLLEECPRDETSGLHLLPLPESAPALPTEEQVQRSLQAVPGAKDGTSLWDLLSSCHFTEEQRRGLLEDVQEGRTTVPQLLASVQRWVQETKLLAQARVMVPGPRGEVPAVWLLDAGIITQETLEALAQGTQSPAQVAEQPAVKACLWGTGCVAGVLLQPSGAKASIAQAVRDGLLPTGLGQRLLEAQVASGFLVDPLNNQRLSVEDAVKVGLVGRELSEQLGQAERAAAGYPDPYSRASLSLWQAMEKGLVPQNEGLPLLQVQLATGGVVDPVHGVHLPQAAACRLGLLDTQTSQVLTAVDKDNKFFFDPSARDQVTYQQLRERCVCDSETGLLLLPLPSDTVLEVDDHTAVALRAMKVPVSTGRFKGCSVSLWDLLLSEYVGADKRRELVALCRSGRAAALRQVVSAVTTLVEAAERQPLQATFRGLRKQVSARDLFRAQLISRKTLDELSQGTTTVKEVAEMDSVKRSLEGGNFIAGVLIQGTQERMSIPEALRRHILRPGTALVLLEAQAATGFIIDPVENRKLTVEEAFKAGMFGKETYVKLLSAERAVTGYTDPYTGQQISLFQAMQKDLIVREHGIRLLEAQIATGGIIDPVHSHRVPVDVAYRCGYFDEEMNRILADPSDDTKGFFDPNTHENLTYLQLLERCVEDPETGLYLLQIIKKGENYVYINEATRHVLQSRTAKMRVGRFADQVVSFWDLLSSPYFTEDRKRELIQEYGAQSGGLEKLLEIITTTIEETETQNQGIKVAAIRGEVTAADLFNSRVIDQKTLHTLRVGRTGGQALSTLECVKPYLEGSGCIAGVTVPSTREVMSLHEASRKELIPAAFATWLLEAQAATGFLLDPCTRQKLSVDEAVDVGLVNEELRERLLKAERAATGYRDPATGDTIPLFQAMQKQLIEKAEALRLLEVQVATGGVIDPQHHHRLPLETAYRRGCLHKDIYALISDQKHMRKRFVDPNTQEKVSYRELQERCRPQEDTGWLLFPVNKAARDSEHIDDETRRALEAEQVEITVGRFRGQKPTLWALLNSEYVTEEKKLQLVRMYRTHTRRALQTVAQLILELIEKQETSNKHLWFQGIRRQITASELLSSAIITEEMLQDLETGRSTTQELMEDDRVKRYLEGTSCIAGVLVPAKDQPGRQEKMSIYQAMWKGVLRPGTALVLLEAQAATGFVIDPVRNLRLSVEEAVAAGVVGGEIQEKLLSAERAVTGYTDPYTGQQISLFQAMQKDLIVREHGIRLLEAQIATGGVIDPVHSHRVPVDVAYRRGYFDEEMNRVLADPSDDTKGFFDPNTHENLTYVQLLRRCVPDPDTGLYMLQLAGRGSAVHQLSEELRCALRDARVTPGSGALQGQSVSVWELLFYREVSEDRRQDLLSRYRAGTLTVEELGATLTSLLAQAQAQARAEAEAGSPRPDPREALRAATMEVKVGRLRGRAVPVWDVLASGYVSRAAREELLAEFGSGTLDLPALTRRLTAIIEEAEEAPGARPQLQDAWRGPREPGPAGRGDGDSGRSQREGQGEGETQEAAAAAAAAAARRQEQTLRDATMEVQRGQFQGRPVSVWDVLFSSYLSEARRDELLAQHAAGALGLPDLVAVLTRVIEETEERLSKVSFRGLRRQVSASELHTSGILGPETLRDLAQGTKTLQEVTEMDSVKRYLEGTSCIAGVLVPAKDQPGRQEKMSIYQAMWKGVLRPGTALVLLEAQAATGFVIDPVRNLRLSVEEAVAAGVVGGEIQEKLLSAERAVTGYTDPYTGQQISLFQAMQKDLIVREHGIRLLEAQIATGGVIDPVHSHRVPVDVAYQRGYFDEEMNRVLADPSDDTKGFFDPNTHENLTYVQLLRRCVPDPDTGLYMLQLAGRGSAVHQLSEELRCALRDARVTPGSGALQGQSVSVWELLFYREVSEDRRQDLLSRYRAGTLTVEELGATLTSLLAQAQAQARAEAEAGSPRPDPREALRAATMEVKVGRLRGRAVPVWDVLASGYVSRAAREELLAEFGSGTLDLPALTRRLTAIIEEAEEAPGARPQLQDAWRGPREPGPAGRGDGDSGRSQREGQGEGETQEAAAAARRQEQTLRDATMEVQRGQFQGRPVSVWDVLFSSYLSEARRDELLAQHAAGALGLPDLVAVLTRVIEETEERLSKVSFRGLRCQVSASELHTSGILGPETLRDLAQGTKTLQEVTEMDSVKRYLEGTSCIAGVLVPAKDQPGRQEKMSIYQAMWKGVLRPGTALVLLEAQAATGFVIDPVRNLRLSVEEAVAAGVVGGEIQEKLLSAERAVTGYTDPYTGQQISLFQAMQKDLIVREHGIRLLEAQIATGGVIDPVHSHRVPVDVAYRRGYFDEEMNRVLADPSDDTKGFFDPNTHENLTYVQLLRRCVPDPDTGLYMLQLAGRGSAVHQLSEELRCALRDARVTPGSGALQGQSVSVWELLFYREVSEDRRQDLLSRYRAGTLTVEELGATLTSLLAQAQAQARAEAEAGSPRPDPREALRAATMEVKVGRLRGRAVPVWDVLASGYVSRAAREELLAEFGSGTLDLPALTRRLTAIIEEAEEAPGARPQLQDAWRGPREPGPAGRGDGDSGRSQREGQGEGETQEAAAATAAARRQEQTLRDATMEVQRGQFQGRPVSVWDVLFSSYLSEARRDELLAQHAAGALGLPDLVAVLTRVIEETEERLSKVSFRGLRRQVSASELHTSGILGPETLRDLAQGTKTLQEVTEMDSVKRYLEGTSCIAGVLVPAKDQPGRQEKMSIYQAMWKGVLRPGTALVLLEAQAATGFVIDPVRNLRLSVEEAVAAGVVGGEIQEKLLSAERAVTGYTDPYTGQQISLFQAMQKDLIVREHGIRLLEAQIATGGVIDPVHSHRVPVDVAYRRGYFDEEMNRVLADPSDDTKGFFDPNTHENLTYVQLLRRCVPDPDTGLYMLQLAGRGSAVHQLSEELRCALRDARVTPGSGALQGQSVSVWELLFYREVSEDRRQDLLSRYRAGTLTVEELGATLTSLLAQAQAQARAEAEAGSPRPDPREALRAATMEVKVGRLRGRAVPVWDVLASGYVSRAAREELLAEFGSGTLDLPALTRRLTAIIEEAEEAPGARPQLQDAWRGPREPGPAGRGDGDSGRSQREGQGEGETQEAAAATAAARRQEQTLRDATMEVQRGQFQGRPVSVWDVLFSSYLSEARRDELLAQHAAGALGLPDLVAVLTRVIEETEERLSKVSFRGLRRQVSASELHTSGILGPETLRDLAQGTKTLQEVTEMDSVKRYLEGTSCIAGVLVPAKDQPGHQEKMSIYQAMWKGVLRPGTALVLLEAQAATGFVIDPVRNLRLSVEEAVAAGVVGGEIQEKLLSAERAVTGYTDPYTGQQISLFQAMQKDLIVREHGIRLLEAQIATGGVIDPVHSHRVPVDVAYRRGYFDEEMNRVLAHPSDDTKGFFDPNTHENLTYVQLLRRCVPDPDTGLYMLQLAGRGSAVHQLSEELRCALRDARVMPGSGALQGQSVSVWELLFYREVSEDRRQDLLSRYRAGTLTVEELGATLTSLLAQAQAQARAEAEAEAGSPRPDPREALRAATMEVKVGRLRGRAVPVWDVLASGYVSGAAREELLAEFGSGTLDLPALTRRLTAIIEEAEEAPGARPQLQDAWRGPREPGPAGRGDGDSGRSQREGQGEGETQEAAAAARRQEQTLRDATMEVQRGQFQGRPVSVWDVLFSSYLSEAHRDELLAQHAAGALGLPDLVAVLTRVIEETEERLSKVSFRGLRRQVSASELHTSGILGPETLRDLAQGTKTLQEVTEMDSVKRYLEGTSCIAGVLVPAKDQPGRQEKMSIYQAMWKGVLRPGTALVLLEAQAATGFVIDPVRNLRLSVEEAVAAGVVGGEIQEKLLSAERAVTGYTDPYTGQQISLFQAMQKDLIVREHGIRLLEAQIATGGVIDPVHSHRVPVDVAYRRGYFDEEMNRVLADPSDDTKGFFDPNTHENLTYLQLLQRATLDPETGLLFLSLSLQ

SEQ ID NO: 23548 - protein, 228 aa, Homo sapiens
TISWFRDGQLLPSSNYSNIKIYNTPSASYLEVTPDSENDFGNYNCTAVNRIGQESLEFILVQADTPSSPSIDQVEPYSSTAQVQFDEPEATGGVPILKYKAEWRAVGEEVWHSKWYDAKEASMEGIVTIVGLKPETTYAVRLAALNGKGLGEISAASEFKTQPVHSPPPREPSAPKLEGQMGEDGNSIKVNLIKQDDGGSPIRHYLVRYRALSSEWKPEIRLPSGSDH

SEQ ID NO: 23549 - protein, 260 aa, Homo sapiens
MNGRALCILTKDDFRHRAPSSGDVLYELLQYIKTQRRALVCGPFFGGIFRLKTPTQHSPVPPEEVTGPSQMDTRRGHLLQPPDPGLTSNFGHLDDPGLARWTPGKEESLNLCHCAELGCRTQGVCSFPAMPQAPIDGRIADCRLLWDYVYQLLLDTRYEPYIKWEDKDAKIFRVVDPNGLARLWGNHKNRVNMTYEKMSRALRHYYKLNIIKKEPGQKLLFRFLKTPGKMVQDKHSHLEPLESQEQDRIEFKDKRPEISP

SEQ ID NO: 23550 - protein, 565 aa, Homo sapiens
MLISRNKLILLLGIVFFERGKSATLSLPKAPSCGQSLVKVQPWNYFNIFSRILGGSQVEKGSYPWQVSLKQRQKHICGGSIVSPQWVITAAHCIANRNIVSTLNVTAGEYDLSQTDPGEQTLTIETVIIHPHFSTKKPMDYDIALLKMAGAFQFGHFVGPICLPELREQFEAGFICTTAGWGRLTEGGVLSQVLQEVNLPILTWEECVAALLTLKRPISGKTFLCTGFPDGGRDACQGDSGGSLMCRNKKGAWTLAGVTSWGLGCGRGWRNNVRKSDQGSPGIFTDISKVLPWIHEHIQTGNRRKSSRAWCSEQDVIVSGAEGKLHFPESLHLYYESKQRCVWTLLVPEEMHVLLSFSHLDVESCHHSYLSMYSLEDRPIGKFCGESLPSSILIGSNSLRLKFVSDATDNAAGFNLTYKALKPNYIPDSGCSYLTVLFEEGLIQSLNYPENYSDKANCDWIFQASKHHLIKLSFQSLEIEESGDCTSDYVTVHSDVERKKEIARLCGYDVPTPVLSPSSIMLISFQSDENGTCRGFQATVSFIPKAVYPDLNISISEDESMFLET

SEQ ID NO: 23551 - protein, 251 aa, Homo sapiens
MLLEKDVNPGGKEETPGQRPAVTETHQLAELNEKKNERLRAAFGISDSYVDGSSFDPQRRAREAKQPAPEPPKPYSLVRESSSSRSPTPKQKKKKKKKDRGRRSESSSPRRERKKSSKKKKHRSESESKKRKHRSPTPKSKRKSKDKKRKRSRSTTPAPKSRRAHRSTSADSASSSDTSRSRSRSAAAKTHTTALAGRSPSPASGRRGEGDAPFSEPGTTSTQRPSSPETATKQPSSPYEDKDKDKKEVCS

SEQ ID NO: 23552 - protein, 1075 aa, Homo sapiens
PVHGPQNVEIVDIRARQLTLQWEPFGYAVTRCHSYNLTVQYQYVFNQQQYEAEEVIQTSSHYTLRGLRPFMTIRLRLLLSNPEGRMESEELVVQTEEDVPGAVPLESIQGGPFEEKIYIQWKPPNETNGVITLYEINYKAVGSLDPSADLSSQRGKVFKLRNETHHLFVGLYPGTTYSFTIKASTAKGFGPPVTTRIATKISAPSMPEYDTDTPLNETDTTITVMLKPAQSRGAPVSVYQLVVKEERLQKSRRAADIIECFSVPVSYRNASSLDSLHYFAAELKPANLPVTQPFTVGDNKTYNGYWNPPLSPLKSYSIYFQALSKANGETKINCVRLATKAPMGSAQVTPGTPLCLLTTGASTQNSNTVEPEKQVDNTVKMAGVIAGLLMFIIILLGVMLTIKRRRNAYSYSYYLKLAKKQKETQSGAQREMGPVASADKPTTKLSASRNDEGFSSSSQDVNGFTDGSRGELSQPTLTIQTHPYRTCDPVEMSYPRDQFQPAIRVADLLQHITQMKRGQGYGFKEEYEALPEGQTASWDTAKEDENRNKNRYGNIISYDHSRVRLLVLDGDPHSDYINANYIDGYHRPRHYIATQGPMQETVKDFWRMIWQENSASIVMVTNLVEVGRVKCVRYWPDDTEVYGDIKVTLIETEPLAEYVIRTFTVQKKGYHEIRELRLFHFTSWPDHGVPCYATGLLGFVRQVKFLNPPEAGPIVVHCSAGAGRTGCFIAIDTMLDMAENEGVVDIFNCVRELRAQRVNLVQTEEQYVFVHDAILEACLCGNTAIPVCEFRSLYYNISRLDPQTNSSQIKDEFQTLNIVTPRVRPEDCSIGLLPRNHDKNRSMDVLPLDRCLPFLISVDGESSNYINAALMDSHKQPAAFVVTQHPLPNTVADFWRLVFDYNCSSVVMLNEMDTAQFCMQYWPEKTSGCYGPIQVEFVSADIDEDIIHRIFRICNMARPQDGYRIVQHLQYIGWPAYRDTPPSKRSLLKVVRRLEKWQEQYDGREGRTVVHCLNGGGRSGTFCAICSVCEMIQQQNIIDVFHIVKTLRNNKSNMVETLEQYKFVYEVALEYLSSF

SEQ ID NO: 23553 - protein, 961 aa, Homo sapiens
MEVPAAGRVPAEGAPTAAVAEVRCPGPAPLRLLEWRVAAGAAVRIGSVLAVFEAAASAQSSGASQSRVASGGCVRPARPERRLRSERAGVVRELCAQPGQVVAPGAVLVRLEGCSHPVVMKGLCAECGQDLTQLQSKNGKQQVPLSTATVSMVHSVPELMVSSEQAEQLGREDQQRLHRNRKLVLMVDLDQTLIHTTEQHCQQMSNKGIFHFQLGRGEPMLHTRLRPHCKDFLEKIAKLYELHVFTFGSRLYAHTIAGFLDPEKKLFSHRILSRDECIDPFSKTGNLRNLFPCGDSMVCIIDDREDVWKFAPNLITVKKYVYFQGTGDMNAPPGSRESQTRKKVNHSRGTEVSEPSPPVRDPEGVTQAPGVEPSNGLEKPARELNGSEAATPRDSPRPGKPDERDIWPPAQAPTSSQELAGAPEPQGSCAQGGRVAPGQRPAQGATGTDLDFDLSSDSESSSESEGTKSSSSASDGESEGKRGRQKPKAAPEGAGALAQGSSLEPGRPAAPSLPGEAEPGAHAPDKEPELGGQEEGERDGLCGLGNGCADRKEAETESQNSELSGVTAGESLDQSMEEEEEEDTDEDDHLIYLEEILVRVHTDYYAKYDRYLNKEIEEAPDIRKIVPELKSKVLADVAIIFSGLHPTNFPIEKTREHYHATALGAKILTRLVLSPDAPDRATHLIAARAGTEKVLQAQECGHLHVVNPDWLWSCLERWDKVEEQLFPLRDDHTKAQRENSPAAFPDREGVPPTALFHPMPVLPKAQPGPEVRIYDSNTGKLIRTGARGPPAPSSSLPIRQEPSSFRAVPPPQPQMFGEELPDAQDGEQPGPSRRKRQPSMSETMPLYTLCKEDLESMDKEVDDILGEGSDDSDSEKRRPEEQEEEPQPRKPGTRRERTLGAPASSERSAAGGRGPRGHKRKLNEEDAASESSRESSNEDEGSSSEADEMAKALEAELNDLM

SEQ ID NO: 23554 - protein, 978 aa, Homo sapiens
MAQVAMSTLPVEDEESSESRMVVTFLMSALESMCKELAKSKAEVACIAVYETDVFVVGTERGRAFVNTRKDFQKDFVKYCVEEEEKAAEMHKMKSTTQANRMSVDAVEIETLRKTVEDYFCFCYGKALGKSTVVPVPYEKMLRDQSAVVVQGLPEGVAFKHPENYDLATLKWILENKAGISFIIKRPFLEPKKHVGGRVMVTDADRSILSPGGSCGPIKVKTEPTEDSGISLEMAAVTVKEESEDPDYYQYNIQGSHHSSEGNEGTEMEVPAEDSTQHVPSETSEDPEVEVTIEDDDYSPPSKRPKANELPQPPVPEPANAGKRKVREFNFEKWNARITDLRKQVEELFERKYAQAIKAKGPVTIPYPLFQSHVEDLYVEGLPEGIPFRRPSTYGIPRLERILLAKERIRFVIKKHELLNSTREDLQLDKPASGVKEEWYARITKLRKMVDQLFCKKFAEALGSTEAKAVPYQKFEAHPNDLYVEGLPENIPFRSPSWYGIPRLEKIIQVGNRIKFVIKRPELLTHSTTEVTQPRTNTPVKEDWNVRITKLRKQVEEIFNLKFAQALGLTEAVKVPYPVFESNPEFLYVEGLPEGIPFRSPTWFGIPRLERIVRGSNKIKFVVKKPELVISYLPPGMASKINTKALQSPKRPRSPGSNSKVPEIEVTVEGPNNNNPQTSAVRTPTQTNGSNVPFKPRGREFSFEAWNAKITDLKQKVENLFNEKCGEALGLKQAVKVPFALFESFPEDFYVEGLPEGVPFRRPSTFGIPRLEKILRNKAKIKFIIKKPEMFETAIKESTSSKSPPRKINSSPNVNTTASGVEDLNIIQVTIPDDDNERLSKVEKARQLREQVNDLFSRKFGEAIGMGFPVKVPYRKITINPGCVVVDGMPPGVSFKAPSYLEISSMRRILDSAEFIKFTVIRPFPGLVINNQLVDQSESEGPVIQESAEPSQLEVPATEEIKETDGSSQIKQEPDPTW

SEQ ID NO: 23555 - protein, 617 aa, Homo sapiens
MSAGFWQPGPGGPPCRLCGEASRGRAPSRDEGSLLLGSRRPRRDAAERCAAALMASRRKSEAKQMPRAAPATRVTRRSTQESLTAGGTDLKRELHPPATSHEAPGTKRSPSAPAATSSASSSTSSYKRAPASSAPQPKPLKRFKRAAGKKGARTRQGPGAESEDLYDFVFIVAGEKEDGEEMEIGEVACGALDGSDPSCLGLPALEASQRFRSISTLELFTVPLSTEAALTLCHLLSSWVSLESLTLSYNGLGSNIFRLLDSLRALSGQAGCRLRALHLSDLFSPLPILELTRAIVRALPLLRVLSIRVDHPSQRDNPGVPGNAGPPSHIIGDEEIPENCLEQLEMGFPRGAQPAPLLCSVLKASGSLQQLSLDSATFASPQDFGLVLQTLKEYNLALKRLSFHDMNLADCQSEVLFLLQNLTLQEITFSFCRLFEKRPAQFLPEMVAAMKGNSTLKGLRLPGNRLGNAGLLALADVFSEDSSSSLCQLDISSNCIKPDGLLEFAKRLERWGRGAFGHLRLFQNWLDQDAVTAREAIRRLRATCHVVSDSWTHPRPSQIMLAPCDGARTSQSHARYHQLAGAEAWAAQNPNHQFYLSLSVTFFLFFPSSLALRSWRP

SEQ ID NO: 23556 - protein, 803 aa, Homo sapiens
MGSGAGELGRAERLPVLFLFLLSLFCPALCEQIRYRIPEEMPKGSVVGNLATDLGFSVQELPTRKLRVSSEKPYFTVSAESGELLVSSRLDREEICGKKPACALEFEAVAENPLNFYHVNVEIEDINDHTPKFTQNSFELQISESAQPGTRFILGSAHDADIGSNTLQNYQLSPSDHFSLINKEKSDGSKYPEMVLKTPLDREKQKSYHLTLTALDFGAPPLSSTAQIHVLVTDANDNAPVFSQDVYRVSLSENVYPGTTVLQVTATDQDEGVNAEITFSFSEASQITQFDLNSNTGEITVLNTLDFEEVKEYSIVLEARDGGGMIAQCTVEVEVIDENDNAPEVIFQSLPNLIMEDAELGTHIALLKVRDKDSRHNGEVTCKLEGDVPFKILTSSRNTYKLVTDAVLDREQNPEYNITVTATDRGKPPLSSSSSITLHIGDVNDNAPVFSQSSYIVHVAENNPPGASISQVRASDPDLGPNGQVSYCIMASDLEQRELSSYVSISAESGVVFAQRAFDHEQLRAFELTLQARDQGSPALSANVSLRVLVDDRNDNAPRVLYPALGPDGSALFDMVPHAAEPGYLVTKVVAVDADSGHNAWLSYHVLQASEPGLFSLGLRTGEVRTARALGDRDAVRQRLLVAVRDGGQPPLSATATLHLVFADSLQEVLPDITDRPDPSDLQAELQFYLVVALALISVLFLVAMILAIALRLRRSSSPASWSCFQPGLCVKSESVVPPNYSEGTLPYSYNLCVAHTGKTEFNFLKCSEQLSSGQDILCGDSSGALFPLCNSSELTSHQVSFL

SEQ ID NO: 23557 - protein, 142 aa, Homo sapiens [sequence omitted]

SEQ ID NO: 23558 - protein, 254 aa, Homo sapiens
MAKPCGVRLSGEARKQVEVFRQNLFQEAEEFLYRFLPQKIIYLNQLLQEDSLNVADLTSLRAPLDIPIPDPPPKDDEMETDKQEKKEGKRDKRKGLNPLFLTVHKCGFLPGNEKVLSLLALVKPEVWTLKEKCILVITWIQHLIPKIEDGNDFGVAIQEKVLERVNAVKTKVEAFQTTISKYFSERGDAVAKASKETHVMDYRALVHERDEAAYGELRAMVLDLRAFYAELYHIISSNLEKIVNPKGEEKPSMY

SEQ ID NO: 23559 - protein, 459 aa, Homo sapiens [sequence omitted]

SEQ ID NO: 23560 - protein, 2413 aa, Homo sapiens; identical to SEQ ID NO: 8690

SEQ ID NO: 23561 - protein, 1930 aa, Homo sapiens
MRITLRNLEEVEFCVEDKPGTHFTPVPPTPPDACRGMLCGFGAVCEPNAEGPGRASCVCKKSPCPSVVAPVCGSDASTYSNECELQRAQCSQQRRIRLLSRGPCGSRDPCSNVTCSFGSTCARSADGLTASCLCPATCRGAPEGTVCGSDGADYPGECQLLRRACARQENVFKKFDGPCDPCQGALPDPSRSCRVNPRTRRPEMLLRPESCPARQAPVCGDDGVTYENDCVMGRSGAARGLLLQKVRSGQCQGRDQCPEPCRFNAVCLSRRGRPRCSCDRVTCDGAYRPVCAQDGRTYDSDCWRQQAECRQQRAIPSKHQGPCDQAPSPCLGVQCAFGATCAVKNGQAACECLQACSSLYDPVCGSDGVTYGSACELEATACTLGREIQVARKGPCDRCGQCRFGALCEAETGRCVCPSECVALAQPVCGSDGHTYPSECMLHVHACTHQISLHVASAGPCETCGDAVCAFGAVCSAGQCVCPRCEHPPPGPVCGSDGVTYGSACELREAACLQQTQIEEARAGPCEQAECGSGGSGSGEDGDCEQELCRQRGGIWDEDSEDGPCVCDFSCQSVPGSPVCGSDGVTYSTECELKKARCESQRGLYVAAQGACRGPTFAPLPPVAPLHCAQTPYGCCQDNITAARGVGLAGCPSACQCNPHGSYGGTCDPATGQCSCRPGVGGLRCDRCEPGFWNFRGIVTDGRSGCTPCSCDPQGAVRDDCEQMTGLCSCKPGVAGPKCGQCPDGRALGPAGCEADASAPATCAEMRCEFGARCVEESGSAHCVCPMLTCPEANATKVCGSDGVTYGNECQLKTIACRQGLQISIQSLGPCQEAVAPSTHPTSASVTVTTPGLLLSQALPAPPGALPLAPSSTAHSQTTPPPSSRPRTTASVPRTTVWPVLTVPPTAPSPAPSLVASAFGESGSTDGSSDEELSGDQEASGGGSGGLEPLEGSSVATPGPPVERASCYNSALGCCSDGKTPSLDAEGSNCPATKVFQGVLELEGVEGQELFYTPEMADPKSELFGETARSIESTLDDLFRNSDVKKDFRSVRLRDLGPGKSVRAIVDVHFDPTTAFRAPDVARALLRQIQVSRRRSLGVRRPLQEHVRFMDFDWFPAFITGATSGAIAAGATARATTASRLPSSAVTPRAPHPSHTSQPVAKTTAAPTTRRPPTTAPSRVPGRRPPAPQQPPKPCDSQPCFHGGTCQDWALGGGFTCSCPAGRGGAVCEKVLGAPVPAFEGRSFLAFPTLRAYHTLRLALEFRALEPQGLLLYNGNARGKDFLALALLDGRVQLRFDTGSGPAVLTSAVPVEPGQWHRLELSRHWRRGTLSVDGETPVLGESPSGTDGLNLDTDLFVGGVPEDQAAVALERTFVGAGLRGCIRLLDVNNQRLELGIGPGAATRGSGVGECGDHPCLPNPCHGGAPCQNLEAGRFHCQCPPGRVGPTCADEKSPCQPNPCHGAAPCRVLPEGGAQCECPLGREGTFCQTASGQDGSGPFLADFNGFSHLELRGLHTFARDLGEKMALEVVFLARGPSGLLLYNGQKTDGKGDFVSLALRDRRLEFRYDLGKGAAVIRSREPVTLGAWTRVSLERNGRKGALRVGDGPRVLGESPKSRKVPHTVLNLKEPLYVGGAPDFSKLARAAAVSSGFDGAIQLVSLGGRQLLTPEHVLRQVDVTSFAGHPCTRASGHPCLNGASCVPREAAYVCLCPGGFSGPHCEKGLVEKSAGDVDTLAFDGRTFVEYLNAVTESELANEIPVPETLDSGALHSEKALQSNHFELSLRTEATQGLVLWSGKATERADYVALAIVDGHLQLSYNLGSQPVVLRSTVPVNTNRWLRVVAHREQREGSLQVGNEAPVTGSSPLGATQLDTDGALWLGGLPELPVGPALPKAYGTGFVGCLRDVVVGRHPLHLLEDAVTKPELRPCPTP

SEQ ID NO: 23562 - protein, 418 aa, Homo sapiens
MLPEDKEADSLRGNISVKAVKKEVEKKLRCLLADLPLPPELPGGDDLSKSPEEKKTATQLHSKRRPKICGPRYGETKEKDIDWGKRCVDKFDIIGIIGEGTYGQVYKARDKDTGEMVALKKVRLDNEKEGFPITAIREIKILRQLTHQSIINMKEIVTDKEDALDFKKDKGAFYLVFEYMDHDLMGLLESGLVHFNENHIKSFMRQLMEGLDYCHKKNFLHRDIKCSNILLNNRGQIKLADFGLARLYSSEESRPYTNKVITLWYRPPELLLGEERYTPAIDVWSCGCILGELFTKKPIFQANQELAQLELISRICGSPCPAVWPDVIKLPYFNTMKPKKQYRRKLREEFVFIPAAALDLFDYMLALDPSKRCTAEQALQCEFLRDVEPSKCLHQISLYGKIVMSYGVKSEEDRSRWA

SEQ ID NO: 23563 - protein, 906 aa, Homo sapiens
MDSTACLKSLLLTVSQYKAVKSEANATQLLRHLEVISGQKLTRLFTSNQILTSECLSCLVELLEDPNISASLILSIIGLLSQLAVDIETRDCLQNTYNLNSVLAGVVCRSSHTDSVFLQCIQLLQKLTYNVKIFYSGANIDELITFLIDHIQSSEDELKMPCLGLLANLCRHNLSVQTHIKTLSNVKSFYRTLITLLAHSSLTVVVFALSILSSLTLNEEVGEKLFHARNIHQTFQLIFNILINGDGTLTRKYSVDLLMDLLKNPKIADYLTRYEHFSSCLHQVLGLLNGKDPDSSSKVLELLLAFCSVTQLRHMLTQMMFEQSPPGSATLGSHTKCLEPTVALLRWLSQPLDGSENCSVLALELFKEIFEDVIDAANCSSADRFVTLLLPTILDQLQFTEQNLDEALTRKKCERIAKAIEVLLTPLCGDDTLKMHIAKILTTVKCTTLIEQQFTYGKIDLGFGTKVADSELCKLAADVILKTLDLINKLKPLVPGMEVSFYKILQDPRLITPLAFALTSDNREQVQSGLRILLEAAPLPDFPALVLGESIAANNAYRQQETEHIPRKMPWQSSNHSFPTSIKCLTPHLKDGVPGLNIEELIEKLQSGMVVKDQICDVRISDIMDVYEMKLSTLASKESRLQDLLETKALALAQADRLIAQHRCQRTQAETEARTLASMLREVERKNEELSVLLKAQQVESERAQSDIEHLFQHNRKLESVAEEHEILTKSYMELLQRNESTEKKNKDLQITCDSLNKQIETVKKLNESLKEQNEKSIAQLIEKEEQRKEVQNQLVDREHKLANLHQKTKVQEEKIKTLQKEREDKEETIDILRKELSRTEQIRKELSIKASSLEVQKAQLEGRLEEKESLVKLQQEELNKHSHMIAMIHSLSGGKINPETVNLSI

SEQ ID NO: 23564 - protein, 55 aa, Homo sapiens
MAAALFVLLGFALLGTHGASGAAGTVFTTVEDLGSKILLTCSLNDSATEQRAAPE

SEQ ID NO: 23565 - protein, 605 aa, Homo sapiens
MFSCFCFSLQDNSFSSTTVTECDEDPVSLHEDQTDCSSLRDENNKENYPDAGALVEEHAPPSWEPQQQNVEATVLVDSVLRPSMGNFKSRKPKSIFKAESGRSHGESQETEHVVSSQSECQVRAGTPAHESPQNNAFKCQETVRLQPRIDQRTAISPKDAFETRQDLNENSLLKLQALESDLCSAFLTNQEEAAQVHGVKDPAPASTQSVLADGTDSADPSPVHKDGQNEADSAPEDLHSVGTSRLLYHITDGDNPLLSPRCSIFSQSQRFNLDPESAPSPPSTQQFMMPRSSSRCSCGDGKEPQTITQLTKHIQSLKRKIRKFEEKFEQEKKYRPSHGDKTSNPEVLKWMNDLAKGRKQLKELKLKLSEEQGSAPKGPPRNLLCEQPTVPRENGKPEAAGPEPSSSGEETPDAALTCLKERREQLPPQEDSKVTKQDKNLIKPLYDRYRIIKQILSTPSLIPTIEEEDSDEDRPQGSQQPSLADPASHLPVGDHLTYSNETEPVRALLPDEKKEVKPPALSMSNLHEATMPVLLDHLRETRADKKRLRKALREFEEQFFKQTGRSPQKEDRIPMADEYYEYKHIKAKLRLLEVLISKQDVAKTI

SEQ ID NO: 23566 - protein, 295 aa, Homo sapiens [sequence omitted]

SEQ ID NO: 23567 - protein, 466 aa, Homo sapiens; identical to SEQ ID NO: 18196

SEQ ID NO: 23568 - protein, 573 aa, Homo sapiens
MSKGILQVHPPICDCPGCRISSPVNRGRLADKRTVALPAARNLKKERTPSFSASDGDSDGSGPTCGRRPGLKQEDGPHIRIMKRRVHTHWDVNISFREASCSQDGNLPTLISSVHRSRHLVMPEHQSRCEFQRGSLEIGLRPAGDLLGKRLGRSPRISSDCFSEKRARSESPQAEALLLPRELGPSMAPEDHYRRLVSALSEASTFEDPQRLYHLGLPSHGYGFLPPAQAEMFAWQQELLRKQNLARLELPADLLRQKELESARPQLLAPETALRPNDGAEELQRRGALLVLNHGAAPLLALPPQGPPGSGPPTPSRDSARRAPRKGGPGPASARPSESKEMTGARLWAQDGSEDEPPKDSDGEDPETAAVGCRGPTPGQAPAGGAGAEGKGLFPGSTLPLGFPYAVSPYFHTGAVGGLSMDGEEAPAPEDVTKWTVDDVCSFVGGLSGCGEYTRVFREQGIDGETLPLLTEEHLLTNMGLKLGPALKIRAQVARRLGRVFYVASFPVALPLQPPTLRAPERELGTGEQPLSPTTATSPYGGGHALAGQTSPKQENGTLALLPGAPDPSQPLC

SEQ ID NO: 23569 - protein, 672 aa, Homo sapiens
MTYDDIPHLSAKIKPKQQKVELEMAIDTLNPNYCRSKGEQIALNVDGACADETSTYSSKLMDKQTFCSSQTTSNTSRYAAALYRQGELHLTPLHGILQLRPSFSYLDKADAKHREREAANEAGDSSQDEAEDDVKQITVRFSRPESEQARQRRVQSYEFLQKKHAEEPWVHLHYYGLRDSRSEHERQYLLCPGSSGVENTELVKSPSEYLMMLMPPSQEEEKDKPVAPSNVLSMAQLRTLPLADQIKILMKNVKVMPFANLMSLLGPSIDSVAVLRGIQKVAMLVQGNWVVKSDILYPKDSSSPHSGVPAEVLCRGRDFVMWKFTQSRWVVRKEVATVTKLCAEDVKDFLEHMAVVRINKGWEFILPYDGEFIKKHPDVVQRQHMLWTGIQAKLEKVYNLVKETMPKKPDAQSGPAGLVCGDQRIQVAKTKAQQNHALLERELQRRKEQLRVPAVPPGVRIKEEPVSEEGEEDEEQEAEEEPMDTSPSGLHSKLANGLPLGRAAGTDSFNGHPPQGCASTPVARELKAFVEATFQRQFVLTLSELKRLFNLHLASLPPGHTLFSGISDRMLQDTVLAAGCKQILVPFPPQTAASPDEQKVFALWESGDMSDQHRQVLLEIFSKNYRVRRNMIQSRLTQECGEDLSKQEVDKVLKDCCVSYGGMWYLKGTVQS

SEQ ID NO: 23570 - protein, 682 aa, Homo sapiens [sequence omitted]

SEQ ID NO: 23571 - protein, 355 aa, Homo sapiens
MEEGERSPLLSQETAGQKPLSVHRPPTSGCLGPVPREDQAEAWGCSCCPPETKHQALSGTPKKGPAPSLSPGSSCVKYLIFLSNFPFSLLGLLALAIGLWGLAVKGSLGSDLGGPLPADPMLGLALGGLVVSAVSLAGYLGALCENTCLLRGFSGGILAFLVLEAVAGALVVALWGPLQDSLEHTLRVAIAHYQDDPDLRFLLDQVQLGLRCCGAASYQDWQQNLYFNCSSPGVQACSLPASCCIDPREDGASVNDQCGFGVLRLDADAAQRVVYLEGCGPPLRRWLRANLAASGGYAIAVVLLQGAELLLAARLLGALAARRGAAYGPGARGEDRAGPQSPSPGAPPAAKPARG

SEQ ID NO: 23572 - protein, 1087 aa, Homo sapiens
MASAPAEAETRQRLLRTVKKEVKQIMEEAVTRKFVHEDSSHIISFCAAVEACVLHGLRRRAAGFLRSNKIAALFMKVGKNFPPAEDLSRKVQDLEQLIESARNQIQGLQENVRKLPKLPNLSPLAIKHLWIRTALFEKVLDKIVHYLVENSSKYYEKEALLMDPVDGPILASLLVGPCALEYTKMKTADHFWTDPSADELVQRHRIHSSHVRQDSPTKRPALCIQKRHSSGSMDDRPSLSARDYVESLHQNSRATLLYGKNNVLVQPRDDMEAVPGYLSLHQTADVMTLKWTPNQLMNGSVGDLDYEKSVYWDYAMTIRLEEIVYLHCHQQVDSGGTVVLVSQDGIQRPPFRFPKGGHLLQFLSCLENGLLPHGQLDPPLWSQRGKGKVFPKLRKRSPQGSAESTSSDKDDDEATDYVFRIIYPGMQSEFVAPDFLGSTSSVSVGPAWMMVPAGRSMLVVARGSQWEPARWDTTLPTPSPKEQPPMPQDLMDVSVSNLPSLWQPSPRKSSCSSCSQSGSADGSSTNGCNHERAPLKLLCDNMKYQILSRAFYGWLAYCRHLSTVRTHLSALVNHMIVSPDLPCDAGQGLTARIWEQYLHDSTSYEEQELLRLIYYGGIQPEIRKAVWPFLLGHYQFGMTETERKESSQSCSSGRQNIRLHSDSSSSTQVFESVDEVEQVEAEGRLEEKQPKIPNGNLVNGTCSPDSGHPSSHNFSSGLSEHSEPSLSTEDSVLDAQRNTPTVLRPRDGSVDDRQSSEATTSQDEAPREELAVQDSLESDLLANESMDEFMSITGSLDMALPEKDDVVMEGWRSSETEKHGQADSEDNLSEEPEMESLFPALASLAVTTSANEVSPVSSSGVTYSPELLDLYTVNLHRIEKDVQRCDRNYWYFTPANLEKLRNIMCSYIWQHIEIGYVQGMCDLLAPLLVILDDEALAFSCFTELMKRMNQNFPHGGAMDTHFANMRSLIQILDSELFELMHQNGDYTHFYFCYRWFLLDFKRELVYDDVFLVWETIWAAKHVSSAHYVLFIALALVEVYRDIILENNMDFTDIIKFFNEMAERHNTKQVLKLARDLVYKVQTLIENK

SEQ ID NO: 23573 - protein, 1964 aa, Homo sapiens
MFRQFYLWTCLASGIILGSLFEICLGQYDDDWQYEDCKLARGGPPATIVAIDEESRNGTILVDNMLIKGTAGGPDPTIELSLKDNVDYWVLMDPVKQMLFLNSTGRVLDRDPPMNIHSIVVQVQCINKKVGTIIYHEVRIVVRDRNDNSPTFKHESYYATVNELTPVGTTIFTGFSGDNGATDIDDGPNGQIEYVIQYNPDDPTSNDTFEIPLMLTGNIVLRKRLNYEDKTRYFVIIQANDRAQNLNERRTTTTTLTVDVLDGDDLGPMFLPCVLVPNTRDCRPLTYQAAIPELRTPEELNPIIVTPPIQAIDQDRNIQPPSDRPGILYSILVGTPEDYPRFFHMHPRTAELSLLEPVNRDFHQKFDLVIKAEQDNGHPLPAFAGLHIEILDENNQSPYFTMPSYQGYILESAPVGATISDSLNLTSPLRIVALDKDIEDTKDPELHLFLNDYTSVFTVTQTGITRYLTLLQPVDREEQQTYTFSITAFDGVQESEPVIVNIQVMDANDNTPTFPEISYDVYVYTDMRPGDSVIQLTAVDADEGSNGEITYEILVGAQGDFIINKTTGLITIAPGVEMIVGRTYALTVQAADNAPPAERRNSICTVYIEVLPPNNQSPPRFPQLMYSLEISEAMRVGAVLLNLQATDREGDSITYAIENGDPQRVFNLSETTGILTLGKALDRESTDRYILIITASDGRPDGTSTATVNIVVTDVNDNAPVFDPYLPRNLSVVEEEANAFVGQVKATDPDAGINGQVHYSLGNFNNLFRITSNGSIYTAVKLNREVRDYYELVVVATDGAVHPRHSTLTLAIKVLDIDDNSPVFTNSTYTVLVEENLPAGTTILQIEAKDVDLGANVSYRIRSPEVKHFFALHPFTGELSLLRSLDYEAFPDQEASITFLVEAFDIYGTMPPGIATVTVIVKDMNDYPPVFSKRIYKGMVAPDAVKGTPITTVYAEDADPPGLPASRVRYRVDDVQFPYPASIFEVEEDSGRVITRVNLNEEPTTIFKLVVVAFDDGEPVMSSSATVKILVLHPGEIPRFTQEEYRPPPVSELATKGTMVGVISAAAINQSIVYSIVSGNEEDTFGINNITGVIYVNGPLDYETRTSYVLRVQADSLEVVLANLRVPSKSNTAKVYIEIQDENNHPPVFQKKFYIGGVSEDARMFTSVLRVKATDKDTGNYSVMAYRLIIPPIKEGKEGFVVETYTGLIKTAMLFHNMRRSYFKFQVIATDDYGKGLSGKADVLVSVVNQLDMQVIVSNVPPTLVEKKIEDLTEILDRYVQEQIPGAKVVVESIGARRHGDAFSLEDYTKCDLTVYAIDPQTNRAIDRNELFKFLDGKLLDINKDFQPYYGEGGRILEIRTPEAVTSIKKRGESLGYTEGALLALAFIIILCCIPAILVVLVSYRQVFKGRQAECTKTARIQAALPAAKPAVPAPAPVAAPPPPPPPPPGAHLYEELGDSSILSSLFLLYHFQQSRGNNSVSEDRKHQQVVMPFSSNTIEAHKSAHVDGSLKSNKLKSARKFTFLSDEDDLSAHNPLYKENISQVSTNSDISQRTDFVDPFSPKIQAKSKSLRGPREKIQRLWSQSVSLPRRLMRKVPNRPEIIDLQQWQGTRQKAENENTGICTNKRGSSNPLLTTEEANLTEKEEIRQGETLMIEGTEQLKSLSSDSSFCFPRPHFSFSTLPTVSRTVELKSEPNVISSPAECSLELSPSRPCVLHSSLSRRETPICMLPIETERNIFENFAHPPNISPSACPLPPPPPISPPSPPPAPAPLAPPPDISPFSLFCPPPSPPSIPLPLPPPTFFPLSVSTSGPPTPPLLPPFPTPLPPPPPSIPCPPPPSASFLSTECVCITGVKCTTNLMPAEKIKSSMTQLSTTTVCKTDPQREPKGILRHVKNLAELEKSVANMYSQIEKNYLRTNVSELQTMCPSEVTNMEITSEQNKGSLNNIVEGTEKQSHSQSTSL

SEQ ID NO: 23574 - protein, 624 aa, Homo sapiens
MVGRSPSATPAERPPRGCAELAQRQQHEPDPRIGRAPVESRLLREAGPTPARAAGQLEYETQIKKMLCSKDSLGLKEELTDEDREKVAVHEGINSGTAMSRGLYQPATIFMGRQMSAILSMRDFSTEHKSPQPTKNFSIPDPHSHRQTAQSSNVTDSCVVQTSNDTQCLNKSDNIDGKASLQIGEKMPVTASVLSEEEQTHCLEIGSNTRHGKSNLSEGKKSAELNSPLRERLSPENRTTDLKCDSSSGSEGEILTREHIEVEEKRASPPVSPIPVSEYCESENKWSQEKHSPWEGVSDHLAHREPKSQKPFRKMQEEEEESWSTSSDLTISISEDDLILESPEPQPNPGGKMEGEDGIEALKLIHAEQERVALSTEKNCILQTLSSPDSEKESSTNAPTREPGQTPDSDVPRAQVGQHVATLKEHDNSVKEEATALLRKALTEECGRRSAIHSSESSCSLPSILNDNSGIKEAKPAVWLNSVPTREQEVSSGCGDKSKKENVAADIPITETEAYQLLKKATLQDNTNQTENRFQKTDASVSHLSGLNIGSGAFETKTANKIASEASFSSSEGSPLSRHENKKKPVINLKSNALWDESDDSNSEIEAALRPRNHNTDDSDDFYD

SEQ ID NO: 23575 - protein, 740 aa, Homo sapiens [sequence omitted]

SEQ ID NO: 23576 - protein, 540 aa, Homo sapiens
METLESELTCPICLELFEDPLLLPCAHSLCFNCAHRILVSHCATNESVESITAFQCPTCRHVITLSQRGLDGLKRNVTLQNIIDRFQKASVSGPNSPSETRRERAFDANTMTSAEKVLCQFCDQDPAQDAVKTCVTCEVSYCDECLKATHPNKKPFTGHRLIEPIPDSHIRGLMCLEHEDEKVNMYCVTDDQLICALCKLVGRHRDHQVAALSERYDKLKQNLESNLTNLIKRNTELETLLAKLIQTCQHVETVKDQKVIGREKQQYYPRNRRKWVSNSLQARLMGRRCISRRERKLTLDVEKVNASRQEAKLTEECDLLIEIIQQRRQIIGTKIKEGKVMRLRKLAQQIANCKQCIERSASLISQAEHSLKENDHARFLQTAKNITERVSMATASSQVLIPEINLNDTFDTFALDFSREKKLLECLDYLTAPNPPTIREELCTASYDTITVHWTSDDEFSVVSYELQYTIFTGQANVVSEYLMAYLFLSLVAFFRLIAFLNLNFKGRQGRKEHTIFIDLSFLNKKVIALTCTTLVKTAG

SEQ ID NO: 23577 - protein, 1174 aa, Homo sapiens
MAVETLSPDWEFDRVDDGSQKIHAEVQLKNYGKFLEEYTSQLRRIEDALDDSIGDVWDFNLDPIALKLLPYEQSSLLELIKTENKVLNKVITVYAALCCEIKKLKYEAETKFYNGLLFYGEGATDASMVEGDCQIQMGRFISFLQELSCFVTRCYEVVMNVVHQLAALYISNKIAPKIIETTGVHFQTMYEHLGELLTVLLTLDEIIDNHITLKDHWTMYKRLLKSVHHNPSKFGIQEEKLKPFEKFLLKLEGQLLDGMIFQACIEQQFDSLNGGVSVSKNSTFAEEFAHSIRSIFANVEAKLGEPSEIDQRDKYVGICGLFVLHFQIFRTIDKKFYKSLLDICKKVPAITLTANIIWFPDNFLIQKIPAAAKLLDRKSLQAIKIHRDTFLQQKAQSLTKDVQSYYVFVSSWMMKMESILSKEQRMDKFAEDLTNRCNVFIQVGFLYAYSISTIIKTTMNLYMSMQKPMTKTSVKALCRLVELLKAIEHMFYRRSMVVADSVSHITQHLQHQALHSISVAKKRVISDKKYSEQRLDVLSALVLAENTLNGPSTKQRRLIVSLALSVGTQMKTFKDEELFPLQVVMKKLDLISELRERVQTQCDCCFLYWHRAVFPIYLDDVYENAVDAARLHYMFSALRDCVPAMMHARHLESYEILLDCYDKEIMEILNEHLLDKLCKEIEKDLRLSVHTHLKLDDRNPFKVGMKDLALFFSLNPIRFFNRFIDIRAYVTHYLDKTFYNLTTVALHDWATYSEMRNLATQRYGLVMTEAHLPSQTLEQGLDVLEIMRNIHIFVSRYLYNLNNQIFIERTSNNKHLNTINIRHIANSIRTHGTGIMNTTVNFTYQFLKKKFYIFSQFMYDEHIKSRLIKDIRFFREIKDQNDHKYPFDRAEKFNRGIRKLGVTPEGQSYLDQFRQLISQIGNAMGYVRMIRSGGLHCSSNAIRFVPDLEDIVNFEELVKEEGLAEETLKAARHLDSVLSDHTRNSAEGTEYFKMLVDVFAPEFRRPKNIHLRNFYIIVPPLTLNFVEHSISCKEKLNKKNKIGAAFTDDGFAMGVAYILKLLDQYREFDSLHWFQSVREKYLKEIRAVAKQQNVQSASQDEKLLQTMNLTQKRLDVYLQEFELLYFSLSSARIFFRADKTAAEENQEKKEKEEETKTSNGDLSDSTVSADPVVK

SEQ ID NO: 23578 - protein, 698 aa, Homo sapiens
MQDGASLSDSTEDEEEGASLGDGSGAEGGSCSSSRRSGGDGGDEVEGSGVGAGEGETVQHFPLARPKSLMQKLQCSFQTSWLKDFPWLRYSKDTGLMSCGWCQKTPADGGSVDLPPVGHDELSRGTRNYKKTLLLRHHVSTEHKLHEANAQESEIPSEEGYCDFNSRPNENSYCYQLLRQLNEQRKKGILCDVSIVVSGKIFKAHKNILVAGSRFFKTLYCFSNKESPNQNNTTHLDIAAVQGFSVILDFLYSGNLVLTSQNAIEVMTVASYLQMSEVVQTCRNFIKDALNISIKSEAPESVVVDYNNRKPVNRDGLSSSRDQKIASFWATRNLTNLASNVKIENDGCNVDEGQIENYQMNDSSWVQDGSPEMAENESEGQTKVFIWNNMGSQGIQETGKTRRKNQTTKRFIYNIPPNNETNLEDCSVMQPPVAYPEENTLLIKEEPDLDGALLSGPDGDRNVNANLLAEAGTSQDGGDAGTSHDFKYGLMPGPSNDFKYGLIPGTSNDFKYGLIPGASNDFKYGLLPESWPKQETWENGESSLIMNKLKCPHCSYVAKYRRTLKRHLLIHTGVRSFSCDICGKLFTRREHVKRHSLVHKKDKKYKCMVCKKIFMLAASVGIRHGSRRYGVCVDCADKSQPGGQEGVDQGQDTEFPRDEEYEENEVGEADEELVDDGEDQNDPSRWDESGEVCMSLDD

SEQ ID NO: 23579 - protein, 446 aa, Homo sapiens [sequence omitted]

SEQ ID NO: 23580 - protein, 790 aa, Homo sapiens
MEATSREAAPAKSSASGPNAPPALFELCGRAVSAHMGVLESGVWALPGPILQSILPLLNIYYLERIEETALKKGLSTQAIWRRLWDELMKTRPSSLESVTCWRAKFMEAFFSHVLRGTIDVSSDRRLCDQRFSPLLHSSRHVRQLTICNMLQGATELVAEPNRRVLETLASSLHTLKFRHLLFSDVAAQQSLRQLLHQLIHHGAVSQVSLYSWPVPESALFILILTMSAGFWQPGPGGPPCRLCGEASRGRAPSRDEGSLLLGSRRPRRDAAERCAAALMASRRKSEAKQMPRAAPATRVTRRSTQESLTAGGTDLKRELHPPATSHEAPGTKRSPSAPAATSSASSSTSSYKRAPASSAPQPKPLKRFKRAAGKKGARTRQGPGAESEDLYDFVFIVAGEKEDGEEMEIGEVACGALDGSDPSCLGLPALEASQRFRSISTLELFTVPLSTEAALTLCHLLSSWVSLESLTLSYNGLGSNIFRLLDSLRALSGQAGCRLRALHLSDLFSPLPILELTRAIVRALPLLRVLSIRVDHPSQRDNPGVPGNAGPPSHIIGDEEIPENCLEQLEMGFPRGAQPAPLLCSVLKASGSLQQLSLDSATFASPQDFGLVLQTLKEYNLALKRLSFHDMNLADCQSEVLFLLQNLTLQEITFSFCRLFEKRPAQFLPEMVAAMKGNSTLKGLRLPGNRLGNAGLLALADVFSEDSSSSLCQLDISSNCIKPDGLLEFAKRLERWGRGAFGHLRLFQNWLDQDAVTAREAIRRLRATCHVVSDSWDSSQAFADYVSTM

SEQ ID NO: 23581 - protein, 453 aa, Homo sapiens
MEQKMKCPHCKDQLESGFGSQSCKTCALMFSSEPSTSEVHRDQERKERLSKFESIRHSIAGIIRSPKSALGSSALSDMISISEKPLAEQDWYHGAIPRIEAQELLKKQGDFLVRESHGKPGEYVLSVYSDGQRRHFIIQYVDNMYRFEGTGFSNIPQLIDHHYTTKQVITKKSGVVLLNPIPKDKKWILSHEDVILGELLGKGNFGEVYKGTLKDKTSVAVKTCKEDLPQELKIKFLQEAKILKQYDHPNIVKLIGVCTQRQPVYIIMELVSGGDFLTFLRRKKDELKLKQLVKFSLDAAAGMLYLESKNCIHRDLAARNCLVGENNVLKISDFGMSRQEDGGVYSSSGLKQIPIKWTAPEALNYGRYSSESDVWSFGILLWETFSLGVCPYPGMTNQQAREQVERGYRMSAPQHCPEDISKIMMKCWDYKPENRPKFSELQKELTIIKRKLT

SEQ ID NO: 23582 - protein, 483 aa, Homo sapiens
MSENNKNSLESSLRQLKCHFTWNLMEGENSLDDFEDKVFYRTEFQNREFKATMCNLLAYLKHLKGQNEAALECLRKAEELIQQEHADQAEIRSLVTWGNYAWVYYHMGRLSDVQIYVDKVKHVCEKFSSPYRIESPELDCEEGWTRLKCGGNQNERAKVCFEKALEKKPKNPEFTSGLAIASYRLDNWPPSQNAIDPLRQAIRLNPDNQYLKVLLALKLHKMREEGEEEGEGEKLVEEALEKAPGVTDVLRSAAKFYRRKDEPDKAIELLKKALEYIPNNAYLHCQIGCCYRAKVFQVMNLRENGMYGKRKLLELIGHAVAHLKKADEANDNLFRVCSILASLHALADQYEDAEYYFQKEFSKELTPVAKQLLHLRYGNFQLYQMKCEDKAIHHFIEGVKINQKSREKEKMKDKLQKIAKMRLSKNGADSEALHVLAFLQELNEKMQQADEDSERGLESGSLIPSASSWNGERIEMWCPLGYC

SEQ ID NO: 23583 - protein, 799 aa, Homo sapiens
MIPPLKSPAAFHEQRRSLERARTEDYLKRKIRSRPERSELVRMHILEETSAEPSLQAKQLKLKRARLADDLNEKIAQRPGPMELVEKNILPVESSLKEAIIVGQVNYPKVADSSSFDEDSSDALSPEQPASHESQGSVPSPLEARVSEPLLSATSASPTQVVSQLPMGRDSREMLFLAEQPPLPPPPLLPPSLTNGTTIPTAKSTPTLIKQSQPKSASEKSQRSKKAKELKPKVKKLKYHQYIPPDQKQDRGAPPMDSSYAKILQQQQLFLQLQILNQQQQQHHNYQAILPAPPKSAGEALGSSGTPPVRSLSTTNSSSSSGAPGPCGLARQNSTSLTGKPGALPANLDDMKVAELKQELKLRSLPVSGTKTELIERLRAYQDQISPVPGAPKAPAATSILHKAGEVVVAFPAARLSTGPALVAAGLAPAEVVVATVASSGVVKFGSTGSTPPVSPTPSERSLLSTGDENSTPGDTFGEMVTSPLTQLTLQASPLQILVKEEGPRAGSCCLSPGGRAELEGRDKDQMLQEKDKQIEALTRMLRQKQQLVERLKLQLEQEKRAQQPAPAPAPLGTPVKQENSFSSCQLSQQPLGPAHPFNPSLAAPATNHIDPCAVAPGPPSVVVKQEALQPEPEPVPAPQLLLGPQGPSLIKGVAPPTLITDSTGTHLVLTVTNKNADSPGLSSGSPQQPSSQPGSPAPAPSAQMDLEHPLQPLFGTPTSLLKKEPPGYEEAMSQQPKQQENGSSSQQMDDLFDILIQSGGNPRNFSRFQGAAIPAREGEAIPEDSLWVPPGSTAITFC

SEQ ID NO: 23584 - protein, 543 aa, Homo sapiens
MSDGLDNEEKPPAPPLRMNSNPGFFSTQPQLKPLPMAPEEKNKKARLRSIFPGGGDKTNKKKEKERPEISLPSDFEHTIHVGFDAVTGEFTGIPEQWARLLQTSNITKLEQKKNPQAVLDVLKFYDSKETVNNQKYMSFTSGDKSAHGYIAAHPSSTKTASEPPLAPPVSEEEDEEEEEEEDENEPPPVIAPRPEHTKSIYTRSVVESIASPAVPNKEVTPPSAENANSSTLYRNTDRQRKKSKMTDEEILEKLRSIVSVGDPKKKYTRFEKIGQGASGTVYTALDIATGQEVAIKQMNLQQQPKKELIINEILVMRENKNPNIVNYLDSYLVGDELWVVMEYLAGGSLTDVVTETCMDEGQIAAVCRECLQALDFLHSNQVIHRDIKSDNILLGMDGSVKLTDFGFCAQITPEQSKRSTMVGTPYWMAPEVVTRKAYGPKVDIWSLGIMAIEMVEGEPPYLNENPLRALYLIATNGTPELQNPERLSAVFRDFLNRCLEMDVDRRGSAKELLQHPFLKLAKPLSSLTPLIIAAKEAIKNSSR

SEQ ID NO: 23585 - protein, 466 aa, Homo sapiens
MGTVTEDLIRRNAEHNDCVIFSLEELSLHQQEIERLEHIDKWCRDLKILYLQNNLIGKIENVSKLKKLEYLNLALNNIEKIENLEGCEELAKLDLTVNFIGELSSIKNLQHNIHLKELFLMGNPCASFDHYREFVVATLPQLKWLDGKEIEPSERIKALQDYSVIEPQIREQEKDHCLKRAKLKEEAQRKHQEEDKNEDKRSNAGFDGRWYTDINATLSSLESKDHLQAPDTEEHNTKKLDNSEDDLEFWNKPCLFTPESRLETLRHMEKQRKKQEKLSEKKKKVKPPRTLITEDGKALNVNEPKIDFSLKDNEKQIILDLAVYRYMDTSLIDVDVQPTYVRVMIKGKPFQLVLPAEVKPDSSSAKRSQTTGHLVICMPKVGEVITGGQRAFKSMKTTSDRSREQTNTRSKHMEKLEVDPSKHSFPDVTNIVQEKKHTPRRRPEPKIIPSEEDPTFEDNPEVPPLI

SEQ ID NO: 23586 - protein, 693 aa, Homo sapiens
MMQESGTETKSNGSAIQNGSGGSNHLLECGGLREGRSNGETPAVDIGAADLAHAQQQQQQALQVARQLLLQQQQQQQVSGLKSPKRNDKQPALQVPVSVAMMTPQVITPQQMQQILQQQVLSPQQLQVLLQQQQALMLQQQQLQEFYKKQQEQLQLQLLQQQHAGKQPKEQQQVATQQLAFQQQLLQMQQLQQQHLLSLQRQGLLTIQPGQPALPLQPLAQGMIPTELQQLWKEVTSAHTAEETTGNNHSSLDLTTTCVSSSAPSKTSLIMNPHASTNGQLSVHTPKRESLSHEEHPHSHPLYGHGVCKWPGCEAVCEDFQSFLKHLNSEHALDDRSTAQCRVQMQVVQQLELQLAKDKERLQAMMTHLHVKSTEPKAAPQPLNLVSSVTLSKSASEASPQSLPHTPTTPTAPLTPVTQGPSVITTTSMHTVGPIRRRYSDKYNVPISSADIAQNQEFYKNAEVRPPFTYASLIRQAILESPEKQLTLNEIYNWFTRMFAYFRRNAATWKGAIRTNLSLHKCFIRVEDEFGSFWTVDDEEFKRGRHIQRGRPRKYCPDENFDELVAHNPSLIKNMQSSHAYCTPLNAALQASMAENSIPLYTTASMGNPTLGNLASAIREELNGAMEHTNSNESDSSPGRSPMQAVHPVHVKEEPLDPEEAEGPLSLVTTANHSPDFDHDRDYEDEPVNEDME

SEQ ID NO: 23587 - protein, 383 aa, Homo sapiens
MKRHEMVAKHLVMFYYFAQHLWPEQNIRDSFQKVTLRRYRKCGYENLQLRKGCKSVVECKQHKGDYSGLNQCLKTTLSKIFQCNKYVEVFHKISNSNRHKMRHTENKHFKCKECRKTFCMLSHLTQHKRIQTRVNFYKCEAYGRAFNWSSTLNKHKRIHTGEKPYKCKECGKAFNQTSHLIRHKRIHTEEKPYKCEECGKAFNQSSTLTTHNIIHTGEIPYKCEKCVRAFNQASKLTEHKLIHTGEKRYECEECGKAFNRSSKLTEHKYIHTGEKLYKCEECDKAFNLSSTLTKHKVIHTGEKLYKCKECGKAFKQFSHLAIHNIIHTGEKLYKCEECGKAFNLSSNLTAHKKNRTGEKPYKCEECGKANLSSTLTPHKTIHI

SEQ ID NO: 23588 - protein, 1098 aa, Homo sapiens
MSKKIAQLTKVIYALNTKNDEHESAIQALKDAHEEEIQQILAETREKILQYKSKVTEELDLRRKIQVLESSLEDHIKMKQQALTEFEAYKHRVEDMQLCAEAQHVQRIVTMSREVEEIRRKFEEKLRSFGQLQVQFEKDKRLALEDLQAAHRREIQELLKSQQDHSASVNKGQEKAEELHRMEVESLNKMLEELRLERKKLIEDYEGKLNKAQSFYERELDTLKRSQLFTAESLQASKEKEADLRKEFQGQEAILRKTIGKLKTELQMVQDEAGSLLDKCQKLQTALAIAENNVQVLQKQLDDAKEGEMALLSKHKEVESELAAARERLQQQASDLVLKASHIGMLQATQMTQEVTIKDLESEKSRVNERLSQLEEERAFLRSKTQSLDEEQKQQILELEKKVNEAKRTQQEYYERELKNLQSRLEEEVTQLNEAHSKTLEELAWKHHMAIEAVHSNAIRDKKKLQMDLEEQHNKDKLNLEEDKNQLQQELENLKEVLEDKLVNLQKKEIGHLQDMVRKSEQGLGSAEGLIASLQDSQERLQNELDLTKDSLKETKDALLNVEGELEQERQQHEETIAAMKEEEKLKVDKMAHDLEIKWTENLRQECSKLREELRLQHEEDKKSAMSQLLQLKDREKNAARDSWQKKVEDLLNQISLLKQNLEIQLSQSQTSLQQLQAQFTQERQRLTQELEELEEQHQQRHKSLKEAHVLAFQTMEEEKEKEQRALENHLQQKHSAELQSLKDAHRESMEGFRIEMEQELQTLRFELEDEGKAMLASLRSELNHQHAAAIDLLRHNHHQELAAAKMELERSIDISRRQSKEHICRITDLQEELRHREHHISELDKEVQHLHENISALTKELEFKGKEILRIRSESNQQIRLHEQDLNKRLEKELDVMTADHLREKNIMRADFNKTNELLKEINAALQVSLEEMEEKYLMRESKPEDIQMITELKAMLTERDQIIKKLIEDNKFYQLELVNRETNFNKVFNSSPTVGVINPLAKQKKKNDKSPTNRFVSVPNLSALESGGVGNGHPNRLDPIPNSPVHDIEFNSSKPLPQPVPPKGPKTFLSPAQSEASPVASPDPQRQEWFARYFTF

SEQ ID NO: 23589 - protein, 375 aa, Homo sapiens
MIVPAAPYLPGLIQGNQEAAAAPDTMAQPYASAQFAPPQNGIPAEYTAPHPHPAPEYTGQTTVPEHTLNLYPPAQTHSEQSPADTSAQTVSGTATQTDDAAPTDGQPQTQPSENTENKSQPKRLHVSNIPFRFRDPDLRQMFGQFGKILDVEIIFNERGSKGFGFVTFENSADADRAREKLHGTVVEGRKIEVNNATARVMTNKKTVNPYTNGWKLNPVVGAVYSPEFYAVPGFPYPAATAAAAYRGAHLRGRGRTVYNTFRAAAPPPPIPAYGGVVYQDGFYGADIYGGYAAYRYAQPTPATAAAYSDSYGRVYAADPYHHALAPAPTYGVGAMNAFAPLTDAKTRSHADDVGLVLSSLQASIYRGGYNRFAPY

SEQ ID NO: 23590 - protein, 553 aa, Homo sapiens
MQLSKRETKGQFLIDHICNYYSLLEKDYFGIRYVDPEKQRHWLEPNKSIFKQMKTHPPYTMCFRVKFYPHEPLKIKEELTRYLLYLQIKRDIFHGRLLCSFSDAAYLGACIVQAELGDYDPDEHPENYISEFEIFPKQSQKLERKIVEIHKNELRGQSPPVAEFNLLLKAHTLETYGVDPHPCKDSTGTTTFLGFTAAGFVVFQGNKRIHLIKWPDVCKLKFEGKTFYVIGTQKEKKAMLAFHTSTPAACKHLWKCGVENQAFYKYAKSSQIKTVSSSKIFFKGSRFRYSGKVAKEVVEASSKIQREPPEVHRANITQSRSSHSLNKQLIINMEPLQPLLPSPSEQEEELPLGEGVPLPKEENISAPLISSSPVKAAREYEDPPSEEEDKIKEEPLTISELVYNPSASLLPTPVDDDEIDMLFDCPSRLELEREDTDSFEDLEADENAFLIAEEEELKEARRALSWSYDILTGHIRVNPLVKSFSRLLVVGLGLLLFVFPLLLLLLESGIDLSFLCEIRQTPEFEQFHYEYYCPLKEWVAGKVHLILYMLGCS

SEQ ID NO: 23591 - protein, 221 aa, Homo sapiens
MAAALFVLLGFALLGTHGASGAVFTTVEDLGSKILLTCSLNDSATEVTGHRWLKGGVVLKEDALPGQKTEFKVDSDDQWGEYSCVFLPEPMGTANIQLHGPPRVKAVKSSEHINEGETAMLVCKSESVPPVTDWAWYKITDSEDKALMNGSESRFFVSSSQGRSELHIENLNMEADPGQYRCNGTSSKGSDQAIITLRVRSHLAALWPFLGIVAEVLVLVT

SEQ ID NO: 23592 - protein, 708 aa, Homo sapiens
MATTAELFEEPFVADEYIERLVWRTPGGGSRGGPEAFDPKRLLEEFVNHIQELQIMDERIQRKVEKLEQQCQKEAKEFAKKVQELQKSNQVAFQHFQELDEHISYVATKVCHLGDQLEGVNTPRQRAVEAQKLMKYFNEFLDGELKSDVFTNSEKIKEAADIIQKLHLIAQELPFDRFSEVKSKIASKYHDLECQLIQEFTSAQRRGEISRMREVAAVLLHFKGYSHCVDVYIKQCQEGAYLRNDIFEDAGILCQRVNKQVGDIFSNPETVLAKLIQNVFEIKLQSFVKEQLEECRKSDAEQYLKNLYDLYTRTTNLSSKLMEFNLGTDKQTFLSKLIKSIFISYLENYIEVETGYLKSRSAMILQRYYDSKNHQKRSIGTGGIQDLKERIRQRTNLPLGPSIDTHGETFLSQEVVVNLLQETKQAFERCHRLSDPSDLPRNAFRIFTILVEFLCIEHIDYALETGLAGIPSSDSRNANLYFLDVVQQANTIFHLFDKQFNDHLMPLISSSPKLSECLQKKKEIIEQMEMKLDTGIDRTLNCMIGQMKHILAAEQKKTDFKPEDENNVLIQYTNACVKVCAYVRKQVEKIKNSMDGKNVDTVLMELGVRFHRLIYEHLQQYSYSCMGGMLAICDVAEYRKCAKDFKIPMVLHLFDTLHALCNLLVVAPDNLKQVCSGEQLANLDKNILHSFVQLRADYRSARLARHFS

SEQ ID NO: 23593 - protein, 152 aa, Homo sapiens [sequence omitted]

SEQ ID NO: 23594 - protein, 583 aa, Homo sapiens
IENDTGTIYSTMSFDREHQTTYTFRVKAVDGGDPPRSATATVSLFVMDENDNAPTVTLPKNISYTLLPPSSNVRTVVATVLATDSDDGINADLNYSIVGGNPFKLFEIDPTSGVVSLVGKLTQKHYGLHRLVVQVNDSGQPSQSTTTLVHVFVNESVSNATAIDSQIARSLHIPLTQDIAGDPSYEISKQRLSIVIGVVAGIMTVILIILIVVMARYCRSKNKNGYEAGKKDHEDFFTPQQHDKSKKPKKDKKNKKSKQPLYSSIVTVEASKPNGQRYDSVNEKLSDSPSMGRYRSVNGGPGSPDLARHYKSSSPLPTVQLHPQSPTAGKKHQAVQDLPPANTFVGAGDNISIGSDHCSEYSCQTNNKYSKQLVMENNVLILDSFCQIAQKYHKPFRRVTFSVVSQPQDPHQGSLQSCYDSGLEESETPSSKSSSGPRLGALPLPEDNYERTTPDGSVDSRPLPDVALTGKCTRECDEYGHSDSCWMPVRTSPERKKSQPKLSTFMPVDERGSQEKLANGEAAIMGDRNRNLLNKKLTSSYETFSAASFSKNEEANPEDIPLTKTGEYKPSPVNTLTRREVYL

SEQ ID NO: 23595 - protein, 1230 aa, Homo sapiens
MVTQIRNQSKASGSGLCEGDEVVSINGNPCADLTYPEVIKLMESITDSLQMLIKRPSSGISEALISENENKNLEHLTHGGYVESTTLQIRPATKTQCTEFFLAPVKTEVPLAENQRSGPDCAGSLKEETGPSYQRAPQMPDSQRGRVAEELILREKVEAVQPGPVVELQLSLSQERHKGASGPLVALPGAEKSKSPDPDPNLSHDRIVHINSIPTNEKADPFLRSSKIIQISSGRELRVIQESEAGDAGLPRVEVILDCSDRQKTEGCRLQAGKECVDSPVEGGQSEAPPSLVSFAVSSEGTEQGEDPRSEKDHSRPHKHRARHARLRRSESLSEKQVKEAKSKCKSIALLLTDAPNPNSKGVLMFKKRRRRARKYTLVSYGTGELEREADEEEEGDKEDTCEVAFLGASESEVDEELLSDVDDNTQVVNFDWDSGLVDIEKKLNRGDKMEMLPDTTGKGALMFAKRRERMDQITAQKEEDKVGGTPSREQDAAQTDGLRTTTSYQRKEEESVRTQSSVSKSYIEVSHGLGHVPQQNGFSGTSETANIQRMVPMNRTAKPFPGSVNQPATPFSPTRNMTSPIADFPAPPPYSAVTPPPDAFSRGVSSPIAGPAQPPPWPQPAPWSQPAFYDSSERIASRDERISVPAKRTGILQEAKRRSTTKPMFTFKEPKVSPNPELLSLLQNSEGKRGTGAGGDSGPEEDYLSLGAEACNFMQSSSAKQKTPPPVAPKPAVKSSSSQPVTPVSPVWSPGVAPTQPPAFPTSNPSKGTVVSSIKIAQPSYPPARPASTLNVAGPFKGPQAAVASQNYTPKPTVSTPTVNAVQPGAVGPSNELPGMSGRGAQLFAKRQSRMEKYVVDSDTVQAHAARAQSPTPSLPASWKYSSNVRAPPPVAYNPIHSPSYPLAALKSQPSAAQPSKMGKKKGKKPLNALDVMKHQPYQLNASLFTFQPPDAKDGLPQKSSVKVNSALAMKQALPPRPVNAASPTNVQASSVYSVPAYTSPPSFFAEASSPVSASPVPVGIPTSPKQESASSSYFVAPRPKFSAKKSGVTIQESGRSLSLPGRSVPPPISTSPWVYQPTYSYSSKPTDGLEKANKRPTPWEAAAKSPLGLVDDAFQPRNIQESIVANVVSAARRKVLPGPPEDWNERLSYIPQTQKAYMGSCGRQEYNVTANNNMSTTSQYGSQLPYAYYRQASRNDSAIMSMETRSDYCLPVADYNYNPHPRGWRRQT

SEQ ID NO: 23596 - protein, 818 aa, Homo sapiens
MGSGAGELGRAERLPVLFLFLLSLFCPALCEQIRYRIPEEMPKGSVVGNLATDLGFSVQELPTRKLRVSSEKPYFTVSAESGELLVSSRLDREEICGKKPACALEFEAVAENPLNFYHVNVEIEDINDHTPKFTQNSFELQISESAQPGTRFILEVAEDADIGLNSLQKYKLSLNPSFSLIIKEKQDGSKYPELALEKTLDREQQSYHRLVLTALDGGHPPLSGTTELRIQVTDANDNPPVFNRDVYRVSLRENVPPGTTVLQVSATDQDEGINSEITYSFYRTGQIFSLNSKSGEITTQKKLDFEETKEYSMVVEGRDGGGLVAQCTVEINIQDENDNSPEVTFHSLLEMILENAVPGTLIALIKIHDQDSGENGEVNCQLQGEVPFKIISSSKNSYKLVTDGTLDREQTPEYNVTITATDRGKPPLSSSISVILHIRDVNDNAPVFHQASYLVSVPENNPPGASIAQVCASDLDLGLNGQVSYSIMASDLEPLALASYVSMSAQSGVVFAQRAFDYEQLRTFELTLQARDQGSPALSANVSLRVLVGDRNDNAPRVLYPALGPDGSALFDMVPRAAEPGYLVTKVVAVDADSGHNAWLSYHVLQASEPGLFSLGLRTGEVRTARALGDRDAARQRLLVAVRDGGQPPLSATATLHLVFADSLQEVLPDITDRPVPSDPQAELQFYLVVALALISVLFLLAVILAVALRLRRSSSPAAWSCFQPGLCVKSGPVVPPNYSQGTLPYSYNLCVAHTGKTEFNFLKCSEQLSSGQDILCGDSSGALFPLCNSSESTSHPELVSFIYVYSFSLPTQFSVFT

SEQ ID NO: 23597 - protein, 249 aa, Homo sapiens
MAATAAVSPSDYLQPAASTTQDSQPSPLALLAATCSKIGPPAVEAAVTPPAPPQPTPRKLVPIKPAPLPLSPGKNSFGILSSKGNILQIQGSQLSASYPGGQLVFAIQNPTMINKGTRSNANIQYQAVPQIQASNSQTIQVQPNLTNQIQIIPGTNQAIITPSPSSHKPVPIKPAPIQKSSTTTTPVQSGANVVKLTGGGGNVTLTLPVNNLVNASDTGAPTQLLTASCQTGMLNSTRMFLFLAFINVL

SEQ ID NO: 23598 - protein, 1312 aa, Homo sapiens [sequence omitted]

SEQ ID NO: 23599 - protein, 543 aa, Homo sapiens
MNSHSYNGSVGRPLGSGPGALGRDPPDPEAGHPPQPPHSPGLQVVVAKSEPARPSPGSPRGQPQDQDDDEDDEEDEAGRQRASGKPSNVGHRLGHRRALFEKRKRLSDYALIFGMFGIVVMVTETELSWGVYTKESLYSFALKCLISLSTAILLGLVVLYHAREIQLFMVDNGADDWRIAMTCERVFLISLELAVCAIHPVPGHYRFTWTARLAFTYAPSVAEADVDVLLSIPMFLRLYLLGRVMLLHSKIFTDASSRSIGALNKITFNTRFVMKTLMTICPGTVLLVFSISSWIIAAWTVRVCERYHDKQEVTSNFLGAMWLISITFLSIGYGDMVPHTYCGKGVCLLTGIMGAGCTALVVAVVARKLELTKAEKHVHNFMMDTQLTKRVKNAAANVLRETWLIYKHTRLVKKPDQARVRKHQRKFLQAIHQVQRLRSVKIEQGKLNDQANTLTDLAKTQTVMYDLVSELHAQHEELEARLATLESRLDALGASLQALPGLIAQAIRPPPPPLPPRPGPGPQDQAARSSPCRWTPVAPSDCG

SEQ ID NO: 23600 - protein, 916 aa, Homo sapiens
MTAGAGVLLLLLSLSGALRAHNEDLTTRETCKAGFSEDDYTALISQNILEGEKLLQVKFSSCVGTKGTQYETNSMDFKVGADGTVFATRELQVPSEQVAFTVTAWDSQTAEKWDAVVRLLVAQTSSPHSGHKPQKGKKVVALDPSPPPKDTLLPWPQHQNANGLRRRKRDWVIPPINVPENSRGPFPQQLVRIRSDKDNDIPIRYSITGVGADQPPMEVFSIDSMSGRMYVTRPMDREEHASYHLRAHAVDMNGNKVENPIDLYIYVIDMNDNRPEFINQVYNGSVDEGSKPGTYVMTVTANDADDSTTANGMVRYRIVTQTPQSPSQNMFTINSETGDIVTVAAGLDREKVQQYTVIVQATDMEGNLNYGLSNTATAIITVTDVNDNPPEFTASTFAGEVPENRVETVVANLTVMDRDQPHSPNWNAVYRIISGDPSGHFSVRTDPVTNEGMVTVVKAVDYELNRAFMLTVMVSNQAPLASGIQMSFQSTAGVTISIMDINEAPYFPSNHKLIRLEEGVPPGTVLTTFSAVDPDRFMQQAVRYSKLSDPASWLHINATNGQITTAAVLDRESLYTKNNVYEATFLAADNGIPPASGTGTLQIYLIDINDNAPELLPKEAQICEKPNLNAINITAADADVDPNIGPYVFELPFVPAAVRKNWTITRLNGDYAQLSLRILYLEAGMYDVPIIVTDSGNPPLSNTSIIKVKVCPCDDNGDCTTIGAVAAAGLGTGAIVAILICILILLTMVLLFVMWMKRREKERHTKQLLIDPEDDVRDNILKYDEEGGGEEDQDYDLSQLQQPEAMGHVPSKAPGVRRVDERPVGAEPQYPIRPMVPHPGDIGDFINEGLRAADNDPTAPPYDSLLVFDYEGSGSTAGSVSSLNSSSSGDQDYDYLNDWGPRFKKLADMYGGGEED

SEQ ID NO: 23601 - protein, 574 aa, Homo sapiens
MCPHFAQDLWPEQGMEDSFQKAILRRYGKYGHENLQLRKGCKSVDEYKVNKEGYNGLNQCFTTAQSKVFQCDKYLKVFYKFLNSNRPKIRHTEKKSFKCKKRVKLFCMLSHKTQHKSIYHREKSYKCKECGKTFNWSSTLTNHRKIYTEEKPYKCEEYNKSPKQLSTLTTHEIIHAGEKLYKCEECGEAFNRSSNLTTHKIIHTGEKPYKCEECGKAFIWSSTLTEHKKIHTRKKPYKCEECGKAFIWSSTLTRHKRMHTGEKPYKCEECGKAFSQSSTLTTHKIIHTGEKRYKCLECGKAFKQLSTLTTHKIIHVGEKLYKCEECGKGFNRSSNLTTHKIIHTGEKPYKCEECGKAFIWSSTLTKHKRIHTREKPYKCEECGKAFIWSSTLTRHKRMHTGEKPYKCEECGKSFSQSSTLTTHKIIHTGEKPYKCEECGKAFNWSSTLTKHKIIHTEEKPYKCEKCGKAFKQSSILTNHKRIHTGEKPYKCEECGKSFNRSSTFTKHKVIHTGVKPYKCEECGKAFFWSSTLTKHKRIHTGEQPYKWEKFGKAFNRSSHLTTDKITHWREILQV

SEQ ID NO: 23602 - protein, 848 aa, Homo sapiens
MLQTKDLIWTLFFLGTAVSLQVDIVPSQGEISVGESKFFLCQVAGDAKDKDISWFSPNGEKLTPNQQRISVVWNDDSSSTLTIYNANIDDAGIYKCVVTGEDGSESEATVNVKIFQKLMFKNAPTPQEFREGEDAVIVCDVVSSLPPTIIWKHKGRDVILKKDVRFIVLSNNYLQIRGIKKTDEGTYRCEGRILARGEINFKDIQVIVNVPPTIQARQNIVNATANLGQSVTLVCDAEGFPEPTMSWTKDGEQIEQEEDDEKYIFSDDSSQLTIKKVDKNDEAEYICIAENKAGEQDATIHLKVFAKPKITYVENQTAMELEEQVTLTCEASGDPIPSITWRTSTRNISSEEKTLDGHMVVRSHARVSSLTLKSIQYTDAGEYICTASNTIGQDSQSMYLEVQYAPKLQGPVAVYTWEGNQVNITCEVFAYPSATISWFRDGQLLPSSNYSNIKIYNTPSASYLEVTPDSENDFGNYNCTAVNRIGQESLEFILVQADTPSSPSIDQVEPYSSTAQVQFDEPEATGGVPILKYKAEWRAVGEEVWHSKWYDAKEASMEGIVTIVGLKPETTYAVRLAALNGKGLGEISAASEFKTQPVQGEPSAPKLEGQMGEDGNSIKVNLIKQDDGGSPIRHYLVRYRALSSEWKPEIRLPSGSDHVMLKSLDWNAEYEVYVVAENQQGKSKAAHFVFRTSAQPTAIPANGSPTSGLSTGAIVGILIVIFVLLLVVVDITCYFLNKCGLFMCIAVNLCGKAGPGAKGKDMEEGKAAFSKDESKEPIVEVRTEEERTPNHDGGKHTEPNETTPLTEPEKGPVEAKPECQETETKPAPAEVKTVPNDATQTKENESKA

SEQ ID NO: 23603 - protein, 58 aa, Homo sapiens
MSHQPLSCLTEKEDSPSESTGNGPPHLAHPNLDTFTPEELLQQMKELLTENHQLKGPH

SEQ ID NO: 23604 - protein, 445 aa, Homo sapiens
MKVKMLSRNPDNYVRETKLDLQRVPRNYDPALHPFEVPREYIRALNATKLERVFAKPFLASLDGHRDGVNCLAKHPEKLATVLSGACDGEVRIWNLTQRNCIRTIQAHEGFVRGICTRFCGTSFFTVGDDKTVKQWKMDGPGYGDEEEPLHTILGKTVYTGIDHHWKEAVFATCGQQVDIWDEQRTNPICSMTWGFDSISSVKFNPIETFLLGSCASDRNIVLYDMRQATPLKKVILDMRTNTICWNPMEAFIFTAANEDYNLYTFDMRALDTPVMVHMDHVSAVLDVDYSPTGKEFVSASFDKSIRIFPVDKSRSREVYHTKRMQHVICVKWTSDSKYIMCGSDEMNIRLWKANASEKLGVLTSREKAAKDYNQKLKEKFQHYPHIKRIARHRHLPKSIYSQIQEQRIMKEARRRKEVNRIKHSKPGSVPLVSEKKKHVVAVVK

SEQ ID NO: 23605 - protein, 641 aa, Homo sapiens
MPDNRQPRNRQPRIRSGNEPRSAPAMEPDGRGAWAHSRAALDRLEKLLRCSRCTNILREPVCLGGCEHIFCSNCVSDCIGTGCPVCYTPAWIQDLKINRQLDSMIQLCSKLRNLLHDNELSDLKEDKPRKSLFNDAGNKKNSIKMWFSPRSKKVRYVVSKASVQTQPAIKKDASAQQDSYEFVSPSPPADVSERAKKASARSGKKQKKKTLAEINQKWNLEAEKEDGEFDSKEESKQKLVSFCSQPSVISSPQINGEIDLLASGSLTESECFGSLTEVSLPLAEQIESPDTKSRNEVVTPEKGDIPSVEYLLQNGSDPNVKDHAGWTPLHEACNHGHLKVVELLLQHKALVNTTGYQNDSPLHDAAKNGHVDIVKLLLSYGASRNAVNIFGLRPVDYTDDESMKSLLLLPEKNESSSASHCSVMNTGQRRDGPLVLIGSGLSSEQQKMLSELAVILKAKKYTEFDSTVTHVVVPGDAVQSTLKCMLGILNGCWILKFEWVKACLRRKVCEQEEKYEIPEGPRRSRLNREQLLPKLFDGCYFYLWGTFKHHPKDNLIKLVTAGGGQILSRKPKPDSDVTQTINTVAYHARPDSDQRFCTQYIIYEDLCNYHPERVRQGKVWKAPSSWFIDCVMSFELLPLDS

SEQ ID NO: 23606 - protein, 2614 aa, Homo sapiens [sequence omitted]

SEQ ID NO: 23607 - protein, 426 aa, Homo sapiens
MLTLHVWIWFGFMPCPNLMQNYNHQCCRTLFASSVLNLTELAALRPDLGKLKKILYFHENQLIYPVKKCQERDFQYGYNQILSCLVADVVVFNSVFNMESFLTSMGKFMKLIPDHRPKDLESIIRPKCQVIYFPIRFPDVSRFMPKHKTTHLKKMLGLKGNGGAVLSMALPFQPEQRDSEDLLKNFNSECDTHCGLDTARQEYLGNSLRQESDLKKSTSSDNSSSHHGENKQNLTVDPCDILGGVDNQQRLLHIVWPHRWEHDKDPESFFKVLMHLKDLGLNFHVSVLGETFTDVPDIFSEAKKALGSSVLHWGYLPSKDDYFQVLCMADVVISTAKHEFFGVAMLEAVYCGCYPLCPKDLVYPEIFPAEYLYSTPEQLSKRLQNFCKRPDIIRKHLYKGEIAPFSWAALHGKFRSLLTTEPREDL

SEQ ID NO: 23608 - protein, 403 aa, Homo sapiens
MAIPGIPYERRLLIMADPRDKALQDYRKKLLEHKEIDGRLKELREQLKELTKQYEKSENDLKALQSVGQIVGEVLKQLTEEKFIVKATNGPRYVVGCRRQLDKSKLKPGTRVALDMTTLTIMRYLPREVDPLVYNMSHEDPGNVSYSEIGGLSEQIRELREVIELPLTNPELFQRVGIIPPKGCLLYGPPGTGKTLLARAVASQLDCNFLKVVSSSIVDKYIGESARLIREMFNYARDHQPCIIFMDEIDAIGGRRFSEGTSADREIQRTLMELLNQMDGFDTLHRVKMIMATNRPDTLDPALLRPGRLDRKIHIDLPNEQARLDILKIHAGPITKHGEIDYEAIVKLSDGFNGADLRNVCTEAGMFAIRADHDFVVQEDFMKAVRKVADSKKLESKLDYKPV

SEQ ID NO: 23609 - protein, 1131 aa, Homo sapiens
MRCLAPRPAGSYLSEPQGSSQCATMELGPLEGGYLELLNSDADPLCLYHFYDQMDLAGEEEIELYSEPDTDTINCDQFSRLLCDMEGDEETREAYANIAELDQYVFQDSQLEGLSKDIFIEHIGPDEVIGESMEMPAEVGQKSQKRPFPEELPADLKHWKPAEPPTVVTGSLLVGPVSDCSTLPCLPLPALFNQEPASGQMRLEKTDQIPMPFSSSSLSCLNLPEGPIQFVPTISTLPHGLWQISEAGTGVSSIFIYHGEVPQASQVPPPSGFTVHGLPTSPDRPGSTSPFAPSATDLPSMPEPALTSRANMTEHKTSPTQCPAAGEVSNKLPKWPEPVEQFYRSLQDTYGAEPAGPDGILVEVDLVQARLERSSSKSLERELATPDWAERQLAQGGLAEVLLAAKEHRRPRETRVIAVLGKAGQGKSYWAGAVSRAWACGRLPQYDFVFSVPCHCLNRPGDAYGLQDLLFSLGPQPLVAADEVFSHILKRPDRVLLILDGFEELEAQDGFLHSTCGPAPAEPCSLRGLLAGLFQKKLLRGCTLLLTARPRGRLVQSLSKADALFELSGFSMEQAQAYVMRYFESSGMTEHQDRALTLLRDRPLLLSHSHSPTLCRAVCQLSEALLELGEDAKLPSTLTGLYVGLLGRAALDSPPGALAELAKLAWELGRRHQSTLQEDQFPSADVRTWAMAKGLVQHPPRAAESELAFPSFLLQCFLGALWLALSGEIKDKELPQYLALTPRKKRPYDNWLEGVPRFLAGLIFQPPARCLGALLGPSAAASVDRKQKVLARYLKRLQPGTLRARQLLELLHCAHEAEEAGIWQHVVQELPGRLSFLGTRLTPPDAHVLGKALEAAGQDFSLDLRSTGICPSGLGSLVGLSCVTRFRAALSDTVALWESLQQHGETKLLQAAEEKFTIEPFKAKSLKDVEDLGKLVQTQRTRSSSEDTAGELPAVRDLKKLEFALGPVSGPQAFPKLVRILTAFSSLQHLDLDALSENKIGDEGVSQLSATFPQLKSLETLNLSQNNITDLGAYKLAEALPSLAASLLRLSLYNNCICDVGAESLARVLPDMVSLRVMDVQYNKFTAAGAQQLAASLRRCPHVETLAMWTPTIPFSVQEHLQQQDSRISLR

SEQ ID NO: 23610 - protein, 295 aa, Homo sapiens
MHDQHFHLLTPLPHRGLSCQRGPAVHDRQRAAGLARGADRAAGNASYRSIGALNQVRFRHWFVAKLYMNTHPGRLLLGLTLGLWLTTAWVLSVAERQAVNATGHLSDTLWLIPITFLTIGYGDVVPGTMWGKIVCLCTGVMGVCCTALLVAVVARKLEFNKAEKHVHNFMMDIQYTKEMKESAARVLQEAWMFYKHTRRKESHAARRHQRKLLAAINAFRQVRLKHRKLREQVNSMVDISKMHMILYDLQQNLSSSHRALEKQIDTLAGKLDALTELLSTALGPRQLPEPSQQSK

SEQ ID NO: 23611 - protein, 291 aa, Homo sapiens
MFQAFPGDYDSGSRCSSSPSAESQYLSSVDSFGSPPTAAASQECAGLGEMPGSFVPTVTAITTSQDLQWLVQPTLISSMAQSQGQPLASQPPVVDPYDMPGTSYSTPGMSGYSSGGASGSGGPSTSGTTSGPGPARPARARPRRPREETLTPEEEEKRRVRRERNKLAAAKCRNRRRELTDRLQAETDQLEEEKAELESEIAELQKEKERLEFVLVAHKPGCKIPYEEGPGPGPLAEEVQVLGDPFPVVNPSYTSSFVLTCPEVSAFAGAQRTSGSDQPSDPLNSPSLLAL

SEQ ID NO: 23612 - protein, 1583 aa, Homo sapiens
MAQILPVRFQEHFQLQNLGINPANIGFSTLTMESDKFICIREKVGEQAQVTIIDMSDPMAPIRRPISAESAIMNPASKVIALKAGKTLQIFNIEMKSKMKAHTMAEEVIFWKWVSVNTVALVTETAVYHWSMEGDSQPMKMFDRHTSLVGCQVIHYRTDEYQKWLLLVGISAQQNRVVGAMQLYSVDRKVSQPIEGHAAAFAEFKMEGNAKPATLFCFAVRNPTGGKLHIIEVGQPAAGNQPFVKKAVDVFFPPEAQNDFPVAMQIGAKHGVIYLITKYGYLHLYDLESGVCICMNRISADTIFVTAPHKPTSGIIGVNKKGQVLSVCVEEDNIVNYATNVLQNPDLGLRLAVRSNLAGAEKLFVRKFNTLFAQGSYAEAAKVAASAPKGILRTRETVQKFQSIPAQSGQASPLLQYFGILLDQGQLNKLESLELCHLVLQQGRKQLLEKWLKEDKLECSEELGDLVKTTDPMLALSVYLRANVPSKVIQCFAETGQFQKIVLYAKKVGYTPDWIFLLRGVMKISPEQGLQFSRMLVQDEEPLANISQIVDIFMENSLIQQCTSFLLDALKNNRPAEGLLQTWLLEMNLVHAPQVADAILGNKMFTHYDRAHIAQLCEKAGLLQQALEHYTDLYDIKRAVVHTHLLNPEWLVNFFGSLSVEDSVECLHAMLSANIRQNLQLCVQVASKYHEQLGTQALVELFESFKSYKGLFYFLGSIVNFSQDPDVHLKYIQAACKTGQIKEVERICRESSCYNPERVKNFLKEAKLTDQLPLIIVCDRFGFVHDLVLYLYRNNLQRYIEIYVQKVNPSRTPAVIGGLLDVDCSEEVIKHLIMAVRGQFSTDELVAEVEKRNRLKLLLPWLESQIQEGCEEPATHNALAKIYIDSNNSPECFLRENAYYDSSVVGRYCEKRDPHLACVAYERGQCDLELIKVCNENSLFKSEARYLVCRKDPELWAHVLEETNPSRRQLIDQVVQTALSETRDPEEISVTVKAFMTADLPNELIELLEKIVLDNSVFSEHRNLQNLLILTAIKADRTRVMEYISRLDNYDALDIASIAVSSALYEEAFTVFHKFDMNASAIQVLIEHIGNLDRAYEFAERCNEPAVWSQLAQAQLQKDLVKEAINSYIRGDDPSSYLEVVQSASRSNNWEDLVKFLQMARKKGRESYIETELIFALAKTSRVSELEDFINGPNNAHIQQVGDRCYEEGMYEAAKLLYSNVSNFARLASTLVHLGEYQAAVDNSRKASSTRTWKEVCFACMDGQEFRFAQLCGLHIVIHADELEELMCYYQDRGYFEELILLLEAALGLERAHMGMFTELAILYSKFKPQKMLEHLELFWSRVNIPKVLRAAEQAHLWAELVFLYDKYEEYDNAVLTMMSHPTEAWKEGQFKDIITKVANVELCYRALQFYLDYKPLLINDLLLVLSPRLDHTWTVSFFSKAGQLPLVKPYLRSVQSHNNKSVNEALNHLLTEEEDYQDAMQHAAESRDAELAQKLLQWFLEEGKRECFAACLFTCYDLLRPDMVLELAWRHNLVDLAMPYFIQVMREYLSKVDKLDALESLRKQEEHVTEPAPLVFDFDGHE

SEQ ID NO: 23613 - protein, 512 aa, Homo sapiens
MKAIIHLTLLALLSVNTATNQGNSADAVTTTETATSGPTVAAADTTETNFPETASTTANTPSFPTATSPAPPIISTHSSSTIPTPAPPIISTHSSSTIPIPTAADSESTTNVNSLATSDIITASSPNDGLITMVPSETQSNNEMSPTTEDNQSSGPPTGTALLETSTLNSTGPSNPCQDDPCADNSLCVKLHNTSFCLCLEGYYYNSSTCKKGKVFPGKISVTVSETFDPEEKHSMAYQDLHSEITSLFKDVFGTSVYGQTVILTVSTSLSPRSEMRADDKFVNVTIVTILAETTSDNEKTVTEKINKAIRSSSSNFLNYDLTLRCDYYGCNQTADDCLNGLACDCKSDLQRPNPQSPFCVASSLKCPDACNAQHKQCLIKKSGGAPECACVPGYQEDANGNCQKCAFGYSGLDCKDKFQLILTIVGTIAGIVILSMIIALIVTARSNNKTKHIEEENLIDEDFQNLKLRSTGFTNLGAEGSVFPKVRITASRDSQMQNPYSRHSSMPRPDY

SEQ ID NO: 23614 - protein, 1886 aa, Homo sapiens
MTRWVPTKREEKYGVAFYNYDARGADELSLQIGDTVHILETYEGWYRGYTLRKKSKKGIFPASYIHLKEAIVEGKGQHETVIPGDLPLIQEVTTTLREWSTIWRQLYVQDNREMFRSVRHMIYDLIEWRSQILSGTLPQDELKELKKKVTAKIDYGNRILDLDLVVRDEDGNILDPELTSTISLFRAHEIASKQVEERLQEEKSQKQNIDINRQAKFAATPSLALFVNLKNVVCKIGEDAEVLMSLYDPVESKFISENYLVRWSSSGLPKDIDRLHNLRAVFTDLGSKDLKREKISFVCQIVRVGRMELRDNNTRKLTSGLRRPFGVAVMDVTDIINGKVDDEDKQHFIPFQPLALDDAIRHKPLNMSSRFSPRVAGENDFLQTVINKVIAAKEVNHKGQGLWVTLKLLPGDIHQIRKEFPHLVDRTTAVARKTGFPEIIMPGDVRNDIYVTLVQGDFDKGSKTTAKNVEVTVSVYDEDGKRLEHVIFPGAGDEAISEYKSVIYYQVKQPRWFETVKVAIPIEDVNRSHLRFTFRHRSSQDSKDKSEKIFALAFVKLMRYDGTTLRDGEHDLIVYKAEAKKLEDAATYLSLPSTKAELEEKGHSATGKSMQSLGSCTISKDSFQISTLVCSTKLTQNVDLLGLLKWRSNTSLLQQNLRQLMKVDGGEVVKFLQDTLDALFNIMMENSESETFDTLVFDALVFIIGLIADRKFQHFNPVLETYIKKHFSATLAYTKLTKVLKNYVDGAEKPGVNEQLYKAMKALESIFKFIVRSRILFNQLYENKGEADFVESLLQLFRSINDMMSSMSDQTVRVKGAALKYLPTIVNDVKLVFDPKELSKMFTEFILNVPMGLLTIQKLYCLIEIVHSDLFTQHDCREILLPMMTDQLKYHLERQEDLEACCQLLSHILEVLYRKDVGPTQRHVQIIMEKLLRTVNRTVISMGRDSELIGNFVACMTAILRQMEDYHYAHLIKTFGKMRTDVVDFLMETFIMFKNLIGKNVYPFDWVIMNMVQNKVFLRAINQYADMLNKKFLDQANFELQLWNNYFHLAVAFLTQESLQLENFSSAKRAKILNKYGDMRRQIGFEIRDMWYNLGQHKIKFIPEMVGPILEMTLIPETELRKATIPIFFDMMQCEFHSTRSFQMFENEIITKLDHEVEGGRGDEQYKVLFDKILLEHCRKHKYLAKTGETFVKLVVRLMERLLDYRTIMHDENKENRMSCTVNVLNFYKEIEREEMYIRYLYKLCDLHKECDNYTEAAYTLLLHAKLLKWSEDVCVAHLTQRDGYQATTQGQLKEQLYQEIIHYFDKGKMWEEAIALGKELAEQYENEMFDYEQLSELLKKQAQFYENIVKVIRPKPDYFAVGYYGQGFPTFLRGKVFIYRGKEYERREDFEARLLTQFPNAEKMKTTSPPGDDIKNSPGQYIQCFTVKPKLDLPPKFHRPVSEQIVSFYRVNEVQRFEYSRPIRKGEKNPDNEFANMWIERTIYTTAYKLPGILRWFEVKSVFMVEISPLENAIETMQLTNDKINSMVQQHLDDPSLPINPLSMLLNGIVDPAVMGGFANYEKAFFTDRYLQEHPEAHEKIEKLKDLIAWQIPFLAEGIRIHGDKVTEALRPFHERMEACFKQLKEKVEKEYGVRIMPSSLDDRRGSRPRSMVRSFTMPSSSRPLSVASVSSLSSDSTPSRPGSDGFALEPLLPKKMHSRSQDKLDKDDLEKEKKDKKKEKRNSKHQEIFEKEFKPTDISLQQSEAVILSETISPLRPQRPKSQVMNVIGSERRFSVSPSSPSSQQTPPPVTPRAKLSFSMQSSLELNGMTGADVADVPPPLPLKGSVADYGNLMENQDLLGSPTPPPPPPHQRHLPPPLPSKTPPPPPPKTTRKQASVDSGIVQ

SEQ ID NO: 23615 - protein, 658 aa, Homo sapiens
MLLKISEITMPGKIFPLKMAHDLDTGSNGLQRYTISSNPHFHVLTRNRSEGRKFPELVLDKPLDREEQPQLRLTLIALDGGSPPRSGTSEIQIQVLDINDNVPEFAQELYEAQVPENNPLGSLVITVSARDLDAGSFGKVSYALFQVDDVNQPFEINAITGEIRLRKALDFEEIQSYDVDVEATDGGGLSGKCSLVVRVLDVNDNAPELTMSFFISLIPENLPEITVAVFSVSDADSGHNQQVICSIENNLPFLLRPSVENFYTLVTEGALDRESRAEYNITITVTDLGTPRLKTQQSITVQVSDVNDNAPAFTQTSYTLFVRENNSPALHIGSVSATDRDSGINAQVTYSLLPPQDPHLPLSSLVSINADNGHLFALRSLDYEALQSFEFRVGATDRGSPALSSEALVRLLVLDANDNSPFVLYPLQNGSAPCTELVPRAAEPGYLVTKVVAVDGDSGQNAWLSYQLLKATELGLFGVWAHNGEVRTARLLSERDAAKHRLVVLVKDNGEPPRSATATLHVLLVDGFSQPYLPLPEAAPAQAQADSLTVYLVVALASVSSLFLFSVLLFVAVRLCRRSRAASVGRYSVPEGPFPGHLVDVSGTGTLSQSYQYKVCLTGGSETNEFKFLKPIMPNFPPQGTEREMEETPTSRNSFPFS

SEQ ID NO: 23616 - protein, 526 aa, Homo sapiens
MRDSSAPSSASSSVTDLYCTPHSSRSDLVLPGTAGDFSLSASLSACTLLYEGAVEPMQIDVDPQEDPQNAPDVNYVVENPSLDLEQYAASYSGLMRIERLQFIADHCPTLRVEALKMALSFVQRTFNVDMYEEIHRKLSEATRELQNAPDAIPESGVEPPALDTAWVEATRKKALLKLEKLDTDLKNYKGNSIKESIRRGHDDLGDHYLDCGDLSNALKCYSRARDYCTSAKHVINMCLNVIKVSVYLQNWSHVLSYVSKAESTPEIAERGERDSQTQAILTKLKCAAGLAELAARKYKQAAKCLLLASFDHCDFPELLSPSNVAIYGGLCALATFDRQELQRNVISSSSFKLFLELEPQVRDIIFKFYESKYASCLKMLDEMKDNLLLDMYLAPHVRTLYTQIRNRALIQYFSPYVSADMHRMAAAFNTTVAALEDELTQLILEGLISARVDSHSKILYARDVDQRSTTFEKSLLMGKEFQRRAKAMMLRAAVLRNQIHVKSPPREGSQGELTPANSQSRMSTNM

SEQ ID NO: 23617 - protein, 645 aa, Homo sapiens
MESAQDLDVGSNSLQNYTISPNSHFYIKIPDSSDRKIYPELVLDRALDYEQEAELRLTLTAVDGGSPPKSGTTLVLIKVLDINDNAPEFPQSLYEVQVPEDRPLGSWIATISAKDLDAGNYGKISYTFFHASEDIRKTFEINPISGEVNLRSPLDFEVIQSYTINIQATDGGGLSGKCTLLVKVMDINDNPPEVTISSITKRIPENASETLVALFSILDQDSGDNGRMICSIQDNLPFFLKPTFKNFFTLVSEKALDRESQAEYNITITVTDLGTPRLKTEYNITVLLSDVNDNAPTFTQTSYTLFVRENNSPALHIGSVSATDRDSGTNAQVNYSLLPPQDRHLPLASLVSINADNGHLFALRSLDYEALQEFEFRVGATDRGSPALSSEALVRVLVLDANDNSPFVLYPLQNGSAPCTELVPRAAEPGYLVTKVVAVDGDSGQNAWLSYQLLKATEPGLFGVWAHNGEVRTARLLSERDAAKHRLVVLVKDNGEPPRSATATLHVLLVDGFSQPYLPLPEAAPAQAQADSLTVYLVVALASVSSLFLFSVLLFVAVRLCRRSRAASVGRCSVPEGPFPGHLVDVSGTGTLSQSYQYEVCLTGGSGTNEFKFLKPIIPNFQVHDTGRNMGEIENFRNSFGLNIQ

SEQ ID NO: 23618 - protein, 607 aa, Homo sapiens
MRGAARLGRPGRSCLPGARGLRAPPPPPLLLLLALLPLLPAPGAAAAPAPRPPELQSASAGPSVSLYLSEDEVRRLIGLDAELYYVRNDLISHYALSFSLLVPSETNFLHFTWHAKSKVEYKLGFQVDNVLAMDMPQVNISVQGEVPRTLSVFRVELSCTGKVDSEVMILMQLNLTVNSSKNFTVLNFKRRKMCYKKLEEVKTSALDKNTSRTIYDPVHAAPTTSTRVFYISVGVCCAVIFLVAIILAVLHLHSMKRIELDDSISASSSSQGLSQPSTQTTQYLRADTPNNATPITSYPTLRIEKNDLRSVTLLEAKGKVKDIAISRERITLKDVLQEGTFGRIFHGILIDEKDPNKEKQAFVKTVKDQASEIQVTMMLTESCKLRGLHHRNLLPITHVCIEEGEKPMVILPYMNWGNLKLFLRQCKLVEANNPQAISQQDLVHMAIQIACGMSYLARREVIHKDLAARNCVIDDTLQVKITDNALSRDLFPMDYHCLGDNENRPVRWMALESLVNNEFSSASDVWAFGVTLWELMTLGQTPYVDIDPFEMAAYLKDGYRIAQPINCPDELFAVMACCWALDPEERPKFQQLVQCLTEFHAALGAYV

SEQ ID NO: 23619 - protein, 1351 aa, Homo sapiens
MTAEPMSESKLNTLVQKLHDFLAHSSEESEETSSPPRLAMNQNTDKISGSGSNSDMMENSKEEGTSSSEKSKSSGSSRSKRKPSIVTKYVESDDEKPLDDETVNEDASNENSENDITMQSLPKDGLHGIVSCTACGQQVNHFQKDSIYRHPSLQVLICKNCFKYYMSDDISRDSDGMDEQCRWCAEGGNLICCDFCHNAFCKKCILRNLGRKELSTIMDENNQWYCYICHPEPLLDLVTACNSVFENLEQLLQQNKKKIKVDSEKSNKVYEHTSRFSPKKTSSNCNGEEKKLDDSCSGSVTYSYSALIVPKEMIKKAKKLIETTANMNSSYVKFLKQATDNSEISSATKLRQLKAFKSVLADIKKAHLALEEDLNSEFRAMDAVNKEKNTKEHKVIDAKFETKARKGEKPCALEKKDISKSEAKLSRKQVDSEHMHQNVPTEEQRTNKSTGGEHKKSDRKEEPQYEPANTSEDLDMDIVSVPSSVPEDIFENLETAMEVQSSVDHQGDGSSGTEQEVESSSVKLNISSKDNRGGADCQEVPQDKDGYKSCGLNPKLEKCGLGQENSDNEHLVENEVSLLLEESDLRRSPRVKTTPLRRPTETNPVTSNSDEECNETVKEKQKLSVPVRKKDKRNSSDSAIDNPKPNKLPKSKQSETVDQNSDSDEMLAILKEVSRMSHSSSSDTDINEIHTNHKTLYDLKTQAGKDDKGKRKRKSSTSGSDFDTKKGKSAKSSIISKKKRQTQSESSNYDSELEKEIKSMSKIGAARTTKKRIPNTKDFDSSEDEKHSKKGMDNQGHKNLKTSQEGSSDDAERKQERETFSSAEGTVDKDTTIMELRDRLPKKQQASASTDGVDKLSGKEESFTSLEVRKVAETKEKSKHLKTKTCKKVQDGLSDIAEKFLKKDQSDETSEDDKKQSKKGTEEKKKPSDFKKKVIKMEQQYESSSDGTEKLPEREEICHFPKGIKQIKNGTTDGEKKSKKIRDKTSKKKDELSDYAEKSTGKGDSCDSSEDKKSKNGAYGREKKRCKLLGKSSRKRQDCSSSDTEKYSMKEDGCNSSDKRLKRIELRERRNLSSKRNTKEIQSGSSSSDAEESSEDNKKKKQRTSSKKKAVIVKEKKRNSLRTSTKRKQADITSSSSSDIEDDDQNSIGEGSSDEQKIKPVTENLVLSSHTGFCQSSGDEALSKSVPVTVDDDDDDNDPENRIAKKMLLEEIKANLSSDEDGSSDDEPEEGKKRTGKQNEENPGDEEAKNQVNSESDSDSEESKKPRYRHRLLRHKLTVSDGESGEEKKTKPKEHKEVKGRNRRKVSSEDSEDSDFQESGVSEEVSESEDEQRPRTRSAKKAELEENQRSY

SEQ ID NO: 23620 - protein, 393 aa, Homo sapiens
MALPRSQGHWSNKDILRLLECMENNRPSDDNSTFSSTQSHMDWGKVAFKNFSGEMCRLKWLEISCNLRKFGTLKELVLEAKKCVKKMNKSQKYRNGPDFPKRPLTAYNRFFKESWPQYSQMYPGMRSQELTKILSKKYRELPEQMKQKYIQDFRKEKQEFEEKLARFREEHPDLVQKAKKSSVSKRTQNKVQKKFQKNIEEVRSLPKTDRFFKKVKFHGEPQKPPMNGYHKFHQDSWSSKEMQHLSVRERMVEIGRRWQRIPQSQKDHFKSQAEELQKQYKVKLDLWLKTLSPENYAAYKESTYAKGKNMAMTGGPDPRLKQADPQSSSAKGLQEGFGEGQGLQAAGTDSSQTIWVNCHVSMEPEENRKKDREKEESSNSSDCSSGEEIEVDV

SEQ ID NO: 23621 - protein, 307 aa, Homo sapiens
MLNTTSVTEFLLLGVTDIQELQPFLFVVFLTIYFISVTGNGAVLMIVISDPRLHSLMYFFLGNLSYLDICYSTVTLPKMLQNFLSTHKAISFLGCISQLHFFHSLGSTESMLFAVMAFDLSVAICKPLRYTVIMNPQLCTQMAITIWVIGFFHALLHSVMTSRLNFCGSNRIHHFLCDIKPLLKLACGNTELNQWLLSTVTGTIAMGPFFLTLLSYFYIITYLFFKTRSCSMLCKALSTCASHFMVVILFYAPVLFTYIHPALESFMDQDRIVAIMYTVVTPVLNPLIYTLRNKEVKGALGRVIRRL

SEQ ID NO: 23622 - protein, 297 aa, Homo sapiens
MGPLSAPPCTQHITWKGLLLTVETPKPSISSSNFNPREATEAVILTCDPETPDASYLWWMNGQSLPMTHSLQLSETNRTLYLFGVTNYTAGPYECEIRNPVSASRSDPVTLNLLPKLPKPYITINNLNPRENKDVSTFTCEPKSENYTYIWWLNGQSLPVSPRVKRRIENRILILPSVTRNETGPYQCEIRDRYGGIRSDPVTLNVLYGPDLPRIYPSFTYYHSGQNLYLSCFADSNPPAQYSWTINGKFQLSGQKLSIPQITTKHSGLYACSVRNSATGKESSKSVTVRVSDWTLP

SEQ ID NO: 23623 - protein, 528 aa, Homo sapiens
MMENSKEEGTSSSEKSKSSGSSRSKRKPSIVTKYVESDDEKPLDDETVNEDASNENSENDITMQSLPKGTVIVQPEPVLNEDKDDFKGPEFRSRSKMKTENLKKRGEDGLHGIVSCTACGQQVNHFQKDSIYRHPSLQVLICKNCFKYYMSDDISRDSDGMDEQCRWCAEGGNLICCDFCHNAFCKKCILRNLGRKELSTIMDENNQWYCYICHPEPLLDLVTACNSVFENLEQLLQQNKKKIKVDSEKSNKVYEHTSRFSPKKTSSNCNGEEKKLDDSCSGSVTYSYSALIVPKEMIKKAKKLIETTANMNSSYVKFLKQATDNSEISSATKLRQLKAFKSVLADIKKAHLALEEDLNSEFRAMDAVNKEKNTKEHKVIDAKFETKARKGEKPCALEKKDISKSEAKLSRKQVDSEHMHQNVPTEEQRTNKSTGGEHKKSDRKEEPQYEPANTSEDLDMDIVSVPSSVPEDIFENLETAMEVQSSVDHQGDGSSGTEQEVESSSVKLNISSKDNRGGIKSKTTAKVT

SEQ ID NO: 23624 - protein, 325 aa, Homo sapiens
MKTFSSFLQIGRNMHQGNQTTITEFILLGFFKQDEHQNLLFVLFLGMYLVTVIGNGLIIVAISLDTYLHTPMYLFLANLSFADISSISNSVPKMLVNIQTKSQSISYESCITQMYFSIVFVVIDNLLLGTMAYDHFVAICHPLNYTILMRPRFGILLTVISWFLSNIIALTHTLLLIQLLFCNHNTLPHFFCDLAPLLKLSCSDTLINELVLFIVGLSVIIFPFTLSFFSYVCIIRAVLRVSSTQGKWKAFSTCGSHLTVVLLFYGTIVGVYFFPSSTHPEDTDKIGAVLFTVVTPMINPFIYSLRNKDMKGALRKLINRKISSL

SEQ ID NO: 23625 - protein, 784 aa, Homo sapiens
MKIPNIGNVMNKFEILGVVGEGAYGVVLKCRHKETHEIVAIKKFKDSEENEEVKETTLRELKMLRTLKQENIVELKEAFRRRGKLYLVFEYVEKNMLELLEEMPNGVPPEKVKSYIYQLIKAIHWCHKNDIVHRDIKPENLLISHNDVLKLCDFGFARNLSEGNNANYTEYVATRWYRSPELLLGAPYGKSVDMWSVGCILGELSDGQPLFPGESEIDQLFTIQKVLGPLPSEQMKLFYSNPRFHGLRFPAVNHPQSLERRYLGILNSVLLDLMKNLLKLDPADRYLTEQCLNHPTFQTQRLLDRSPSRSAKRKPYHVESSTLSNRNQAGKSTALQSHHRSNSKDIQNLSVGLPRADEGLPANESFLNGNLAGASLSPLHTKTYQASSQPGSTSKDLTNNNIPHLLSPKEAKSKTEFDFNIDPKPSEGPGTKYLKSNSRSQQNRHSFMESSQSKAGTLQPNEKQSRHSYIDTIPQSSRSPSYRTKAKSHGALSDSKSVSNLSEARAQIAEPSTSRYFPSSCLDLNSPTSPTPTRHSDTRTLLSPSGRNNRNEGTLDSRRTTTRHSKTMEELKLPEHMDSSHSHSLSAPHESFSYGLGYTSPFSSQQRPHRHSMYVTRDKVRAKGLDGSLSIGQGMAARANSLQLLSPQPGEQLPPEMTVARSSVKETSREGTSSFHTRQKSEGGVYHDPHSDDGTAPKENRHLYNDPVPRRVGSFYRVPSPRPDNSFHENNVSTRVSSLPSESSSGTNHSKRQPAFDPWKSPENISHSEQLKEKEKQGFFRSMK

SEQ ID NO: 23626 - protein, 715 aa, Homo sapiens
MNSGVAMKYGNDSSAELSELHSAALASLKGDIVELNKRLQQTERERDLLEKKLAKAQCEQSHLMREHEDVQERTTLRYEERITELHSVIAELNKKIDRLQGTTIREEDEYSELRSELSQSQHEVNEDSRSMDQDQTSVSIPENQSTMVTADMDNCSDLNSELQRVLTGLENVVCGRKKSSCSLSVAEVDKHIEQLTTASEHCDLAIKTVEEIEGVLGRDLYPNLAEERSRWEKELAGLREENESLTAMLCSKEEELNRTKATMNAIREERDRLRRRVRELQTRLQSVQATGPSSPGRLTSTNRPINPSTGELSTSSSSNDIPIAKIAERVKLSKTRSESSSSDRPVLGSEISSIGVSSSVAEHLAHSLQDCSNIQEIFQTLYSHGSAISESKIREFEVETERLNSRIEHLKSQNDLLTITLEECKSNAERMSMLVGKYESNATALRLALQYSEQCIEAYELLLALAESEQSLILGQFRAAGVGSSPGDQSGDENITQMLKRAHDCRKTAENAAKALLMKLDGSCGGAFAVAGCSVQPWESLSSNSHTSTTSSTASSCDTEFTKEDEQRLKDYIQQLKNDRAAVKLTMLELESIHIDPLSYDVKPRGDSQRLDLENAVLMQELMAMKEEMAELKAQLYLLEKEKKALELKLSTREAQEQAYLVHIEHLKSEVEEQKEQRMRSLSSTSSGSKDKPGKVGPEWLGDTLRLSDCPVTAQ

SEQ ID NO: 23627 - protein, 478 aa, Homo sapiens
MATALVSAHSLAPLNLKKEGLRVVREDHYSTWEQGFKLQGNSKGLGQEPLCKQFRQLRYEETTGPREALSRLRELCQQWLQPETHTKEQILELLVLEQFLIILPKELQARVQEHHPESREDVVVVLEDLQLDLGETGQQDPDQPKKQKILVEEMAPLKGVQEQQVRHECEVTKPEKEKGEETRIENGKLIVVTDSCGRVESSGKISEPMEAHNEGSNLERHQAKPKEKIEYKCSEREQRFIQHLDLIEHASTHTGKKLCESDVCQSSSLTGHKKVLSREKGHQCHECGKAFQRSSHLVRHQKIHLGEKPYQCNECGKVFSQNAGLLEHLRIHTGEKPYLCIHCGKNFRRSSHLNRHQRIHSQEEPCECKECGKTFSQALLLTHHQRIHSHSKSHQCNECGKAFSLTSDLIRHHRIHTGEKPFKCNICQKAFRLNSHLAQHVRIHNEEKPYQCSECGEAFRQRSGLFQHQRYHHKDKLA

SEQ ID NO: 23628 - protein, 2057 aa, Homo sapiens
MLRLVVQSAKIDPPLAPLPRPCMSIDFRDIKKRTRVVEGNDPVWNETLIWHLWNRPLENDSFLQVTLQDMGSQKKERFIGLATVLLKPLLKQPSEVLFVKDLTLLNHSMKPTDCTVTLQVAHMSNQDIEKTGAEDHLGITAREAASQKLMVPGSTAHRALSSKPQHFQVRVKVFEARQLMGNNIKPVVKVSIAGQQHQTRIKMGNNPFFNEIFFQNFHEVPAKFFDETILIQVVNSSAMRYKAEIGRFQTDIGFIYHSPGHTLLRKWLGLCQPNNPGSGVTGYLKVTIYALGVGDQALIDQKLLYGTDDTDIQIFKSAVVPINMAYLQLFIYCAEDLHLKKHQSVNPQLEVELIGEKLRTHMQTQTDNPIWNQILTFRIQLPCLSSYIKFRVLDCRKKDCPDEIGTASLSLNQISSTGEEIEGVYSGFLPCFGPSFLTLHGGKKAPFRIQEEGACIPDSVRDGLAYRGRVFLELITQIKSYQDSTIKDLSHEVTRIEKHQNRQKYGLCVIFLSCTMMPNFKELIHFEVSIGHYGNKMDLNYKPLVSSTPYSPVIYDGNIYHYVPWYNTKPVVAVTSNWEDVSFRMNCLNLLHFTRDRLKANLDTLKSTRNPKDPALLYQWEKLLRELAEDCKRPLPCMTYQPKATSLDRKRWQLRSLLLQELAQKAKQAKPKDMVATAEDWLYRLNTVLPEPQMGLPDVMIWLVAKEQRVAYAQVPAHSVLFSPAGALHSGRLCGKIQTLFLQYPEGEGQKDVLPAHLRVCMWLGNVTDSKDLQLLRQGDTAVYAEMYENQAKYKDQWGQQGLYHCPNFSDVMGNKTLPMTDFQPPLGWHWQDSWTVEPQRRLLLDIDINKSQVLEEVYENQGRDTRGAWGPAAIPNTDVNGQPMEARENVKCPQGWHFKKDWVVELNHAVDSKGWEYGVGIPPSGLPQVWSPVEKTYHSCRRRRWARVRFRNHGELSHEQETLSFLQLGLAKGEEEGWEYDTFGSKFHLNPQPQSRFRRRCWRRRLAPNKDKGIAPIFLLEGSLAMDLKYHAGKEEDSKTWPWGLDRQFRDPQRQDTRPPNLPFIYCTFNKPHYYQLFCYIYQARNLVSNQILTFQGPFIRVVFLNHSQCTQTLRSSAGPTWAQTLIFQHLLLYENPQDTKESPPLVVLELWQRDFWGKESLWGRSVWPPMVWLDLQDRILPPMRWHPLVKELGKEEGEILASCELILQTEKLGEKQLPILSVPWKNGAYTLPKSIQPTIKRMAIEILAWGLRNMKKASSPQLLVEFGEESLRTEPIRDFQTNPNFPESESVLVLTVLMPTEEAYALPLVVKVVDNWAFGQQTVTGQANIDFLQPYFCDPWAQDYMHPKLPTLSEKKHQDFLGYLYRKFWFKSSKAEDEYEHEVDWWSKLFWATDEHKSLKYKYKDYHTLKVYECELEAVPAFQGLQDFCQTFKLYQEQPKLDSPVVGEFKGLFRIYPFPENPEAPKPPLQFLVWPEREDFPQPCLVRVYMVRAINLQPQDYNGLCDPYVILKLGKTELGNRDMYQPNTLDPIFGMMFELTCNIPLEKDLEIQLYDFDLFSPDDKIGTTVIDLENRLLSGFGAHCGLSKSYCQSGPFRWRDQMPPSYLLERYAKRKGLPPPLFSPEEDAVFYNGKKFKLQSFEPKTPTVHGLGPKKERLALYLLHTQGLVPEHVETRTLYSHSQPGIDQGKVQMWVDIFPKKLGPPGPQVNINPRKPKRYELRCIIWKTANVDLVDDNLSREKTSDIYIKGWLYGLEKDMQKTDIHYHSLTGEADFNWRFIFTMDYLAAERTCVQSQKDYIWSLDATSMKFPARLIIQVWDNDIFSPDDFLGVLELDLSDMPLPARHAKQCSIRMMDADPKWPYFIQYKHFSLFKKKTVTGWWPCQVLDGGKWRLSGKVKMSLEILSEKEALIKPAGRGQSEPNQYPTLHPPLRTNTSFTWLRSPVQNFCYIFWKRYRFKLIAFMVISIIALMLFNFIYSAPHYLAMSWIKPQLQLYPPIKIFNIINSLNTSNASSSILPTQDPNLKPTIDHEWKLHPGPTNHLSDIFPELPAPGD

SEQ ID NO: 23629 - protein, 960 aa, Homo sapiens
MKIPNIGNVMNKFEILGVVGEGAYGVVLKCRHKETHEIVAIKKFKDSEENEEVKETTLRELKMLRTLKQENIVELKEAFRRRGKLYLVFEYVEKNMLELLEEMPNGVPPEKVKSYIYQLIKAIHWCHKNDIVHRDIKPENLLISHNDVLKLCDFGFARNLSEGNNANYTEYVATRWYRSPELLLGAPYGKSVDMWSVGCILGELSDGQPLFPGESEIDQLFTIQKVLGPLPSEQMKLFYSNPRFHGLRFPAVNHPQSLERRYLGILNSVLLDLMKNLLKLDPADRYLTEQCLNHPTFQTQRLLDRSPSRSAKRKPYHVESSTLSNRNQAGKSTALQSHHRSNSKDIQNLSVGLPRADEGLPANESFLNGNLAGASLSPLHTKTYQASSQPGSTSKDLTNNNIPHLLSPKEAKSKTEFDFNIDPKPSEGPGTKYLKSNSRSQQNRHSFMESSQSKAGTLQPNEKQSRHSYIDTIPQSSRSPSYRTKAKSHGALSDSKSVSNLSEARAQIAEPSTSRYFPSSCLDLNSPTSPTPTRHSDTRTLLSPSGRNNRNEGTLDSRRTTTRHSKTMEELKLPEHMDSSHSHSLSAPHESFSYGLGYTSPFSSQQRPHRHSMYVTRDKVRAKGLDGSLSIGQGMAARANSLQLLSPQPGEQLPPEMTVARSSVKETSREGTSSFHTRQKSEGGVYHDPHSDDGTAPKENRHLYNDPVPRRVGSFYRVPSPRPDNSFHENNVSTRVSSLPSESSSGTNHSKRQPAFDPWKSPENISHSEQLKEKEKQGFFRSMKKKKKKSQTVPNSDSPDLLTLQKSIHSASTPSSRPKEWRPEKISDLQTQSQPLKSLRKLLHLSSASNHPASSDPRFQPLTAQQTKNSFSEIRIHPLSQASGGSSNIRQEPAPKGRPALQLPGQMDPGWHVSSVTRSATEGPSYSEQLGAKSGPNGHPYNRTNRSRMPNLNDLKETAL

SEQ ID NO: 23630 - protein, 954 aa, Homo sapiens
MTAEPMSESKLNTLVQKLHDFLAHSSEESEETSSPPRLAMNQNTDKISGSGSNSDMMENSKEEGTSSSEKSKSSGSSRSKRKPSIVTKYVESDDEKPLDDETVNEDASNENSENDITMQSLPKGTVIVQPEPVLNEDKDDFKGPEFRSRSKMKTENLKKRGEDGLHGIVSCTACGQQVNHFQKDSIYRHPSLQVLICKNCFKYYMSDDISRDSDGMDEQCRWCAEGGNLICCDFCHNAFCKKCILRNLGRKELSTIMDENNQWYCYICHPEPLLDLVTACNSVFENLEQLLQQNKKKIKVDSEKSNKVYEHTSRFSPKKTSSNCNGEEKKLDDSCSGSVTYSYSALIVPKEMIKKAKKLIETTANMNSSYVKFLKQATDNSEISSATKLRQLKAFKSVLADIKKAHLALEEDLNSEFRAMDAVNKEKNTKEHKVIDAKFETKARKGEKPCALEKKDISKSEAKLSRKQVDSEHMHQNVPTEEQRTNKSTGGEHKKSDRKEEPQYEPANTSEDLDMDIVSVPSSVPEDIFENLETAMEVQSSVDHQGDGSSGTEQEVESSSVKLNISSKDNRGGADCQEVPQDKDGYKSCGLNPKLEKCGLGQENSDNEHLVENEVSLLLEESDLRRSPRVKTTPLRRPTETNPVTSNSDEECNETVKEKQKLSVPVRKKDKRNSSDSAIDNPKPNKLPKSKQSETVDQNSDSDEMLAILKEVSRMSHSSSSDTDINEIHTNHKTLYDLKTQAGKDDKGKRKRKSSTSGSDFDTKKGKSAKSSIISKKKRQTQSESSNYDSELEKEIKSMSKIGAARTTKKRIPNTKDFDSSEDEKHSKKGMDNQGHKNLKTSQEGSSDDAERKQERETFSSAEGTVDKDTTIMELRDRLPKKQQASASTDGVDKLSGKEESFTSLEVRKVAETKEKSKHLKTKTCKKVQDGLSDIAEKFLKKDQSDETSEDDKK

SEQ ID NO: 23631 - protein, 871 aa, Homo sapiens
MEGAGPRGAGPARRRGAGGPPSPLLPSLLLLLLLWMLPDTVAPQELNPRGRNVCRAPGSQVPTCCAGWRQQGDECGIAVCEGNSTCSENEVCVRPGECRCRHGYFGANCDTKCPRQFWGPDCKELCSCHPHGQCEDVTGQCTCHARRWGARCEHACQCQHGTCHPRSGACRCEPGWWGAQCASACYCSATSRCDPQTGACLCHAGWWGRSCNNQCACNSSPCEQQSGRCQCRERTFGARCDRYCQCFRGRCHPVDGTCACEPGYRGKYCREPCPAGFYGLGCRRRCGQCKGQQPCTVAEGRCLTCEPGWNGTKCDQPCATGFYGEGCSHRCPPCRDGHACNHVTGKCTRCNAGWIGDRCETKCSNGTYGEDCAFVCADCGSGHCDFQSGRCLCSPGVHGPHCNVTCPPGLHGADCAQACSCHEDTCDPVTGACHLETNQRKGVMGAGALLVLLVCLLLSLLGCCCACRGKDPTRRPRPRRELSLGRKKAPHRLCGRFSRISMKLPRIPLRRQKLPKVVVAHHDLDNTLNCSFLEPPSGLEQPSPSWSSRASFSSFDTTDEGPVYCVPHEEAPAESRDPEVPTVPAEAPAPSPVPLTTPASAEEAIPLPASSDSERSASSVEGPGGALYARVARREARPARARGEIGGLSLSPSPERRKPPPPDPATKPKVSWIHGKHSAAAAGRAPSPPPPGSEAAPSPSKRKRTPSDKSAHTVEHGSPRTRDPTPRPPGLPEEATALAAPSPPRARARGRGPGLLEPTDAGGPPRSAPEAASMLAAELRGKTRSLGRAEVALGAQGPREKPAPPQKAKRSVPPASPARAPPATETPGPEKAATDLPAPETPRKKTPIQKPPRKKSREAAGELGRAGAPTL

SEQ ID NO: 23632 - protein, 312 aa, Homo sapiens
MENYNQTSTDFILLGLFPPSRIDLFFFILIVFIFLMALIGNLSMILLIFLDTHLHTPMYFLLSQLSLIDLNYISTIVPKMASDFLHGNKSISFTGCGIQSFFFLALGGAEALLLASMAYDRYIAICFPLHYLIRMSKRVCVLMITGSWIIGSINACAHTVYVLHIPYCRSRAINHFFCDVPAMVTLACMDTWVYEGTVFLSATIFLVFPFIGISCSYGQVLFAVYHMKSAEGRKKAYLTCSTHLTVVTFYYAPFVYTYLRPRSLRSPTEDKVLAVFYTILTPMLNPIIYSLRNKEVMGALTRVSQRICSVKM

SEQ ID NO: 23633 - protein, 262 aa, Homo sapiens
MAAGGDHGSPDSYRSPLASRYASPEMCFVFSDRYKFRTWRQLWLWLAEAEQTLGLPITDEQIQEMKSNLENIDFKMAAEEEKRLRHDVMAHVHTFGHCCPKAAGIIHLGATSCYVGDNTLARVISRLADFAKERASLPTLGFTHFQPAQLTTVGKRCCLWIQDLCMDLQNLKRVRDDLRFRGVKGTTGTQASFLQLFEGDDHKVEQLDKMVTEKAGFKRAFIITGQTYTRKVDIEVLSVLASLGASVHKICTDIRLLANLKE

SEQ ID NO: 23634 - protein, 359 aa, Homo sapiens
ISRLADFAKERASLPTLGFTHFQPAQLTTVGKRCCLWIQDLCMDLQNLKRVRDDLRFRGVKGTTGTQASFLQLFEGDDHKVEQLDKMVTEKAGFKRAFIITGQTYTRKVDIEVLSVLASLGASVHKICTDIRLLANLKEMEEPFEKQQIGSSAMPYKRNPMRSERCCSLARHLMTLVMDPLQTASVQWFERTLDDSANRSVAQGHHIHQVEWRRICLAEAFLTADTILNTLQNISEGLVVYPKVIERRIRQELPFMATENIIMAMVKAGGSRQDCHEKIRVLSQQAASVVKQEGGDNDLIERIQVDAYFSPIHSQLDHLLDPSSFTGRASQQVQRFLEEEVYPLLKPYESVMKVKAELC

SEQ ID NO: 23635 - protein, 315 aa, Homo sapiens
MVLASGNSSSHPVSFILLGIPGLESFQLWIAFPFCATYAVAVVGNITLLHVIRIDHTLHEPMYLFLAMLAITDLVLSSSTQPKMLAIFWFHAHEIQYHACLIQVFFIHAFSSVESGVLMAMALDCYVAICFPLRHSSILTPSVVIKLGTIVMLRGLLWVSPFCFMVSRMPFCQHQAIPQSYCEHMAVLKLVCADTSISRGNGLFVAFSVAGFDMIVIGMSYVMILRAVLQLPSGEARLKAFSTRSSHICVILALYIPALFSFLTYRFGHDVPRVVHILFANLYLLIPPMLNPIIYGVRTKQIGDRVIQGCCGNIP

SEQ ID NO: 23636 - protein, 310 aa, Homo sapiens
MQLNNNVTEFILLGLTQDPFWKKIVFVIFLRLYLGTLLGNLLIIISVKTSQALKNPMFFFLFYLSLSDTCLSTSITPRMIVDALLKKTTISFSECMIQVFSSHVFGCLEIFILILTAVDRYVDICKPLHYMTIISQWVCGVLMAVAWVGSCVHSLVQIFLALSLPFCGPNVINHCFCDLQPLLKQACSETYVVNLLLVSNSGAICAVSYVMLIFSYVIFLHSLRNHSAEVIKKALSTCVSHIIVVILFFGPCIFMYTCLATVFPMDKMIAVFYTVGTSFLNPVIYTLKNTEVKSAMRKLWSKKLITDDKR

SEQ ID NO: 23637 - protein, 339 aa, Homo sapiens
TQLLQAAAAEASLNKSKSATTTPSGSPRTSQQNVYNPSEGSTWNPFDDDNFSKLTAEELLNKDFAKLGEGKHPEKLGGSAESLIPGFQSTQGDAFATTSFSAGTDLQRESNPCPVITVEHFKESLGVKGLPLYPDPSRVPGTKTQNNLESDYLARDGPSSNSSFHSSEEEGTDLEGDMLDCSGSRPLLMESEEEDESCRPPPGKLGGAVPFAPPEVSPEQAKTVQGGRKNQFQAFTQPATDGLSEPDVFAIAPFRSSRVPNDDMDIFSKAPFVSKSSMAPSQPEESDVFLRAPFTKKKSMEELTVIQCTSQELPAQTGLLSQTGDVPLPAGRERAVYTS

SEQ ID NO: 23638 - protein, 458 aa, Homo sapiens
MDVNDNAPEITVSSITSPIPENTPETVVMVFRIRDRDSGDNGKMVCSIPEDIPFVLKSSVNNYYTLETERPLDRESRAEYNITITVTDLGTPRLKTEHNITVLVSDVNDNAPAFTQTSYALFVRENNSPALHIGSISATDRDSGTNAQVNYSLLPSQDPHLPLASLVSINADNGHLFALRSLDYEALQGFQFRVGATDHGSPALSSEALVRVLVLDANDNSPFVLYPLQNGSAPCTELVPWAAEPGYLVTKVVAVDGDSGQNAWLSYQLLKATEPGLFGVWAHNGEVRTARLLSERDAAKHRLVVLVKDNGEPPRSATATLHVLLVDGFSQPYLPLPEAAPAQAQADSLTVYLVVALASVSSLFLFSVLLFVAVRLCRRSRAAPVGRCSVPEGPFPGHLVDVSGTGTLSQSYHYEVCVTGGSRSNKFKFLKPIIPNFLPQSTGSEVEENPPFQNNLGF

SEQ ID NO: 23639 - protein, 486 aa, Homo sapiens
MPLPVQVFNLQGAVEPMQIDVDPQEDPQNAPDVNYVVENPSLDLEQYAASYSGLMRIERLQFIADHCPTLRVEALKMALSFVQRTFNVDMYEEIHRKLSEATRELQNAPDAIPESGVEPPALDTAWVEATRKKALLKLEKLDTDLKNYKGNSIKESIRRGHDDLGDHYLDCGDLSNALKCYSRARDYCTSAKHVINMCLNVIKVSVYLQNWSHVLSYVSKAESTPEIAERGERDSQTQAILTKLKCAAGLAELAARKYKQAAKCLLLASFDHCDFPELLSPSNVAIYGGLCALATFDRQELQRNVISSSSFKLFLELEPQVRDIIFKFYESKYASCLKMLDEMKDNLLLDMYLAPHVRTLYTQIRNRALIQYFSPYVSADMHRMAAAFNTTVAALEDELTQLILEGLISARVDSHSKILYARDVDQRSTTFEKSLLMGKEFQRRAKAMMLRAAVLRNQIHVKSPPREGSQGELTPANSQSRMSTNM

SEQ ID NO: 23640 - protein, 530 aa, Homo sapiens
MEDDSLYLGGDWQFNHFSKLTSSRLDAAFAEIQRTSLSEKSPLSSETRFDLCDDLAPVARQLAPREKLPLSSRRPAAVGAGLQKIGNTFYVNVSLQCLTYTLPLSNYMLSREDSQTCHLHKCCMFCTMQAHITWALHSPGHVIQPSQVLAAGFHRGEQEDAHEFLMFTVDAMKKACLPGHKQLDHHSKDTTLIHQIFGAYWRSQIKYLHCHGVSDTFDPYLDIALDIQAAQSVKQALEQLVKPKELNGENAYHCGLCLQKAPASKTLTLPTSAKVLILVLKRFSDVTGNKLAKNVQYPKCRDMQPYMSQQNTGPLVYVLYAVLVHAGWSCHNGHYFSYVKAQEGQWYKMDDAEVTASGITSVLSQQAYVLFYIQKSEWERHSESVSRGREPRALGAEDTDRPATQGELKRDHPCLQVPELDEHLVERATQESTLDHWKFPQEQNKTKPEFNVRKVEGTLPPNVLVIHQSKYKCGMKNHHPEQQSSLLNLSSTKPTDQESMNTGTLASLQGSTRRSKGNNKHSKRSLLVCQ

SEQ ID NO: 23641 - protein, 511 aa, Homo sapiens
TQLLQAAAAEASLNKSKSATTTPSGSPRTSQQNVYNPSEGSTWNPFDDDNFSKLTAEELLNKDFAKLGEGKHPEKLGGSAESLIPGFQSTQGDAFATTSFSAGTAEKRKGGQTVDSGLPLLSVSDPFIPLQVPDAPDLQRESNPCPVITVEHFKESLGVKGLPLYPDPSRVPGTKTQNNLESDYLARDGPSSNSSFHSSEEEGTDLEGDMLDCSGSRPLLMESEEEDESCRPPPGKLGGAVPFAPPEVSPEQAKTVQGGRKNQFQAFTQPATDGLSEPDVFAIAPFRSSRVPNDDMDIFSKAPFVSKSSMAPSQPEESDVFLRAPFTKKKSMEELTVIQCTSQELPAQTGLLSQTGDVPLPAGRERAVYTSVQAQYSTAGFVQQSNLLSHSVQAADHLDSISPRGSCLESGGHSNDRNKGPQLQKEAVSGPMAGKPFRPQSLSKYSRHYSPEDEPSPEAQPIAAYKIVSQTNKQSIAGSVSITSLSSRTTELPAADPFALAPFPSKSGKKP

SEQ ID NO: 23642 - protein, 5059 aa, Homo sapiens
MPGAPLLRLLTAVSAAVAVAVAGAPGTVMPPTTGDATLAFVFDVTGSMWDELMQVIDGASRILERSLSRRSQAIANYALVPFHDPDIGPVTLTADPTVFQRELRELYVQGGGDCPEMSVGAIKAAVEVANPGSFIYVFSDARAKDYHKKEELLRLLQLKQSQVVFVLTGDCGDRTHPGYLAYEEIAATSSGQVFHLDKQQVTEVLKWVESAIQASKVHLLSTDHEEEGEHTWRLPFDPSLKEVTISLSGPGPEIEVQDPLGRILQEDEGLNVLLNIPDSAKVVAFKPEHPGLWSIKVYSSGRHSVRITGVSNIDFRAGFSTQPLLDLNHTLEWPLQGVPISLVINSTGLKAPGRLDSVELAQSSGKPLLTLPTKPLSNGSTHQLWGGPPFHTPKERFYLKVKGKDHEGNPLLRVSGVSYSGVAPGAPLVSMAPRIHGYLHQPLLVSCSVHSALPFRLQLRRGEARLGEERHFQESGNSSWEILRASKAEEGTYECTAVSRAGTGRAKAQIVVTDPPPQLVPAPNVTVSPGETAVLSCRVLGEAPYNLTWVRDWRVLPASTGRVAQLADLSLEISGIIPTDGGRYQCVASNANGVTRASVWLLVREAPQVSIHTSSQHFSQGVEVKVSCSASGYPTPHISWSRESQALQEDSRIHVDAQGTLIIQGVAPEDAGNYSCQATNEVGTDQETVTLYYTDPPSVSAVNAVVLVAVGEEAVLVCEASGVPPPRVIWYRGGLEMILAPEGSSSGKLRIPAAQERDAGTYTCRAVNELGDASAEIQLAVGHAPQLTELPRDVTVELGRSALLACRATGRPPPTVTWRRGDGQPLGLRLGAGRGSRSRQPDSGVLFFESVAPEDQAPYVCEARNVFGKVQAEARLIVTGHAPPQIASSAPTVRVLEGQPVSLPCIVLAGRPLPERHWLKDGRPLPPGSRHSIRADGSLHLDRALQEHAGRYSCVATNTAGSQHRDVELVVQVPPRIHPTATHHITNEGVAASLPCVASGVPAPTITWTKETNALTSRGPHYNVSKEGTLLIAQPSAQDAGAYVCTATNTVGFSSQEMRLSVNTKPRIHMNGSRNADVPLQVTAKAGEEVTLDCEAKGSPPPLVTWTKDSRPVPPITNRYGLLPSGSLRLAQVQVGDSGHYECTASNPAGSASHRYVLGVQVPPQVQPGPRVLKVLVGEALDLNCVAEGNPEPQLSWSKDGVVLQGRGPQGSVHFAAIRTSDAGRYRCEASNSAGVDAWEVELRVLEPPHWGADETSGLLERVAGENASLPCPARGTPKPQVTWRKGPSSEPLHGQPGVAVLEEGSLFLASVSPADSGDYECQATNEVGSTSRRAKLVVYVPPSIREDGRKANVSGMAGQSLTLECDANGFPVPEIVWLKDAQLIPKVGGHRLLDEGQSLHFPRIQEGDSGLYSCRAENQAGTAQRDFHLLVLTPPSVLGAGAAQEVLGLAGADVELQCWTSGVPTPQVEWTKDRQPVLPGGPHLQVQEDGQVLRITGSHVGDEGRYQCVAFSPAGQQARDFQLRVHAPPTIWGSNETGEVAVMEDHLVQLLCEARGVPTPNITWFKDGALLPTSTKVVYTRGGRQLQLGRAQSSDAGVYTCKASNAVGAAEKATRLDVYVPPTIEGAGGRPYVVKAVAGRPVALECVARGHPSPTLSWHHEGLPVAESNESRLETDGSVLRLESPGEASSGLYSCVASSPAGEAVLQYSVEVQVPPQLLVAEGLGQVTTIVGQPLELPCQASGSPVPTIQWLQNGRPAEELAGVQVASQGTTLHIDHVELDHSGLFACQATNEAGTAGAEVEVSVHEFPSVSIIGGENITAPFLQPVTLQCIGDGVPTPSLRWWKDGVALAAFGGNLQIEKVDLRDEGIYTCAATNLAGESKREVALKVLVPPNIEPGPVNKAVLENASVTLECLASGVPPPDVSWFKGHQPVSSWMGVTVSVDGRVLRIEQAQLSDAGSYRCVASNVAGSTELRYGLRVNVPPRITLPPSLPGPVLVNTPVRLTCNATGAPSPTLMWLKDGNPVSPAGTPGLQVFPGGRVLTLASARASDSGRYSCVAVSAVGEDRQDVVLQVHMPPSILGEELNVSVVANESVALECQSHAMPPPVLSWWKDGRPLEPRPGVHLSADKALLQVDRADVWDAGHYTCEALNQAGHSEKHYNLNVWVAPVFPLRESHTLTVREGHPTRLSCECRGVPFPKISWRKDGQPLPGEGAGLQHVSAVGRLLYLGQAQLAQEGTYTCECSNVVGNSSQDLQLEVHVPPQIAGPREPPTQVSVVQDGVATLECNATGKPPPTVTWERDGQPVGAELGLQLQNQGQSLHVERAQAAHTGRYSCVAENLAGRAERKFELSVLVPPELIGDLDPLTNITAALHSPLTLLCEAMGIPPPAIRWFRGEEPVSPGEDTYLLAGGWMLKMTQTQEQDSGLYSCLASNEAGEARRNFSVEVLVPPSIENEDLEEVIKVLDGQTAHLMCNVTGHPQPKLTWFKDGRPLARGDAHHISPDGVLLQVLQANLSSAGHYSCIAANAVGEKTKHFQLSVLLAPTILGGAEDSADEEVTVTVNNPISLICEALAFPSPNITWMKDGAPFEASRNIQLLPGTHGLQILNAQKEDAGQYTCVVTNELGEAVKNYHVEVLIPPSISKDDPLAEVGVKEVKTKVNSTLTLECESWAVPPPTIRWYKDGQPVTPSSRLQVLGEGRLLQIQPTQVSDSGRYLCVATNVAGEDDQDFNVLIQVPPMFQKVGDFSAAFEILSREEEARGGVTEYREIVENNPAYLYCDTNAIPPPDLTWYREDQPLSAGDEVSVLQGGRVLQIPLVRAENAGRYSCKASNEVGEDWLHYELLVLTPPVILGDTEELVEEVTVNASSTVSLQCPALGNPVPTISWLQNGLPFSPSPRLQVLEDGQVLQVSTAEVADAASYMCVAENQAGSAEKLFTLRVQVPPRIAGLDLEQVTAILNSSVSLPCDVHAHPNPEVTWYKDSQALSLGEEVFLLPGTHTLQLGRARLSDSGMYTCEALNAAGRDQKLVQLSVLVPPAFRQAPRGPQDAVLVRVGDKAVLSCETDALPEPTVTWYKDGQPLVLAQRTQALRGGQRLEIQEAQVSDKGLYSCKVSNVAGEAVRTFTLTVQVPPTFENPKTETVSQVAGSPLVLTCDVSGVPAPTVTWLKDRMPVESSAVHGVVSRGGRLQLSRLQPAQAGTYTCVAENTQAEARKDFVVAVLVAPRIRSSGVAREHHVLEGQEVRLDCEADGQPPPDVAWLKDGSPLGQDMGPHLRFYLDGGSLVLKGLRASDAGAYTCVAHNPAGEDARLHTVNVLVPPTIKQGADGSGTLVSRPGELVTMVCPVRGSPPIHVSWLKDGLPLPLSQRTLLHGSGHTLRISKVQLADAGIFTCVAASPAGVADRNFTLQVQVPPVLEPVEFQNDVVVVRGSLVELPCEARGVPLPLVSWMKDGEPLLSQSLEQGPSLQLEAVGAGDSGTYSCVAVSEAGEARRHFQLTVMEPPHIEDSGQPTELSLTPGAPMELLCDAQGTPQPNITWHKDGQALTRLENNSRATRVLRVENVQVRDAGLYTCLAESPAGAIEKSFRVRVQAPPNIVGPRGPRFVVGLAPGQLVLECSVEAEPAPKITWHRDGIVLQEDAHTQFPERGRFLQLQALSTADSGDYSCTARNAAGSTSVAFRVEIHTVPTIRSGPPAVNVSVNQTALLPCQADGVPAPLVSWRKDRVPLDPRSPRFEILPEGSLRIQPVLAQDAGHYLCLASNSAGSDRQGRDLRVLALLPCEASGSPKPLVVWWKDGQKLDFRLQQGAYRLLPSNALLLTAPGPQDSAQFECVVSNEVGEAHRLYQVTVHVPPTIADDQTDFTVTMMAPVVLTCHSTGIPAPTVSWSKAGAQLGARGSGYRVSPSGALEIGQALPIHAGRYTCSARNSAGVAHKHVFLTVQASPVVKPLPSVVRAVAEEEVLLPCEASGIPRPTITWQKEGLNVATGVSTQVLPGGQLRIAHASPEDAGNYLCIAKNSAGSAMGKTRLVVQVPPVIENGLPDLSTTEGSHAFLPCKARGSPEPNITWDKDGQPVSGAEGKFTIQPSGELLVKNLEGQDAGTYTCTAENAVGRARRRVHLTILVLPVFTTLPGDRSLRLGDRLWLRCAARGSPTPRIGWTVNDRPVTEGVSEQDGGSTLQRAAVSREDSGTYVCWAENRVGRTQAVSFVHVKEAPVLQGEAFSYLVEPVGGSIQLDCVVRGDPVPDIHWIKDGLPLRGSHLRHQLQNGSLTIRRTERDDAGRYQCLAENEMGVAKKVVILVLQSAPVFQVEPQDMTVRSGDDVALRCQATGEPTPTIEWLQAGQPLRASRRLRTLPDGSLWLENVETGDAGTYDCVAHNLLGSATARAFLVVRGEPQGSWGSMTGVINGRKFGVATLNTSVMQEAHSGVSSIHSSIRHVPANVGPLMRVLVVTIAPIYWALARESGEALNGHSLTGGRFRQESHVEFATGELLTMTQVARGLDPDGLLLLDVVVNGVVPESLADADLQVQDFEEHYVQTGPGQLFVGSTQRFFQGGLPSFLRCNHSIQYNAARGPQPQLVQHLRASAISSAFDPEAEALRFQLATALQAEENEVGCPEGFELDSQGAFCVDRDECSGGPSPCSHACLNAPGRFSCTCPTGFALAWDDRNCRDVDECAWDAHLCREGQRCVNLLGSYRCLPDCGPGFRVADGAGCEDVDECLEGLDDCHYNQLCENTPGGHRCSCPRGYRMQGPSLPCLDVNECLQLPKACAYQCHNLQGSYRCLCPPGQTLLRDGKACTSLERNGQNVTTVSHRGPLLPWLRPWASIPGTSYHAWVSLRPGPMALSSVGRAWCPPGFIRQNGVCTDLDECRVRNLCQHACRNTEGSYQCLCPAGYRLLPSGKNCQDINECEEESIECGPGQMCFNTRGSYQCVDTPCPATYRQGPSPGTCFRRCSQDCGTGGPSTLQYRLLPLPLGVRAHHDVARLTAFSEVGVPANRTELSMLEPDPRSPFALRPLRAGLGAVYTRRALTRAGLYRLTVRAAAPRHQSVFVLLIAVSPYPY

SEQ ID NO: 23643 - protein, 463 aa, Homo sapiens
MQWIRGGSGMLWVNQEDEVEEGPSDVQNGHLDPNSDCLCLGRPLQNRDQMRANVINEIMSTERHYIKHLKDICEGYLKQCRKRRDMFSDEQLKVIFGNIEDIYRFQMGFVRDLEKQYNNDDPHLSEIGPCFLEHQDGFWIYSEYCNNHLDACMELSKLMKDSRYQHFFEACRLLQQMIDIAIDGFLLTPVQKICKYPLQLAELLKYTAQDHSDYRYVAAALAVMRNVTQQINERKRRLENIDKIAQWQASVLDWEGEDILDRSSELIYTGEMAWIYQPYGRNQQRVFFLFDHQMVLCKKDLIRRDILYYKGRIDMDKYEVVDIEDGRDDDFNVSMKNAFKLHNKETEEIHLFFAKKLEEKIRWLRAFREERKMVQEDEKIGFEISENQKRQAAMTVRKVPKQKGVNSARSVPPSYPPPQDPLNHGQYLVPDGIAQSQVFEFTEPKRSQSPFWQNFSRLTPFKK

SEQ ID NO: 23644 - protein, 503 aa, Homo sapiens
MAETSLLEAGASAASTAAALENLQVEASCSVCLEYLKEPVIIECGHNFCKACITRWWEDLERDFPCPVCRKTSRYRSLRPNRQLGSMVEIAKQLQAVKRKIRDESLCPQHHEALSLFCYEDQEAVCLICAISHTHRAHTVVPLDDATQEYKEKLQKCLEPLEQKLQEITRCKSSEEKKPGELKRLVESRRQQILREFEELHRRLDEEQQVLLSRLEEEEQDILQRLRENAAHLGDKRRDLAHLAAEVEGKCLQSGFEMLKDVKSTLEKCEKVKTMEVTSVSIELEKNFSNFPRQYFALRKILKQLIADVTLDPETAHPNLVLSEDRKSVKFVETRLRDLPDTPRRFTFYPCVLATEGFTSGRHYWEVEAAHCVLAQDPENQALARFYCYTERTIAKRLVLRRDPSVKRTLCRGCSSLLVPGLTCTQRQRRCRGQRWTVQTCLTCQRSQRFLNDPGHLLWGDRPEAQLGSQADSKPLQPLPNTAHSISDRLPEEKMQTQGSSNQ

SEQ ID NO: 23645 - protein, 312 aa, Homo sapiens
MEILSNSTSKFPTFLLTGIPGLESAHVWISIPFCCFYAIALSGNSVILFVIITQQSLHEPMYYFLFRLSATDLGLTVSSLSTTLGILWFEAREISLYSCIVQMFFLHGFTFMESGVLVATAFDRYVAICDPLRYTTILTNSRIIQMGLLMITRAIVLILPLLLLLKPLYFCRMNALSHSYCYHPDVIQLACSDIRANSICGLIDLILTTGIDTPCIVLSYILIIHSVLRIASPEEWHKVFSTCVSHVGAVAFFYIHMLSLSLVYRYGRSAPRVVHSVMANVYLLLPPVLNPIIDSVKTKQIRKAMLSLLLTK

SEQ ID NO: 23646 - protein, 312 aa, Homo sapiens
MWPNITAAPFLLTGFPGLEAAHHWISIPFFAVYVCILLGNGMLLYLIKHDHSLHEPMYYFLTMLAGTDLMVTLTTMPTVMGILWVNHREISSVGCFLQAYFIHSLSVVESGSLLAMAYDCFIAIRNPLRYASILTNTRVIALGVGVFLRGFVSILPVILRLFSFSYCKSHVITRAFCLHQEIMRLACADITFNRLYPVILISLTIFLDCLIILFSYILILNTVIGIASGEERAKALNTCISHISCVLIFYVTVMGLTFIYRFGKNVPEVVHIIMSYIYFLFPPLMNPVIYSIKTKQIQYGIIRLLSKHRFSS

SEQ ID NO: 23647 - protein, 728 aa, Homo sapiens
MRNYDSGPPPSTVINQNETFANIIFKPTVVQQARIAQNGILGDFIIRYDVNREQSIGDIQVLNGYFVHYFAPKDLPPLPKNVVFVLDSSASMVGTKLRQTKDALFTILHDLRPQDRFSIIGFSNRIKVWKDHLISVTPDSIRDGKVYIHHMSPTGGTDINGALQRAIRLLNKYVAHSGIGDRSVSLIVFLTDGKPTVGETHTLKILNNTREAARGQVCIFTIGIGNDVDFRLLEKLSLENCGLTRRVHEEEDAGSQLIGFYDEIRTPLLSDIRIDYPPSSVVQATKTLFPNYFNGSEIIIAGKLVDRKLDHLHVEVTASNSKKFIILKTDVPVRPQKAGKDVTGSPRPGGDGEGDTNHIERLWSYLTTKELLSSWLQSDDEPEKERLRQRAQALAVSYRFLTPFTSMKLRGPVPRMDGLEEAHGMSAAMGPEPVVQSVRGAGTQPGPLLKKPYQPRIKISKTSVDGDPHFVVDFPLSRLTVCFNIDGQPGDILRLVSDHRDSGVTVNGELIGAPAPPNGHKKQRTYLRTITILINKPERSYLEITPSRVILDGGDRLVLPCNQSVVVGSWGLEVSVSANANVTVTIQGSIAFVILIHLYKKPAPFQRHHLGFYIANSEGLSSNCHGLLGQFLNQDARLTEDPAGPSQNLTHPLLLQVGEGPEAVLTVKGHQVPVVWKQRKIYNGEEQIDCWFARNNAAKLIDGEYKDYLASHPFDTGMTLGRGMSREL

SEQ ID NO: 23648 - protein, 899 aa, Homo sapiens
MVKLLLSRGANINAFDKKDRRAIHWAAYMGHIEVVKLLVSHGAEVTCKDKKSYTPLHAAASSGMISVVKYLLDLGVDMNEPNAYGNTPLHVACYNGQDVVVNELIDCGAIVNQKNEKGFTPLHFAAASTHGALCLELLVGNGADVNMKSKDGKTPLHMTALHGRFSRSQTIIQSGAVIDCEDKNGNTPLHIAARYGHELLINTLITSGADTAKRGIHGMFPLHLAALSGFSDCCRKLLSSGFDIDTPDDFGRTCLHAAAAGGNLECLNLLLNTGADFNKKDKFGRSPLHYAAANCNYQCLFALVGSGASVNDLDERGCTPLHYAATSDTDGKCLEYLLRNDANPGIRDKQGYNAVHYSAAYGHRLCLQLIASETPLDVLMETSGTDMLSDSDNRATISPLHLAAYHGHHQALEVLVQSLLDLDVRNSSGRTPLDLAAFKGHVECVDVLINQGASILVKDYILKRTPIHAAATNGHSECLRLLIGNAEPQNAVDIQDGNGQTPLMLSVLNGHTDCVYSLLNKGANVDAKDKWGRTALHRGAVTGHEECVDALLQHGAKCLLRDSRGRTPIHLSAACGHIGVLGALLQSAASMDANPATADNHGYTALHWACYNGHETCVELLLEQEVFQKTEGNAFSPLHCAVINDNEGAAEMLIDTLGASIVNATDSKGRTPLHAAAFTDHVECLQLLLSHNAQVNSVDSTGKTPLMMAAENGQTNTVEMLVSSASAELTLQDNSKNTALHLACSKGHETSALLILEKITDRNLINATNAALQTPLHVAARNGLTMVVQELLGKGASVLAVDENGYTPALACAPNKDVADCLALILATMMPVSSSSPLSSLTFNAINRYTNTSKTVSFEALPIMRNEPSSYCSFNNIGGEQEYLYTDVDELNDSDSETY

SEQ ID NO: 23649 - protein, 314 aa, Homo sapiens
MMASERNQSSTPTFILLGFSEYPEIQVPLFLVFLFVYTVTVVGNLGMIIIIRLNSKLHTIMCFFLSHLSLTDFCFSTVVTPKLLENLVVEYRTISFSGCIMQFCFACIFGVTETFMLAAMAYDRFVAVCKPLLYTTIMSQKLCALLVAGSYTWGIVCSLILTYFLLDLSFCESTFINNFICDHSVIVSASYSDPYISQRLCFIIAIFNEVSSLIIILTSYMLIFTTIMKMRSASGRQKTFSTCASHLTAITIFHGTILFLYCVPNPKTSSLIVTVASVFYTVAIPMLNPLIYSLRNKDINNMFEKLVVTKLIYH

SEQ ID NO: 23650 - protein, 499 aa, Homo sapiens
MRVLTFRDVAVEFSPEEWECLDSAQQRLYRDVMLENYGNLFSLGLAIFKPDLITYLEQRKEPWNARRQKTVAKHPAGSLHFTAEILLEHDINDSFQKVILRKSGSCDLNTLRLKKDYQRVGNCKGQKSSYNGIHQCLSATRSKTCQYNKCGKAFGLCSIFTEHKKIFSREKCYKCEECGKDCRLSDFTIQKRIHTADRSYKCEECGKACKKFSNLTEHNRVHTGKKPYKCEECGKTFTCSSALTKHKRNHTGDRPYKCEECHKAFRCCSDLTKHKRIHTGEKPYKCKECHKAFRCCSDLTKHKRIHTGEKPYKCNECGKAFMWISALSQHNRIHTGEKPYICEECGKAFTYSSTLISHKRIHMELRPYKCEECGKTFKWFSDLTNHKRIHTGEKPYKCEECGKSFTCSSNLIKHKRIHMEVRPYKCEECGKTFKWFPDLTNHKRIHTGEKPYKCEECGKTFTCSSSLIKHKRSHTGDRPTSAKNVAKPLGGSQTLLNIR

SEQ ID NO: 23651 - protein, 59 aa, Homo sapiens
METPLDVLSRAASLVHADDEKREAALRGEPRIQTLPVASALSSHRTGPPPISPSKRKFS

SEQ ID NO: 23652 - protein, 859 aa, Homo sapiens
MRRCRWAALALGLLRLCLAQANFAPHFFDNGVGSTNGNMALFSLPEDTPVGSHVYTLNGTDPEGDPISYHISFDPSTRSVFSVDPTFGNITLVEELDREREDEIEAIISISDGLNLVAEKVVILVTDANDEAPRFIQEPYVALVPEDIPAGSIIFKVHAVDRDTGSGGSVTYFLQNLHSPFAVDRHSGVLRLQAGATLDYERSRTHYITVVAKDGGGRLHGADVVFSATTTVTVNVEDVQDMAPVFVGTPYYGYVYEDTLPGSEVLKVVAMDGDRGKPNRILYSLVNGNDGAFEINETSGAISITQSPAQLQREVYELHVQVTEMSPAGSPAAQATVPVTIRIVDLNNHPPTFYGESGPQNRFELSMNEHPPQGEILRGLKITVNDSDQGANAKFNLQLVGPRGIFRVVPQTVLNEAQVTIIVENSAAIDFEKSKVLTFKLLAVEVNTPEKFSSTADVVIQLLDTNDNVPKFDSLYYVARIPENAPGGSSVVAVTAVDPDTGPWGEVKYSTYGTGADLFLIHPSTGLIYTQPWASLDAEATARYNFYVKAEDMEGKYSVAEVFITLLDVNDHPPQFGKSVQKKTMVLGTPVKIEAIDEDAEEPNNLVDYSITHAEPANVFDINSHTGEIWLKNSIRSLDALHNITPGRDCLWSLEVQAKDRGSPSFSTTALLKIDITDAETLSRSPMAAFLIQTKDNPMKAVGVLAGTMATVVAITVLISTATFWRNKKSNKVLPMRRVLRKRPSPAPRTIRIEWLKSKSTKAATKFMLKEKPPNENCNNNSPESSLLPRAPALPPPPSVAPSTGAAQWTVPTVSGSLTPQPTQPPPKPKTMGSPVQSTLISELKQKFEKKSVHNKAYF

SEQ ID NO: 23653 - protein, 317 aa, Homo sapiens
MGTDNQTWVSEFILLGLSSDWDTRVSLFVLFLVMYVVTVLGNCLIVLLIRLDSRLHTPMYFFLTNLSLVDVSYATSVVPQLLAHFLAEHKAIPFQSCAAQLFFSLALGGIEFVLLAVMAYDRYVAVCDALRYSAIMHGGLCARLAITSWVSGFISSPVQTAITFQLPMCRNKFIDHISCELLAVVRLACVDTSSNEVTIMVSSIVLLMTPFCLVLLSYIQIISTILKIQSREGRKKAFHTCASHLTVVALCYGVAIFTYIQPHSSPSVLQEKLFSVFYAILTPMLNPMIYSLRNKEVKGAWQKLLWKFSGLTSKLAT

SEQ ID NO: 23654 - protein, 1070 aa, Homo sapiens
MTSPAKFKKDKEIIAEYDTQVKEIRAQLTEQMKCLDQQCELRVQLLQDLQDFFRKKAEIEMDYSRNLEKLAERFLAKTRSTKDQQFKKDQNVLSPVNCWNLLLNQVKRESRDHTTLSDIYLNNIIPRFVQVSEDSGRLFKKSKEVGQQLQDDLMKVLNELYSVMKTYHMYNADSISAQSKLKEAEKQEEKQIGKSVKQEDRQTPRSPDSTANVRIEEKHVRRSSVKKIEKMKEKRQAKYTENKLKAIKARNEYLLALEATNASVFKYYIHDLSDLIDCCDLGYHASLNRALRTFLSAELNLEQSKHEGLDAIENAVENLDATSDKQRLMEMYNNVFCPPMKFEFQPHMGDMASQLCAQQPVQSELVQRCQQLQSRLSTLKIENEEVKKTMEATLQTIQDIVTVEDFDVSDCFQYSNSMESVKSTVSETFMSKPSIAKRRANQQETEQFYFTKMKEYLEGRNLITKLQAKHDLLQKTLGESQRTDCSLARRSSTVRKQDSSQAIPLVVESCIRFISRHGLQHEGIFRVSGSQVEVNDIKNAFERGEDPLAGDQNDHDMDSIAGVLKLYFRGLEHPLFPKDIFHDLMACVTMDNLQERALHIRKVLLVLPKTTLIIMRYLFAFLNHLSQFSEENMMDPYNLAICFGPSLMSVPEGHDQVSCQAHVNELIKTIIIQHENIFPSPRELEGPVYSRGGSMEDYCDSPHGETTSVEDSTQDVTAEHHTSDDECEPIEAIAKFDYVGRTARELSFKKGASLLLYQRASDDWWEGRHNGIDGLIPHQYIVVQDTEDGVVERSSPKSEIEVISEPPEEKVTARAGASCPSGGHVADIYLANINKQRKRPESGSIRKTFRSDSHGLSSSLTDSSSPGVGASCRPSSQPIMSQSLPKEGPDKCSISGHGSLNSISRHSSLKNRLDSPQIRKTATAGRSKSFNNHRPMDPEVIAQDIEATMNSALNELRELERQSSVKHTPDVVLDTLEPLKTSPVVAPTSEPSSPLHTQLLKDPEPAFQRSASTAGDIACAFRPVKSVKMAAPVKPPATRPKPTVFPKTNATSPGVNSSTSPQSTDKSCTV

SEQ ID NO: 23655 - protein, 314 aa, Homo sapiens
MERQNQSCVVEFILLGFSNYPELQGQLFVAFLVIYLVTLIGNAIIIVIVSLDQSLHVPMYLFLLNLSVVDLSFSAVIMPEMLVVLSTEKTTISFGGCFAQMYFILLFGGAECFLLGAMAYDRFAAICHPLNYQMIMNKGVFMKLIIFSWALGFMLGTVQTSWVSSFPFCGLNEINHISCETPAVLELACADTFLFEIYAFTGTFLIILVPFLLILLSYIRVLFAILKMPSTTGRQKAFSTCAAHLTSVTLFYGTASMTYLQPKSGYSPETKKVMSLSYSLLTPLLNLLIYSLRNSEMKRALMKLWRRRVVLHTI

SEQ ID NO: 23656 - protein, 161 aa, Homo sapiens
MSVLSPEIKCETSKFTRSSFGSCLIFESSWKKAVLETQKIKKEYTTAFGLEELKECIKMPYLPGLQSCQKSVSSTPLEVPKRLPRADAEVSAVRLKKTKETCSVAPLWEKSKGSGFSDPLTGAPSQYLERLSKIAILEYDTIRQETTTKSKKSKKRDLRDR

SEQ ID NO: 23657 - protein, 484 aa, Homo sapiens
MAAGGDHGSPDSYRSPLASRYASPEMCFVFSDRYKFRTWRQLWLWLAEAEQTLGLPITDEQIQEMKSNLENIDFKMAAEEEKRLRHDVMAHVHTFGHCCPKAAGIIHLGATSCYVGDNTDLIILRNALDLLLPKLARVISRLADFAKERASLPTLGFTHFQPAQLTTVGKRCCLWIQDLCMDLQNLKRVRDDLRFRGVKGTTGTQASFLQLFEGDDHKVEQLDKMVTEKAGFKRAFIITGQTYTRKVDIEVLSVLASLGASVHKICTDIRLLANLKEMEEPFEKQQIGSSAMPYKRNPMRSERCCSLARHLMTLVMDPLQTASVQWFERTLDDSANRRICLAEAFLTADTILNTLQNISEGLVVYPKVIERRIRQELPFMATENIIMAMVKAGGSRQDCHEKIRVLSQQAASVVKQEGGDNDLIERIQVDAYFSPIHSQLDHLLDPSSFTGRASQQVQRFLEEEVYPLLKPYESVMKVKAELCL

SEQ ID NO: 23658 - protein, 314 aa, Homo sapiens
MPTVNHSGTSHTVFHLLGIPGLQDQHMWISIPFFISYVTALLGNSLLIFIILTKRSLHEPMYLFLCMLAGADIVLSTCTIPQALAIFWFRAGDISLDRCITQLFFIHSTFISESGILLVMAFDHYIAICYPLRYTTILTNALIKKICVTVSLRSYGTIFPIIFLLKRLTFCQNNIIPHTFCEHIGLAKYACNDIRINIWYGFSILMSTVVLDVVLIFISYMLILHAVFHMPSPDACHKALNTFGSHVCIIILFYGSGIFTILTQRFGRHIPPCIHIPLANVCILAPPMLNPIIYGIKTKQIQEQVVQFLFIKQK

SEQ ID NO: 23659 - protein, 412 aa, Homo sapiens
MAKRPGPPGSREMGLLTFRDIAIEFSLAEWQCLDHAQQNLYRDVMLENYRNLFSLGMTVSKPDLIACLEQNKEPQNIKRNEMAAKHPVTCSHFNQDLQPEQSIKDSLQKVIPRTYGKCGHENLQLKKCCKRVDECEVHKGGYNDLNQCLSNTQNKIFQTHKCVKVFSKFSNSNRHNARYTGKKHLKCKKYGKSFCMFSHLNQHQIIHTKEKSYKCEECGKSFNHSSSGTTHKRILTGEKPYRCEECGKAFRWPSNLTRHKRIHTGEKPYACEECGQAFRRSSTLTNHKRIHTGERPYKCEECGKAFSVSSALIYHKRIHTGEKPYTCEECGKAFNCSSTLKTHKIIHTGEKPYTCEECGRTFNCSSTVKAHKRIHTGEKPYKCEECDKAFKWHSSLAKHKIIHTGEKPYKCK

SEQ ID NO: 23660 - protein, 432 aa, Homo sapiens
MVFSIQDIDSGDNGRIVCSIPEDLPFVLKSSVENYYTLETERPLDRESTAEYNITITVTDLGIPRLKTEHNTTVLVSDVNDNAPTFTQTSYTLFVRENNSPALHIGSVSATDRDSGTNAQVNYSLLPPQDLHLPLASLVSINTDNGHLFALRSLDYEALQAFDFRVGATDRGSPALSSEALVRVLVLDANDNSPFVLYPLQNGSAPCTELVPRAAEPGYLVTKVVAVDGDSGQNAWLSYQLLKATEPGLFGVWAHNGEVRTARLLSERDAAKHRLVVLVKDNGEPPRSATATLQVLLVDGFSQPYLPLPEAAPAQAQADSLTVYLVVALASVSSLFLFSVLLFVAVRLCRRSRAASVGSCSVPKGPFPGHLVDVSGTGTLSQSYQYEVCLTGGSETNEFKFLKPVIPNIQAKGLGKNSEENSTFRNSFGFNF

SEQ ID NO: 23661 - protein, 318 aa, Homo sapiens
MMSFAPNASHSPVFLLLGFSRANISYTLLFFLFLAIYLTTILGNVTLVLLISWDSRLHSPMYYLLRGLSVIDMGLSTVTLPQLLAHLVSHYPTIPAARCLAQFFFFYAFGVTDTLVIAVMALDRYVAICDPLHYALVMNHQRCACLLALSWVVSILHTMLRVGLVLPLCWTGDAGGNVNLPHFFCDHRPLLRASCSDIHSNELAIFFEGGFLMLGPCALIVLSYVRIGAAILRLPSAAGRRRAVSTCGSHLTMVGFLYGTIICVYFQPPFQNSQYQDMVASVMYTAITPLANPFVYSLHNKDVKGALCRLLEWVKVDP

SEQ ID NO: 23662 - protein, 478 aa, Homo sapiens
VHAHPNPEVTWYKDSQALSLGEEVFLLPGTHTLQLGRARLSDSGMYTCEALNAAGRDQKLVQLSVLVPPAFRQAPRGPQDAVLVRVGDKAVLSCETDALPEPTVTWYKDGQPLVLAQRTQALRGGQRLEIQEAQVSDKGLYSCKVSNVAGEAVRTFTLTVQVPPTFENPKTETVSQVAGSPLVLTCDVSGVPAPTVTWLKDRMPVESSAVHGVVSRGGRLQLSRLQPAQAGTYTCVAENTQAEARKDFVVAVLVAPRIRSSGVAREHHVLEGQEVRLDCEADGQPPPDVAWLKDGSPLGQDMGPHLRFYLDGGSLVLKGLRASDAGAYTCVAHNPAGEDARLHTVNVLVPPTIKQGADGSGTLVSRPGELVTMVCPVRGSPPIHVSWLKDGLPLPLSQRTLLHGSGHTLRISKVQLADAGIFTCVAASPAGVADRNFTLQCPLSWSRWSSRMTWWWFVAPWWNSRARPGAFPCLSCRG

SEQ ID NO: 23663 - protein, 918 aa, Homo sapiens
MSRPRFNPRGDFPLQRPRAPNPSGMRPPGPFMRPGSMGLPRFYPAGRARGIPHRFAGHESYQNMGPQRMNVQVTQHRTDPRLTKEKLDFHEAQQKKGKPHGSRWDDEPHISASVAVKQSSVTQVTEQSPKVQSRYTKESASSILASFGLSNEDLEELSRYPDEQLTPENMPLILRDIRMRKMGRRLPNLPSQSRNKETLGSEAVSSNVIDYGHASKYGYTEDPLEVRIYDPEIPTDEVENEFQSQQNISASVPNPNVICNSMFPVEDVFRQMDFPGESSNNRSFFSVESGTKMSGLHISGGQSVLEPIKSVNQSINQTVSQTMSQSLIPPSMNQQPFSSELISSVSQQERIPHEPVINSSNVHVGSRGSKKNYQSQADIPIRSPFGIVKASWLPKFSHADAQKMKRLPTPSMMNDYYAASPRIFPHLCSLCNVECSHLKDWIQHQNTSTHIESCRQLRQQYPDWNPEILPSRRNEGNRKENETPRRRSHSPSPRRSRRSSSSHRFRRSRSPMHYMYRPRSRSPRICHRFISRYRSRSRSRSPYRIRNPFRGSPKCFRSVSPERMSRRSVRSSDRKKALEDVVQRSGHGTEFNKQKHLEAADKGHSPAQKPKTSSGTKPSVKPTSATKSDSNLGGHSIRCKSKNLEDDTLSECKQVSDKAVSLQRKLRKEQSLHYGSVLLITELPEDGCTEEDVRKLFQPFGKVNDVLIVPYRKEAYLEMEFKEAITAIMKYIETTPLTIKGKSVKICVPGKKKAQNKEVKKKTLESKKVSASTLKRDADASKAVEIVTSTSAESVDQTQQLVPLVRNTARDHDGTPENEGEETVQSALFGFQYDASDHTMAWLGPNTVPEVKEMILQDPQLQTTQLPQTTQAPDITWGMLKKTTYKAEQILLQTQKPFTPDNLFLALLSGDAKPEYEQ

SEQ ID NO: 23664 - protein, 414 aa, Homo sapiens
MRANVINEIMSTERHYIKHLKDICEGYLKQCRKRRDMFSDEQLKVIFGNIEDIYRFQMGFVRDLEKQYNNDDPHLSEIGPCFLEHQDGFWIYSEYCNNHLDACMELSKLMKDSRYQHFFEACRLLQQMIDIAIDGFLLTPVQKICKYPLQLAELLKYTAQDHSDYRYVAAALAVMRNVTQQINERKRRLENIDKIAQWQASVLDWEGEDILDRSSELIYTGEMAWIYQPYGRNQQRVFFLFDHQMVLCKKDLIRRDILYYKGRIDMDKYEVVDIEDGRDDDFNVSMKNAFKLHNKETEEIHLFFAKKLEEKIRWLRAFREERKMVQEDEKIGFEISENQKRQAAMTVRKVPKQKGVNSARSVPPSYPPPQDPLNHGQYLVPDGIAQSQVFEFTEPKRSQSPFWQNFSRLTPFKK

SEQ ID NO: 23665 - protein, 312 aa, Homo sapiens
MEQHNLTTVNEFILTGITDIAELQAPLFALFLMIYVISVMGNLGMIVLTKLDSRLQTPMYFFLRHLAFMDLGYSTTVGPKMLVNFVVDKNIISYYFCATQLAFFLVFIGSELFILSAMSYDLYVAICNPLLYTVIMSRRVCQVLVAIPYLYCTFISLLVTIKIFTLSFCGYNVISHFYCDSLPLLPLLCSNTHEIELIILIFAAIDLISSLLIVLLSYLLILVAILRMNSAGRQKAFSTCGAHLTVVIVFYGTLLFMYVQPKSSHSFDTDKVASIFYTLVIPMLNPLIYSLRNKDVKYALRRTWNNLCNIFV

SEQ ID NO: 23666 - protein, 490 aa, Homo sapiens
MPLPVQVFNLQGAVEPMQIDVDPQEDPQNAPDVNYVVENPSLDLEQYAASYSGLMRIERLQFIADHCPTLRVEALKMALSFVQRTFNVDMYEEIHRKLSEATRSSLRELQNAPDAIPESGVEPPALDTAWVEATRKKALLKLEKLDTDLKNYKGNSIKESIRRGHDDLGDHYLDCGDLSNALKCYSRARDYCTSAKHVINMCLNVIKVSVYLQNWSHVLSYVSKAESTPEIAERGERDSQTQAILTKLKCAAGLAELAARKYKQAAKCLLLASFDHCDFPELLSPSNVAIYGGLCALATFDRQELQRNVISSSSFKLFLELEPQVRDIIFKFYESKYASCLKMLDEMKDNLLLDMYLAPHVRTLYTQIRNRALIQYFSPYVSADMHRMAAAFNTTVAALEDELTQLILEGLISARVDSHSKILYARDVDQRSTTFEKSLLMGKEFQRRAKAMMLRAAVLRNQIHVKSPPREGSQGELTPANSQSRMSTNM

SEQ ID NO: 23667 - protein, 5654 aa, Homo sapiens
MSVGRRKLALLWALALALACTRHTGHAQDGSSESSYKHHPALSPIARGPSGVPLRGATVFPSLRTIPVVRASNPAHNGRVCSTWGSFHYKTFDGDVFRFPGLCNYVFSEHCGAAYEDFNIQLRRSQESAAPTLSRVLMKVDGVVIQLTKGSVLVNGHPVLLPFSQSGVLIQQSSSYTKVEARLGLVLMWNHDDSLLLELDTKYANKTCGLCGDFNGMPVVSELLSHNTKLTPMEFGNLQKMDDPTDQCQDPVPEPPRNCSTGFGICEELLHGQLFSGCVALVDVGSYLEACRQDLCFCEDTDLLSCVCHTLAEYSRQCTHAGGLPQDWRGPDFCPQKCPNNMQYHECRSPCADTCSNQEHSRACEDHCVAGCFCPEGTVLDDIGQTGCVPVSKCACVYNGAAYAPGATYSTDCTNCTCSGGRWSCQEVPCPGTCSVLGGAHFSTFDGKQYTVHGDCSYVLTKPCDSSAFTVLAELRRCGLTDSETCLKSVTLSLDGAQTVVVIKASGEVFLNQIYTQLPISAANVTIFRPSTFFIIAQTSLGLQLNLQLVPTMQLFMQLAPKLRGQTCGLCGNFNSIQADDFRTLSGVVEATAAAFFNTFKTQAACPNIRNSFEDPCSLSVENEKYAQHWCSQLTDADGPFGRCHAAVKPGTYYSNCMFDTCNCERSEDCLCAALSSYVHACAAKGVQLGGWRDGVCTKPMTTCPKSMTYHYHVSTCQPTCRSLSEGDITCSVGFIPVDGCICPKGTFLDDTGKCVQASNCPCYHRGSMIPNGESVHDSGAICTCTHGKLSCIGGQAPAPVCAAPMVFFDCRNATPGDTGAGCQKSCHTLDMTCYSPQCVPGCVCPDGLVADGEGGCITAEDCPCVHNEASYRAGQTIRVGCNTCTCDSRMWRCTDDPCLATCAVYGDGHYLTFDGQSYSFNGDCEYTLVQNHCGGKDSTQDSFRVVTENVPCGTTGTTCSKAIKIFLGGFELKLSHGKVEVIGTDESQEVPYTIRQMGIYLVVDTDIGLVLLWDKKTSIFINLSPEFKGRVCGLCGNFDDIAVNDFATRSRSVVGDVLEFGNSWKLSPSCPDALAPKDPCTANPFRKSWAQKQCSILHGPTFAACHAHVEPARYYEACVNDACACDSGGDCECFCTAVAAYAQACHEVGLCVSWRTPSICPLFCDYYNPEGQCEWHYQPCGVPCLRTCRNPRGDCLRDVRGLEGCYPKCPPEAPIFDEDKMQCVATCPTPPLPPRCHVHGKSYRPGAVVPSDKNCQSCLCTERGVECTYKAEACVCTYNGQRFHPGDVIYHTTDGTGGCISARCGANGTIERRVYPCSPTTPVPPTTFSFSTPPLVVSSTHTPSNGPSSAHTGPPSSAWPTTAGTSPRTRLPTASASLPPVCGEKCLWSPWMDVSRPGRGTDSGDFDTLENLRAHGYRVCESPRSVECRAEDAPGVPLRALGQRVQCSPDVGLTCRNREQASGLCYNYQIRVQCCTPLPCSTSSSPAQTTPPTTSKTTETRASGSSAPSSTPGTVSLSTARTTPAPGTATSVKKTFSTPSPPPVPATSTSSMSTTAPGTSVVSSKPTPTEPSTSSCLQELCTWTEWIDGSYPAPGINGGDFDTFQNLRDEGYTFCESPRSVQCRAESFPNTPLADLGQDVICSHTEGLICLNKNQLPPICYNYEIRIQCCETVNVCRDITRLPKTVATTRPTPHPTGAQTQTTFTTHMPSASTEQPTATSRGGPTATSVTQGTHTTLVTRNCHPRCTWTKWFDVDFPSPGPHGGDKETYNNIIRSGEKICRRPEEITRLQCRAKSHPEVSIEHLGQVVQCSREEGLVCRNQDQQGPFKMCLNYEVRVLCCETPRGCHMTSTPGSTSSSPAQTTPSTTSKTTETQASGSSAPSSTPGTVSLSTARTTPAPGTATSVKKTFSTPSPPPVPATSTSSMSTTAPGTSVVSSKPTPTEPSTSSCLQELCTWTEWIDGSYPAPGINGGDFDTFQNLRDEGYTFCESPRSVQCRAESFPNTPLADLGQDVICSHTEGLICLNKNQLPPICYNYEIRIQCCETVNVCRDITRPPKTVATTRPTPHPTGAQTQTTFTTHMPSASTEQPTATSRGGPTATSVTQGTHTTPVTRNCHPRCTWTTWFDVDFPSPGPHGGDKETYNNIIRSGEKICRRPEEITRLQCRAKSHPEVSIEHLGQVVQCSREEGLVCRNQDQQGPFKMCLNYEVRVLCCETPKGCPVTSTPVTAPSTPSGRATSPTQSTSSWQKSRTTTLVTTSTTSTPQTSTTYAHTTSTTSAPTARTTSAPTTRTTSASPASTTSGPGNTPSPVPTTSTISAPTTSITSAPTTSTTSAPTSSTTSGPGTTPSPVPTTSITSAPTTSTTSAPTTSTTSARTSSTTSATTTSRISGPETTPSPVPTTSTTSATTTSTTSAPTTSTTSAPTSSTTSSPQTSTTSAPTTSTTSGPGTTPSPVPTTSTTSAPTTRTTSAPKSSTTSAATTSTTSGPETTPRPVPTTSTTSSPTTSTTSAPTTSTTSASTTSTTSGAGTTPSPVPTTSTTSAPTTSTTSAPISSTTSATTTSTTSGPGTTPSPVPTTSTTSAPTTSTTSGPGTTPSAVPTTSITSAPTTSTNSAPISSTTSATTTSRISGPETTPSPVPTASTTSASTTSTTSGPGTTPSPVPTTSTISVPTTSTTSASTTSTTSASTTSTTSGPGTTPSPVPTTSTTSAPTTSTTSAPTTSTISAPTTSTTSATTTSTTSAPTPRRTSAPTTSTISASTTSTTSATTTSTTSATTTSTISAPTTSTTLSPTTSTTSTTITSTTSAPISSTTSTPQTSTTSAPTTSTTSGPGTTSSPVPTTSTTSAPTTSTTSAPTTRTTSVPTSSTTSTATTSTTSGPGTTPSPVPTTSTTSAPTTRTTSAPTTSTTSAPTTSTTSAPTSSTTSATTTSTISVPTTSTTSVPGTTPSPVPTTSTISVPTTSTTSASTTSTTSGPGTTPSPVPTTSTTSAPTTSTTSAPTTSTISAPTTSTPSAPTTSTTLAPTTSTTSAPTTSTTSTPTSSTTSSPQTSTTSASTTSITSGPGTTPSPVPTTSTTSAPTTSTTSAATTSTISAPTTSTTSAPTTSTTSASTASKTSGLGTTPSPIPTTSTTSPPTTSTTSASTASKTSGPGTTPSPVPTTSTIFAPRTSTTSASTTSTTPGPGTTPSPVPTTSTASVSKTSTSHVSISKTTHSQPVTRDCHLRCTWTKWFDIDFPSPGPHGGDKETYNNIIRSGEKICRRPEEITRLQCRAESHPEVSIEHLGQVVQCSREEGLVCRNQDQQGPFKMCLNYEVRVLCCETPKGCPVTSTPVTAPSTPSGRATSPTQSTSSWQKSRTTTLVTTSTTSTPQTSTTSAPTTSTTSAPTTSTTSAPTTSTTSTPQTSISSAPTSSTTSAPTSSTISARTTSIISAPTTSTTSSPTTSTTSATTTSTTSAPTSSTTSTPQTSKTSAATSSTTSGSGTTPSPVTTTSTASVSKTSTSHVSVSKTTHSQPVTRDCHPRCTWTKWFDVDFPSPGPHGGDKETYNNIIRSGEKICRRPEEITRLQCRAKSHPEVSIEHLGQVVQCSREEGLVCRNQDQQGPFKMCLNYEVRVLCCETPKGCPVTSTSVTAPSTPSGRATSPTQSTSSWQKSRTTTLVTSSITSTTQTSTTSAPTTSTTPASIPSTTSAPTTSTTSAPTTSTTSAPTTSTTSTPQTTTSSAPTSSTTSAPTTSTISAPTTSTISAPTTSTTSAPTASTTSAPTSTSSAPTTNTTSAPTTSTTSAPITSTISAPTTSTTSTPQTSTISSPTTSTTSTPQTSTTSSPTTSTTSAPTTSTTSAPTTSTTSTPQTSISSAPTSSTTSAPTASTISAPTTSTTSFHTTSTTSPPTSSTSSTPQTSKTSAATSSTTSGSGTTPSPVPTTSTASVSKTSTSHVSVSKTTHSQPVTRDCHPRCTWTKWFDVDFPSPGPHGGDKETYNNIIRSGEKICRRPEEITRLQCRAESHPEVSIEHLGQVVQCSREEGLVCRNQDQQGPFKMCLNYEVRVLCCETPKGCPVTSTPVTAPSTPSGRATSPTQSTSSWQKSRTTTLVTTSTTSTPQTSTTSAPTTSTIPASTPSTTSAPTTSTTSAPTTSTTSAPTHRTTSGPTTSTTLAPTTSTTSAPTTSTNSAPTTSTISASTTSTISAPTTSTISSPTSSTTSTPQTSKTSAATSSTTSGSGTTPSPVPTTSTTSASTTSTTSAPTTSTTSGPGTTPSPVPSTSTTSAATTSTTSAPTTRTTSAPTSSMTSGPGTTPSPVPTTSTTSAPTTSTTSGPGTTPSPVPTTSTTSAPITSTTSGPGSTPSPVPTTSTTSAPTTSTTSASTASTTSGPGTTPSPVPTTSTTSAPTTRTTSASTASTTSGPGSTPSPVPTTSTTSAPTTRTTPASTASTTSGPGTTPSPVPTTSTTSASTTSTISLPTTSTTSAPITSMTSGPGTTPSPVPTTSTTSAPTTSTTSASTASTTSGPGTTPSPVPTTSTTSAPTTSTTSASTASTTSGPGTSLSPVPTTSTTSAPTTSTTSGPGTTPSPVPTTSTTSAPTTSTTSGPGTTPSPVPTTSTTPVSKTSTSHLSVSKTTHSQPVTSDCHPLCAWTKWFDVDFPSPGPHGGDKETYNNIIRSGEKICRRPEEITRLQCRAESHPEVNIEHLGQVVQCSREEGLVCRNQDQQGPFKMCLNYEVRVLCCETPRGCPVTSVTPYGTSPTNALYPSLSTSMVSASVASTSVASSSVASSSVAYSTQTCFCNVADRLYPAGSTIYRHRDLAGHCYYALCSQDCQVVRGVDSDCPSTTLPPAPATSPSISTSEPVTELGCPNAVPPRKKGETWATPNCSEATCEGNNVISLRPRTCPRVEKPTCANGYPAVKVADQDGCCHHYQCQCVCSGWGDPHYITFDGTYYTFLDNCTYVLVQQIVPVYGHFRVLVDNYFCGAEDGLSCPRSIILEYHQDRVVLTRKPVHGVMTNEIIFNNKVVSPGFRKNGIVVSRIGVKMYATIPELGVQVMFSGLIFSVEVPFSKFANNTEGQCGTCTNDRKDECRTPRGTVVASCSEMSGLWNVSIPDQPACHRPHPTPTTVGPTTVGSTTVGPTTVGSTTVGPTTPPAPCLPSPICQLILSKVFEPCHTVIPPLLFYEGCVFDRCHMTDLDVVCSSLELYAALCASHDICIDWRGRTGHMCPFTCPADKVYQPCGPSNPSYCYGNDSASLGALPEAGPITEGCFCPEGMTLFSTSAQVCVPTGCPRCLGPHGEPVKVGHTVGMDCQECTCEAATWTLTCRPKLCPLPPACPLPGFVPVPAAPQAGQCCPQYSCACNTSRCPAPVGCPEGARAIPTYQEGACCPVQNCSWTVCSINGTLYQPGAVVSSSLCETCRCELPGGPPSDAFVVSCETQICNTHCPVGFEYQEQSGQCCGTCVQVACVTNTSKSPAHLFYPGETWSDAGNHCVTHQCEKHQDGLVVVTTKKACPPLSCSLDEARMSKDGCCRFCPPPPPPYQNQSTCAVYHRSLIIQQQGCSSSEPVRLAYCRGNCGDSSSMYSLEGNTVEHRCQCCQELRTSLRNVTLHCTDGSSRAFSYTEVEECGCMGRRCPAPGDTQHSEEAEPEPSQEAESGSWERGVPVSPMH

SEQ ID NO: 23668 - protein, 311 aa, Homo sapiens
MATSNHSSGAEFILAGLTQRPELQLPLFLLFLGIYVVTVVGNLGMIFLIALSSQLYPPVYYFLSHLSFIDLCYSSVITPKMLVNFVPEENIISFLECITQLYFFLIFVIAEGYLLTAMEYDRYVAICRPLLYNIVMSHRVCSIMMAVVYSLGFLWATVHTTRMSVLSFCRSHTVSHYFCDILPLLTLSCSSTHINEILLFIIGGVNTLATTLAVLISYAFIFSSILGIHSTEGQSKAFGTCSSHLLAVGIFFGSITFMYFKPPSSTTMEKEKVSSVFYITIIPMLNPLIYSLRNKDVKNALKKMTRGRQSS

SEQ ID NO: 23669 - protein, 420 aa, Homo sapiens
MDEQPRLMHSHAGVGMAGHPGLSQHLQDGAGGTEGEGGRKQDIGDILQQIMTITDQSLDEAQARKHALNCHRMKPALFNVLCEIKEKTVLSIRGAQEEEPTDPQLMRLDNMLLAEGVAGPEKGGGSAAAAAAAAASGGAGSDNSVEHSDYRAKLSQIRQIYHTELEKYEQACNEFTTHVMNLLREQSRTRPISPKEIERMVSIIHRKFSSIQMQLKQSTCEAVMILRSRFLDARRKRRNFNKQATEILNEYFYSHLSNPYPSEEAKEELAKKCGITVSQVSNWFGNKRIRYKKNIGKFQEEANIYAAKTAVTATNVSAHGSQANSPSTPNSAGSSSSFNMSNSGDLFMSVQSLNGDSYQGAQVGANVQSQVDTLRHVISQTGGYSDGLAASQMYSPQGISHLPRHPRQAHYHFRLPTWHP

SEQ ID NO: 23670 - protein, 1013 aa, Homo sapiens
MPAARPPAAGLRGISLFLALLLGSPAAALERDALPEGDASPLGPYLLPSGAPERGSPGKEHPEERVVTAPPSSSQSAEVLGELVLDGTAPSAHHDIPALSPLLPEEARPKHALPPKKKLPSLKQVNSARKQLRPKATSAATVQRAGSQPASQGLDLLSSSTEKPGPPGDPDPIVASEEASEVPLWLDRKESAVPTTPAPLQISPFTSQPYVAHTLPQRPEPGEPGPDMAQEAPQEDTSPMALMDKGENELTGSASEESQETTTSTIITTTVITTEQAPALCSVSFSNPEGYIDSSDYPLLPLNNFLECTYNVTVYTGYGVELQVKSVNLSDGELLSIRGVDGPTLTVLANQTLLVEGQVIRSPTNTISVYFRTFQDDGLGTFQLHYQAFMLSCNFPRRPDSGDVTVMDLHSGGVAHFHCHLGYELQGAKMLTCINASKPHWSSQEPICSAPCGGAVHNATIGRVLSPSYPENTNGSQFCIWTIEAPEGQKLHLHFERLLLHDKDRMTVHSGQTNKSALLYDSLQTESVPFEGLLSEGNTIRIEFTSDQARAASTFNIRFEAFEKGHCYEPYIQNGNFTTSDPTYNIGTIVEFTCDPGHSLEQGPAIIECINVRDPYWNDTEPLCRAMCGGELSAVAGVVLSPNWPEPYVEGEDCIWKIHVGEEKRIFLDIQFLNLSNSDILTIYDGDEVMPHILGQYLGNSGPQKLYSSTPDLTIQFHSDPAGLIFGKGQGFIMNYIEVSRNDSCSDLPEIQNGWKTTSHTELVRGARITYQCDPGYDIVGSDTLTCQWDLSWSSDPPFCEKIMYCTDPGEVDHSTRLISDPVLLVGTTIQYTCNPGFVLEGSSLLTCYSRETGTPIWTSRLPHCVSEESLACDNPGLPENGYQILYKRLYLPGESLTFMCYEGFELMGEVTIRCILGQPSHWNGPLPVCKVAEAAAETSLEGGNMALAIFIPVLIISLLLGGAYIYITRCRYYSNLRLPLMYSHPYSQITVETEFDNPIYETGETREYEVSI

SEQ ID NO: 23671 - protein, 559 aa, Homo sapiens
MQHVLCNHPPWIFTCLCAEGNIQPGDPGPGDQEKQQQASEGRPWSDQAEGPEGEGAMPLFGRTKKRTLGAFSRPPQRQPVSSRNGLRGVELEASPAQSGNPEETDKLLKRIEVLGFGTVNCGECGLSFSKMTNLLSHQRIHSGEKPYVCGVCEKGFSLKKSLARHQKAHSGEKPIVCRECGRGFNRKSTLIIHERTHSGEKPYMCSECGRGFSQKSNLIIHQRTHSGEKPYVCRECGKGFSQKSAVVRHQRTHLEEKTIVCSDCGLGFSDRSNLISHQRTHSGEKPYACKECGRCFRQRTTLVNHQRTHSKEKPYVCGVCGHSFSQNSTLISHRRTHTGEKPYVCGVCGRGFSLKSHLNRHQNIHSGEKPIVCKDCGRGFSQQSNLIRHQRTHSGEKPMVCGECGRGFSQKSNLVAHQRTHSGERPYVCRECGRGFSHQAGLIRHKRKHSREKPYMCRQCGLGFGNKSALITHKRAHSEEKPCVCRECGQGFLQKSHLTLHQMTHTGEKPYVCKTCGRGFSLKSHLSRHRKTTSVHHRLPVQPDPEPCAGQPSDSLYSL

SEQ ID NO: 23672 - protein, 923 aa, Homo sapiens
MPRHHAGGEEGGAAGLWVKSGAAAAAAGGGRLGSGMKDVESGRGRVLLNSAAARGDGLLLLGTRAATLGGGGGGLRESRRGKQGARMSLLGKPLSYTSSQSCRRNVKYRRVQNYLYNVLERPRGWAFIYHAFVFLLVFGCLILSVFSTIPEHTKLASSCLLILEFVMIVVFGLEFIIRIWSAGCCCRYRGWQGRLRFARKPFCVIDTIVLIASIAVVSAKTQGNIFATSALRSLRFLQILRMVRMDRRGGTWKLLGSVVYAHSKELITAWYIGFLVLIFSSFLVYLVEKDANKEFSTYADALWWGTITLTTIGYGDKTPLTWLGRLLSAGFALLGISFFALPAGILGSGFALKVQEQHRQKHFEKRRNPAANLIQCVWRSYAADEKSVSIATWKPHLKALHTCSPTNQKLSFKERVRMASPRGQSIKSRQASVGDRRSPSTDITAEGSPTKVQKSWSFNDRTRFRPSLRLKSSQPKPVIDADTALGTDDVYDEKGCQCDVSVEDLTPPLKTVIRAIRIMKFHVAKRKFKETLRPYDVKDVIEQYSAGHLDMLCRIKSLQTRVDQILGKGQITSDKKSREKITAEHETTDDLSMLGRVVKVEKQVQSIESKLDCLLDIYQQVLRKGSASALALASFQIPPFECEQTSDYQSPVDSKDLSGSAQNSGCLSRSTSANISRGLQFILTPNEFSAQTFYALSPTMHSQATQVPISQSDGSAVAATNTIANQINTAPKPAAPTTLQIPPPLPAIKHLPRPETLHPNPAGLQESISDVTTCLVASKENVQVAQSNLTKDRSMRKSFDMGGETLLSVCPMVPKDLGKSLSVQNLIRSTEELNIQLSGSESSGSRGSQDFYPKWRESKLFITDEEVGPEETETDTFDAAPQPAREAAFASDSLRTGRSRSSQSICKAGESTDALSLPHVKLK

SEQ ID NO: 23673 - protein, 922 aa, Homo sapiens
MDRQMILSRSSVMGVRGLQGFVGSTCPHICTVVNFKELAEHHRSKYPGCTPTIVVDAMCCLRYWYTPESWICGGQWREYFSALRDFVKTFTAAGIKLIFFFDGMVEQDKRDEWVKRRLKNNREISRIFHYIKSHKEQPGRNMFFIPSGLAVFTRFALKTLGQETLCSLQEADYEVASYGLQHNCLGILGEDTDYLIYDTCPYFSISELCLESLDTVMLCREKLCESLGLCVADLPLLACLLGNDIIPEGMFESFRYKCLSSYTSVKENFDKKGNIILAVSDHISKVLYLYQGEKKLEEILPLGPNKALFYKGMASYLLPGQKSPWFFQKPKGVITLDKQVISTSSDAESREEVPMCSDAESRQEVPMCTGPESRREVPVYTDSEPRQEVPMCSDPEPRQEVPTCTGPESRREVPMCSDPEPRQEVPMCTGPEARQEVPMYTDSEPRQEVPMYTDSEPRQEVPMYTGSEPRQEVPMYTGPESRQEVPMYTGPESRQEVLIRTDPESRQEIMCTGHESKQEVPICTDPISKQEDSMCTHAEINQKLPVATDFEFKLEALMCTNPEIKQEDPTNVGPEVKQQVTMVSDTEILKVARTHHVQAESYLVYNIMSSGEIECSNTLEDELDQALPSQAFIYRPIRQRVYSLLLEDCQDVTSTCLAVKEWFVYPGNPLRHPDLVRPLQMTIPGGTPSLKILWLNQEPEIQVRRLDTLLACFNLSSSREELQAVESPFQALCCLLIYLFVQVDTLCLEDLHAFIAQALCLQGKSTSQLVNLQPDYINPRAVQLGSLLVRGLTTLVLVNSACGFPWKTSDFMPWNVFDGKLFHQKYLQSEKGYAVEVLLEQNRSRLTKFHNLKAVVCKACMKENRRITGRAHWGSHHAGRWGRQGSSYHRTGSGYSRSSQGQPWRDQGPGSRQYEHDQWRRY

SEQ ID NO: 23674 - protein, 1084 aa, Homo sapiens
MLCAENRKEMEDWISSLKSVQTREPYEVAQFNVEHFSGMHNWYACSHARPTFCNVCRESLSGVTSHGLSCEVCKFKAHKRCAVRATNNCKWTTLASIGKDIIEDEDGVAMPHQWLEGNLPVSAKCAVCDKTCGSVLRLQDWKCLWCKTMVHTACKDLYHPICPLGQCKVSIIPPIALNSTDSDGFCRATFSFCVSPLLVFVNSKSGDNQGVKFLRRFKQLLNPAQVFDLMNGGPHLGLRLFQKFDNFRILVCGGDGSVGWVLSEIDKLNLNKQCQLGVLPLGTGNDLARVLGWGGSYDDDTQLPQILEKLERASTKMLDRWSIMTYELKLPPKASLLPGPPEASEEFYMTIYEDSVATHLTKILNSDEHAVVISSAKTLCETVKDFVAKVEKTYDKTLENAVVADAVASKCSVLNEKLEQLLQALHTDSQAAPVLPGLSPLIVEEDAVESSSEESLGESKEQLGDDVTKPSSQKAVKPREIMLRANSLKKAVRQVIEEAGKVMDDPTVHPCEPANQSSDYDSTETDESKEEAKDDGAKESITVKTAPRSPDARASYGHSQTDSVPGPAVAASKENLPVLNTRIICPGLRAGLAASIAGSSIINKMLLANIDPFGATPFIDPDLDSVDGYSEKCVMNNYFGIGLDAKISLEFNNKREEHPEKCRSRTKNLMWYGVLGTRELLQRSYKNLEQRVQLECDGQYIPLPSLQGIAVLNIPSYAGGTNFWGGTKEDDIFAAPSFDDKILEVVAIFDSMQMAVSRVIKLQHHRIAQCRTVKITIFGDEGVPVQVDGEAWVQPPGIIKIVHKNRAQMLTRDRAFESTLKSWEDKQKCDSGKPVLRTHLYIHHAIDLATEEVSQMQLCSQAAEELITRICDAATIHCLLEQELAHAVNACSHALNKANPRCPESLTRDTATEIAINVKALYNETESLLVGRVPLQLESPHEERVSNALHSVEVELQKLTEIPWLYYILHPNEDEEPPMDCTKRNNRSTVFRIVPKFKKEKVQKQKTSSQPVQKWGTEEVAAWLDLLNLGEYKDIFIRHDIRGAELLHLERRDLKDLGIPKVGHVKRILQGIKELGRSTPQSEV

SEQ ID NO: 23675 - protein, 469 aa, Homo sapiens
MYQRMLRCGAELGSPGGGGGGGGGGGAGGRLALLWIVPLTLSGLLGVAWGASSLGAHHIHHFHGSSKHHSVPIAIYRSPASLRGGHAGTTYIFSKGGGQITYKWPPNDRPSTRADRLAIGFSTVQKEAVLVRVDSSSGLGDYLELHIHQGKIGVKFNVGTDDIAIEESNAIINDGKYHVVRFTRSGGNATLQVDSWPVIERYPAGNNDNERLAIARQRIPYRLGRVVDEWLLDKGRQLTIFNSQATIIIGGKEQGQPFQGQLSGLYYNGLKVLNMAAENDANIAIVGNVRLVGEVPSSMTTESTATAMQSEMSTSIMETTTTLATSTARRGKPPTKEPISQTTDDILVASAECPSDDEDIDPCEPSSANPTRAGGREPYPGSAEVIRESSSTTGMVVGIVAAAALCILILLYAMYKYRNRDEGSYHVDESRNYISNSAQSNGAVVKEKQPSSAKSSNKNKKNKDKEYYV

SEQ ID NO: 23676 - protein, 923 aa, Homo sapiens
MCIPPPNVTGSLHIGHALTVAIQDALVRWHRMRGDQVLWVPGSDHAGIATQAVVEKQLWKERGVRRHELSREAFLREVWQWKEAKGGEICEQLRALGASLDWDRECFTMDVGSSVAVTEAFVRLYKAGLLYRNHQLVNWSCALRSAISDIEVENRPLPGHTQLRLPGCPTPVSFGLLFSVAFPVDGEPDAEVVVGTTRPETLPGDVAVAVHPDDSRYTHLHGRQLRHPLMGQPLPLITDYAVQPHVGTGAVKVTPAHSPADAEMGARHGLSPLNVIAEDGTMTSLCGDWLQGLHRFVAREKIMSVLSEWGLFRGLQNHPMVLPICSRSGDVIEYLLKNQWFVRCQEMGARAAKAVESGALELSPSFHQKNWQHWFSHIGDWCVSRQLWWGHQIPAYLVVEDHAQGEEDCWVVGRSEAEAREVAAELTGRPGAELTLERDPDVLDTWFSSALFPFSALGWPQETPDLARFYPLSLLETGSDLLLFWVGRMVMLGTQLTGQLPFSKVLLHPMVRDRQGRKMSKSLGNVLDPRDIISGVEMQVLQEKLRSGNLDPAELAIVAAAQKKDFPHGIPECGTDALRFTLCSHGVQAGDLHLSVSEVQSCRHFCNKIWNALRFILNALGEKFVPQPAEELSPSSPMDAWILSRLALAAQECERGFLTRELSLVTHALHHFWLHNLCDVYLEAVKPVLWHSPRPLGPPQVLFSCADLGLRLLAPLMPFLAEELWQRLPPRPGCPPAPSISVAPYPSACSLEHWRQPELERRFSRVQEVVQVLRALRATYQLTKARPRVLLQSSEPGDQGLFEAFLEPLGTLGYCGAVGLLPPGAAAPSGWAQAPLSDTAQVYMELQGLVDPQIQLPLLAARRYKLQKQLDSLTARTPSEGEAGTQRQQKLSSLQLELSKLDKAASHLRQLMDEPPAPGSPEL

SEQ ID NO: 23677 - protein, 246 aa, Homo sapiens
MVSDLVIILNYDRAVEAFAKGGNLTLGGNLTVAVGPLGRNLEGNVALRSSAAVFTYCKSRGLFAGVSLEGSCLIERKETNRKFYCQDIRAYDILFGDTPRPAQAEDLYEILDSFTEKYENEGQRINARKAAREQRKSSAKELPPKPLSRPQQSSAPVQLNSGSQSNRNEYKLYPGLSSYHERVGNLNQPIEVTALYSFEGQQPGDLNFQAGDRITVISKTDSHFDWWEGKLRGQTGIFPANYVTMN

SEQ ID NO: 23678 - protein, 579 aa, Homo sapiens; identical to SEQ ID NO: 356

SEQ ID NO: 23679 - protein, 759 aa, Homo sapiens
MTWVKIVFGVATSAVLALLVMCIVLRPSRVHNSEENTMRALTLKDILNGTFSYKTFFPNWISGQEYLHQSADNNIVLYNIETGQSYTILSNRTMKSVNASNYGLSPDRQFVYLESDYSKLWRYSYTATYYIYDLSNGEFVRGNELPRPIQYLCWSPVGSKLAYVYQNNIYLKQRPGDPPFQITFNGRENKIFNGIPDWVYEEEMLATKYALWWSPNGKFLAYAEFNDTDIPVIAYSYYGDEQYPRTINIPYPKAGAKNPVVRIFIIDTTYPAYVGPQEVPVPAMIASSDYYFSWLTWVTDERVCLQWLKRVQNVSVLSICDFREDWQTWDCPKTQEHIEESRTGWAGGFFVSTPVFSYDAISYYKIFSDKDGYKHIHYIKDTVENAIQITSGKWEAINIFRVTQDSLFYSSNEFEEYPGRRNIYRISIGSYPPSKKCVTCHLRKERCQYYTASFSDYAKYYALVCYGPGIPISTLHDGRTDQEIKILEENKELENALKNIQLPKEEIKKLEVDEITLWYKMILPPQFDRSKKYPLLIQVYGGPCSQSVRSVFAVNWISYLASKEGMVIALVDGRGTAFQGDKLLYAVYRKLGVYEVEDQITAVRKFIEMGFIDEKRIAIWGWSYGGYVSSLALASGTGLFKCGIAVAPVSSWEYYASVYTERFMGLPTKDDNLEHYKNSTVMARAEYFRNVDYLLIHGTADDNVHFQNSAQIAKALVNAQVDFQAMWYSDQNHGLSGLSTNHLYTHMTHFLKQCFSLSD

SEQ ID NO: 23680 - protein, 485 aa, Homo sapiens
MRIPVDPSTSRRFSPPSSSLQPGKMSDVSPVVAAQQQQQQQQQQQQQQQQQQQQQQQEAAAAAAAAAAAAAAAAAVPRLRPPHDNRTMVEIIADHPAELVRTDSPNFLCSVLPSHWRCNKTLPVAFKVVALGEVPDGTVVTVMAGNDENYSAELRNASAVMKNQVARFNDLRFVGRSGRGKSFTLTITVFTNPPQVATYHRAIKVTVDGPREPRRHRQKLDDSKPSLFSDRLSDLGRIPHPSMRVGVPPQNPRPSLNSAPSPFNPQGQSQITDPRQAQSSPPWSYDQSYPSYLSQMTSPSIHSTTPLSSTRGTGLPAITDVPRRISGASELGPFSDPRQFPSISSLTESRFSNPRMHYPATFTYTPPVTSGMSLGMSATTHYHTYLPPPYPGSSQSQSGPFQTSSTPYLYYGTSSGSYQFPMVPGGDRSPSRMLPPCTTTSNGSTLLNPNLPNQNDGVDADGSHSSSPTVLNSSGRMDESVWRPY

SEQ ID NO: 23681 - protein, 1219 aa, Homo sapiens
MANGGGGGGGSSGGGGGGGGSSLRMSSNIHANHLSLDASSSSSSSSSSSSSSSSSSSSSSVHEPKMDALIIPVTMEVPCDSRGQRMWWAFLASSMVTFFGGLFIILLWRTLKYLWTVCCHCGGKTKEAQKINNGSSQADGTLKPVDEKEEAVAAEVGWMTSVKDWAGVMISAQTLTGRVLVVLVFALSIGALVIYFIDSSNPIESCQNFYKDFTLQIDMAFNVFFLLYFGLRFIAANDKLWFWLEVNSVVDFFTVPPVFVSVYLNRSWLGLRFLRALRLIQFSEILQFLNILKTSNSIKLVNLLSIFISTWLTAAGFIHLVENSGDPWENFQNNQALTYWECVYLLMVTMSTVGYGDVYAKTTLGRLFMVFFILGGLAMFASYVPEIIELIGNRKKYGGSYSAVSGRKHIVVCGHITLESVSNFLKDFLHKDRDDVNVEIVFLHNISPNLELEALFKRHFTQVEFYQGSVLNPHDLARVKIESADACLILANKYCADPDAEDASNIMRVISIKNYHPKIRIITQMLQYHNKAHLLNIPSWNWKEGDDAICLAELKLGFIAQSCLAQGLSTMLANLFSMRSFIKIEEDTWQKYYLEGVSNEMYTEYLSSAFVGLSFPTVCELCFVKLKLLMIAIEYKSANRESRILINPGNHLKIQEGTLGFFIASDAKEVKRAFFYCKACHDDITDPKRIKKCGCKRLEDEQPSTLSPKKKQRNGGMRNSPNTSPKLMRHDPLLIPGNDQIDNMDSNVKKYDSTGMFHWCAPKEIEKVILVTGWMPYLGPRVLMTCLDIGVVCMPTDIQSTSPASIKKFKETRSEAAMTVLSGHVVVCIFGDVSSALIGLRNLVMPLRASNFHYHELKHIVFVGSIEYLKREWETLHNFPKVSILPGTPLSRADLRAVNINLCDMCVILSANQNNIDDTSLQDKECILASLNIKSMQFDDSIGVLQANSQGFTPPGMDRSSPDNSPVHGMLRQPSITTGVNIPIITELVNDTNVQFLDQDDDDDPDTELYLTQPFACGTAFAVSVLDSLMSATYFNDNILTLIRTLVTGGATPELEALIAEENALRGGYSTPQTLANRDRCRVAQLALLDGPFADLGDGGCYGDLFCKALKTYNMLCFGIYRLRDAHLSTPSQCTKRYVITNPPYEFELVPTDLIFCLMQFDHNAGQSRASLSHSSHSSQSSSKKSSSVHSIPSTANRQNRPKSRESRDKQKYVQEERL

SEQ ID NO: 23682 - protein, 817 aa, Homo sapiens
MANATRRGSGVEQKSQESVSFKDVTVGFTQEEWQHLDPSQRALYRDVMLENYSNLVSVGYCVHKPEVIFRLQQGEEPWKQEEEFPSQSFPVWTADHLKERSQENQSKHLWEVVFINNEMLTKEQGDVIGIPFNVDVSSFPSRKMFCQCDSCGMSFNTVSELVISKINYLGKKSDEFNACGKLLLNIKHDETHTQEKNEVLKNRNTLSHHEETLQHEKIQTLEHNFEYSICQETLLEKAVFNTQKRENAEENNCDYNEFGRTLCDSSSLLFHQISPSRDNHYEFSDCEKFLCVKSTLSKPHGVSMKHYDCGESGNNFRRKLCLSHLQKGDKGEKHFECNECGKAFWEKSHLTRHQRVHTGQKPFQCNECEKAFWDKSNLTKHQRSHTGEKPFECNECGKAFSHKSALTLHQRTHTGEKPYQCNACGKTFCQKSDLTKHQRTHTGLKPYECYECGKSFRVTSHLKVHQRTHTGEKPFECLECGKSFSEKSNLTQHQRIHIGDKSYECNACGKTFYHKSLLTRHQIIHTGWKPYECYECGKTFCLKSDLTVHQRTHTGQKPFACPECGKFFSHKSTLSQHYRTHTGEKPYECHECGKIFYNKSYLTKHNRTHTGEKPYECNECGKAFYQKSQLTQHQRIHIGEKPYKCNECGKAFCHKSALIVHQRTHTQEKPYKCNECGKSFCVKSGLIFHERKHTGEKPYECNECGKFFRHKSSLTVHHRAHTGEKSCQCNECGKIFYRKSELAQHQRSHTGEKPYECNTCRKTFSQKSNLIVHQRRHIGENLMNEMDIRNFQPQVSLHNASEYSHCGESPDDILNVQ

SEQ ID NO: 23683 - protein, 1496 aa, Homo sapiens
MGTALLQRGGCFLLCLSLLLLGCWAELGSGLEFPGAEGQWTRFPKWNACCESEMSFQLKTRSARGLVLYFDDEGFCDFLELILTRGGRLQLSFSIFCAEPATLLADTPVNDGAWHSVRIRRQFRNTTLFIDQVEAKWVEVKSKRRDMTVFSGLFVGGLPPELRAAALKLTLASVREREPFKGWIRDVRVNSSQVLPVDSGEVKLDDEPPNSGGGSPCEAGEEGEGGVCLNGGVCSVVDDQAVCDCSRTGFRGKDCSQEDNNVEGLAHLMMGDQGKSKGKEEYIATFKGSEYFCYDLSQNPIQSSSDEITLSFKTLQRNGLMLHTGKSADYVNLALKNGAVSLVINLGSGAFEALVEPVNGKFNDNAWHDVKVTRNLRQVTISVDGILTTTGYTQEDYTMLGSDDFFYVGGSPSTADLPGSPVSNNFMGCLKEVVYKNNDVRLELSRLAKQGDPKMKIHGVVAFKCENVATLDPITFETPESFISLPKWNAKKTGSISFDFRTTEPNGLILFSHGKPRHQKDAKHPQMIKVDFFAIEMLDGHLYLLLDMGSGTIKIKALLKKVNDGEWYHVDFQRDGRSGTISVNTLRTPYTAPGESEILDLDDELYLGGLPENKAGLVFPTEVWTALLNYGYVGCIRDLFIDGQSKDIRQMAEVQSTAGVKPSCSKETAKPCLSNPCKNNGMCRDGWNRYVCDCSGTGYLGRSCEREATVLSYDGSMFMKIQLPVVMHTEAEDVSLRFRSQRAYGILMATTSRDSADTLRLELDAGRVKLTVNLDCIRINCNSSKGPETLFAGYNLNDNEWHTVRVVRRGKSLKLTVDDQQAMTGQMAGDHTRLEFHNIETGIITERRYLSSVPSNFIGHLQSLTFNGMAYIDLCKNGDIDYCELNARFGFRNIIADPVTFKTKSSYVALATLQAYTSMHLFFQFKTTSLDGLILYNSGDGNDFIVVELVKGYLHYVFDLGNGANLIKGSSNKPLNDNQWHNVMISRDTSNLHTVKIDTKITTQITAGARNLDLKSDLYIGGVAKETYKSLPKLVHAKEGFQGCLASVDLNGRLPDLISDALFCNGQIERGCEGPSTTCQEDSCSNQGVCLQQWDGFSCDCSMTSFSGPLCNDPGTTYIFSKGGGQITYKWPPNDRPSTRADRLAIGFSTVQKEAVLVRVDSSSGLGDYLELHIHQGKIGVKFNVGTDDIAIEESNAIINDGKYHVVRFTRSGGNATLQVDSWPVIERYPAGNNDNERLAIARQRIPYRLGRVVDEWLLDKGRQLTIFNSQATIIIGGKEQGQPFQGQLSGLYYNGLKVLNMAAENDANIAIVGNVRLVGEVPSSMTTESTATAMQSEMSTSIMETTTTLATSTARRGKPPTKEPISQTTDDILVASAECPSDDEDIDPCEPSSANPTRAGGREPYPGSAEVIRESSSTTGMVVGIVAAAALCILILLYAMYKYRNRDEGSYHVDESRNYISNSAQSNGAVVKEKQPSSAKSSNKNKKNKDKEYYV

SEQ ID NO: 23684 - protein, 704 aa, Homo sapiens
MWEEYPDVYGVRRSNRSRQEPSRFNIKEEASSGSESGSPKRRGQRQLKKQEKWKQEPSEDEQEQGTSAESEPEQKKVKARRPVPRRTVPKPRVKKQPKTQRGKRKKQDSSDEDDDDDEAPKRQTRRRAAKNVSYKEDDDFETDSDDLIEMTGEGVDEQQDNSETIEKVLDSRLGKKGATGASTTVYAIEANGDPSGDFDTEKDEGEIQYLIKWKGWSYIHSTWESEESLQQQKVKGLKKLENFKKKEDEIKQWLGKVSPEDVEYFNCQQELASELNKQYQIVERVIAVKTSKSTLGQTDFPAHSRKPAPSNEPEYLCKWMGLPYSECSWEDEALIGKKFQNCIDSFHSRNNSKTIPTRECKALKQRPRFVALKKQPAYLGGENLELRDYQLEGLNWLAHSWCKNNSVILADEMGLGKTIQTISFLSYLFHQHQLYGPFLIVVPLSTLTSWQREFEIWAPEINVVVYIGDLMSRNTIREYEWIHSQTKRLKFNALITTYEILLKDKTVLGSINWAFLGVDEAHRLKNDDSLLYKTLIDFKSNHRLLITGTPLQNSLKELWSLLHFIMPEKFEFWEDFEEDHGKGRENGYQSLHKVLEPFLLRRVKKDVEKSLPAKVEQILRVEMSALQKQYYKWILTRNYKALAKGTRGSTSGFLNIVMELKKCCNHCYLIKPPEENERENGQEILLSLIRSSGKLILLDKLLTR

SEQ ID NO: 23685 - protein, 506 aa, Homo sapiens
MRHCINCCIQLLPDGAHKQQVNCQGGPHHGHQACPTCKGENKILFRVDSKQMNLLAVLEVRTEGNENWGGFLRFKKGKRCSLVFGLIIMTLVMASYILSGAHQELLISSPFHYGGFPSNPSLMDSENPSDTKEHHHQSSVNNISYMKDYPSIKLIINSITTRIEFTTRQLPDLEDLKKQELHMFSVIPNKFLPNSKSPCWYEEFSGQNTTDPYLTNSYVLYSKRFRSTFDALRKAFWGHLAHAHGKHFRLRCLPHFYIIGQPKCGTTDLYDRLRLHPEVKFSAIKEPHWWTRKRFGIVRLRDGLRDRYPVEDYLDLFDLAAHQIHQGLQASSAKEQSKMNTIIIGEASASTMWDNNAWTFFYDNSTDGEPPFLTQDFIHAFQPNARLIVMLRDPVERLYSDYLYFASSNKSADDFHEKVTEALQLFENCMLDYSLRACVYNNTLNNAMPVCTPPPRTPRAGPWQKELVCCYYASGIVGLRFSIGTERSVLMCKCCSPLFMDVKAEN

SEQ ID NO: 23686 - protein, 277 aa, Homo sapiens
MGTALLQRGGCFLLCLSLLLLGCWAELGSGLEFPGAEGQWTRFPKWNACCESEMSFQLKTRSARGLVLYFDDEGFCDFLELILTRGGRLQLSFSIFCAEPATLLADTPVNDGAWHSVRIRRQFRNTTLFIDQVEAKWVEVKSKRRDMTVFSGLFVGGLPPELRAAALKLTLASVREREPFKGWIRDVRVNSSQVLPVDSGEVKLDDEPPNSGGGSPCEAGEEGEGGVCLNGGVCSVVDDQAVCDCSRTGFRGKDCSQDNNVEGLAHLMMGDQGKSKD

SEQ ID NO: 23687 - protein, 480 aa, Homo sapiens
MRVLCAFPEAMPSSNSRPPACLAPGALYLALLLHLSLSSQAGDRRPLPVDRAAGLKEKTLILLDVSTKNPVRTVNENFLSLQLDPSIIHDGWLDFLSSKRLVTLARGLSPAFLRFGGKRTDFLQFQNLRNPAKSRGGPGPDYYLKNYEDEPNNYRTMHGRAVNGSQLGKDYIQLKSLLQPIRIYSRASLYGPNIGRPRKNVIALLDGFMKVAGSTVDAVTWQHCYIDGRVVKVMDFLKTRLLDTLSDQIRKIQKVVNTYTPGKKIWLEGVVTTSAGGTNNLSDSYAAGFLWLNTLGMLANQGIDVVIRHSFFDHGYNHLVDQNFNPLPDYWLSLLYKRLIGPKVLAVHVAGLQRKPRPGRVIRDKLRIYAHCTNHHNHNYVRGSITLFIINLHRSRKKIKLAGTLRDKLVHQYLLQPYGQEGLKSKSVQLNGQPLVMVDDGTLPELKPRPLRAGRTLVIPPVTMGFYVVKNVNALACRYR

SEQ ID NO: 23688 - protein, 509 aa, Homo sapiens
MESERSKRMGNACIPLKRIAYFLCLLSALLLTEGKKPAKPKCPAVCTCTKDNALCENARSIPRTVPPDVISLSFVRSGFTEISEGSFLFTPSLQLLSLANNNLQTLPKDIFKGLDSLTNVDLRGNSFNCDCKLKWLVEWLGHTNATVEDIYCEGPPEYKKRKINSLSSKDFDCIITEFAKSQDLPYQSLSIDTFSYLNDEYVVIAQPFTGKCIFLEWDHVEKTFRNYDNITGTSTVVCKPIVIETQLYVIVAQLFGGSHIYKRDSFANKFIKIQDIEILKIRKPNDIETFKIENNWYFVVADSSKAGFTTIYKWNGNGFYSHQSLHAWYRDTDVEYLEIVRTPQTLRTPHLILSSSSQRPVIYQWNKATQLFTNQTDIPNMEDVYAVKHFSVKGDVYICLTRFIGDSKVMKWGGSSFQDIQRMPSRGSMVFQPLQINNYQYAILGSDYSFTQVYNWDAEKAKFVKFQELNVQAPRSFTHVSINKRNFLFASSFKGNTQIYKHVIVDLSA

SEQ ID NO: 23689 - protein, 527 aa, Homo sapiens
MVRPGYSHRVSLPTSPGILATSPYPETDSAFFEPSHLTSAADEGAVQVSRRTISSNSFSPEVFVLPVDVEKENAHFYVADMIISAMEKMKCNILSQQQTESWSKEVSGLLGSDQPDSEMTFDTNIKQESGSSTSSYSGYEGCAVLQVSPVTETRTYHDVKEICKCDVDEFVILELGDFNDITETCSCSCSSSKSVTYEPDFNSAELLAKELYRVFQKCWILSVVNSQLAGSLSAAGSIVVNEECVRKDFESSMNVVQEIKFKSRIRGTEDWAPPRFQIIFNIHPPLKRDLVVAAQNFFCAGCGTPVEPKFVKRLRYCEYLGKYFCDCCHSYAESCIPARILMMWDFKKYYVSNFSKQLLDSIWHQPIFNLLSIGQSLYAKAKELDRVKEIQEQLFHIKKLLKTCRFANSALKEFEQVPGHLTDELHLFSLEDLVRIKKGLLAPLLKDILKASLAHVAGCELCQGKGFICEFCQNTTVIFPFQTATCRRCSACRACFHKQCFQSSECPRCARITARRKLLESVASAAT

SEQ ID NO: 23690 - protein, 119 aa, Homo sapiens
MQAAPRAGCGAALLLWIVSSCLCRAWTAPSTSQKCDEPLVSGLPHVAFSSSSSISGSYSPGYAKINKRGGAGGWSPSDSDHYQWLQVDFGNRKQISAIATQGRYSSSDWVTQYRMLYSD

SEQ ID NO: 23691 - protein, 772 aa, Homo sapiens
MYPQGRHPAPHQPGQPGFKFTVAESCDRIKDEFQFLQAQYHSLKVEYDKLANEKTEMQRHYVMYYEMSYGLNIEMHKQTEIAKRLNTILAQIMPFLSQEHQQQVAQAVERAKQVTMTELNAIIGQQQLQAQHLSHATHGPPVQLPPHPSGLQPPGIPPVTGSSSGLLALGALGSQAHLTVKDEKNHHELDHRGAAGLGNNSVSPSESLRASEKHRGSADYSMEAKKRKAEEKDSLSRYDSDGDKSDDLVVDVSNEDPATPRVSPAHSPPENGLDKARSLKKDAPTSPASVASSSSTPSSKTKDLGHNDKSSTPGLKSNTPTPRNDAPTPGTSTTPGLRSMPGKPPGMDPIGIMASALRTPISITSSYAAPFAMMSHHEMNGSLTSPGAYAGLHNIPPQMSAAAAAAAAAYGRSPMVSFGAVGFDPHPPMRATGLPSSLASIPGGKPAYSFHVSADGQMQPVPFPHDALAGPGIPRHARQINTLSHGEVVCAVTISNPTRHVYTGGKGCVKIWDISQPGSKSPISQLDCLNRDNYIRSCKLLPDGRTLIVGGEASTLTIWDLASPTPRIKAELTSSAPACYALAISPDAKVCFSCCSDGNIAVWDLHNQTLVRQFQGHTDGASCIDISHDGTKLWTGGLDNTVRSWDLREGRQLQQHDFTSQIFSLGYCPTGEWLAVGMESSNVEVLHHTKPDKYQLHLHESCVLSLKFAYCGKWFVSTGKDNLLNAWRTPYGASIFQSKESSSVLSCDISADDKYIVTGSGDKKATVYEVIY

SEQ ID NO: 23692 - protein, 555 aa, Homo sapiens
MELEKSGALLESGTYEDNYYGTPKPPAEPAPLLLNVTDQILPGATPSAEGKRKRNKSVSNMEKASIEPPEEEEEERPVVNGNGVVVTPESSEHEDKSAGASGEMPSQPYPAPVYSQPEELKEQMDDTKPTKPEDNEEPDPLPDNWEMAYTEKGEVYFIDHNTKTTSWLDPRLAKKAKPPEECKENELPYGWEKIDDPIYGTYYVDHINRRTQFENPVLEAKRKLQQHNMPHTELGTKPLQAPGFREKPLFTRDASQLKGTFLSTTLKKSNMGFGFTIIGGDEPDEFLQVKSVIPDGPAAQDGKMETGDVIVYINEVCVLGHTHADVVKLFQSVPIGQSVNLVLCRGYPLPFDPEDPANSMVPPLAIMERPPPVMVNGRHNYETYLEYISRTSQSVPDITDRPPHSLHSMPTDGQLDGTYPPPVHDDNVSMASSGATQAELMTLTIVKGAQGFGFTIADSPTGQRVKQILDIQGCPGLCEGDLIVEINQQNVQNLSHTEVVDILKDCPIGSETSLIIHRGGKTNTGSAIKYVGKIVGSFNNIVKMQISLELNEIIL

SEQ ID NO: 23693 - protein, 386 aa, Homo sapiens
MAAIPALDPEAEPSMDVILVGSSELSSSVSPGTGRDLIAYEVKANQRNIEDICICCGSLQVHTQHPLFEGGICAPCKDKFLDALFLYDDDGYQSYCSICCSGETLLICGNPDCTRCYCFECVDSLVGPGTSGKVHAMSNWVCYLCLPSSRSGLLQRRRKWRSQLKAFYDRESENPLEMFETVPVWRRQPVRVLSLFEDIKKELTSLGFLESGSDPGQLKHVVDVTDTVRKDVEEWGPFDLVYGATPPLGHTCDRPPSWYLFQFHRLLQYARPKPGSPRPFFWMFVDNLVLNKEDLDVASRFLEMEPVTIPDVHGGSLQNAVRVWSNIPAIRSRHWALVSEEELSLLAQNKQSSKLAAKWPTKLVKNCFLPLREYFKYFSTELTSSL

SEQ ID NO: 23694 - protein, 620 aa, Homo sapiens [sequence omitted]

SEQ ID NO: 23695 - protein, 754 aa, Homo sapiens
MVQKSRNGGVYPGPSGEKKLKVGFVGLDPGAPDSTRDGALLIAGSEAPKRGSILSKPRAGGAGAGKPPKRNAFYRKLQNFLYNVLERPRGWAFIYHAYVFLLVFSCLVLSVFSTIKEYEKSSEGALYILEIVTIVVFGVEYFVRIWAAGCCCRYRGWRGRLKFARKPFCVIDIMVLIASIAVLAAGSQGNVFATSALRSLRFLQILRMIRMDRRGGTWKLLGSVVYAHSKELVTAWYIGFLCLILASFLVYLAEKGENDHFDTYADALWWGLITLTTIGYGDKYPQTWNGRLLAATFTLIGVSFFALPAGILGSGFALKVQEQHRQKHFEKRRNPAAGLIQSAWRFYATNLSRTDLHSTWQYYERTVTVPMYRLIPPLNQLELLRNLKSKSGLAFRKDPPPEPSPSPRGVAAKGKGSPQAQTVRRSPSADQSLEDSPSKVPKSWSFGDRSRARQAFRIKGAASRQNSEEASLPGEDIVDDKSCPCEFVTEDLTPGLKVSIRAVCVMRFLVSKRKFKESLRPYDVMDVIEQYSAGHLDMLSRIKSLQSRIDMIVGPPPPSTPRHKKYPTKGPTAPPRESPQYSPRVDQIVGRGPAITDKDRTKGPAEAELPEDPSMMGRLGKVEKQVLSMEKKLDFLVNIYMQRMGIPPTETEAYFGAKEPEPAPPYHSPEDSREHVDRHGCIVKIVRSSSSTGQKNFSAPPAAPPVQCPPSTSWQPQSHPRQGHGTSPVGDHGSLGRAPETRAGQEGSHGGVSH

SEQ ID NO: 23696 - protein, 451 aa, Homo sapiens
MQDGHHSSDPWSSSSGMNQPGYAGMLGNSSHIPQSSSYCSLHPHERLSYPSHSSADINSSLPPMSTFHRSGTNHYSTSSCTPPANGTDSIMANRGSGAAGSSQTGDALGKALASIYSPDHTNNSFSSNPSTPVGSPPSLSAGTAVWSRNGGQASSSPNYEGPLHSLQSRIEDRLERLDDAIHVLRNHAVGPSTAMPGGHGDMHGIIGPSHNGAMGGLGSGYGTGLLSANRHSLMVGTHREDGVALRGSHSLLPNQVPVPQLPVQSATSPDLNPPQDPYRGMPPGLQGQSVSSGSSEIKSDDEGDENLQDTKSSEDKKLDDDKKDIKSITSNNDDEDLTPEQKAEREKERRMANNARERLRVRDINEAFKELGRMVQLHLKSDKPQTKLLILHQAVAVILSLEQQVRERNLNPKAACLKRREEEKVSSEPPPLSLAGPHPGMGDASNHMGQM

SEQ ID NO: 23697 - protein, 297 aa, Homo sapiens
MTEITAEGNASTTTTVIDSKNGSVPKSPGKVLKRTVTEDIVTTFSSPAAWLLVIALIITWSAVAIVMFDLVDYKNFSASSIAKIGSDPLKLVRDAMEETTDWIYGFFSLLSDIISSEDEEDDDGDEDTDKGEIDEPPLRKKEIHKDKTEKQEKPERKIQTKVTHKEKEKGKEKVREKEKPEKKATHKEKIEKKEKPETKTLAKEQKKAKTAEKSEEKTKKEVKGGKQEKVKQTAAKVKEVQKTPSKPKEKEDKEKAAVSKHEQKGQSPAIPPPLPTEQASRPTPASPALEGKYFFFS

SEQ ID NO: 23698 - protein, 982 aa, Homo sapiens
MAQFYYKRNVNAPYRDRIPLRIVRAESELSPSEKAYLNAVEKGDYASVKKSLEEAEIYFKININCIDPLGRTALLIAIENENLELIELLLSFNVYVGDALLHAIRKEVVGAVELLLNHKKPSGEKQVPPILLDKQFSEFTPDITPIILAAHTNNYEIIKLLVQKGVSVPRPHEVRCNCVECVSSSDVDSLRHSRSRLNIYKALASPSLIALSSEDPFLTAFQLSWELQELSKVENEFKSEYEELSRQCKQFAKDLLDQTRSSRELEIILNYRDDNSLIEEQSGNDLARLKLAIKYRQKEFVAQPNCQQLLASRWYDEFPGWRRRHWAVKMVTCFIIGLLFPVFSVCYLIAPKSPLGLFIRKPFIKFICHTASYLTFLFLLLLASQHIDRSDLNRQGPPPTIVEWMILPWVLGFIWGEIKQMWDGGLQDYIHDWWNLMDFVMNSLYLATISLKIVAFVKYSALNPRESWDMWHPTLVAEALFAIANIFSSLRLISLFTANSHLGPLQISLGRMLLDILKFLFIYCLVLLAFANGLNQLYFYYEETKGLTCKGIRCEKQNNAFSTLFETLQSLFWSIFGLINLYVTNVKAQHEFTEFVGATMFGTYNVISLVVLLNMLIAMMNNSYQLIADHADIEWKFARTKLWMSYFEEGGTLPTPFNVIPSPKSLWYLIKWIWTHLCKKKMRRKPESFGTIGVRTQHRRAADNLRRHHQYQEVMRNLVKRYVAAMIRDAKTEEGLTEENFKELKQDISSFRFEVLGLLRGSKLSTIQSANASKESSNSADSDEKSDSEGNSKDKKKNFSLFDLTTLIHPRSAAIASERHNISNGSALVVQEPPREKQRKVNFVTDIKNFGLFHRRSKQNAAEQNANQIFSVSEEVARQQAAGPLERNIQLESRGLASRGDLSIPGLSEQCVLVDHRERNTDTLGLQVGKRVCPFKSEKVVVEDTVPIIPKEKHAKEEDSSIDYDLNLPDTVTHEDYVTTRL

SEQ ID NO: 23699 - protein, 852 aa, Homo sapiens
MEYERRGGRGDRTGRYGATDRSQDDGGENRSRDHDYRDMDYRSYPREYGSQEGKHDYDDSSEEQSAEIRGQLQSHGVQAREVRLMRNKSSGQSRGFAFVEFSHLQDATRWMEANQHSLNILGQKVSMHYSDPKPKINEDWLCNKCGVQNFKRREKCFKCGVPKSEAEQKLPLGTRLDQQTLPLGGRELSQGLLPLPQPYQAQGVLASQALSQGSEPSSENANDTIILRNLNPHSTMDSILGALAPYAVLSSSNVRVIKDKQTQLNRGFAFIQLSTIEAAQLLQILQALHPPLTIDGKTINVEFAKGSKRDMASNEGSRISAASVASTAIAAAQWAISQASQGGEGTWATSEEPPVDYSYYQQDEGYGNSQGTESSLYAHGYLKGTKGPGITGTKGDPTGAGPEASLEPGADSVSMQAFSRAQPGAAPGIYQQSAEASSSQGTAANSQSYTIMSPAVLKSELQSPTHPSSALPPATSPTAQESYSQYPVPDVSTYQYDETSGYYYDPQTGLYYDPNSQYYYNAQSQQYLYWDGERRTYVPALEQSADGHKETGAPSKEGKEKKEKHKTKTAQQIAKDMERWARSLNKQKENFKNSFQPISSLRDDERRESATADAGYAILEKKGALAERQHTSMDLPKLASDDRPSPPRGLVAAYSGESDSEEEQERGGPEREEKLTDWQKLACLLCRRQFPSKEALIRHQQLSGLHKQNLEIHRRAHLSENELEALEKNDMEQMKYRDRAAERREKYGIPEPPEPKRRKYGGISTASVDFEQPTRDGLGSDNIGSRMLQAMGWKEGSGLGRKKQGIVTPIEAQTRVRGSGLGARGSSYGVTSTESYKETLHKTMVTRFNEAQ

SEQ ID NO: 23700 - protein, 1320 aa, Homo sapiens
MANDSPAKSLVDIDLSSLRDPAGIFELVEVVGNGTYGQVYKGRHVKTGQLAAIKVMDVTEDEEEEIKLEINMLKKYSHHRNIATYYGAFIKKSPPGHDDQLWLVMEFCGAGSITDLVKNTKGNTLKEDWIAYISREILRGLAHLHIHHVIHRDIKGQNVLLTENAEVKLVDFGVSAQLDRTVGRRNTFIGTPYWMAPEVIACDENPDATYDYRSDLWSCGITAIEMAEGAPPLCDMHPMRALFLIPRNPPPRLKSKKWSKKFFSFIEGCLVKNYMQRPSTEQLLKHPFIRDQPNERQVRIQLKDHIDRTRKKRGEKDETEYEYSGSEEEEEEVPEQEGEPSSIVNVPGESTLRRDFLRLQQENKERSEALRRQQLLQEQQLREQEEYKRQLLAERQKRIEQQKEQRRRLEEQQRREREARRQQEREQRRREQEEKRRLEELERRRKEEEERRRAEEEKRRVEREQEYIRRQLEEEQRHLEVLQQQLLQEQAMLLECRWREMEEHRQAERLQRQLQQEQAYLLSLQHDHRRPHPQHSQQPPPPQQERSKPSFHAPEPKAHYEPADRAREVEDRFRKTNHSSPEAQSKQTGRVLEPPVPSRSESFSNGNSESVHPALQRPAEPQVQWSHLASLKNNVSPVSRSHSFSDPSPKFAHHHLRSQDPCPPSRSEVLSQSSDSKSEAPDPTQKAWSRSDSDEVPPRVPVRTTSRSPVLSRRDSPLQGSGQQNSQAGQRNSTSSIEPRLLWERVEKLVPRPGSGSSSGSSNSGSQPGSHPGSQSGSGERFRVRSSSKSEGSPSQRLENAVKKPEDKKEVFRPLKPAVRIDLTALAKELRAVEDVRPPHKVTDYSSSSEESGTTDEEDDDVEQEGADESTSGPEDTRAASSLNLSNGETESVKTMIVHDDVESEPAMTPSKEGTLIVRQTQSASSTLQKHKSSSSFTPFIDPRLLQISPSSGTTVTSVVGFSCDGMRPEAIRQDPTRKGSVVNVNPTNTRPQSDTPEIRKYKKRFNSEILCAALWGVNLLVGTESGLMLLDRSGQGKVYPLINRRRFQQMDVLEGLNVLVTISGKKDKLRVYYLSWLRNKILHNDPEVEKKQGWTTVGDLEGCVHYKVVKYERIKFLVIALKSSVEVYAWAPKPYHKFMAFKSFGELVHKPLLVDLTVEEGQRLKVIYGSCAGFHAVDVDSGSVYDIYLPTHIQCSIKPHAIIILPNTDGMELLVCYEDEGVYVNTYGRITKDVVLQWGEMPTSVAYIRSNQTMGWGEKAIEIRSVETGHLDGVFMHKRAQRLKFLCERNDKVFFASVRSGGSSQVYFMTLGRTSLLSW

SEQ ID NO: 23701 - protein, 733 aa, Homo sapiens
MGNGSVKPKHSKHPDGHSGNLTTDALRNKVTELERELRRKDAEIQEREYHLKELREQLSKQTVAIAELTEELQNKCIQLNKLQDVVHMQGGSPLQASPDKVPLEVHRKTSGLVSLHSRRGAKAGVSAEPTTRTYDLNKPPEFSFEKARVRKDSSEKKLITDALNKNQFLKRLDPQQIKDMVECMYGRNYQQGSYIIKQGEPGNHIFVLAEGRLEVFQGEKLLSSIPMWTTFGELAILYNCTRTASVKAITNVKTWALDREVFQNIMRRTAQARDEQYRNFLRSVSLLKNLPEDKLTKIIDCLEVEYYDKGDYIIREGEEGSTFFILAKGKVKVTQSTEGHDQPQLIKTLQKGEYFGEKALISDDVRSANIIAEENDVACLVIDRETFNQTVGTFEELQKYLEGYVANLNRDDEKRHAKRSMSNWKLSKALSLEMIQLKEKVKVKNENVAFAMKCIRKKHIVDTKQQEHVYSEKRILEELCSPFIVKLYRTFKDNKYVYMLLEACLGGELWSILRDRGSFDEPTSKFCVACVTEAFDYLHRLGIIYRDLKPENLILDAEGYLKLVDFGFAKKIGSGQKTWTFCGTPEYVAPEVILNKGHDFSVDFWSLGILVYELLTGNPPFSGVDQMMTYNLILKGIEKMDFPRKITRRPEDLIRRLCRQNPTERLGNLKNGINDIKKHRWLNGFNWEGLKARSLPSPLQRELKGPIDHSYFDKYPPEKGMPPDELSGWDKDF

SEQ ID NO: 23702 - protein, 1237 aa, Homo sapiens
MARAKLPRSPSEGKAGPGGAPAGAAAPEEPHGLSPLLPARGGGSVGSDVGQRLPVEDFSLDSSLSQVQVEFYVNENTFKERLKLFFIKNQRSSLRIRLFNFSLKLLTCLLYIVRVLLDDPALGIGCWGCPKQNYSFNDSSSEINWAPILWVERKMTLWAIQVIVAIISFLETMLLIYLSYKGNIWEQIFRVSFVLEMINTLPFIITIFWPPLRNLFIPVFLNCWLAKHALENMINDFHRAILRTQSAMFNQVLILFCTLLCLVFTGTCGIQHLERAGENLSLLTSFYFCIVTFSTVGYGDVTPKIWPSQLLVVIMICVALVVLPLQFEELVYLWMERQKSGGNYSRHRAQTEKHVVLCVSSLKIDLLMDFLNEFYAHPRLQDYYVVILCPTEMDVQVRRVLQIPLWSQRVIYLQGSALKDQDLMRAKMDNGEACFILSSRNEVDRTAADHQTILRAWAVKDFAPNCPLYVQILKPENKFHVKFADHVVCEEECKYAMLALNCICPATSTLITLLVHTSRGQEGQESPEQWQRMYGRCSGNEVYHIRMGDSKFFREYEGKSFTYAAFHAHKKYGVCLIGLKREDNKSILLNPGPRHILAASDTCFYINITKEENSAFIFKQEEKRKKRAFSGQGLHEGPARLPVHSIIASMGTVAMDLQGTEHRPTQSGGGGGGSKLALPTENGSGSRRPSIAPVLELADSSALLPCDLLSDQSEDEVTPSDDEGLSVVEYVKGYPPNSPYIGSSPTLCHLLPVKAPFCCLRLDKGCKHNSYEDAKAYGFKNKLIIVSAETAGNGLYNFIVPLRAYYRSRKELNPIVLLLDNKPDHHFLEAICCFPMVYYMEGSVDNLDSLLQCGIIYADNLVVVDKESTMSAEEDYMADAKTIVNVQTMFRLFPSLSITTELTHPSNMRFMQFRAKDSYSLALSKLEKRERENGSNLAFMFRLPFAAGRVFSISMLDTLLYQSFVKDYMITITRLLLGLDTTPGSGYLCAMKITEGDLWIRTYGRLFQKLCSSSAEIPIGIYRTESHVFSTSEPHDLRAQSQISVNVEDCEDTREVKGPWGSRAGTGGSSQGRHTGGGDPAEHPLLRRKSLQWARRLSRKAPKQAGRAAAAEWISQQRLSLYRRSERQELSELVKNRMKHLGLPTTGYEDVANLTASDVMNRVNLGYLQDEMNDHQNTLSYVLINPPPDTRLEPSDIVYLIRSDPLAHVASSSQSRKSSCSHKLSSCNPETRDETQL

SEQ ID NO: 23703 - protein, 1120 aa, Homo sapiens
MELEKSGALLESGTYEDNYYGTPKPPAEPAPLLLNVTDQILPGATPSAEGKRKRNKSVSNMEKASIEPPEEEEEERPVVNGNGVVVTPESSEHEDKSAGASGEMPSQPYPAPVYSQPEELKEQMDDTKPTKPEDNEEPDPLPDNWEMAYTEKGEVYFIDHNTKTTSWLDPRLAKKAKPPEECKENELPYGWEKIDDPIYGTYYVDHINRRTQFENPVLEAKRKLQQHNMPHTELGTKPLQAPGFREKPLFTRDASQLKGTFLSTTLKKSNMGFGFTIIGGDEPDEFLQVKSVIPDGPAAQDGKMETGDVIVYINEVCVLGHTHADVVKLFQSVPIGQSVNLVLCRGYPLPFDPEDPANSMVPPLAIMERPPPVMVNGRHNYETYLEYISRTSQSVPDITDRPPHSLHSMPTDGQLDGTYPPPVHDDNVSMASSGATQAELMTLTIVKGAQGFGFTIADSPTGQRVKQILDIQGCPGLCEGDLIVEINQQNVQNLSHTEVVDILKDCPIGSETSLIIHRGGFFSPWKTPKPIMDRWENQGSPQTSLSAPAIPQNLPFPPALHRSSFPDSTEAFDPRKPDPYELYEKSRAIYESRQQVPPRTSFRMDSSGPDYKELDVHLRRMESGFGFRILGGDEPGQPILIGAVIAMGSADRDGRLHPGDELVYVDGIPVAGKTHRYVIDLMHHAARNGQVNLTVRRKVLCGGEPCPENGRSPGSVSTHHSSPRSDYATYTNSNHAAPSSNASPPEGFASHSLQTSDVVIHRKENEGFGFVIISSLNRPESGSTITVPHKIGRIIDGSPADRCAKLKVGDRILAVNGQSIINMPHADIVKLIKDAGLSVTLRIIPQEELNSPTSAPSSEKQSPMAQQSPLAQQSPLAQPSPATPNSPIAQPAPPQPLQLQGHENSYRSEVKARQDVKPDIRQPPFTDYRQPPLDYRQPPGGDYQQPPPLDYRQPPLLDYRQHSPDTRQYPLSDYRQPQDFDYFTVDMEKGAKGFGFSIRGGREYKMDLYVLRLAEDGPAIRNGRMRVGDQIIEINGESTRDMTHARAIELIKSGGRRVRLLLKRGTGQVPEYGMVPSSLSMCMKSDKHGSPYFYLLGHPKDTTNPPPGVLPLPPPQVCRK

SEQ ID NO: 23704 - protein, 123 aa, Homo sapiens
MSTPARRRLMRDFKRLQEDPPAGVSGAPSENNIMVWNAVIFGPEGTPFEDGTFKLTIEFTEEYPNKPPTVRFVSKMFHPNVYADGSICLDILQNRWSPTYDVSSILTSIQILWVKSLYGIVNF

SEQ ID NO: 23705 - protein, 922 aa, Homo sapiens
MDKKSFEMVLDEIRKVVDLLRYFSWAEPQLKAMKALQHKMVAVQPTEVVNILNCFTFSKDKLVALELLASNIIDAQNSRPIEDLFRVNMSEKKRCKRILEQAFKGGCKAPHAMISSCGTIPGNPYPKGRPSRINGIFPGTPLKKDGEECTNEGKGIAARILGPSKPPPSTYNPHKPVPYPIPPCRPHATIAPSAYNNAGLVPLANVIAPPPPPYTPNPVGTENEDLSNPSKPIQNQTFSTPASQLFSPHGSNPSTPAATPVPTASPVKAINHPSASAAATVSGMNLLNTVLPVFPGQVSSAVHTPQPSIPNPTVIRTPSLPTAPVTSIHSTTTTPVPSIFSGLVSLPGPSATPTAATPTPGPTPRSTLGSSEAFASTSAPFTSLPFSTSSSAASTSNPNSASLSSVFAGLPLPLPPTSQGLSNPTPVIAGGSTPSVAGPLGVNSPLLSALKGFLTSNDTNLINSSALSSAVTSGLASLSSLTLQNSDSSASAPNKCYAPSAIPTPQRTSTPGLALFPGLPSPVANSTSTPLTLPVQSPLATAASASTSVPVSCGSSASLLRGPHPGTSDLHISSTPAATTLPVMIKTEPTSPTPSAFKGPSHSGNPSHGTLGLSGTLGRAYTSTSVPISLSACLNPALSGLSSLSTPLNGSNPLSSISLPPHGSSTPIAPVFTALPSFTSLTNNFPLTGNPSLNPSVSLPGSLIATSSTAATSTSLPHPSSTAAVLSGLSASAPVSAAPFPLNLSTAVPSLFSVTQGPLSSSNPSYPGFSVSNTPSVTPALPSFPGLQAPSTVAAVTPLPVAATAPSPAPVLPGFASAFSSNFNSALVAQAGLSSGLQAAGSSVFPGLLSLPGIPGFPQNPSQSSLQELQHNAAAQSALLQQVHSASALESYPAQPDGFPSYPSAPGTPFSLQPSLSQSGWQ

SEQ ID NO: 23706 - protein, 860 aa, Homo sapiens
MTSATSPIILKWDPKSLEIRTLTVERLLEPLVTQVTTLVNTSNKGPSGKKKGRSKKAHVLAASVEQATQNFLEKGEQIAKESQDLKEELVAAVEDVRKQGETMRIASSEFADDPCSSVKRGTMVRAARALLSAVTRLLILADMADVMRLLSHLKIVEEALEAVKNATNEQDLANRFKEFGKEMVKLNYVAARRQQELKDPHCRDEMAAARGALKKNATMLYTASQAFLRHPDVAATRANRDYVFKQVQEAIAGISNAAQATSPTDEAKGHTGIGELAAALNEFDNKIILDPMTFSEARFRPSLEERLESIISGAALMADSSCTRDDRRERIVAECNAVRQALQDLLSEYMNNTGRKEKGDPLNIAIDKMTKKTRDLRRQLRKAVMDHISDSFLETNVPLLVLIEAAKSGNEKEVKEYAQVFREHANKLVEVANLACSISNNEEGVKLVRMAATQIDSLCPQVINAALTLAARPQSKVAQDNMDVFKDQWEKQVRVLTEAVDDITSVDDFLSVSENHILEDVNKCVIALQEGDVDTLDRTAGAIRGRAARVIHIINAEMENYEAGVYTEKVLEATKLLSETVMPRFAEQVEVAIEALSANVPQPFEENEFIDASRLVYDGVRDIRKAVLMIRTPEELEDDSDFEQEDYDVRSRTSVQTEDDQLIAGQSARAIMAQLPQEEKAKIAEQVEIFHQEKSKLDAEVAKWDDSGNDIIVLAKQMCMIMMEMTDFTRGKGPLKNTSDVINAAKKIAEAGSRMDKLARAVADQLDSATSLIQAAKNLMNAVVLTVKASYVASTKYQKVYGTAAVNSPVVSWKMKAPEKKPLVKREKPEEFQTRVRRGSQKKHISPVQALSEFKAMDSF

SEQ ID NO: 23707 - protein, 168 aa, Homo sapiens
SNNFMGCLKEVVYKNNDVRLELSRLAKQGDPKMKIHGVVAFKCENVATLDPITFETPESFISLPKWNAKKTGSISFDFRTTEPNGLILFSHGKPRHQKDAKHPQMIKVDFFAIEMLDGHLYLLLDMGSGTIKIKALLKKVNDGEWYHVDFQRDGRSGQMAGDHTRLEF

SEQ ID NO: 23708 - protein, 822 aa, Homo sapiens
MPRHHAGGEEGGAAGLWVKSGAAAAAAGGGRLGSGMKDVESGRGRVLLNSAAARGDGLLLLGTRAATLGGGGGGLRESRRGKQGARMSLLGKPLSYTSSQSCRRNVKYRRVQNYLYNVLERPRGWAFIYHAFVFLLVFGCLILSVFSTIPEHTKLASSCLLILEFVMIVVFGLEFIIRIWSAGCCCRYRGWQGRLRFARKPFCVIDTIVLIASIAVVSAKTQGNIFATSALRSLRFLQILRMVRMDRRGGTWKLLGSVVYAHSKELITAWYIGFLVLIFSSFLVYLVEKDANKEFSTYADALWWGTITLTTIGYGDKTPLTWLGRLLSAGFALLGISFFALPAGILGSGFALKVQEQHRQKHFEKRRNPAANLIQCVWRSYAADEKSVSIATWKPHLKALHTCSPTKKEQGEASSRIMKFHVAKRKFKETLRPYDVKDVIEQYSAGHLDMLCRIKSLQTRVDQILGKGQITSDKKSREKITAEHETTDDLSMLGRVVKVEKQVQSIESKLDCLLDIYQQVLRKGSASALALASFQIPPFECEQTSDYQSPVDSKDLSGSAQNSGCLSRSTSANISRGLQFILTPNEFSAQTFYALSPTMHSQATQVPISQSDGSAVAATNTIANQINTAPKPAAPTTLQIPPPLPAIKHLPRPETLHPNPAGLQESISDVTTCLVASKENVQVAQSNLTKDRSMRKSFDMGGETLLSVCPMVPKDLGKSLSVQNLIRSTEELNIQLSGSESSGSRGSQDFYPKWRESKLFITDEEVGPEETETDTFDAAPQPAREAAFASDSLRTGRSRSSQSICKAGESTDALSLPHVKLK

SEQ ID NO: 23709 - protein, 645 aa, Homo sapiens
MVQKSRNGGVYPGPSGEKKLKVGFVGLDPGAPDSTRDGALLIAGSEAPKRGSILSKPRAGGAGAGKPPKRNAFYRKLQNFLYNVLERPRGWAFIYHAYVFLLVFSCLVLSVFSTIKEYEKSSEGALYILEIVTIVVFGVEYFVRIWAAGCCCRYRGWRGRLKFARKPFCVIDIMVLIASIAVLAAGSQGNVFATSALRSLRFLQILRMIRMDRRGGTWKLLGSVVYAHSKELVTAWYIGFLCLILASFLVYLAEKGENDHFDTYADALWWGLITLTTIGYGDKYPQTWNGRLLAATFTLIGVSFFALPAGILGSGFALKVQEQHRQKHFEKRRNPAAGLIQSAWRFYATNLSRTDLHSTWQYYERTVTVPMYRLIPPLNQLELLRNLKSKSGLAFRKDPPPEPSPSQKVSLKDRVFSSPRGVAAKGKGSPQAQTVRRSPSADQSLEDSPSKVPKSWSFGDRSRARQAFRIKGAASRQNSEEASLPGEDIVDDKSCPCEFVTEDLTPGLKVSIRAVCVMRFLVSKRKFKESLRPYDVMDVIEQYSAGHLDMLSRIKSLQSRDGLQRHAQGRRGLTEGSRTEAPRAGGPAGRHPSARDPHGPRVPAMPAPHAIAVCHPLAVTVAAASPFAPLPLAVCTFVHAPKNIS

SEQ ID NO: 23710 - protein, 3374 aa, Homo sapiens
MSPESGHSRIFEATAGPNKPESGFAEDSAARGEGVSDLHEVVSLKERMARYQAAVSRGDCRSFSANMMEESEMCAVPGGLAKVKKQFEDEITSSRNTFAQYQYQHQNRSEQEAIHSSQVGTSRSSQEMARNEQEGSKVQKIDVHGTEMVSHLEKHTEEVNQASQFHQYVQETVIDTPEDEEIPKVSTKLLKEQFEKSAQEKILYSDKEMTTPAKQIKTESEYEETFKPSSVVSTSSTSCVSTSQRKETSTTRYSDHSVTSSTLAQINATSSGMTEEFPPPPPDVLQTSVDVTAFSQSPELPSPPRRLPVPKDVYSKQRNLYELNRLYKHIHPELRKNLEKDYISEVSEIVSSQMNSGSSVSADVQQARYVFENTNDSSQKDLNSEREYLEWDEILKGEVQSIRWIFENQPLDSINNGSPDEGDISRGIADQEIIAGGDVKYTTWMFETQPIDTLGAYSSDTVENAEKIPELARGDVCTARWMFETRPLDSMNKMHQSQEESAVTISKDITGGDVKTVRYMFETQHLDQLGQLHSVDEVHLLQLRSELKEIKGNVKRSIKCFETQPLYVIRDGSGQMLEIKTVHREDVEKGDVRTARWMFETQPLDTINKDITEIKVVRGISMEENVKGGVSKAKWLFETQPLEKIKESEEVIIEKEKIIGTDVSRKCWMFETQPLDILKEVPDADSLQREEIIGGDVQTTKHLFETLPIEALKDSPDIGKLQKITASEEEKGDVRHQKWIFETQPLEDIRKDKKEYTRTVKLEEVDRGDVKNYTHIFESNNLIKFDASHKIEVEGVTRGAVELNKSLFETTPLYAIQDPLGKYHQVKTVQQEEIVRGDVRSCRWLFETRPIDQFDESIHKFQIIRGISAQEIQTGNVKSAKWLFETQPLDSIKYFSDVEETESKTEQTRDIVKGDVKTCKWLFETQPMESLYEKVSLMTSSEEIHKGDVKTCTWLFETQPLDTIKDDSETAVKLQTVKQEEIQGGDVRTACFLFETENLDSIQGEEVKEIKPVEMDIQAGDVSSMRYKFENQSLDSISSSSEEVLKKIKTLKTEDIQKGNVLNCRWLFENQPIDKIKESQEGDECVKTVTDIQGGDVRKGCFIFETFSLDEIKEESDYISTKKTITEEVIQGDVKSYRMLFETQPLYAIQDREGSYHEVTTVKKEEVIHGDVRGTRWLFETKPLDSINKSETVYVIKSVTQEDIQKGDVSSVRYRFETQPLDQISEESHNIMPSIDHIQGGNVKTSRQFFESENFDKNNYIRTVSVNEIQKGNVKTSTWLFETHTMDELRGEGLEYENIKTVTQEDVQKGDVKQAVWLFENRTFDSIMEAHKGITKMTKEEIPPSDVKTTTWLFETTPLHEFNETRVEKIEIIGKSIKETLEDLYSQKVIQAPGIIIEADEIGDVRMAKYKLMNQASPEIQKEEIIRADLRNIMVNLLSKRDCTEREILISEEEKGNVNLTKTQLLNRSTEFHAEKEEIVKGDVQQAIKNLFSEERSVKKGILIQEDEKGDINMTIYCLLHENDGDTIEREEVIGGDVKRTIHNLLSSTSNNKISERAKIDASERGNVQFFTTCIEAGALDYLKQLHTESNETLTAKKQEGEKEIIGGDVEGTKLLLKKRQSLVERTVSETDIIPGDVHNTVKVFMTEPQSTFGKIPKEEIIKGDLTSTLNSLSQAVNQKTVTKTEEIIKGNMLATLKSLKESSHRWKESKQPDAIPGDIEKAIECLEKATNTKTEILKKELLKDDLETSLRSLKEAQRSFKEVHKEGVIKKDAKAVMAGSSGEQKTDIHQVAVQRNKNSLLQPKPGPFEPAAKWQGGADTLSQTMGKSCHGNLVEERTEVNLPKAPKGTVKIVIDREQNNDALEKSLRRLSNSHHKSNVLESGDKTGVWTDTTGEQHLRDEYMSRQLTSTVSVKNNLTTKESDRAVRELKKDDVFNSIQSAGKTVGKQQTYELRNDHQKMEGFHIKSPKKTKNIKILTDTQSSKPSPTQHPVSMPVGGTYDLSGDFQKQTLLKQETKYSNKDIKKKNINLQPMWQLLPVEQDTSNVTEMKVSEKSHNTFKATNKKRETDVHLKSQDFLMKTNTSTGLKMAMERSLNPINFNPENNVKESECPLPPPSPPPPPPSNASSEIEFPLPPPPPLMMFPEKNGFLPSLSTEKIKAEFESFPGLPLPPPPVDEKSERESSSMFLPPPPPPTPSQKPAHLLSSSAPEKHSGDFMQQYSQKEASNSQNSQAKIITGKTGVLPPPTLPKPKLPKHIKDNKNDFSPKVELATSLSDMECKITTSKDQKKVMVMTSSEHTETKQNVISKSLDERKQLSIDSANCLSHTVPGTSAPRKKQIAPLIKSHSFPESSGQQNPKPYMRKFKTPLMIAEEKYRQQKEEIEKQKQESSYYNIVKTQSQNQHITEVEKEMPLQKTNEEVSLSGIDSECTVVQPSPGSQSNARILGVCSDNQLSTTSPETVAAKRLHHVLAASEDKDKMKKEVLQSSRDIMQSKSACEIKQSHQECSTQQTQQKKYLEQLHLPQSKPISPNFKVKTIKLPTLDHTLNETDHSYESHKQQSEIDVQTFTKKQYLKTKKTEASTECSHKQSLAERHYQLPKKEKRVTVQLPTESIQKNQEDKLKMVPRKQREFSGSDRGKLPGSEEKNQGPSMIGRKEERLITERKHEHLKNKSAPKVVKQKVIDAHLDSQTQNFQQTQIQTAESKAEHKKLPQPYNSLQEEKCLEVKGIQEKQVFSNTKDSKQEITQNKSFFSSVKESQRDDGKGALNIVEFLRKREELQQILSRVKQFEAEPNKSGLKTFQTLLNTIPGWLISEDKREYAVHIAMENNLEKVKEEITHIKTQAEDMLVSYENIIQTAMMSSKTGKPGNKPTSLDETSSKVSNVHVSNNKNSEQKENKIAKEKTVQHQVAAHHEATVRSHVKTHQEIKLDDSNIPPPSLKTRPPSPTFITIESTARRTENPTKNELSQSPKKDSYVEPPPRRPMSQKSEIHRANTSPSPPRSRSEQLVRLKDTTAKLSKGAIPCPAATPVPIVEKRSEIIMSPATLRRQIKIETRGRDSPPTITIPVNINHAASGSFRESVDAQEEIRKVEKRATYVHKDGLNSTDHMVPDTESYDAVEIIRKVAVPPRLSEHTQRYEAANRTVQMAENFVNDPENEINRWFREFEHGPVSEAKSNRRVYAKGETNHNIQQESRTFCKEEFGLTSLGNTSFTDFSCKHPRELREKIPVKQPRICSETRSLSEHFSGMDAFESQIVESKMKTSSSHSSEAGKSGCDFKHAPPTYEDVIAGHILDISDSPKEVRKNFQKTWQESGRVFKGLGYATADASATEMRTTFQEESAFISEAAAPRQGNMYTLSKDSLSNGVPSGRQAEFS

SEQ ID NO: 23711 - protein, 436 aa, Homo sapiens
MQPPPSLCGRALVALVLACGLSRIWGEERGFPPDRATPLLQTAEIMTPPTKTLWPKGSNASLARSLAPAEVPKGDRTAGSPPRTISPPPCQGPIEIKETFKYINTVVSCLVFVLGIIGNSTLLRIIYKNKCMRNGPNILIASLALGDLLHIVIDIPINVYKLLAEDWPFGAEMCKLVPFIQKASVGITVLSLCALSIDRYRAVASWSRIKGIGVPKWTAVEIVLIWVVSVVLAVPEAIGFDIITMDYKGSYLRICLLHPVQKTAFMQFYKTAKDWWLFSFYFCLPLAITAFFYTLMTCEMLRKKSGMQIALNDHLKQRREVAKTVFCLVLVFALCWLPLHLSRILKLTLYNQNDPNRCELLSFLLVLDYIGINMASLNSCINPIALYLVSKRFKNCFKAGPHVGNKLVMLFSVNIECDGTVNQNPTMWPERKSNNN

SEQ ID NO: 23712 - protein, 909 aa, Homo sapiens
NPLIAGISNVLNTPSSAAFPTASAGSSSVKSQPGLLGMPLNQILNQHNAASFPASSLLSAAAKAQLANQNKLAGNNSSSSSNSGAVAGSGNTEGHSTLNTMFPPTANMLLPTGEGQSGRAALRDKLMSQQKDALRKRKQPPTTVLSLLRQSQMDSSAVPKPGPDLLRKQGQGSFPISSMSQLLQSMSCQSSHLSSNSTPGCGASNTALPCSANQLHFTDPSMNSSVLQNIPLRGEAVHCHNANTNFVHSNSPVPNHHLAGLINQIQASGNCGMLSQSGMALGNSLHPNPPQSRISTSSTPVIPNSIVSSYNQTSSEAGGSGPSSSIAIAGTNHPAITKTTSVLQDGVIVTTAAGNPLQSQLPIGSDFPFVGQEHALHFPSNSTSNNHLPHPLNPSLLSSLPISLPVNQQHLLNQNLLNILQPSAGEGDMSSINNTLSNHQLTHLQSLLNNNQMFPPNQQQQQLLQGYQNLQAFQGQSTIPCPANNNPMACLFQNFQVRMQEDAALLNKRISTQPGLTALPENPNTTLPPFQDTPCELQPRIDPSLGQQVKDGLVVGGPGDASVDAIYKAVVDAASKGMQVVITTAVNSTTQISPIPALSAMSAFTASIGDPLNLSSAVSAVIHGRNMGGVDHDGRLRNSRGARLPKNLDHGKNVNEGDGFEYFKSASCHTSKKQWDGEQSPRGERNRWKYEEFLDHPGHIHSSPCHERPNNVSTLPFLPGEQHPILLPPRNCPGDKILEENFRYNNYKRTMMSFKERLENTVERCAHINGNRPRQSRGFGELLSTAKQDLVLEEQSPSSSNSLENSLVKDYIHYNGDFNAKSVNGCVPSPSDAKSISSEDDLRNPDSPSSNELIHYRPRTFNVGDLVWGQIKGLTSWPGKLVREDDVHNSCQQSPEEGKVYQSLSIVKY

SEQ ID NO: 23713 - protein, 202 aa, Homo sapiens
MFSPPVSSGKNGPTSLASGHFTGSSKTERGSYSSYGRESNLQGCHQQSLLGGDMDMGNPGTLSPTKPGSQYYQYSSNNPRRRPLHSSAMEVQTKKVRKVPPGLPSSVYAPSASTADYNRDSPGYPSSKPATSTFPSSFFMQDGHHSSDPWSSSSGMNQPGYAGMLGNSSHIPQSSSYCSLHPHERLSYPSHSSADINSSLPP

SEQ ID NO: 23714 - protein, 2946 aa, Homo sapiens [sequence omitted]

SEQ ID NO: 23715 - protein, 467 aa, Homo sapiens
SGSDHVMLKSLDWNAEYEVYVVAENQQGKSKAAHFVFRTSAQPTAIPANGSPTSGLSTGAIVGILIVIFVLLLVVVDITCYFLNKCGLFMCIAVNLCGKAGPGAKGKDMEEGKAAFSKDESKEPIVEVRTEEERTPNHDGGKHTEPNETTPLTEPELPADTTATVEDMLPSVTTVTTNSDTITETFATAQNSPTSETTTLTSSIAPPATATPDSNSVPAGQATPSKGPSASAPSPAPASAPKVAPLVDLSDTPTSTPAASNLSSSVLANQGAVLSPSAPAGVGEASKAPPASKPTPAPVPTPTGAASPLAAAAAPATEAPQAKQEAPSTKGPDPEPTQPGAAKSPAEAATALASPKSEAASVSTTNPSQGEDFKMDEGNFKTPDIDLAKDVFAALGSPAPAAGASGQAPELAPSTADSSVSPAPAKTEKGPVEAKPECQETETKPAPAEVKTVPNDATQTKENESKA

SEQ ID NO: 23716 - protein, 5596 aa, Homo sapiens; identical to SEQ ID NO: 8778

SEQ ID NO: 23717 - protein, 471 aa, Homo sapiens
MPSETHAMLATLARVAALRRTCLFSGRGGGRGLWTGRPQSDMNNIKPLEGVKILDLTRVLAGPFATMNLGDLGAEVIKVERPGAGDDTRTWGPPFVGTESTYYLSVNRNKKSIAVNIKDPKGVKIIKELAAVCDVFVENYVPGKLSAMGLGYEDIDEIAPHIIYCSITGYGQTGPISQRAGYDAVASAVSGLMHITGPENGDPVRPGVAMTDLATGLYAYGAIMAGLIQKYKTGKGLFIDCNLLSSQVACLSHIAANYLIGQKEAKRWGTAHGSIVPYQAFKTKDGYIVVGAGNNQQFATVCKILDLPELIDNSKYKTNHLRVHNRKELIKILSERFEEELTSKWLYLFEGSGVPYGPINNMKNVFAEPQNAVSGFQSLLHSLAHGPFLHLQGSARVLHNGLVMEMEHPTVGKISVPGPAVRYSKFKMSEARPPPLLGQHTTHILKEVLRYDDRAIGELLSAGVVDQHETH

SEQ ID NO: 23718 - protein, 279 aa, Homo sapiens
MERPSLRALLLGAAGLLLLLLPLSSSSSSDTCGPCEPASCPPLPPLGCLLGETRDACGCCPMCARGEGEPCGGGGAGRGYCAPGMECVKSRKRRKGKAGAAAGGPGVSGVCVCKSRYPVCGSDGTTYPSGCQLRAASQRAESRGEKAITQVSKGTCEQGPSIVTPPKDIWNVTGAQVYLSCEVIGIPTPVLIWNKVKRGHYGVQRTELLPGDRDNLAIQTRGGPEKHEVTGWVLVSPLSKEDAGEYECHASNSQGQASASAKITVVDALHEIPVKKGTQ

SEQ ID NO: 23719 - protein, 960 aa, Homo sapiens
MITVVYGPDLVNISHLNLVAFQEEVAKEWTNEVFSLATNLLAQNMSRDAFLEKAYTKLKLQVTPEGRIPLKNIYRLFSADRKRVETALEACSLPSSRNDSIPQEDFTPEVYRVFLNNLCPRPEIDNIFSEFGAKSKPYLTVDQMMDFINLKQRDPRLNEILYPPLKQEQVQVLIEKYEPNNSLARKGQISVDGFMRYLSGEENGVVSPEKLDLNEDMSQPLSHYFINSSHNTYLTAGQLAGNSSVEMYRQVLLSGCRCVELDCWKGRTAEEEPVITHGFTMTTEISFKEVIEAIAECAFKTSPFPILLSFENHVDSPKQQAKMAEYCRLIFGDALLMEPLEKYPLESGVPLPSPMDLMYKILVKNKKKSHKSSEGSGKKKLSEQASNTYSDSSSMFEPSSPGAGEADTESDDDDDDDDCKKSSMDEGTAGSEAMATEEMSNLVNYIQPVKFESFEISKKRNKSFEMSSFVETKGLEQLTKSPVEFVEYNKMQLSRIYPKGTRVDSSNYMPQLFWNAGCQMVALNFQTMDLAMQINMGMYEYNGKSGYRLKPEFMRRPDKHFDPFTEGIVDGIVANTLSVKIISGQFLSDKKVGTYVEVDMFGLPVDTRRKAFKTKTSQGNAVNPVWEEEPIVFKKVVLPTLACLRIAVYEEGGKFIGHRILPVQAIRPGYHYICLRNERNQPLTLPAVFVYIEVKDYVPDTYADVIEALSNPIRYVNLMEQRAKQLAALTLEDEEEVKKEADPGETPSEAPSEARTTPAENGVNHTTTLTPKPPSQALHSQPAPGSVKAPAKTEDLIQSVLTEVEAQTIEELKQQKSFVKLQKKHYKEMKDLVKRHHKKTTDLIKEHTTKYNEIQNDYLRRRAALEKSAKKDSKKKSEPSSPDHGSSTIEQDLAALDAEMTQKLIDLKDKQQQQLLNLRQEQYYSEKYQKREHIKLLIQKLTDVAEECQNNQLKKLKEIC

SEQ ID NO: 23720 - protein, 733 aa, Homo sapiens
MSHVAVENALGLDQQFAGLDLNSSDNQSGGSTASKGRYIPPHLRNREATKGFYDKDSSGWSSSKDKDAYSSFGSRSDSRGKSSFFSDRGSGSRGRFDDRGRSDYDGIGSRGDRSGFGKFERGGNSRWCDKSDEDDWSKPLPPSERLEQELFSGGNTGINFEKYDDIPVEATGNNCPPHIESFSDVEMGEIIMGNIELTRYTRPTPVQKHAIPIIKEKRDLMACAQTGSGKTAAFLLPILSQIYSDGPGEALRAMKENGRYGRRKQYPISLVLAPTRELAVQIYEEARKFSYRSRVRPCVVYGGADIGQQIRDLERGCHLLVATPGRLVDMMERGKIGLDFCKYLVLDEADRMLDMGFEPQIRRIVEQDTMPPKGVRHTMMFSATFPKEIQMLARDFLDEYIFLAVGRVGSTSENITQKVVWVEESDKRSFLLDLLNATGKDSLTLVFVETKKGADSLEDFLYHEGYACTSIHGDRSQRDREEALHQFRSGKSPILVATAVAARGLDISNVKHVINFDLPSDIEEYVHRIGRTGRVGNLGLATSFFNERNINITKDLLDLLVEAKQEVPSWLENMAYEHHYKGSSRGRSKSSRFSGGFGARDYRQSSGASSSSFSSSRASSSRSGGGGHGSSRGFGGGSSRSQEEMKGTISSPVQKDHAPLWSKCLHEMPYFVKKVHAGIFRSPACSHGSLRYLRPTNPPDEDNHNSCRHESNLERDAQKCVNWSVTTKMRTAC

SEQ ID NO: 23721 - protein, 2457 aa, Homo sapiens
MDPSGVKVLETAEDIQERRQQVLDRYHRFKELSTLRRQKLEDSYRFQFFQRDAEELEKWIQEKLQIASDENYKDPTNLQGKLQKHQAFEAEVQANSGAIVKLDETGNLMISEGHFASETIRTRLMELHRQWELLLEKMREKGIKLLQAQKLVQYLRECEDVMDWINDKEAIVTSEELGQDLEHVEVLQKKFEEFQTDMAAHEERVNEVNQFAAKLIQEQHPEEELIKTKQDEVNAAWQRLKGLALQRQGKLFGAAEVQRFNRDVDETISWIKEKEQLMASDDFGRDLASVQALLRKHEGLERDLAALEDKVKALCAEADRLQQSHPLSATQIQVKREELITNWEQIRTLAAERHARLNDSYRLQRFLADFRDLTSWVTEMKALINADELASDVAGAEALLDRHQEHKGEIDAHEDSFKSADESGQALLAAGHYASDEVREKLTVLSEERAALLELWELRRQQYEQCMDLQLFYRDTEQVDNWMSKQEAFLLNEDLGDSLDSVEALLKKHEDFEKSLSAQEEKITALDEFATKLIQNNHYAMEDVATRRDALLSRRNALHERAMRRRAQLADSFHLQQFFRDSDELKSWVNEKMKTATDEAYKDPSNLQGKVQKHQAFEAELSANQSRIDALEKAGQKLIDVNHYAKDEVAARMNEVISLWKKLLEATELKGIKLREANQQQQFNRNVEDIELWLYEVEGHLASDDYGKDLTNVQNLQKKHALLEADVAAHQDRIDGITIQARQFQDAGHFDAENIKKKQEALVARYEALKEPMVARKQKLADSLRLQQLFRDVEDEETWIREKEPIAASTNRGKDLIGVQNLLKKHQALQAEIAGHEPRIKAVTQKGNAMVEEGHFAAEDVKAKLHELNQKWEALKAKASQRRQDLEDSLQAQQYFADANEAESWMREKEPIVGSTDYGKDEDSAEALLKKHEALMSDLSAYGSSIQALREQAQSCRQQVAPTDDETGKELVLALYDYQEKSPREVTMKKGDILTLLNSTNKDWWKVEVNDRQGFVPAAYVKKLDPAQSASRENLLEEQGSIALRQEQIDNQYHSLLELGEKRKGMLEKSCKKFMLFREANELQQWINEKEAALTSEEVGADLEQVEVLQKKFDDFQKDLKANESRLKDINKVAEDLESEGLMAEEVQAVQQQEVYGMMPRDETDSKTASPWKSARLMVHTVATFNSIKELNERWRSLQQLAEERSQLLGSAHEVQRFHRDADETKEWIEEKNQALNTDNYGHDLASVQALQRKHEGFERDLAALGDKVNSLGETAERLIQSHPESAEDLQEKCTELNQAWSSLGKRADQRKAKLGDSHDLQRFLSDFRDLMSWINGIRGLVSSDELAKDVTGAEALLERHQEHRTEIDARAGTFQAFEQFGQQLLAHGHYASPEIKQKLDILDQERADLEKAWVQRRMMLDQCLELQLFHRDCEQAENWMAAREAFLNTEDKGDSLDSVEALIKKHEDFDKAINVQEEKIAALQAFADQLIAAGHYAKGDISSRRNEVLDRWRRLKAQMIEKRSKLGESQTLQQFSRDVDEIEAWISEKLQTASDESYKDPTNIQLSKLLSKHQKHQAFEAELHANADRIRGVIDMGNSLIERGACAGSEDAVKARLAALADQWQFLVQKSAEKSQKLKEANKQQNFNTGIKDFDFWLSEVEALLASEDYGKDLASVNNLLKKHQLLEADISAHEDRLKDLNSQADSLMTSSAFDTSQVKDKRDTINGRFQKIKSMAASRRAKLNESHRLHQFFRDMDDEESWIKEKKLLVGSEDYGRDLTGVQNLRKKHKRLEAELAAHEPAIQGVLDTGKKLSDDNTIGKEEIQQRLAQFVEHWKELKQLAAARGQRLEESLEYQQFVANVEEEEAWINEKMTLVASEDYGDTLAAIQGLLKKHEAFETDFTVHKDRVNDVCTNGQDLIKKNNHHEENISSKMKGLNGKVSDLEKAAAQRKAKLDENSAFLQFNWKADVVESWIGEKENSLKTDDYGRDLSSVQTLLTKQETFDAGLQAFQQEGIANITALKDQLLAAKHVQSKAIEARHASLMKRWSQLLANSAARKKKLLEAQSHFRKVEDLFLTFAKKASAFNSWFENAEEDLTDPVRCNSLEEIKALREAHDAFRSSLSSAQADFNQLAELDRQIKSFRVASNPYTWFTMEALEETWRNLQKIIKERELELQKEQRRQEENDKLRQEFAQHANAFHQWIQETRTYLLDGSCMVEESGTLESQLEATKRKHQEIRAMRSQLKKIEDLGAAMEEALILDNKYTEHSTVGLAQQWDQLDQLGMRMQHNLEQQIQARNTTGVTEEALKEFSMMFKHFDKDKSGRLNHQEFKSCLRSLGYDLPMVEEGEPDPEFEAILDTVDPNRDGHVSLQEYMAFMISRETENVKSSEEIESAFRALSSEGKPYVTKEELYQNLTREQADYCVSHMKPYVDGKGRELPTAFDYVEFTRSLFVN

SEQ ID NO: 23722 - protein, 474 aa, Homo sapiens
MSISSDEVNFLVYRYLQESGFSHSAFTFGIESHISQSNINGALVPPAALISIIQKGLQYVEAEVSINEDGTLFDGRPIESLSLIDAVMPDVVQTRQQAYRDKLAQQQAAAAAAAAAAASQQGSAKNGENTANGEENGAHTIANNHTDMMEVDGDVEIPPNKAVVLRGHESEVFICAWNPVSDLLASGSGDSTARIWNLSENSTSGSTQLVLRHCIREGGQDVPSNKDVTSLDWNSEGTLLATGSYDGFARIWTKDGNLASTLGQHKGPIFALKWNKKGNFILSAGVDKTTIIWDAHTGEAKQQFPFHSAPALDVDWQSNNTFASCSTDMCIHVCKLGQDRPIKTFQGHTNEVNAIKWDPTGNLLASCSDDMTLKIWSMKQDNCVHDLQAHNKEIYTIKWSPTGPGTNNPNANLMLASASFDSTVRLWDVDRGICIHTLTKHQEPVYSVAFSPDGRYLASGSFDKCVHIWNTQVL

SEQ ID NO: 23723 - protein, 602 aa, Homo sapiens
MSDKSDLKAELERKKQRLAQIREEKKRKEEERKKKEADMQQKKEPVQDDSDLDRKRRETEALLQSIGISPEPPLVPTPMSPSSKSVSTPSEAGSQDSGDLGPLTRRRLHKLGVSKVTQVDFLPREVVSYSKETQTPLATHQSEEDEEDEEMVESKVGQDSELENQDKKQEVKEAPPRELTEEEKQQILHSEEFLIFFDRTIRVIERALAEDSDIFFDYSGRELEEKDGDVQAGANLSFNRQFYDEHWSKHRVVTCMDWSLQYPELMVASYNNNEDAPHEPDGVALVWNMKFKKTTPEYVFHCQSSVMSVCFARFHPNLVVGGTYSGQIVLWDNRSHRRTPVQRTPLSAAAHTHPVYCVNVVGTQNAHNLITVSTDGKMCSWSLDMLSTPQESMELVYNKSKPVAVTGMAFPTGDVNNFVVGSEEGTVYTACRHGSKAGIGEVFEGHQGPVTGINCHMAVGPIDFSHLFVTSSFDWTVKLWTTKHNKPLYSFEDNADYVYDVMWSPVHPALFACVDGMGRLDLWNLNNDTEVPTASVAIEGASALNRVRWAQAGKEVAVGDSEGRIWVYDVGEGLAMLPGWSQNSWTQAILLCWPPKVLGLQT

SEQ ID NO: 23724 - protein, 851 aa, Homo sapiens
MNGGKECDGGDKEGGLPAIQVPVGWQRRVDQNGVLYVSPSGSLLSCLEQVKTYLLTDGTCKCGLECPLILPKVFNFDPGAAVKQRTAEDVKADEDVTKLCIHKRKIIAVATLHKSMEAPHPSLVLTSPGGGTNATPVVPSRAATPRSVRNKSHEGITNSVMPECKNPFKLMIGSSNAMGRLYVQELPGSQQQELHPVYPRQRLGSSEHGQKSPFRGSHGGLPSPASSGSQIYGDGSISPRTDPLGSPDVFTRSNPGFHGAPNSSPIHLNRTPLSPPSVMLHGSPVQSSCAMAGRTNIPLSPTLTTKSPVMKKPMCNFSTNMEIPRAMFHHKPPQGPPPPPPPSCALQKKPLTSEKDPLGILDPIPSKPVNQNPVIINPTSFHSNVHSQVPMMNVSMPPAVVPLPSNLPLPTVKPGHMNHGSHVQRVQHSASTSLSPSPVTSPVHMMGTGIGRIEASPQRSRSSSTSSDHGNFMMPPVGPQATSSGIKVPPRSPRSTIGSPRPSMPSSPSTKSDGHHQYKDIPNPLIAGISNVLNTPSSAAFPTASAGSSSVKSQPGLLGMPLNQILNQHNAASFPASSLLSAAAKAQLANQNKLAGNNSSSSSNSGAVAGSGNTEGHSTLNTMFPPTANMLLPTGEGQSGRAALRDKLMSQQKDALRKRKQPPTTVLSLLRQSQMDSSAVPKPGPDLLRKQGQGSFPISSMSQLLQSMSCQSSHLSSNSTPGCGASNTALPCSANQLHFTDPSMNSSVLQNIPLRGEAVHCHNANTNFVHSNSPVPNHHLAGLINQIQASGNCGMLSQSGMALGNSLHPNPPQSRISTSSTPVIPNSIVSSYNQTSSEAGMVLLEKSTQRY

SEQ ID NO: 23725 - protein, 1211 aa, Homo sapiens
MPLPDGARTPGGVCREARGGGYTNRTFEFDDGQCAPRVQVEFYVNENTFKERLKLFFIKNQRSSLRIRLFNFSLKLLTCLLYIVRVLLDDPALGIGCWGCPKQNYSFNDSSSEINWAPILWVERKMTLWAIQVIVAIISFLETMLLIYLSYKGNIWEQIFRVSFVLEMINTLPFIITIFWPPLRNLFIPVFLNCWLAKHALENMINDFHRAILRTQSAMFNQVLILFCTLLCLVFTGGCRTCGIQHLERAGENLSLLTSFYFCIVTFSTVGYGDVTPKIWPSQLLVVIMICVALVVLPLQFEELVYLWMERQKSGGNYSRHRAQTEKHVVLCVSSLKIDLLMDFLNEFYAHPRLQDYYVVILCPTEMDVQVRRVLQIPLWSQRVIYLQGSALKDQDLMRAKMDNGEACFILSSRNEVDRTAADHQTILRAWAVKDFAPNCPLYVQILKPENKFHVKFADHVVCEEECKYAMLALNCICPATSTLITLLVHTSRGQEGQESPEQWQRMYGRCSGNEVYHIRMGDSKFFREYEGKSFTYAAFHAHKKYGVCLIGLKREDNKSILLNPGPRHILAASDTCFYINITKEENSAFIFKQEEKRKKRAFSGQGLHEGPARLPVHSIIASMGTVAMDLQGTEHRPTQSGGGGGGSKLALPTENGSGSRRPSIAPVLELADSSALLPCDLLSDQSEDEVTPSDDEGLSVVEYVKGYPPNSPYIGSSPTLCHLLPVKAPFCCLRLDKGCKHNSYEDAKAYGFKNKLIIVSAETAGNGLYNFIVPLRAYYRSRKELNPIVLLLDNKPDHHFLEAICCFPMVYYMEGSVDNLDSLLQCGIIYADNLVVVDKESTMSAEEDYMADAKTIVNVQTMFRLFPSLSITTELTHPSNMRFMQFRAKDSYSLALSKLEKRERENGSNLAFMFRLPFAAGRVFSISMLDTLLYQSFVKDYMITITRLLLGLDTTPGSGYLCAMKITEGDLWIRTYGRLFQKLCSSSAEIPIGIYRTESHVFSTSEPHDLRAQSQISVNVEDCEDTREVKGPWGSRAGTGGSSQGRHTGGGDPAEHPLLRRKSLQWARRLSRKAPKQAGRAAAAEWISQQRLSLYRRSERQELSELVKNRMKHLGLPTTGYEDVANLTASDVMNRVNLGYLQDEMNDHQNTLSYVLINPPPDTRLEPSDIVYLIRSDPLAHVASSSQSRKSSCSHKLSSCNPETRDETQL

SEQ ID NO: 23726 - protein, 356 aa, Homo sapiens
FILVQADTPSSPSIDQVEPYSSTAQVQFDEPEATGGVPILKYKAEWRAVGEEVWHSKWYDAKEASMEGIVTIVGLKPETTYAVRLAALNGKGLGEISAASEFKTQPVREPSAPKLEGQMGEDGNSIKVNLIKQDDGGSPIRHYLVRYRALSSEWKPEIRLPSGSDHVMLKSLDWNAEYEVYVVAENQQGKSKAAHFVFRTSAQPTAIPANGSPTSGLSTGAIVGILIVIFVLLLVVVDITCYFLNKCGLFMCIAVNLCGKAGPGAKGKDMEEGKAAFSKDESKEPIVEVRTEEERTPNHDGGKHTEPNETTPLTEPEKGPVEAKPECQETETKPAPAEVKTVPNDATQTKENESKA

SEQ ID NO: 23727 - protein, 835 aa, Homo sapiens
MGNRGMEDLIPLVNRLQDAFSAIGQNADLDLPQIAVVGGQSAGKSSVLENFVGRDFLPRGSGIVTRRPLVLQLVNATTEYAEFLHCKGKKFTDFEEVRLEIEAETDRVTGTNKGISPVPINLRVYSPHVLNLTLVDLPGMTKVPVGDQPPDIEFQIRDMLMQFVTKENCLILAVSPANSDLANSDALKVAKEVDPQGQRTIGVITKLDLMDEGTDARDVLENKLLPLRRGYIGVVNRSQKDIDGKKDITAALAAERKFFLSHPSYRHLADRMGTPYLQKVLNQQLTNHIRDTLPGLRNKLQSQLLSIEKEVEEYKNFRPDDPARKTKALLQMVQQFAVDFEKRIEGSGDQIDTYELSGGARINRIFHERFPFELVKMEFDEKELRREISYAIKNIHGIRTGLFTPDLAFEATVKKQLQQYPRLREEMERIVTTHIREREGRTKEQVMLLIDIELAYMNTNHEDFIGFANAQQRSNQMNKKKTSGNQDEILVIRKGWLTINNIGIMKGGSKEYWFVLTAENLSWYKDDEEKEKKYMLSVDNLKLRDVEKGFMSSKHIFALFNTEQRNVYKDYRQLELACETQEEVDSWKASFLRAGVYPERVGDKEKASETEENGSDSFMHSMDPQLERQVETIRNLVDSYMAIVNKTVRDLMPKTIMHLMINNTKEFIFSELLANLYSCGDQNTLMEESAEQAQRRDEMLRMYHALKEALSIIGDINTTTVSTPMPPPVDDSWLQVQSVPAGRRSPTSSPTPQRRAPAVPPARPGSRGPAPGPPPAGSALGGAPPVPSRPGASPDPFGPPPQVPSRPNRAPPGVPSRSGQASPSRPESPRPPFDL

SEQ ID NO: 23728 - protein, 640 aa, Homo sapiens
MSHVAVENALGLDQQFAGLDLNSSDNQSGGSTASKGRYIPPHLRNREATKGFYDKDSSGWSSSKDKDAYSSFGSRSDSRGKSSFFSDRGSGSRGRFDDRGRSDYDGIGSRGDRSGFGKFERGGNSRWCDKSDEDDWSKPLPPSERLEQELFSGGNTGINFEKYDDIPVEATGNNCPPHIESFSDVEMGEIIMGNIELTRYTRPTPVQKHAIPIIKEKRDLMACAQTGSGKTAAFLLPILSQIYSDGPGEALRAMKENGRYGRRKQYPISLVLAPTRELAVQIYEEARKFSYRSRVRPCVVYGGADIGQQIRDLERGCHLLVATPGRLVDMMERGKIGLDFCKYLVLDEADRMLDMGFEPQIRRIVEQDTMPPKGVRHTMMFSATFPKEIQMLARDFLDEYIFLAVGRVGSTSENITQKVVWVEESDKRSFLLDLLNATGKDSLTLVFVETKKGADSLEDFLYHEGYACTSIHGDRSQRDREEALHQFRSGKSPILVATAVAARGLDISNVKHVINFDLPSDIEEYVHRIGRTGRVGNLGLATSFFNERNINITKDLLDLLVEAKQEVPSWLENMAYEHHYKGSSRGRSKSSRFSGGFGARDYRQSSGASSSSFSSSRASSSRSGGGGHGSSRGFGGELGA

SEQ ID NO: 23729 - protein, 392 aa, Homo sapiens [sequence omitted]

SEQ ID NO: 23730 - protein, 729 aa, Homo sapiens
MKIPRMKTPCQPDRNSLRQSRNPQKYFAMDIEDEENMSSSSTDVKENRNLDNVSPKDGSTPGPGEGSQLSNGGGGGPGRKRPLEEGSNGHSKYRLKKRRKTPGPVLPKNALMQLNEIKPGLQYTLLSQTGPVHAPLFVMSVEVNGQVFEGSGPTKKKAKLHAAEKALRSFVQFPNASEAHLAMGRTLSVNTDFTSDQADFPDTLFNGFETPDKAEPPFYVGSNGDDSFSSSGDLSLSASPVPASLAQPPLPVLPPFPPPSGKNPVMILNELRPGLKYDFLSESGESHAKSFVMSVVVDGQFFEGSGRNKKLAKARAAQSALAAIFNLHLDQTPSRQPIPSEGLQLHLPQVLADAVSRLVLGKFGDLTDNFSSPHARRKVLAGVVMTTGTDVKDAKVISVSTGTKCINGEYMSDRGLALNDCHAEIISRRSLLRFLYTQLELYLNNKDDQKRSIFQKSERGGFRLKENVQFHLYISTSPCGDARIFSPHEPILEEPADRHPNRKARGQLRTKIESGEGTIPVRSNASIQTWDGVLQGERLLTMSCSDKIARWNVVGIQGSLLSIFVEPIYFSSIILGSLYHGDHLSRAMYQRISNIEDLPPLYTLNKPLLSGISNAEARQPGKAPNFSVNWTVGDSAIEVINATTGKDELGRASRLCKHALYCRWMRVHGKVPSHLLRSKITKPNVYHESKLAAKEYQAAKARLFTAFIKAGLGAWVEKPTEQDQFSLTP

SEQ ID NO: 23731 - protein, 203 aa, Homo sapiens
MTPILTVLICLGLSLGPRTHVQAGHLPKPTLWAEPGSVIIQGSPVTLRCQGSLQAEEYHLYRENKSASWVRRIQEPGKNGQFPIPSITWEHAGRYHCQYYSHNHSSEHQAQQNQAEFRMGPVTSAHVGTYRCYSSLSSNPYLLSLPSDPLELVVSASLGQHPQDYTVENLIRMGVAGLVLVVLGILLFEAQHSQRSLQDAAGR

SEQ ID NO: 23732 - protein, 1201 aa, Homo sapiens
MSDLDSEVLPLPPRYRFRDLLLGDPSFQNDDRVQVEFYVNENTFKERLKLFFIKNQRSSLRIRLFNFSLKLLTCLLYIVRVLLDDPALGIGCWGCPKQNYSFNDSSSEINWAPILWVERKMTLWAIQVIVAIISFLETMLLIYLSYKGNIWEQIFRVSFVLEMINTLPFIITIFWPPLRNLFIPVFLNCWLAKHALENMINDFHRAILRTQSAMFNQVLILFCTLLCLVFTGTCGIQHLERAGENLSLLTSFYFCIVTFSTVGYGDVTPKIWPSQLLVVIMICVALVVLPLQFEELVYLWMERQKSGGNYSRHRAQTEKHVVLCVSSLKIDLLMDFLNEFYAHPRLQDYYVVILCPTEMDVQVRRVLQIPLWSQRVIYLQGSALKDQDLMRAKMDNGEACFILSSRNEVDRTAADHQTILRAWAVKDFAPNCPLYVQILKPENKFHVKFADHVVCEEECKYAMLALNCICPATSTLITLLVHTSRGQEGQESPEQWQRMYGRCSGNEVYHIRMGDSKFFREYEGKSFTYAAFHAHKKYGVCLIGLKREDNKSILLNPGPRHILAASDTCFYINITKEENSAFIFKQEEKRKKRAFSGQGLHEGPARLPVHSIIASMVAMDLQGTEHRPTQSGGGGGGSKLALPTENGSGSRRPSIAPVLELADSSALLPCDLLSDQSEDEVTPSDDEGLSVVEYVKGYPPNSPYIGSSPTLCHLLPVKAPFCCLRLDKGCKHNSYEDAKAYGFKNKLIIVSAETAGNGLYNFIVPLRAYYRSRKELNPIVLLLDNKPDHHFLEAICCFPMVYYMEGSVDNLDSLLQCGIIYADNLVVVDKESTMSAEEDYMADAKTIVNVQTMFRLFPSLSITTELTHPSNMRFMQFRAKDSYSLALSKLEKRERENGSNLAFMFRLPFAAGRVFSISMLDTLLYQSFVKDYMITITRLLLGLDTTPGSGYLCAMKITEGDLWIRTYGRLFQKLCSSSAEIPIGIYRTESHVFSTSEPHDLRAQSQISVNVEDCEDTREVKGPWGSRAGTGGSSQGRHTGGGDPAEHPLLRRKSLQWARRLSRKAPKQAGRAAAAEWISQQRLSLYRRSERQELSELVKNRMKHLGLPTTGYEDVANLTASDVMNRVNLGYLQDEMNDHQNTLSYVLINPPPDTRLEPSDIVYLIRSDPLAHVASSSQSRKSSCSHKLSSCNPETRDETQL

SEQ ID NO: 23733 - protein, 514 aa, Homo sapiens
MAHKQREDYLNLSPCVFTWYRTFSQLAFDGEKLSHSASEEASGSDSGSQSESEQGSDPGSGHGSESNSSSESSESQSESESESAGSKSQPVLPEAKEKPASKKERIADVKKMWEEYPDVYGVRRSNRSRQEPSRFNIKEEASSGSESGSPKRRGQRQLKKQEKWKQEPSEDEQEQGTSAESEPEQKKVKARRPVPRRTVPKPRVKKQPKTQRGKRKKQDSSDEDDDDDEAPKRQTRRRAAKNVSYKEDDDFETDSDDLIEMTGEGVDEQQDNSETIEKVLDSRLGKKGATGASTTVYAIEANGDPSGDFDTEKDEGEIQYLIKWKGWSYIHSTWESEESLQQQKVKGLKKLENFKKKEDEIKQWLGKVSPEDVEYFNCQQELASELNKQYQIVERVIAVKTSKSTLGQTDFPAHSRKPAPSNEPEYLCKWMGLPYSECSWEDEALIGKKFQNCIDSFHSRNNSKTIPTRECKALKQRPRFVALKKQPAYLGGENLELRDYQLEGLNWLAHSWCK

SEQ ID NO: 23734 - protein, 431 aa, Homo sapiens
MGRKKIQITRIMDERNRQVTFTKRKFGLMKKAYELSVLCDCEIALIIFNSTNKLFQYASTDMDKVLLKYTEYNEPHESRTNSDIVEALNKKENKGCESPDPDSSYALTPRTEEKYKKINEEFDNMIKSHKIPAVPPPNFEMPVSIPVSSHNSLVYSNPVSSLGNPNLLPLAHPSLQRNSMSPGVTHRPPSAGNTGGLMGGDLTSGAGTSAGNGYGNPRNSPGLLVSPGNLNKNMQAKSPPPMNLGMNNRKPDLRVLIPPGSKNTMPSVNQRINNSQSAQSLATPVVSVATPTLPGQGMGGYPSAISTTYGTEYSLSSADLSSLSGFNTASALHLGSVTGWQQQHLHNMPPSALSQLGDRTTTPSRYPQHTRHEAGRSPVDSLSSCSSSYDGSDREDHRNEFHSPIGLTRPSPDERESPSVKRMRLSEGWAT

SEQ ID NO: 23735 - protein, 562 aa, Homo sapiens
MNFPGLFKIVADKTPYLTMEEITRTIHIGPSRLGHPCFYHQKDIKLENLIIKQGEQIMLNSVEEIDGEIMVSCAVARNHQTHSFNLPLSQEGEFYECEDERIYTLKEIVEWKIPKNRTRTVNLTDFSNKWDSTNPFPKDFYGTLILKPVYEIQGVMKFRKDIIRILPSLDVEVKDITDSYDANWFLQLLSTEDLFEMTSKEFPIVTEVIEAPEGNHLPQSILQPGKTIVIHKKYQASRILASEIRSNFPKRHFLIPTSYKGKFKRRPREFPTAYDLEIAKSEKEPLHVVATKAFHSPHDKLSSVSVGDQFLVHQSETTEVLCEGIKKVVNVLACEKILKKSYEAALLPLYMEGGFVEVIHDKKQYPISELCKQFRLPFNVKVSVRDLSIEEDVLAATPGLQLEEDITDSYLLISDFANPTECWEIPVGRLNMTVQLVSNFSRDAEPFLVRTLVEEITEEQYYMMRRYESSASHPPPRPPKHPSVEETKLTLLTLAEERTVDLPKSPKRHHVDITKKLHPNQAGLDSKVLIGSQNDLVDEEKERSNRGATAIAETFKNEKHQK

SEQ ID NO: 23736 - protein, 647 aa, Homo sapiens
MSHVAVENALGLDQQFAGLDLNSSDNQSGGSTASKGRYIPPHLRNREATKGFYDKDSSGWSSSKDKDAYSSFGSRSDSRGKSSFFSDRGSGSRGRFDDRGRSDYDGIGSRGDRSGFGKFERGGNSRWCDKSDEDDWSKPLPPSERLEQELFSGGNTGINFEKYDDIPVEATGNNCPPHIESFSDVEMGEIIMGNIELTRYTRPTPVQKHAIPIIKEKRDLMACAQTGSGKTAAFLLPILSQIYSDGPGEALRAMKENGRYGRRKQYPISLVLAPTRELAVQIYEEARKFSYRSRVRPCVVYGGADIGQQIRDLERGCHLLVATPGRLVDMMERGKIGLDFCKYLVLDEADRMLDMGFEPQIRRIVEQDTMPPKGVRHTMMFSATFPKEIQMLARDFLDEYIFLAVGRVGSTSENITQKVVWVEESDKRSFLLDLLNATGKDSLTLVFVETKKGADSLEDFLYHEGYACTSIHGDRSQRDREEALHQFRSGKSPILVATAVAARGLDISNVKHVINFDLPSDIEEYVHRIGRTGRVGNLGLATSFFNERNINITKDLLDLLVEAKQEVPSWLENMAYEHHYKGSSRGRSKSSRFSGGFGARDYRQSSGASSSSFSSSRASSSRSGGGGHGSSRGFGGGSCSSVEQVPP

SEQ ID NO: 23737 - protein, 332 aa, Homo sapiens
MFSEELWLENEKKCAVVRKSKQGRKRQELLAVAFGVKVGVKGGFLWPPLKLFACSQISSLVRRAALTHNDNHFNYEKTHNFKVHTFRGPHWCEYCANFMWGLIAQGVRCSDCGLNVHKQCSKHVPNDCQPDLKRIKKVYCCDLTTLVKAHNTQRPMVVDICIREIEARGLKSEGLYRVSGFTEHIEDVKMAFDRDGEKADISANVYPDINIITGALKLYFRDLPIPVITYDTYSKFIDAAKISNADERLEAVHEVLMLLPPAHYETLRYLMIHLKKVTMNEKDNFMNAENLGIVFGPTLMRPPEDSTLTTLHDMRYQKLIVQILIENEDVLF

SEQ ID NO: 23738 - protein, 864 aa, Homo sapiens
MGNRGMEDLIPLVNRLQDAFSAIGQNADLDLPQIAVVGGQSAGKSSVLENFVGRDFLPRGSGIVTRRPLVLQLVNATTEYAEFLHCKGKKFTDFEEVRLEIEAETDRVTGTNKGISPVPINLRVYSPHVLNLTLVDLPGMTKVPVGDQPPDIEFQIRDMLMQFVTKENCLILAVSPANSDLANSDALKVAKEVDPQGQRTIGVITKLDLMDEGTDARDVLENKLLPLRRGYIGVVNRSQKDIDGKKDITAALAAERKFFLSHPSYRHLADRMGTPYLQKVLNQQLTNHIRDTLPGLRNKLQSQLLSIEKEVEEYKNFRPDDPARKTKALLQMVQQFAVDFEKRIEGSGDQIDTYELSGGARINRIFHERFPFELVKMEFDEKELRREISYAIKNIHGIRTGLFTPDMAFETIVKKQVKKIREPCLKCVDMVISELISTVRQCTKKLQQYPRLREEMERIVTTHIREREGRTKEQVMLLIDIELAYMNTNHEDFIGFANAQQRSNQMNKKKTSGNQVIRKGWLTINNIGIMKGGSKEYWFVLTAENLSWYKDDEEKEKKYMLSVDNLKLRDVEKGFMSSKHIFALFNTEQRNVYKDYRQLELACETQEEVDSWKASFLRAGVYPERVGDKEKASETEENGSDSFMHSMDPQLERQVETIRNLVDSYMAIVNKTVRDLMPKTIMHLMINNTKEFIFSELLANLYSCGDQNTLMEESAEQAQRRDEMLRMYHALKEALSIIGDINTTTVSTPMPPPVDDSWLQVQSVPAGRRSPTSSPTPQRRAPAVPPARPGSRGPAPGPPPAGSALGGAPPVPSRPGASPDPFGPPPQVPSRPNRAPPGVPSRKGPASPTRPAAPRPAEAPLLDL

SEQ ID NO: 23739 - protein, 248 aa, Homo sapiens
MAGAQPGVHALQLKPVCVSDSLKKGTKFVKWDDDSTIVTPIILRTDPQGFFFYWTDQNKETELLDLSLVKDARCGRHAKAPKDPKLRELLDVGNIGRLEQRMITVVYGPDLVNISHLNLVAFQEEVAKEWTNEVFSLATNLLAQNMSRDAFLEKAYTKLKLQVTPEGRIPLKNIYRLFSADRKRVETALEACSLPSSRVEKANEAAKSEQSCGKAPPKHFHLHFIKQNKMLEPACYCFFVRCFGIGKI

SEQ ID NO: 23740 - protein, 748 aa, Homo sapiens
MKTSPRRPLILKRRRLPLPVQNAPSETSEEEPKRSPAQQESNQAEASKEVAESNSCKFPAGIKIINHPTMPNTQVVAIPNNANIHSIITALTAKGKESGSSGPNKFILISCGGAPTQPPGLRPQTQTSYDAKRTEVTLETLGPKPAARDVNLPRPPGALCEQKRETCDGEAAGCTINNSLSNIQWLRKMSSDGLGSRSIKQEMEEKENCHLEQRQVKVEEPSRPSASWQNSVSERPPYSYMAMIQFAINSTERKRMTLKDIYTWIEDHFPYFKHIAKPGWKNSIRHNLSLHDMFVRETSANGKVSFWTIHPSANRYLTLDQVFKQQQKRPNPELRRNMTIKTELPLGARRKMKPLLPRVSSYLVPIQFPVNQSLVLQPSVKVPLPLAASLMSSELARHSKRVRIAPKVLLAEEGIAPLSSAGPGKEEKLLFGEGFSPLLPVQTIKEEEIQPGEEMPHLARPIKVESPPLEEWPSPAPSFKEESSHSWEDSSQSPTPRPKKSYSGLRSPTRCVSEMLVIQHRERRERSRSRRKQHLLPPCVDEPELLFSEGPSTSRWAAELPFPADSSDPASQLSYSQEVGGPFKTPIKETLPISSTPSKSVLPRTPESWRLTPPAKVGGLDFSPVQTSQGASDPLPDPLGLMDLSTTPLQSAPPLESPQRLLSSEPLDLISVPFGNSSPSDIDVPKPGSPEPQVSGLAANRSLTEGLVLDTMNDSLSKILLDISFPGLDEDPLGPDNINWSQFIPELQ

SEQ ID NO: 23741 - protein, 459 aa, Homo sapiens
MGTALLQRGGCFLLCLSLLLLGCWAELGSGLEFPGAEGQWTRFPKWNACCESEMSFQLKTRSARGLVLYFDDEGFCDFLELILTRGGRLQLSFSIFCAEPATLLADTPVNDGAWHSVRIRRQFRNTTLFIDQVEAKWVEVKSKRRDMTVFSGLFVGGLPPELRAAALKLTLASVREREPFKGWIRDVRVNSSQVLPVDSGEVKLDDEPPNSGGGSPCEAGEEGEGGVCLNGGVCSVVDDQAVCDCSRTGFRGKDCSQGKEEYIATFKGSEYFCYDLSQNPIQSSSDEITLSFKTLQRNGLMLHTGKSADYVNLALKNGAVSLVINLGSGAFEALVEPVNGKFNDNAWHDVKVTRNLRQVTISVDGILTTTGYTQEDYTMLGSDDFFYVGGSPSTADLPGSPVSNNFMGCLKEVNIVAIRIIPNSWSHHFRSSMKAPLLKTRCSRVKRHNFKFNILLLFM

SEQ ID NO: 23742 - protein, 573 aa, Homo sapiens
MPVAATNSETAMQQVLDNLGSLPSATGAAELDLIFLRGIMESPIVRSLAKVQCSREVGTRALPHLFCFHPQAHERLEETKLEAVRDNNLELVQEILRDLAQLAEQSSTAAELAHILQEPHFQSLLETHDSVASKTYETPPPSPGLDPTFSNQPVPPDAVRMVGIRKTAGEHLGVTFRVEGGELVIARILHGGMVAQQGLLHVGDIIKEVNGQPVGSDPRALQELLRNASGSVILKILPSYQEPHLPRQVFVKCHFDYDPARDSLIPCKEAGLRFNAGDLLQIVNQDDANWWQACHVEGGSAGLIPSQLLEEKRKAFVKRDLELTPNSGTLCGSLSGKKKKRMMYLTTKNAEFDRHELLIYEEVARMPPFRRKTLVLIGAQGVGRRSLKNKLIMWDPDRYGTTVPYTSRRPKDSEREGQGYSFVSRGEMEADVRAGRYLEHGEYEGNLYGTRIDSIRGVVAAGKVCVLDVNPQAVKVLRTAEFVPYVVFIEAPDFETLRAMNRAALESGISTKQLTEADLRRTVEESSRIQRGYGHYFDLCLVNSNLERTFRELQTAMEKLRTEPQWVPVSWVY

SEQ ID NO: 23743 - protein, 478 aa, Homo sapiens
MSQVTFSDVAIDFSHEEWACLDSAQRDLYKDVMVQNYENLVSVAGLSVTKPYVIMLLEDGKEPWMMEKKLSKAYPFPLSHSVPASVNFGFSALFEHCSEVTEIFELSELCVFWVLHFLSNSPNSTVEAFFKKKKKKKKKKKRQCFAFLIYFRLGIKMGKQGIINKEGYLEDSPQPVTMEKVVKQSYEFSNSNKNLEYTECDTFRSTFHSKSTLSEPQNNSAEGNSHKYDILKKNLSKKSVIKSERINGGKKLLNSNKSGAAFNQSKSLTLPQTCNREKIYTCSECGKAFGKQSILSRHWRIHTGEKPYECRECGKTFSHGSSLTRHQISHSGEKPYKCIECGKAFSHGSSLTNHQSTHTGEKPYECMNCGKSFSRVSLLIQHLRIHTQEKRYECRICGKAFIHSSSLIHHQKSHTGEKPYECRECGKAFCCSSHLTQHQRIHSMKKKYECNKCLKVFSSFSFLVQHQSIHTEEKPFEV

SEQ ID NO: 23744 - protein, 383 aa, Homo sapiens
MEGSSSYEVPSVAAADLEEGAGQTRSLPATPSKDVHKGVGGIIFSSSPILDLSESGLCRLEEVFRIPSLQQLHLQRNALCVIPQDFFQLLPNLTWLDLRYNRIKALPSGIGAHQHLKTLLLERNPIKMLPVELGSVTTLKALNLRHCPLEFPPQLVVQKGLVAIQRFLRMWAVEHSLPRNPTSQEAPPVREMTLRDLPSPGLELSGDHASNQGAVNAQDPEGAVMKEKASFLPPVEKPDLSELRKSADSSENWPSEEEIRRFWKLRQEIVEHVKADVLGDQLLTRELPPNLKAALNIEKELPKPRHVFRRKTASSRSILPDLLSPYQMAIRAKRLEESRAAALRELQEKQALMEQQRRPFLLIFPRVFQALTRSSGRFILVLL

SEQ ID NO: 23745 - protein, 638 aa, Homo sapiens
MGEIEGTYRVLQTAGMRLGAQTPVGVSTLEPGQTLLPRMQEKHLHLRVKLLDNTMEIFDIEPKCDGQVLLTQVWKRLNLVECDYFGMEFQNTQSYWIWLEPMKPIIRQIRRPKNVVLRLAVKFFPPDPGQLQEEYTRYLFALQLKRDLLEERLTCADTTAALLTSHLLQSEIGDYDETLDREHLKVNEYLPGQQHCLEKILEFHQKHVGQTPAESDFQVLEIARKLEMYGIRFHMASDREGTKIQLAVSHMGVLVFQGTTKINTFNWSKVRKLSFKRKRFLIKLHPEVHGPYQDTLEFLLGSRDECKNFWKICVEYHTFFRLLDQPKPKAKAVFFSRGSSFRYSGRTQKQLVDYFKDSGMKRIPYERRHSKTHTSVRALTADLPKQSISFPEGLRTPASPSSANAFYSLSPSTLVPSGLPEFKDSSSSLTDPQVSYVKSPAAERRSGAVAGGPDTPSAQPLGPPALQPGPGLSTKSPQPSPSSRKSPLSLSPAFQVPLGPAEQGSSPLLSPVLSDAGGAGMDCEEPRHKRVPADEAYFIVKEILATERTYLKDLEVITVWFRSAVVKEDAMPATLMTLLFSNIDPIYEFHRGFLREVEQRLALWEGPSKAHTKGSHQRIGDILLRNMRQLKAAHEFTT

SEQ ID NO: 23746 - protein, 705 aa, Homo sapiens
MQADKCRTSSRSVKKELVIESPLQYKDAAQGEVEAESPGPVPAKPKLIEPLDYENVIVQKKTQILNDCLREMLLFPYDDFQTAILRRQGRYICSTVPAKAEEEAQSLFVTECIKTYNSDWHLVNYKYEDYSGEFRQLPNKVVKLDKLPVHVYEVDEEVDKDEDAASLGSQKGGITKHGWLYKGNMNSAISVTMRSFKRRFFHLIQLGDGSYNLNFYKDEKISKEPKGSIFLDSCMGVVQNNKVRRFAFELKMQDKSSYLLAADSEVEMEEWITILNKILQLNFEAAMQEKRNGDSHEDDEQSKLEGSGSGLDSYLPELAKSAREAEIKLKSESRVKLFYLDPDAQKLDFSSAEPEVKSFEEKFGKRILVKCNDLSFNLQCCVAENEEGPTTNVEPFFVTLSLFDIKYNRKISADFHVDLNHFSVRQMLATTSPALMNGSGQSPSVLKGILHEAAMQYPKQGIFSVTCPHPDIFLVARIEKVLQGSITHCAEPYMKSSDSSKVAQKVLKNAKQACQRLGQYRMPFAWAARTLFKDASGNLDKNARFSAIYRQDSNKLSNDDMLKLLADFRKPEKMAKLPVILGNLDITIDNVSSDFPNYVNSSYIPTKQFETCSKTPITFEVEEFVPCIPKHTQPYTIYTNHLYVYPKYLKYDSQKSFAKARNIAICIEFKDSDEEDSQPLKTWWASFHKKRLCCSFTPSPKPRIL

SEQ ID NO: 23747 - protein, 135 aa, Homo sapiens
MPSDFISLLSADLDLESPKSLYSRESVYDLLPKELQLPPSRETSVASMSQTSGGEAGSPPPAVVAADASSAPSSSSMGGACSSFTTSSSPTIYSTSVTDSKAMQVESCSSAVGNIGKPKRNWSKEEPYVVWTISC

SEQ ID NO: 23748 - protein, 1739 aa, Homo sapiens
MMRNKDKSQEEDSSLHSNASSHSASEEASGSDSGSQSESEQGSDPGSGHGSESNSSSESSESQSESESESAGSKSQPVLPEAKEKPASKKERIADVKKMWEEYPDVYGVRRSNRSRQEPSRFNIKEEASSGSESGSPKRRGQRQLKKQEKWKQEPSEDEQEQGTSAESEPEQKKVKARRPVPRRTVPKPRVKKQPKTQRGKRKKQDSSDEDDDDDEAPKRQTRRRAAKNVSYKEDDDFETDSDDLIEMTGEGVDEQQDNSETIEKVLDSRLGKKGATGASTTVYAIEANGDPSGDFDTEKDEGEIQYLIKWKGWSYIHSTWESEESLQQQKVKGLKKLENFKKKEDEIKQWLGKVSPEDVEYFNCQQELASELNKQYQIVERVIAVKTSKSTLGQTDFPAHSRKPAPSNEPEYLCKWMGLPYSECSWEDEALIGKKFQNCIDSFHSRNNSKTIPTRECKALKQRPRFVALKKQPAYLGGENLELRDYQLEGLNWLAHSWCKNNSVILADEMGLGKTIQTISFLSYLFHQHQLYGPFLIVVPLSTLTSWQREFEIWAPEINVVVYIGDLMSRNTIREYEWIHSQTKRLKFNALITTYEILLKDKTVLGSINWAFLGVDEAHRLKNDDSLLYKTLIDFKSNHRLLITGTPLQNSLKELWSLLHFIMPEKFEFWEDFEEDHGKGRENGYQSLHKVLEPFLLRRVKKDVEKSLPAKVEQILRVEMSALQKQYYKWILTRNYKALAKGTRGSTSGFLNIVMELKKCCNHCYLIKPPEENERENGQEILLSLIRSSGKLILLDKLLTRLRERGNRVLIFSQMVRMLDILAEYLTIKHYPFQRLDGSIKGEIRKQALDHFNADGSEDFCFLLSTRAGGLGINLASADTVVIFDSDWNPQNDLQAQARAHRIGQKKQVNIYRLVTKGTVEEEIIERAKKKMVLDHLVIQRMDTTGRTILENNSGRSNSNPFNKEELTAILKFGAEDLFKELEGEESEPQEMDIDEILRLAETRENEVSTSATDELLSQFKVANFATMEDEEELEERPHKDWDEIIPEEQRKKVEEEERQKELEEIYMLPRIRSSTKKAQTNDSDSDTESKRQAQRSSASESETEDSDDDKKPKRRGRPRSVRKDLVEGFTDAEIRRFIKAYKKFGLPLERLECIARDAELVDKSVADLKRLGELIHNSCVSAMQEYEEQLKENASEGKGPGKRRGPTIKISGVQVNVKSIIQHEEEFEMLHKSIPVDPEEKKKYCLTCRVKAAHFDVEWGVEDDSRLLLGIYEHGYGNWELIKTDPELKLTDKILPVETDKKPQGKQLQTRADYLLKLLRKGLEKKGAVTGGEEAKLKKRKPRVKKENKVPRLKEEHGIELSSPRHSDNPSEEGEVKDDGLEKSPMKKKQKKKENKENKEKQMSSRKDKEGDKERKKSKDKKEKPKSGDAKSSSKSKRSQGPVHITAGSEPVPIGEDEDDDLDQETFSICKERMRPVKKALKQLDKPDKGLNVQEQLEHTRNCLLKIGDRIAECLKAYSDQEHIKLWRRNLWIFVSKFTEFDARKLHKLYKMAHKKRSQEEEEQKKKDDVTGGKKPFRPEASGSSRDSLISQSHTSHNLHPQKPHLPASHGPQMHGHPRDNYNHPNKRHFSNADRGDWQRERKFNYGGGNNNPPWGSDRHHQYEQHWYKDHHYGDRRHMDAHRSGSYRPNNMSRKRPYDQYSSDRDHRGHRDYYDRYAKGCETPGANLCQELFLGRK

SEQ ID NO: 23749 - protein, 760 aa, Homo sapiens
MDASLEKIADPTLAEMGKNLKEAVKMLEDSQRTEEENGKKLISGDIPGPLQGRIQNIGEQGHMALLGHSLGAYISTLDKEKLRKLTTRILSDTTLWLCRIFRYENGCAYFHEEEREGLAKICRLAIHSRYEDFVVDGFNVLYNKKPVIYLSAAARPGLGQYLCNQLGLPFPCLCRVPCNTVFGSQHQMDVAFLEKLIKDDIERGRLPLLLVANAGTAAVGHTDKIGRLKELCEQYGIWLHVEGVNLATLALGYVSSSVLAAAKCDSMTMTPGPWLGLPAVPAVTLYKHDDPALTLVAGLTSNKPTDKLRALPLWLSLQYLGLDGFVERIKHACQLSQRLQESLKKVNYIKILVEDELSSPVVVFRFFQELPGSDPVFKAVPVPNMTPSGVGRERHSCDALNRWLGEQLKQLVPASGLTVMDLEAEGTCLRFSPLMTAAVLGTRGEDVDQLVACIESKLPVLCCTLQLREEFKQEVEATAGLLYVDDPNWSGIGVVRYEHANDDKSSLKSDPEGENIHAGLLKKLNELESDLTFKIGPEYKSMKSCLYVGMASDNVDAAELVETIAATAREIEENSRLLENMTEVVRKGIQEAQVELQKASEERLLEEGVLRQIPVVGSVLNWFSPVQALQKGRTFNLTAGSLESTEPIYVYKAQGAGVTLPPTPSGSRTKQRLPGQKPFKRSLRGSDALSETSSVSHIEDLEKVERLSSGPEQITLEASSTEGHPGAPSPQHTDQTEAFQKGVPHPEDDHSQVEGPESLR

SEQ ID NO: 23750 - protein, 2038 aa, Homo sapiens
MFNLMKKDKDKDGGRKEKKEKKEKKERMSAAELRSLEEMSLRRGFFNLNRSSKRESKTRLEISNPIPIKVASGSDLHLTDIDSDSNRGSVILDSGHLSTASSSDDLKGEEGSFRGSVLQRAAKFGSLAKQNSQMIVKRFSFSQRSRDESASETSTPSEHSAAPSPQVEVRTLEGQLVQHPGPGIPRPGHRSRAPELVTKKFPVDLRLPPVVPLPPPTLRELELQRRPTGDFGFSLRRTTMLDRGPEGQACRRVVHFAEPGAGTKDLALGLVPGDRLVEINGHNVESKSRDEIVEMIRQSGDSVRLKVQPIPELSELSRSWLRSGEGPRREPSDAKTEEQIAAEEAWNETEKVWLVHRDGFSLASQLKSEELNLPEGKVRVKLDHDGAILDVDEDDVEKANAPSCDRLEDLASLVYLNESSVLHTLRQRYGASLLHTYAGPSLLVLGPRGAPAVYSEKVMHMFKGCRREDMAPHIYAVAQTAYRAMLMSRQDQSIILLGSSGSGKTTSCQHLVQYLATIAGISGNKVFSVEKWQALYTLLEAFGNSPTIINGNATRFSQILSLDFDQAGQVASASIQTMLLEKLRVARRPASEATFNVFYYLLACGDGTLRTELHLNHLAENNVFGIVPLAKPEEKQKAAQQFSKLQAAMKVLGISPDEQKACWFILAAIYHLGAAGATKPAVAGRKQFARHEWAQKAAYLLGCSLEELSSAIFKHQHKGGTLQRSTSFRQGPEESGLGDGTGPKLSALECLEGMAAGLYSELFTLLVSLVNRALKSSQHSLCSMMIVDTPGFQNPEQGGSARGASFEELCHNYTQDRLQRLFHERTFVQELERYKEENIELAFDDLEPPTDDSVAAVDQASHQSLVRSLARTDEARGLLWLLEEEALVPGASEDTLLERLFSYYGPQEGDKKGQSPLLHSSKPHHFLLGHSHGTNWVEYNVTGWLNYTKQNPATQNAPRLLQDSQKKIISNLFLGRAGSATVLSGSIAGLEGGSQLALRRATSMRKTFTTGMAAVKKKSLCIQMKLQVDALIDTIKKSKLHFVHCFLPVAEGWAGEPRSASSRRVSSSSELDLPSGDHCEAGLLQLDVPLLRTQLRGSRLLDAMRMYRQGYPDHMVFSEFRRRFDVLAPHLTKKHGRNYIVVDERRAVEELLECLDLEKSSCCMGLSRVFFRAGTLARLEEQRDEQTSRNLTLFQAACRGYLARQHFKKRKIQDLAIRCVQKNIKKNKGVKDWPWWKLFTTVRPLIEVQLSEEQIRNKDEEIQQLRSKLEKAEKERNELRLNSDRLESRISELTSELTDERNTGESASQLLDAETAERLRAEKEMKELQTQYDALKKQMEVMEMEVMEARLIRAAEINGEVDDDDAGGEWRLKYERAVREVDFTKKRLQQEFEDKLEVEQQNKRQLERRLGDLQADSEESQRALQQLKKKCQRLTAELQDTKLHLEGQQVRNHELEKKQRRFDSELSQAHEEAQREKLQREKLQREKDMLLAEAFSLKQQLEEKDMDIAGFTQKVVSLEAELQDISSQESKDEASLAKVKKQLRDLEAKVKDQEEELDEQAGTIQMLEQAKLRLEMEMERMRQTHSKEMESRDEEVEEARQSCQKKLKQMEVQLEEEYEDKQKVLREKRELEGKLATLSDQVNRRDFESEKRLRKDLKRTKALLADAQLMLDHLKNSAPSKREIAQLKNQLEESEFTCAAAVKARKAMEVEIEDLHLQIDDIAKAKTALEEQLSRLQREKNEIQNRLEEDQEDMNELMKKHKAAVAQASRDLAQINDLQAQLEEANKEKQELQEKLQALQSQVEFLEQSMVDKSLVSRQEAKIRELETRLEFERTQVKRLESLASRLKENMEKLTEERDQRIAAENREKEQNKRLQRQLRDTKEEMGELARKEAEASRKKHELEMDLESLEAANQSLQADLKLAFKRIGDLQAAIEDEMESDENEDLINSEGDSDVDSELEDRVDGVKSWLSKNKGPSKAASDDGSLKSSSPTSYWKSLAPDRSDDEHDPLDNTSRPRYSHSYLSDSDTEAKLTETNA

SEQ ID NO: 23751 - protein, 173 aa, Homo sapiens
MEPSSKKLTGRLMLAVGGAVLGSLQFGYNTGVINAPQKVIEEFYNQTWVHRYGESILPTTLTTLWSLSVAIFSVGGMIGSFSVGLFVNRFGRRNSMLMMNLLAFVSAVLMGFSKLGKSFEMLILGRFIIGVYCGLTTGFVPMYVGEVSPTALRGALGTLHQLGIVVGILIAQC

SEQ ID NO: 23752 - protein, 863 aa, Homo sapiens
MGNREMEELIPLVNRLQDAFSALGQSCLLELPQIAVVGGQSAGKSSVLENFVGRDFLPRGSGIVTRRPLVLQLVTSKAEYAEFLHCKGKKFTDFDEVRLEIEAETDRVTGMNKGISSIPINLRVYSPHVLNLTLIDLPGITKVPVGDQPPDIEYQIREMIMQFITRENCLILAVTPANTDLANSDALKLAKEVDPQGLRTIGVITKLDLMDEGTDARDVLENKLLPLRRGYVGVVNRSQKDIDGKKDIKAAMLAERKFFLSHPAYRHIADRMGTPHLQKVLNQQLTNHIRDTLPNFRNKLQGQLLSIEHEVEAYKNFKPEDPTRKTKALLQMVQQFAVDFEKRIEGSGDQVDTLELSGGAKINRIFHERFPFEIVKMEFNEKELRREISYAIKNIHGIRTGLFTPDMAFEAIVKKQIVKLKGPSLKSVDLVIQELINTVKKCTKKLANFPRLCEETERIVANHIREREGKTKDQVLLLIDIQVSYINTNHEDFIGFANAQQRSSQVHKKTTVGNQVIRKGWLTISNIGIMKGGSKGYWFVLTAESLSWYKDDEEKEKKYMLPLDNLKVRDVEKSFMSSKHIFALFNTEQRNVYKDYRFLELACDSQEDVDSWKASLLRAGVYPDKSVGNNKAENDENGQAENFSMDPQLERQVETIRNLVDSYMSIINKCIRDLIPKTIMHLMINNVKDFINSELLAQLYSSEDQNTLMEESAEQAQRRDEMLRMYQALKEALGIIGDISTATVSTPAPPPVDDSWIQHSRRSPPPSPTTQRRPTLSAPLARPTSGRGPAPAIPSPGPHSGAPPVPFRPGPLPPFPSSSDSFGAPPQVPSRPTRAPPSVPSRRPPPSPTRPTIIRPLESSLLD

SEQ ID NO: 23753 - protein, 854 aa, Homo sapiens
MVQKSRNGGVYPGPSGEKKLKVGFVGLDPGAPDSTRDGALLIAGSEAPKRGSILSKPRAGGAGAGKPPKRNAFYRKLQNFLYNVLERPRGWAFIYHAYVFLLVFSCLVLSVFSTIKEYEKSSEGALYILEIVTIVVFGVEYFVRIWAAGCCCRYRGWRGRLKFARKPFCVIDIMVLIASIAVLAAGSQGNVFATSALRSLRFLQILRMIRMDRRGGTWKLLGSVVYAHSKELVTAWYIGFLCLILASFLVYLAEKGENDHFDTYADALWWGLITLTTIGYGDKYPQTWNGRLLAATFTLIGVSFFALPAGILGSGFALKVQEQHRQKHFEKRRNPAAGLIQSAWRFYATNLSRTDLHSTWQYYERTVTVPMYSSQTQTYGASRLIPPLNQLELLRNLKSKSGLAFRKDPPPEPSPSQKVSLKDRVFSSPRGVAAKGKGSPQAQTVRRSPSADQSLEDSPSKVPKSWSFGDRSRARQAFRIKGAASRQNSEEASLPGEDIVDDKSCPCEFVTEDLTPGLKVSIRAVCVMRFLVSKRKFKESLRPYDVMDVIEQYSAGHLDMLSRIKSLQSRVDQIVGRGPAITDKDRTKGPAEAELPEDPSMMGRLGKVEKQVLSMEKKLDFLVNIYMQRMGIPPTETEAYFGAKEPEPAPPYHSPEDSREHVDRHGCIVKIVRSSSSTGQKNFSAPPAAPPVQCPPSTSWQPQSHPRQGHGTSPVGDHGSLVRIPPPPAHERSLSAYGGGNRASMEFLRQEDTPGCRPPEGNLRDSDTSISIPSVDHEELERSFSGFSISQSKENLDALNSCYAAVAPCAKVRPYIAEGESDTDSDLCTPCGPPPRSATGEGPFGDVGWAGPRK

SEQ ID NO: 23754 - protein, 584 aa, Homo sapiens
MASTDYSTYSQAAAQQGYSAYTAQPTQGYAQTTQQAYGQQSYGTYGQPTDVSYTQAQTTATYGQTAYATSYGQPPTGYTTPTAPQAYSQPVQGYGTGAYDTTTATVTTTQASYAAQSAYGTQPAYPAYGQQPAATAPTRPQDGNKPTETSQPQSSTGGYNQPSLGYGQSNYSYPQVPGSYPMQPVTAPPSYPPTSYSSTQPTSYDQSSYSQQNTYGQPSSYGQQSSYGQQSSYGQQPPTSYPPQTGSYSQAPSQYSQQSSSYGQQRPMDEGPDLDLGPPVDPDEDSDNSAIYVQGLNDSVTLDDLADFFKQCGVVKMNKRTGQPMIHIYLDKETGKPKGDATVSYEDPPTAKAAVEWFDGKDFQGSKLKVSLARKKPPMNSMRGGLPPREGRGMPPPLRGGPGGPGGPGGPMGRMGGRGGDRGGFPPRGPRGSRGNPSGGGNVQHRAGDWQCPNPGCGNQNFAWRTECNQCKAPKPEGFLPPPFPPPGGDRGRGGPGGMRGGRGGLMDRGGPGGMFRGGRGGDRGGFRGGRGMDRGGFGGGRRGGPGGPPGPLMEQMGGRRGGRGGPGKMDKGEHRQERRDRPY

SEQ ID NO: 23755 - protein, 849 aa, Homo sapiens
MTKTYNDIDAVTRLLEEKERDLELAARIGQSLLKKNKTLTERNELLEEQVEHIREEVSQLRHELSMKDELLQFYTSAAEESEPESVCSTPLKRNESSSSVQNYFHLDSLQKKLKDLEEENVVLRSEASQLKTETITYEEKEQQLVNDCVKELRDANVQIASISEELAKKTEDAARQQEEITHLLSQIVDLQKKAKACAVENEELVQHLGAAKDAQRQLTAELRELEDKYAECMEMLHEAQEELKNLRNKTMPNTTSRRYHSLGLFPMDSLAAEIEGTMRKELQLEEAESPDITHQKRVFETVRNINQVVKQRSLTPSPMNIPGSNQSSAMNSLLSSCVSTPRSSFYGSDIGNVVLDNKTNSIILETEAADLGNDERSKKPGTPGTPGSHDLETALRRLSLRRENYLSERRFFEEEQERKLQELAEKGELRSGSLTPTESIMSLGTHSRFSEFTGFSGMSFSSRSYLPEKLQIVKPLEGSATLHHWQQLAQPHLGGILDPRPGVVTKGFRTLDVDLDEVYCLNDFEEDDTGDHISLPRLATSTPVQHPETSAHHPGKCMSQTNSTFTFTTCRILHPSDELTRVTPSLNSAPTPACGSTSHLKSTPVATPCTPRRLSLAESFTNTRESTTTMSTSLGLVWLLKERGISAAVYDPQSWDRAGRGSLLHSYTPKMAVIPSTPPNSPMQTPTSSPPSFEFKCTSPPYDNFLASKPASSILREVREKNVRSSESQTDVSVSNLNLVDKVRRFGVAKVVNSGRAHVPTLTEEQGPLLCGPPGPAPALVPRGLVPEGLPLRCPTVTSAIGGLQLNSGIRRNRSFPTMVGSSMQMKAPVTLTSGILMGAKLSKQTSLR

SEQ ID NO: 23756 - protein, 1687 aa, Homo sapiens
MSSRRKRAPPVRVDEEKRQQLHWNMHEDRRNEPIIISDDDEQPCPGSDTSSAHYIILSDSLKEEVAHRDKKRCSKVVSFSKPIEKEETVGIFSPLSVKLNIVISPYHFDNSWKAFLGELTLQLLPAQSLIENFSERSITLMSSESSNQFLIYVHSKGEDVEKQKKEPMSICDKGILVESSFSGEMLEDLGWLQKKRRIKLYQKPEGNHIIKVGIYLLEAGLAKLDFLSDANSRMKKFNQLMKKVMEKLHNSIIPDVLEEDEDDPESEPEGQDIDELYHFVKQTHQQETQSIQVDVQHPALIPVLRPYQREAVNWMLQQECFRSSPATESALHFLWREIVTSEGLKLYYNPYTGCIIREYPNSGPQLLGGILADEMGLGKTVEVLALILTHTRQDVKQDALTLPEGKVVNYFIPSHYFGGKLKKTEIQNIEFEPKEKVQCPPTRVMILTAVKEMNGKKGVSILSIYKYVSSIYRYDVQRNRSLLKRMLKCLIFEGLVKQIKGHGFSGTFTLGKNYKEEDICDKTKKQAVGSPRKIQKETRKSGNKDTDSEYLPSDTSDDDDDPYYYYYKSRRNRSKLRKKLVPSTKKGKSQPFINPDSQGHCPATSDSGITDVAMSKSTCISEFNQEHETEDCAESLNHADSDVPPSNTMSPFNTSDYRFECICGELDQIDRKPRVQCLKCHLWQHAKCVNYDEKNLKIKPFYCPHCLVAMEPVSTRATLIISPSSICHQWVDEINRHVRSSSLRVLVYQGVKKDGFLQPHFLAEQDIVIITYDVLRSELNYVDIPHSNSEDGRRLRNQKRYMAIPSPLVAVEWWRICLDEAQMVECPTVKAAEMAQRLSGINRWCISGTPVQRGLEDLFGLVVFLGIEPYCVKHWWVRLLYRPYCKKNPQHLYSFIAKILWRSAKKDVIDQIQIPPQTEEIHWLHFSPVERHFYHRQHEVCCQDVVVKLRKISDWALKLSSLDRRTVTSILYPLLRLRQACCHPQAVRGEFLPLQKSFEQSTFSFSTMTMEELLTSLQKKCGTECEEAHRQLVCALNGLAGIHIIKGEYALAAELYREVLRSSEEHKGKLKTDSLQRLHATHNLMELLIARHPGIPPTLRDGRLEEEAKQLREHYMSKCNTEVAEAQQALYPVQQTIHELQRKIHSNSPWWLNVIHRAIEFTIDEELVQRVRNEITSNYKQQTGKLSMSEKGLQFLLTTQMEELNKCQKLVREAVKNLEGPPSRNVIESATVCHLRPARLPLNCCVFCKADELFTEYESKLFSNTVKGQTAIFEEMIEDEEGLVDDRAPTTTRGLWAISETERSMKAILSFAKSHRFDVEFVDEGSTSMDLFEAWKKEYKLLHEYWMALRNRVSAVDELAMATERLRVRDPREPKPNPPVLHIIEPHEVEQNRIKLLNDKAVATSQLQKKLGQLLYLTNLEKSQDKTSGGVNPEPCPICARQLGKQWAVLTCGHCFCNECISIIIEQYSVGSHRSSIKCAICRQTTSHKEISYVFTSEKANQEEDIPVKGSHSTKVEAVVRTLMKIQLRDPGAKALVFSTWQDVLDIISKALTDNNMEFAQISRVKTFQENLSAFKRDPQINILLLPLHTGSNGLTIIEATHVLLVEPILNPAHELQAIGRVHRIGQTKPTIVHRFLIKATIEERMQAMLKTAERSHTNSSAKHSEASVLTVADLADLFTKETEELE

SEQ ID NO: 23757 - protein, 861 aa, Homo sapiens
MPHTELGTKPLQAPGFREKPLFTRDASQLKGTFLSTTLKKSNMGFGFTIIGGDEPDEFLQVKSVIPDGPAAQDGKMETGDVIVYINEVCVLGHTHADVVKLFQSVPIGQSVNLVLCRGYPLPFDPEDPANSMVPPLAIMERPPPVMVNGRHNYETYLEYISRTSQSVPDITDRPPHSLHSMPTDGQLDGTYPPPVHDDNVSMASSGATQAELMTLTIVKGAQGFGFTIADSPTGQRVKQILDIQGCPGLCEGDLIVEINQQNVQNLSHTEVVDILKDCPIGSETSLIIHRGGFFSPWKTPKPIMDRWENQGSPQTSLSAPAIPQNLPFPPALHRSSFPDSTEAFDPRKPDPYELYEKSRAIYESPDYKELDVHLRRMESGFGFRILGGDEPGQPILIGAVIAMGSADRDGRLHPGDELVYVDGIPVAGKTHRYVIDLMHHAARNGQVNLTVRRKVLCGGEPCPENGRSPGSVSTHHSSPRSDYATYTNSNHAAPSSNASPPEGFASHSLQTSDVVIHRKENEGFGFVIISSLNRPESGSTITVPHKIGRIIDGSPADRCAKLKVGDRILAVNGQSIINMPHADIVKLIKDAGLSVTLRIIPQEELNSPTSAPSSEKQSPMAQQSPLAQQSPLAQPSPATPNSPIAQPAPPQPLQLQGHENSYRSEVKARQDVKPDIRQPPFTDYRQPPLDYRQPPGGDYQQPPPLDYRQPPLLDYRQHSPDTRQYPLSDYRQPQDFDYFTVDMEKGAKGFGFSIRGGREYKMDLYVLRLAEDGPAIRNGRMRVGDQIIEINGESTRDMTHARAIELIKSGGRRVRLLLKRGTGQVPEYGTFHVLIHPFALPSVNHKCLWLFIKLHQFSTST

SEQ ID NO: 23758 - protein, 864 aa, Homo sapiens
MDVSLCPAKCSFWRIFLLGSVWLDYVGSVLACPANCVCSKTEINCRRPDDGNLFPLLEGQDSGNSNGNASINITDISRNITSIHIENWRSLHTLNAVDMELYTGLQKLTIKNSGLRSIQPRAFAKNPHLRYINLSSNRLTTLSWQLFQTLSLRELQLEQNFFNCSCDIRWMQLWQEQGEAKLNSQNLYCINADGSQLPLFRMNISQCDLPEISVSHVNLTVREGDNAVITCNGSGSPLPDVDWIVTGLQSINTHQTNLNWTNVHAINLTLVNVTSEDNGFTLTCIAENVVGMSNASVALTVYYPPRVVSLEEPELRLEHCIEFVVRGNPPPTLHWLHNGQPLRESKIIHVEYYQEGEISEGCLLFNKPTHYNNGNYTLIAKNPLGTANQTINGHFLKEPFPESTDNFILFDEVSPTPPITVTHKPEEDTFGVSIAVGLAAFACVLLVVLFVMINKYGRRSKFGMKGPVAVISGEEDSASPLHHINHGITTPSSLDAGPDTVVIGMTRIPVIENPQYFRQGHNCHKPDTYVQHIKRRDIVLKRELGEGAFGKVFLAECYNLSPTKDKMLVAVKALKDPTLAARKDFQREAELLTNLQHEHIVKFYGVCGDGDPLIMVFEYMKHGDLNKFLRAHGPDAMILVDGQPRQAKGELGLSQMLHIASQIASGMVYLASQHFVHRDLATRNCLVGANLLVKIGDFGMSRDVYSTDYYREGPCQKGPFSVVWQRQRLAATAASTLFNPSGNDFCIWCEVGGHTMLPIRWMPPESIMYRKFTTESDVWSFGVILWEIFTYGKQPWFQLSNTEVIECITQGRVLERPRVCPKEVYDVMLGCWQREPQQRLNIKEIYKILHALGKATPIYLDILG

SEQ ID NO: 23759 - protein, 797 aa, Homo sapiens
MPPATYDTAGLTMPTATLGNLRGYGMASPGLAAPSLTPPQLATPNLQQFFPQATRQSLLGPPPVGVPMNPSQFNLSGRNPQKQARTSSSTTPNRKDSSSQTMPVEDKSDPPEGSEEAAEPRMDTPEDQDLPPCPEDIAKEKRTPAPEPEPCEASELPAKRLRSSEEPTEKEPPGQLQVKAQPQARMTVPKQTQTPDLLPEALEAQVLPRFQPRVLQVQAQVQSQTQPRIPSTDTQVQPKLQKQAQTQTSPEHLVLQQKQVQPQLQQEAEPQKQVQPQVQPQAHSQGPRQVQLQQEAEPLKQVQPQVQPQAHSQPPRQVQLQLQKQVQTQTYPQVHTQAQPSVQPQEHPPAQVSVQPPEQTHEQPHTQPQVSLLAPEQTPVVVHVCGLEMPPDAVEAGGGMEKTLPEPVGTQVSMEEIQNESACGLDVGECENRAREMPGVWGAGGSLKVTILQSSDSRAFSTVPLTPVPRPSDSVSSTPAATSTPSKQALQFFCYICKASCSSQQEFQDHMSEPQHQQRLGEIQHMSQACLLSLLPVPRDVLETEDEEPPPRRWCNTCQLYYMGDLIQHRRTQDHKIAKQSLRPFCTVCNRYFKTPRKFVEHVKSQGHKDKAKELKSLEKEIAGQDEDHFITVDAVGCFEGDEEEEEDDEDEEEIEVEEELCKQVRSRDISREEWKGSETYSPNTAYGVDFLVPVMGYICRICHKFYHSNSGAQLSHCKSLGHFENLQKYKAAKNPSPTTRPVSRRCAINARNALTALFTSSGRPPSQPNTQDKTPSKVTARPSQPPLPRRSTRLKT

SEQ ID NO: 23760 - protein, 176 aa, Homo sapiens
MVIKLKDGGKAAQANVRIGDVVLSIDGINAQGMTHLEAQNKIKGCTGSLNMTLQRASAAPKPEPVPVQKGEPKEVVKPVPITSPAVSKVTSTNNMAYNKAPRPFGSVSSPKVTSIPSPSSAFTPAHATTSSHASPSPVAAVTPPLFAASGLHANANLSADQSPSALSAGKTAVNVP

SEQ ID NO: 23761 - protein, 339 aa, Homo sapiens
MDSPGYNCFVDKDKMDAAIQDLGPKELSCTELQELKQLARQGYWAQSHALRGKVYQRLIRDIPCRTVTPDASVYSDIVGKIVGKHSSSCLPLPEFVDNTQVPSYCLNARGEGAVRKILLCLANQFPDISFCPALPAVVALLLHYSIDEAECFEKACRILACNDPGRRLIDQSFLAFESSCMTFGDLVNKYCQAAHKLMVAVSEDVLQVYADWQRWLFGELPLCYFARVFDVFLVEGYKVLYRVALAILKFFHKVRAGQPLESDSVKQDIRTFVRDIAKTVSPEKLLEKAFAIRLFSRKEIQLLQMANEKALKQKGITVKQKSLYTWPSMQRTSARRSSA

SEQ ID NO: 23762 - protein, 1028 aa, Homo sapiens
MLCAENRKEMEDWISSLKSVQTREPYEVAQFNVEHFSGMHNWYACSHARPTFCNVCRESLSGVTSHGLSCEVCKFKAHKRCAVRATNNCKWTTLASIGKDIIEDEDGVAMPHQWLEGNLPVSAKCAVCDKTCGSVLRLQDWKCLWCKTMVHTACKDLYHPICPLGQCKVSIIPPIALNSTDSDGFCRATFSFCVSPLLVFVNSKSGDNQGVKFLRRFKQLLNPAQVFDLMNGGPHLGLRLFQKFDNFRILVCGGDGSVGWVLSEIDKLNLNKQCQLGVLPLGTGNDLARVLGWGGSYDDDTQLPQILEKLERASTKMLDRWSIMTYELKLPPKASLLPGPPEASEEFYMTIYEDSVATHLTKILNSDEHAVVISSAKTLCETVKDFVAKVEKTYDKTLENAVVADAVASKCSVLNEKLEQLLQALHTDSQAAPVLPGLSPLIVEEDAVESSSEESLGESKEQLGDDVTKPSSQKAVKPREIMLRANSLKKAVRQVIEEAGKVMDDPTVHPCEPANQSSDYDSTETDESKEEAKDDGAKESITVKTAPRSPDARASYGHSQTDSVPGPAVAASKENLPVLNTRIICPGLRAGLAASIAGSSIINKMLLANIDPFGATPFIDPDLDSVDGYSEKCVMNNYFGIGLDAKISLEFNNKREEHPEKCRSRTKNLMWYGVLGTRELLQRSYKNLEQRVQLECDGQYIPLPSLQGIAVLNIPSYAGGTNFWGGTKEDDIFAAPSFDDKILEVVAIFDSMQMAVSRVIKLQHHRIAQCRTVKITIFGDEGVPVQVDGEAWVQPPGIIKIVHKNRAQMLTRDRAFESTLKSWEDKQKCDSGKPVLRTHLYIHHAIDLATEEVSQMQLCSQAAEELITRICDAATIHCLLEQELAHAVNACSHALNKANPRCPESLTRDTATEIAINVKALYNETESLLVGRVPLQLESPHEERVSNALHSVEVELQKLTEIPWLYYILHPNEDEEPPMDCTKRNNRSTVFRIVPKFKKEKVQKQKTSSQPALPLHSVLHLLWPTFAL

SEQ ID NO: 23763 - protein, 495 aa, Homo sapiens
MWQIVFFTLSCDLVLAAAYNNFRKSMDSIGKKQYQVQHGSCSYTFLLPEMDNCRSSSSPYVSNAVQRDAPLEYDDSVQRLQVLENIMENNTQWLMKLENYIQDNMKKEMVEIQQNAVQNQTAVMIEIGTNLLNQTAEQTRKLTDVEAQVLNQTTRLELQLLEHSLSTNKLEKQILDQTSEINKLQDKNSFLEKKVLAMEDKHIIQLQSIKEEKDQLQVLVSKQNSIIEELEKKIVTATVNNSVLQKQQHDLMETVNNLLTMMSTSNSKDPTVAKEEQISFRDCAEVFKSGHTTNGIYTLTFPNSTEEIKAYCDMEAGGGGWTIIQRREDGSVDFQRTWKEYKVGFGNPSGEYWLGNEFVSQLTNQQRYVLKIHLKDWEGNEAYSLYEHFYLSSEELNYRIHLKGLTGTAGKISSISQPGNDFSTKDGDNDKCICKCSQMLTGGWWFDACGPSNLNGMYYPQRQNTNKFNGIKWYYWKGSGYSLKATTMMIRPADF

SEQ ID NO: 23764 - protein, 1499 aa, Homo sapiens
MGTALLQRGGCFLLCLSLLLLGCWAELGSGLEFPGAEGQWTRFPKWNACCESEMSFQLKTRSARGLVLYFDDEGFCDFLELILTRGGRLQLSFSIFCAEPATLLADTPVNDGAWHSVRIRRQFRNTTLFIDQVEAKWVEVKSKRRDMTVFSGLFVGGLPPELRAAALKLTLASVREREPFKGWIRDVRVNSSQVLPVDSGEVKLDDEPPNSGGGSPCEAGEEGEGGVCLNGGVCSVVDDQAVCDCSRTGFRGKDCSQEDNNVEGLAHLMMGDQGKSKGKEEYIATFKGSEYFCYDLSQNPIQSSSDEITLSFKTLQRNGLMLHTGKSADYVNLALKNGAVSLVINLGSGAFEALVEPVNGKFNDNAWHDVKVTRNLRQVTISVDGILTTTGYTQEDYTMLGSDDFFYVGGSPSTADLPGSPVSNNFMGCLKEVVYKNNDVRLELSRLAKQGDPKMKIHGVVAFKCENVATLDPITFETPESFISLPKWNAKKTGSISFDFRTTEPNGLILFSHGKPRHQKDAKHPQMIKVDFFAIEMLDGHLYLLLDMGSGTIKIKALLKKVNDGEWYHVDFQRDGRSGTISVNTLRTPYTAPGESEILDLDDELYLGGLPENKAGLVFPTEVWTALLNYGYVGCIRDLFIDGQSKDIRQMAEVQSTAGVKPSCSKETAKPCLSNPCKNNGMCRDGWNRYVCDCSGTGYLGRSCEREATVLSYDGSMFMKIQLPVVMHTEAEDVSLRFRSQRAYGILMATTSRDSADTLRLELDAGRVKLTVNLDCIRINCNSSKGPETLFAGYNLNDNEWHTVRVVRRGKSLKLTVDDQQAMTGQMAGDHTRLEFHNIETGIITERRYLSSVPSNFIGHLQSLTFNGMAYIDLCKNGDIDYCELNARFGFRNIIADPVTFKTKSSYVALATLQAYTSMHLFFQFKTTSLDGLILYNSGDGNDFIVVELVKGYLHYVFDLGNGANLIKGSSNKPLNDNQWHNVMISRDTSNLHTVKIDTKITTQITAGARNLDLKSDLYIGGVAKETYKSLPKLVHAKEGFQGCLASVDLNGRLPDLISDALFCNGQIERGCEGPSTTCQEDSCSNQGVCLQQWDGFSCDCSMTSFSGPLCNDPGTTYIFSKGGGQITYKWPPNDRPSTRADRLAIGFSTVQKEAVLVRVDSSSGLGDYLELHIHQGKIGVKFNVGTDDIAIEESNAIINDGKYHVVRFTRSGGNATLQVDSWPVIERYPAGNNDNERLAIARQRIPYRLGRVVDEWLLDKGRQLTIFNSQATIIIGGKEQGQPFQGQLSGLYYNGLKVLNMAAENDANIAIVGNVRLVGEVPSSMTTESTATAMQSEMSTSIMETTTTLATSTARRGKPPTKEPISQTTDDILVASAECPSDDEDIDPCEPSSGGLANPTRAGGREPYPGSAEVIRESSSTTGMVVGIVAAAALCILILLYAMYKYRNRDEGSYHVDESRNYISNSAQSNGAVVKEKQPSSAKSSNKNKKNKDKEYYV

SEQ ID NO: 23765 - protein, 602 aa, Homo sapiens
MPQLNGGGGDDLGANDELISFKDEGEQEEKSSENSSAERDLADVKSSLVNESETNQNSSSDSEAERRPPPRSESFRDKSRESLEEAAKRQDGGLFKGPPYPGYPFIMIPDLTSPYLPNGSLSPTARTLHFQSGSTHYSAYKTIEHQIAVQYLQMKWPLLDVQAGSLQSRQALKDARSPSPAHIVSNKVPVVQHPHHVHPLTPLITYSNEHFTPGNPPPHLPADVDPKTGIPRPPHPPDISPYYPLSPGTVGQIPHPLGWLVPQQGQPVYPITTGGFRHPYPTALTVNASMSRFPPHMVPPHHTLHTTGIPHPAIVTPTVKQESSQSDVGSLHSSKHQDSKKEEEKKKPHIKKPLNAFMLYMKEMRAKVVAECTLKESAAINQILGRRWHALSREEQAKYYELARKERQLHMQLYPGWSARDNYGKKKKRKRDKQPGETNDANTPKKCRALFGLDRQTLWCKPCRRKKKCVRYIQGEGSCLSPPSSDGSLLDSPPPSPNLLGSPPRDAKSQTEQTQPLSLSLKPDPLAHLSMMPPPPALLLAEATHKASALCPNGALDLPPAALQPAAPSSSIAQPSTSSLHSHSSLAGTQPQPLSLVTKSLE

SEQ ID NO: 23766 - protein, 1086 aa, Homo sapiens
MSCLSHSSLPSCCPPQEASMASPTSTNPAHAHFESFLQAQLCQDVLSSFQELCGALGLEPGGGLPQYHKIKDQLNYWSAKSLWTKLDKRAGQPVYQQGRACTSTKCLVVGAGPCGLRVAVELALLGARVVLVEKRTKFSRHNVLHLWPFTIHDLRALGAKKFYGRFCTGTLDHISIRQLQLLLLKVALLLGVEIHWGVTFTGLQPPPRKGSGWRAQLQPNPPAQLANYEFDVLISAAGGKFVPEGFKVREMRGKLAIGITANFVNGRTVEETQVPEISGVARIYNQSFFQSLLKATGIDLENIVYYKDDTHYFVMTAKKQCLLRLGVLRQDWPDTNRLLGSANVVPEALQRFTRAAADFATHGKLGKLEFAQDAHGQPDVSAFDFTSMMRAESSARVQEKHGARLLLGLVGDCLVEPFWPLGTGVARGFLAAFDAAWMVKRWAEGAESLEVLAERESLYQLLSQTSPENMHRNVAQYGLDPATRYPNLNLRAVTPNQVRDLYDVLAKEPVQRNNDKTDTGMPATGSAGTQEELLRWCQEQTAGYPGVHVSDLSSSWADGLALCALVYRLQPGLLEPSELQGLGALEATAWALKVAENELGITPVVSAQAVVAGSDPLGLIAYLSHFHSAFKSMAHSPGPVSQASPGTSSAVLFLSKLQRTLQRSRAKENAEDAGGKKLRLEMEAETPSTEVPPDPEPGVPLTPPSQHQEAGAGDLCALCGEHLYVLERLCVNGHFFHRSCFRCHTCEATLWPGGYEQHPGDGHFYCLQHLPQTDHKAEGSDRGPESPELPTPSENSMPPGLSTPTASQEGAGPVPDPSQPTRRQIRLSSPERQRLSSLNLTPDPEMEPPPKPPRSCSALARHALESSFVGWGLPVQSPQALVAMEKEEKESPFSSEEEEEDVPLDSDVEQALQTFAKTSGTMNNYPTWRRTLLRRAKEEEMKRFCKAQTIQRRLNEIEAALRELEAEGVKLELALRRQSSSPEQQKKLWVGQLLQLVDKKNSLVAEEAELMITVQELNLEEKQWQLDQELRGYMNREENLKTAADRQAEDQVLRKLVDLVNQRDALIRFQEERRLSELALGTGAQG

SEQ ID NO: 23767 - protein, 595 aa, Homo sapiens
MAAVVQQNDLVFEFASNVMEDERQLGDPAIFPAVIVEHVPGADILNSYAGLACVEEPNDMITESSLDVAEEEIIDDDDDDITLTVEASCHDGDETIETIEAAEALLNMDSPGPMLDEKRINGIPEVMETQQVQEKYADSPGASSPEQPKRKKGRKTKPPRPDSPATTPNISVKKKNKDGKGNTIYLWEFLLALLQDKATCPKYIKWTQREKGIFKLVDSKAVSRLWGKHKNKPDMNYETMGRALRYYYQRGILAKVEGQRLVYQFKEMPKDLIYINDEDPSSSIESSDPSLSSSATSNRNQTSRSRVSSSPGVKGGATTVLKPGNSKAAKPKDPVEVAQPSEVLRTVQPTQSPYPTQLFRTVHVVQPVQAVPEGEAARTSTMQDETLNSSVQSIRTIQAPTQVPVVVSPRNQQLHTVTLQTVPLTTVIASTDPSAGTGSQKFILQAIPSSQPMTVLKENVMLQSQKAGSPPSIVLGPAQVQQVLTSNVQTICNGTVSVASSPSFSATAPVVTFSPRSSQLVAHPPGTVITSVIKTQETKTLTQEVEKKESEDHLKENTEKTEQQPQPYVMVVSSSNGFTSQVAMKQNELLEPNSF

SEQ ID NO: 23768 - protein, 45 aa, Homo sapiens
MMRNKDKSQEEDSSLHSNASRYELSTFFLFVFFFGGETSAYNCLP

SEQ ID NO: 23769 - protein, 150 aa, Homo sapiens
MWDNISCWPSSVPGRMVEVECPRFLRMLTSRNGSLFRNCTQDGWSETFPRPNLACGVNVNDSSNEKRHSYLLKLKVMYTVGYSSSLVMLLVALGILCAFRRLHCTRNYIHMHLFVSFILRALSNFIKDAVLFSSDDVTYCDAHRAGCKLV

SEQ ID NO: 23770 - protein, 228 aa, Homo sapiens
MKDIFFQFIIARVRKCYSLSCLHTLPVVPTLRKTERGSYSSYGRESNLQGCHQQSLLGGDMDMGNPGTLSPTKPGSQYYQYSSNNPRRRPLHSSAMEVQTKKVRKVPPGLPSSVYAPSASTADYNRDSPGYPSSKPATSTFPSSFFMQDGHHSSDPWSSSSGMNQPGYAGMLGNSSHIPQSSSYCSLHPHERLSYPSHSSADINSSLPPMSTFHRSGTNHYSTSSCTP

SEQ ID NO: 23771 - protein, 169 aa, Homo sapiens
MLSETLGYLSSVLLQCTEAKKHCWYFEGLYPTYYICRSYEDCCGSRCCVRALSIQRLWYFWFLLMMGVLFCCGAGFFIRRRMYPPPLIEEPAFNVSYTRQPPNPGPGAQQPGPPYYTDPGGPGMNPVGNSMAMAFQVPPNSPQGSVACPPPPAYCNTPPPPYEQVVKAK

SEQ ID NO: 23772 - protein, 243 aa, Homo sapiens
MPVIPALWEAEVRGSLEPKSSRPAWATWVFSPCSIMLEFPETMGFSKNQTGALPRLCDVLQVLWEEQDQCLQELSREQTGDLGTEQPVPGCEGMWDNISCWPSSVPGRMVEVECPRFLRMLTSRNGSLFRNCTQDGWSETFPRPNLACGVNVNDSSNEKRHSYLLKLKVMYTVGYSSSLVMLLVALGILCAFRRLHCTRNYIHMHLFVSFILRALSNFIKDAVLFSSDDVTYCDAHRAGCKLV

SEQ ID NO: 23773 - protein, 1233 aa, Homo sapiens
MPPSWSPLMCGRAAEAAASSRTPGREMGQAVTRRLGAGARAAPRRAMDGRTPRPQDAPARREIAGSWRKPKAKAPLPPAETKYTDVSSAADSVESTAFIMEQKENMIDKDVELSVVLPGDIIKSTTVHGSKPMMDLLIFLCAQYHLNPSSYTIDLLSAEQNHIKFKPNTPIGMLEVEKVILKPKMLDKKKPTPIIPEKTVRVVINFKKTQKTIVRVSPHASLQELAPIICSKCEFDPLHTLLLKDYQSQEPLDLTKSLNDLGLRELYAMDVNRATSVTVFSKSSLQESCQISQNLDIMKEKENKGFFSFFQRSKKKRDQTASAPATPLVNKHRPTFTRSNTISKPYISNTLPSDAPKKRRAPLPPMPASQSVPQDLAHIQERPASCIVKSMSVDETDKSPCEAGRVRAGSLQLSSMSAGNSSLRRTKRKAPSPPSKIPPHQSDENSRVTALQPVDGVPPDSASEANSPEELSSPETFHPGLSSQEQCTAPKLMEETSVFECPGTPEAAITSLTSGISSDYSLEEIDEKEELSEVPKVEAENISPKSQDIPFVSTDIINTLKNDPDSALGNGSGEFSQNSMEEKQETKSTDGQEPHSVVYDTSNGKKVVDSIRNLKSLGPNQENVVQNEIIVYPENTEDNMKNGVKKTEINVEGVAKNNNIDMEVERPSNSEAHETDTAISYKENHLAASSVPDQKLNQPSAEKTKDAAIQTTPSCNSFDGKHQDHNLSDSKVEECVQTSNNNISTQHSCLSSQDSVNTSREFRSQGTLIIHSEDPLTVKDPICAHGNDDLLPPVDRIDKNSTASYLKNYPLYRQDYNPKPKPSNEITREYIPKIGMTTYKIVPPKSLEISKDWQSETIEYKDDQDMHALGKKHTHENVKETAIQTEDSAISESPEEPLPNLKPKPNLRTEHQVPSSVSSPDDAMVSPLKPAPKMTRDTGTAPFAPNLEEINNILESKFKSRASNAQAKPSSFFLQMQKRVSGHYVTSAAAKSVHAAPNPAPKELTNKEAERDMLPSPEQTLSPLSKMPHSVPQPLVEKTDDDVIGQAPAEASPPPIAPKPVTIPASQVSTQNLKTLKTFGAPRPYSSSGPSPFALAVVKRSQSFSKERTESPSASALVQPPANTEEGKTHSVNKFVDIPQLGVSDKENNSAHNEQNSQIPTPTDGPSFTVMRQSSLTFQSSDPEQMRQSLLTAIRSGEAAAKLKRVTIPSNTISVNGRSRLSHSMSPDAQDGH

SEQ ID NO: 23774 - protein, 1238 aa, Homo sapiens
MRTGSAASSAAAAAAAAAASASPATGVCMKTPGGGRRGIRRDPGAEPGAAALRGPRQRPILSRLTNNSRIVGLLAQLEKINAEPSESDTARYVTSKILHLAQSQEKTRREMTAKGSTGMEILLSTLENTKDLQTTLNILSILVELVSAGGGRRVSFLVTKGGSQILLQLLMNASKESPPHEDLMVQIHSILAKIGPKDKKFGVKARINGALNITLNLVKQNLQNHRLVLPCLQLLRVYSANSVNSVSLGKNGVVELMFKIIGPFSKKNSSLIKVALDTLAALLKSKTNARRAVDRGYVQVLLTIYVDWHRHDNRHRNMLIRKGILQSLKSVTNIKLGRKAFIDANGMKILYNTSQLPVIPVTGPVAQLYSLPPEVDDVVDESDDNDDIDVEAENETENEDDLDQNFKNDDIETDINKLKPQQEPGRTIEDLKMYEHLFPELVDDFQDYDLISKEPKPFVFEGKVRGPIVVPTAGEETSGNSGNLRKVVMKENISSKGDEGEKKSTFMDLAKEDIKDNDRTLQQQPGDQNRTISSVHGLNNDIVKALDRITLQNIPSQTAPGFTAEMKKDCSLPLTVLTCAKACPHMATCGNVLFEGRTVQLGKLCCTGVETEDDEDTESNSSVEQASVEVPDGPTLHDPDLYIEIVKNTKSVPEYSEVAYPDYFGHIPPPFKEPILERPYGVQRTKIAQDIERLIHQSDIIDRVVYDLDNPNYTIPEEGDILKFNSKFESGNLRKVIQIRKNEYDLILNSDINSNHYHQWFYFEVSGMRPGVAYRFNIINCEKSNSQFNYGMQPLMYSVQEALNARPWWIRMGTDICYYKNHFSRSSVAAGGQKGKSYYTITFTVNFPHKDDVCYFAYHYPYTYSTLQMHLQKLESAHNPQQIYFRKDVLCETLSGNSCPLVTITAMPESNYYEHICHFRNRPYVFLSARVHPGETNASWVMKGTLEYLMSNNPTAQSLRESYIFKIVPMLNPDGVINGNHRCSLSGEDLNRQWQSPSPDLHPTIYHAKGLLQYLAAVKRLPLVYCDYHGHSRKKNVFMYGCSIKETVWHTNDNATSCDVVEDTGYRTLPKILSHIAPAFCMSSCSFVVEKSKESTARVVVWREIGVQRSYTMESTLCGCDQGKYKGLQIGTRELEEMGAKFCVGLLRLKRLTSPLEYNLPSSLLDFENDLIESSCKVTSPTTYVLDEDEPRFLEEVDYSAESNDELDIELAENVGDYEPSAQEEVLSDSELSRTYLP

SEQ ID NO: 23775 - protein, 961 aa, Homo sapiens
MITVVYGPDLVNISHLNLVAFQEEVAKEWTNEVFSLATNLLAQNMSRDAFLEKAYTKLKLQVTPEGRIPLKNIYRLFSADRKRVETALEACSLPSSRNDSIPQEDFTPEVYRVFLNNLCPRPEIDNIFSEFGAKSKPYLTVDQMMDFINLKQRDPRLNEILYPPLKQEQVQVLIEKYEPNNSLARKGQISVDGFMRYLSGEENGVVSPEKLDLNEDMSQPLSHYFINSSHNTYLTAGQLAGNSSVEMYRQVLLSGCRCVELDCWKGRTAEEEPVITHGFTMTTEISFKEVIEAIAECAFKTSPFPILLSFENHVDSPKQQAKMAEYCRLIFGDALLMEPLEKYPLESGVPLPSPMDLMYKILVKNKKKSHKSSEGSGKKKLSEQASNTYSDSSSMFEPSSPGAGEADTESDDDDDDDDCKKSSMDEGTAGSEAMATEEMSNLVNYIQPVKFESFEISKKRNKSFEMSSFVETKGLEQLTKSPVEFVEYNKMQLSRIYPKGTRVDSSNYMPQLFWNAGCQMVALNFQTMDLAMQINMGMYEYNGKSGYRLKPEFMRRPDKHFDPFTEGIVDGIVANTLSVKIISGQFLSDKKVGTYVEVDMFGLPVDTRRKAFKTKTSQGNAVNPVWEEEPIVFKKVVLPTLACLRIAVYEEGGKFIGHRILPVQAIRPGYHYICLRNERNQPLTLPAVFVYIEVKDYVPDTYADVIEALSNPIRYVNLMEQRAKQLAALTLEDEEEVKKEADPGETPSEAPSEARTTPAENGVNHTTTLTPKPPSQALHSQPAPGSVKAPAKTEDLIQSVLTEVEAQTIEELKQQKSFVKLQKKHYKEMKDLVKRHHKKTTDLIKEHTTKYNEIQNDYLRRRAALEKSAKKDSKKKSEPSSPDHGSSTIEQDLAALDAEMTQKLIDLKDKQQQQLLNLRQEQYYSEKYQKREHIKLLIQKLTDVAEECQNNQLKKLKEICE

SEQ ID NO: 23776 - protein, 859 aa, Homo sapiens
MLPVYQEVKPNPLQDANLCSRVFFWWLNPLFKIGHKRRLEEDDMYSVLPEDRSQHLGEELQGFWDKEVLRAENDAQKPSLTRAIIKCYWKSYLVLGIFTLIEESAKVIQPIFLGKIINYFENYDPMDSVALNTAYAYATVLTFCTLILAILHHLYFYHVQCAGMRLRVAMCHMIYRKALRLSNMAMGKTTTGQIVNLLSNDVNKFDQVTVFLHFLWAGPLQAIAVTALLWMEIGISCLAGMAVLIILLPLQSCFGKLFSSLRSKTATFTDARIRTMNEVITGIRIIKMYAWEKSFSNLITNLRKKEISKILRSSCLRGMNLASFFSASKIIVFVTFTTYVLLGSVITASRVFVAVTLYGAVRLTVTLFFPSAIERVSEAIVSIRRIQTFLLLDEISQRNRQLPSDGKKMVHVQDFTAFWDKASETPTLQGLSFTVRPGELLAVVGPVGAGKSSLLSAVLGELAPSHGLVSVHGRIAYVSQQPWVFSGTLRSNILFGKKYEKERYEKVIKACALKKDLQLLEDGDLTVIGDRGTTLSGGQKARVNLARAVYQDADIYLLDDPLSAVDAEVSRHLFELCICQILHEKITILVTHQLQYLKAASQILILKDGKMVQKGTYTEFLKSGIDFGSLLKKDNEESEQPPVPGTPTLRNRTFSESSVWSQQSSRPSLKDGALESQDTENVPVTLSEENRSEGKVGFQAYKNYFRAGAHWIVFIFLILLNTAAQVAYVLQDWWLSYWANKQSMLNVTVNGGGNVTEKLDLNWYLGIYSGLTVATVLFGIARSLLVFYVLVNSSQTLHNKMFESILKAPVLFFDRNPIGRILNRFSKDIGHLDDLLPLTFLDFIQRWDLAVLSWLVSNS

SEQ ID NO: 23777 - protein, 442 aa, Homo sapiens
MQPPPSLCGRALVALVLACGLSRIWGEERGFPPDRATPLLQTAEIMTPPTKTLWPKGSNASLARSLAPAEVPKGDRTAGSPPRTISPPPCQGPIEIKETFKYINTVVSCLVFVLGIIGNSTLLRIIYKNKCMRNGPNILIASLALGDLLHIVIDIPINVYKLLAEDWPFGAEMCKLVPFIQKASVGITVLSLCALSIDRYRAVASWSRIKGIGVPKWTAVEIVLIWVVSVVLAVPEAIGFDIITMDYKGSYLRICLLHPVQKTAFMQFYKTAKDWWLFSFYFCLPLAITAFFYTLMTCEMLRKKSGMQIALNDHLKQRREVAKTVFCLVLVFALCWLPLHLSRILKLTLYNQNDPNRCELLSFLLVLDYIGINMASLNSCINPIALYLVSKRFKNCFKSCLCCWCQSFEEKQSLEEKQSCLKFKANDHGYDNFRSSNKYSSS

SEQ ID NO: 23778 - protein, 489 aa, Homo sapiens
MELQSRPEALAVELARHQNGDLKKQLHERQPRIAALSDKQALGTITAVPVTGPQVSSLQRLAGQGAAVLPQVRPKTLIPDSLPVAPGRDRPPKQPPTFQKATVVSVKNPSPALPTANNTVSHVPAPGSQPQALAEPAALASPLSSAGVAYAIISTSPSNAAAMAPSTAVSVVSDSIKVQPLLISADNKVIIIQPQVQTQPESTAESRPPTEEPSQGAQATKKKKEDRPPTQENPEKIAFMVALGLVTTEHLEEIQSKRQERKRRSTANPAYSGLLETERKRLASNYLNNPLFLTARANEDPCWKNEITHDEHCAACKRGANLQPCGTCPGAYHLSCLEPPLKTAPKGVWVCPRCQQKALKKDEGVPWTGMLAIVHSYVTHKTVKEEEKQKLLQRGSELQNEHQQLEERDRRLASAVQKCLELKTSLLARQRGTQSSLDRLRALLRLIQGEQLLQVTMTTTSPAPLLAGPWTKPSVAATHPTVQHPQGHN

SEQ ID NO: 23779 - protein, 1086 aa, Homo sapiens
MNGGKECDGGDKEGGLPAIQVPVGWQRRVDQNGVLYVSPSGSLLSCLEQVKTYLLTDGTCKCGLECPLILPKVFNFDPGAAVKQRTAEDVKADEDVTKLCIHKRKIIAVATLHKSMEAPHPSLVLTSPGGGTNATPVVPSRAATPRSVRNKSHEGITNSVMPECKNPFKLMIGSSNAMGRLYVQELPGSQQQELHPVYPRQRLGSSEHGQKSPFRGSHGGLPSPASSGSQIYGDGSISPRTDPLGSPDVFTRSNPGFHGAPNSSPIHLNRTPLSPPSVMLHGSPVQSSCAMAGRTNIPLSPTLTTKSPVMKKPMCNFSTNMEIPRAMFHHKPPQGPPPPPPPSCALQKKPLTSEKDPLGILDPIPSKPVNQNPVIINPTSFHSNVHSQVPMMNVSMPPAVVPLPSNLPLPTVKPGHMNHGSHVQRVQHSASTSLSPSPVTSPVHMMGTGIGRIEASPQRSRSSSTSSDHGNFMMPPVGPQATSSGIKVPPRSPRSTIGSPRPSMPSSPSTKSDGHHQYKDIPNPLIAGISNVLNTPSSAAFPTASAGSSSVKSQPGLLGMPLNQILNQHNAASFPASSLLSAAAKAQLANQNKLAGNNSSSSSNSGAVAGSGNTEGHSTLNTMFPPTANMLLPTGEGQSGRAALRDKLMSQQKDALRKRKQPPTTVLSLLRQSQMDSSAVPKPGPDLLRKQGQGSFPISSMSQLLQSMSCQSSHLSSNSTPGCGASNTALPCSANQLHFTDPSMNSSVLQNIPLRGEAVHCHNANTNFVHSNSPVPNHHLAGLINQIQASGNCGMLSQSGMALGNSLHPNPPQSRISTSSTPVIPNSIVSSYNQTSSEAGGSGPSSSIAIAGTNHPAITKTTSVLQDGVIVTTAAGNPLQSQLPIGSDFPFVGQEHALHFPSNSTSNNHLPHPLNPSLLSSLPISLPVNQQHLLNQNLLNILQPSAGEGDMSSINNTLSNHQLTHLQSLLNNNQMFPPNQQQQQLLQGYQNLQAFQGQSTIPCPANNNPMACLFQNFQVRMQEDAALLNKRISTQPGLTALPENPNTTLPPFQDTPCGAREVEDTNRRFGSLQPCPEKEQKKWKAK

SEQ ID NO: 23780 - protein, 304 aa, Homo sapiens
MNIVFSRDSQVRVMENTVANTEKYFGQFCSLLAAYTRKTARLRDKADQLVKQLIDFANSENPELRATMRGFAEDLAKVQDYRQAQVERLETKVVNPLKLYGAQIKQTRAEIKKFKHVQNHEIKQLEKLEKLRQKSPSDQQMIGQAETRVQRAAVDSSRTTLQLEETVDGFQRQKLKDLQKFFCDFVTIEMVFHAKAVEVYSSAFQTLEKYDLERDLLDFRAKMQGVYGHYDTRLLANTSPPPSVLQSLASQGTLQVQLSRANEDPEHPHANHGRFSLCEWVVKGQPAHCVCGQGGHLMLPGHSL

SEQ ID NO: 23781 - protein, 730 aa, Homo sapiens
MVQKSRNGGVYPGPSGEKKLKVGFVGLDPGAPDSTRDGALLIAGSEAPKRGSILSKPRAGGAGAGKPPKRNAFYRKLQNFLYNVLERPRGWAFIYHAYVFLLVFSCLVLSVFSTIKEYEKSSEGALYILEIVTIVVFGVEYFVRIWAAGCCCRYRGWRGRLKFARKPFCVIDIMVLIASIAVLAAGSQGNVFATSALRSLRFLQILRMIRMDRRGGTWKLLGSVVYAHSKELVTAWYIGFLCLILASFLVYLAEKGENDHFDTYADALWWGLITLTTIGYGDKYPQTWNGRLLAATFTLIGVSFFALPAGILGSGFALKVQEQHRQKHFEKRRNPAAGLIQSAWRFYATNLSRTDLHSTWQYYERTVTVPMYRLIPPLNQLELLRNLKSKSGLAFRKDPPPEPSPSQKVSLKDRVFSSPRGVAAKGKGSPQAQTVRRSPSADQSLEDSPSKVPKSWSFGDRSRARQAFRIKGAASRQNSEEASLPGEDIVDDKSCPCEFVTEDLTPGLKVSIRAVCVMRFLVSKRKFKESLRPYDVMDVIEQYSAGHLDMLSRIKSLQSRVDQIVGRGPAITDKDRTKGPAEAELPEDPSMMGRLGKVEKQVLSMEKKLDFLVNIYMQRMGIPPTETEAYFGAKEPEPAPPYHSPEDSREHVDRHGCIVKIVRSSSSTGQKNFSAPPAAPPVQCPPSTSWQPQSHPRQGHGTSPVGDHGSLGRAPETRAGQEGSHGGVSH

SEQ ID NO: 23782 - protein, 307 aa, Homo sapiens
MAAKCCSTFFLGCEFSQFLPLFLLGIISSNGKRWKEIRRFSLTTLRNFGMGKRSIEDRVQEEAHCLVEELRKTKASPCDPTFILGCAPCNVICSVVFQKRFDYKDQNFLTLMKRFNENFRILNSPWIQVCNNFPLLIDCFPGTHNKVLKNVALTRSYIREKVKEHQASLDVNNPRDFIDCFLIKMEQEKDNQKSEFNIENLVGTVADLFVAGTETTSTTLRYGLLLLLKHPEVTAKVQEEIDHVIGRHRSPCMQDRSHMPYTDAVVHEIQRYSDLVPTGVPHAVTTDTKFRNYLIPKSFDNKIMLAA

SEQ ID NO: 23783 - protein, 128 aa, Homo sapiens
MAKRLQAELSCPVCLDFFSCSISLSCTHVFCFDCIQRYILENHDFRAMCPLCRDVVKVPALEEWQVSVLTLMTKQHNSRLEQSLHVREELRHFREDVTLDAATASSLLVFSNDLRSAQCKKIHHDLTK

SEQ ID NO: 23784 - protein, 1428 aa, Homo sapiens
MENEPDHENVEQSLCAKTSEEELNKSFNLEASLSKFSYIDMDKELEFKNDLIDDKEFDIPQVDTPPTLESILNETDDEDESFILEDPTLLNIDTIDSHSYDTSSVASSDSGDRTNLKRKKKLPDSFSLHGSVMRHSLLKGISAQIVSAADKVDAGLPTAIAVSSLIAVGTSHGLALIFGKDQNQALRLCLGSTSVGGQYGAISALSINNDCSRLLCGFAKGQITMWDLASGKLLRSITDAHPPGTAILHIKFTDDPTLAICNDSGGSVFELTFKRVMGVRTCESRCLFSGSKGEVCCIEPLHSKPELKDHPITQFSLLAMASLTKILVIGLKPSLKVWMTFPYGRMDPSSVPLLAWHFVAVQNYVNPMLAFCRGDVVHFLLVKRDESGAIHVTKQKHLHLYYDLINFTWINSRTVVLLDSVEKLHVIDRQTQEELETVEISEVQLVYNSSHFKSLATGGNVSQALALVGEKACYQSISSYGGQIFYLGTKSVYVMMLRSWRERVDHLLKQDCLTEALALAWSFHEGKAKAVVGLSGDASKRKAIVADRMVEILFHYADRALKKCPDQGKIQVMEQHFQDMVPVIVDYCLLLQRKDLLFSQMYDKLSENSVAKGVFLECLEPYILSDKLVGITPQVMKDLIVHFQDKKLMENVEALIVHMDITSLDIQQVVLMCWENRLYDAMIYVYNRGMNEFISPMEKLFRVIAPPLNAGKTLTDEQVVMGNKLLVYISCCLAGRAYPLGDIPEDLVPLVKNQVFEFLIRLHSAEASPEEEIYPYIRTLLHFDTREFLNVLALTFEDFKNDKQAVEYQQRIVDILLKVMVENSDFTPSQVGCLFTFLARQLAKPDNTLFVNRTLFDQVLEFLCSPDDDSRHSERQQVLLELLQAGGIVQFEESRLIRMAEKAEFYQICEFMYEREHQYDKIIDCYLRDPLREEEVFNYIHNILSIPGHSAEEKQSVWQKAMDHIEELVSLKPCKAAELVATHFSGHIETVIKKLQNQVLLFKFLRSLLDPREGIHVNQELLQISPCITEQFIELLCQFNPTQVIETLQVLECYRLEETIQITQKYQLHEVTAYLLEKKGDIHGAFLIMLERLQSKLQEVTHQGENTKEDPSLKDVEDTMVETIALCQRNSHNLNQQQREALWFPLLEAMMAPQKLSSSAIPHLHSEALKSLTMQVLNSMAAFIALPSILQRILQDPVYGKGKLGEIQGLILGMLDTFNYEQTLLETTTSLLNQDLHWSLCNLRASVTRGLNPKQDYCSICLQQYKRRQEMADEIIVFSCGHLYHSFCLQNKECTVEFEGQTRWTCYKCSSSNKVGKLSENSSEIKKGRITPSQVKMSPSYHQSKGDPTAKKGTSEPVLDPQQIQAFDQLCRLYRGSSRLALLTELSQNRSSESYRPFSGSQSAPAFNSIFQNENFQLQLIPPPVTED

SEQ ID NO: 23785 - protein, 125 aa, Homo sapiens
PELRAAALKLTLASVREREPFKGWIRDVRVNSSQVLPVDSGEVKLDDEPPNSGGGSPCEAGEEGEGGVCLNGGVCSVVDDQAVCDCSRTGFRGKDCSQGLAHLMMGDQGMGSVPFPLCFQCFLVL

SEQ ID NO: 23786 - protein, 1044 aa, Homo sapiens [sequence omitted]

SEQ ID NO: 23787 - protein, 393 aa, Homo sapiens
MGRKKIQITRIMDERNRQVTFTKRKFGLMKKAYELSVLCDCEIALIIFNSTNKLFQYASTDMDKVLLKYTEYNEPHESRTNSDIVEAVPPPNFEMPVSIPVSSHNSLVYSNPVSSLGNPNLLPLAHPSLQRNSMSPGVTHRPPSAGNTGGLMGGDLTSGAGTSAGNGYGNPRNSPGLLVSPGNLNKNMQAKSPPPMNLGMNNRKPDLRVLIPPGSKNTMPSVSEDVDLLLNQRINNSQSAQSLATPVVSVATPTLPGQGMGGYPSAISTTYGTEYSLSSADLSSLSGFNTASALHLGSVTGWQQQHLHNMPPSALSQLGDRTTTPSRYPQHTRHEAGRSPVDSLSSCSSSYDGSDREDHRNEFHSPIGLTRPSPDERESPSVKRMRLSEGWAT

SEQ ID NO: 23788 - protein, 536 aa, Homo sapiens; identical to SEQ ID NO: 12556

SEQ ID NO: 23789 - protein, 141 aa, Homo sapiens
APQKVIEEFYNQTWVHRYGESILPTTLTTLWSLSVAIFSVGGMIGSFSVGLFVNRFGRRNSMLMMNLLAFVSAVLMGFSKLGKSFEMLILGRFIIGVYCGLTTGFVPMYVGEVSPTALRGALGTLHQLGIVVGILIAQAAG

SEQ ID NO: 23790 - protein, 765 aa, Homo sapiens
MKRAAAKHLIERYYHQLTEGCGNEACTNEFCASCPTFLRMDNNAAAIKALELYKINAKLCDPHPSKKGASSAYLENSKGAPNNSCSEIKMNKKGARIDFKDVTYLTEEKVYEILELCREREDYSPLIRVIGRVFSSAEALVQSFRKVKQHTKEELKSLQAKDEDKDEDEKEKAACSAAAMEEDSEASSSRIGDSSQGDNNLQKLGPDDVSVDIDAIRRVYTRLLSNEKIETAFLNALVYLSPNVECDLTYHNVYSRDPNYLNLFIIVMENRNLHSPEYLEMALPLFCKAMSKLPLAAQGKLIRLWSKYNADQIRRMMETFQQLITYKVISNEFNSRNLVNDDDAIVAASKCLKMVYYANVVGGEVDTNHNEEDDEEPIPESSELTLQELLGEERRNKKGPRVDPLETELGVKTLDCRKPLIPFEEFINEPLNEVLEMDKDYTFFKVETENKFSFMTCPFILNAVTKNLGLYYDNRIRMYSERRITVLYSLVQGQQLNPYLRLKVRRDHIIDDALVRLEMIAMENPADLKKQLYVEFEGEQGVDEGGVSKEFFQLVVEEIFNPDIGMFTYDESTKLFWFNPSSFETEGQFTLIGIVLGLAIYNNCILDVHFPMVVYRKLMGKKGTFRDLGDSHPVLYQSLKDLLEYEGNVEDDMMITFQISQTDLFGNPMMYDLKENGDKIPITNENRKEFVNLYSDYILNKSVEKQFKAFRRGFHMVTNESPLKYLFRPEEIELLICGSRNLDFQALEETTEYDGGYTRDSVLIR

SEQ ID NO: 23791 - protein, 315 aa, Homo sapiens
MYCAYTIPGMGGNSLMYYYNGKAVYAPSASTADYNRDSPGYPSSKPATSTFPSSFFMQDGHHSSDPWSSSSGMNQPGYAGMLGNSSHIPQSSSYCSLHPHERLSYPSHSSADINSSLPPMSTFHRSGTNHYSTSSCTPPANGTDSIMANRGSGAAGSSQTGDALGKALASIYSPDHTNNSFSSNPSTPVGSPPSLSGTAVWSRNGGQASSSPNYEGPLHSLQSRIEDRLERLDDAIHVLRNHAVGPSTAMPGGHGDMHGIIGPSHNGAMGGLGSGYGTGLLSANRHSLMVGTHREDGVALRGSHSLLPNQVPVPQ

SEQ ID NO: 23792 - protein, 311 aa, Homo sapiens
MLLEKDVNPGGKEETPGQRPAVTETHQLAELNEKKNERLRAAFGISDSYVDGSSFDPQRRAREAKQPAPEPPKPYSLVRESSSSRSPTPKQKKKKKKKDRGRRSESSSPRRERKKSSKKKKHRSESESKKRKHRSPTPKSKRKSKDKKRKRSRSTTPAPKSRRAHRSTSADSASSSDTSRSRSRSAAAKTHTTALAGRSPSPASGRRGEGDAPFSEPGTTSTQRPSSPETATKQPSSPYEDKDKDKKEKSATRPSPSPERSSTGPEPPAPTPLLAERHGGSPQPLATTPLSQEPVNPSPQLFMFLKGILVF

SEQ ID NO: 23793 - protein, 449 aa, Homo sapiens
MRLLAKIICLMLWAICVAEDCNELPPRRNTEILTGSWSDQTYPEGTQAIYKCRPGYRSLGNVIMVCRKGEWVALNPLRKCQKRPCGHPGDTPFGTFTLTGGNVFEYGVKAVYTCNEGYQLLGEINYRECDTDGWTNDIPICEVVKCLPVTAPENGKIVSSAMEPDREYHFGQAVRFVCNSGYKIEGDEEMHCSDDGFWSKEKPKCVEISCKSPDVINGSPISQKIIYKENERFQYKCNMGYEYSERGDAVCTESGWRPLPSCEEKSCDNPYIPNGDYSPLRIKHRTGDEITYQCRNGFYPATRGNTAKCTSTGWIPAPRCTLKPCDYPDIKHGGLYHENMRRPYFPVAVGKYYSYYCDEHFETPSGSYWDHIHCTQDGWSPAVPCLRKCYFPYLENGYNQNHGRKFVQGKSIDVACHPGYALPKAQTTVTCMENGWSPTPRCIRVSFTL

SEQ ID NO: 23794 - protein, 136 aa, Homo sapiens
SSQVLPVDSGEVKLDDEPPNSGGGSPCEAGEEGEGGVCLNGGVCSVVDDQAVCDCSRTGFRGKDCSQEIKFGLQCVLPVLLHDNDQGKYCCINTAKPLTEKDNNVEGLAHLMMGDQGKSKEKLEIFRWIRKDFTNF

SEQ ID NO: 23795 - protein, 79 aa, Homo sapiens
MGNSYAGQLKTTRFEEVLHNSIEASLRSNNLVPRPIFSQLYLEAEQQLAALEGGSRVDNEEEEEEGEGGLETNGPPNPF

SEQ ID NO: 23796 - protein, 497 aa, Homo sapiens
MMSEHDLADVVQIAVEDLSPDHPGTELWDIVLENHVVTDEDEPALKRQRLEINCQDPSIKSFLYSINQTICLRLDSIEAKLQALEATCKSLEEKLDLVTNKQHSPIQVPMVAGSPLGATQTCNKVRCAVPGRRQNTIVVKVPGQEDSHHEDGESGSEASDSVSSCGQAGSQSIGSNVTLITLNSEEDYPNGTWLGDENNPEMRVRCAIIPSDMLHISTNCRTAEKMALTLLDYLFHREVQAVSNLSGQGKHGKKQLDPLTIYGIRCHLFYKFGITESDWYRIKQSIDSKCRTAWRRKQRGQSLAVKSFSRRTPNSSSYCPSEPMMSTPPPASELPQPQPQPQALHYALANAQQVQIHQIGEDGQVQVIPQGHLHIAQVPQGEQVQITQDSEGNLQIHHVGQDGQLLEATRIPCLLAPSVFKASSGQVLQGAQLIAVASSDPAAAGVDGSPLQGSDIQVQYVQLAPVSDHTAGAQTAEALQPTLQPEMQLEHGAIQIQ

SEQ ID NO: 23797 - protein, 417 aa, Homo sapiens
MGRKKIQITRIMDERNRQVTFTKRKFGLMKKAYELSVLCDCEIALIIFNSTNKLFQYASTDMDKVLLKYTEYNEPHESRTNSDIVEAVPPPNFEMPVSIPVSSHNSLVYSNPVSSLGNPNLLPLAHPSLQRNSMSPGVTHRPPSAGNTGGLMGGDLTSGAGTSAGNGYGNPRNSPGLLVSPGNLNKNMQAKSPPPMNLGMNNRKPDLRVLIPPGSKNTMPSVNQRINNSQSAQSLATPVVSVATPTLPGQGMGGYPSAISTTYGTEYSLSSADLSSLSGFNTASALHLGSVTGWQQQHLHNMPPSALSQLGACTSTHLSQSSNLSLPSTQSLNIKSEPVSPPRDRTTTPSRYPQHTRHEAGRSPVDSLSSCSSSYDGSDREDHRNEFHSPIGLTRPSPDERESPSVKRMRLSEGWAT

SEQ ID NO: 23798 - protein, 657 aa, Homo sapiens
MAHMAFRDVAVDFTQDEWRLLSPAQRTLYREVMLENYSNLVSLGISFSKPELITQLEQGKETWREEKKCSPATCPADPEPELYLDPFCPPGFSSQKFPMQHVLCNHPPWIFTCLCAEGNIQPGDPGPGDQEKQQQASEGRPWSDQAEGPEGEGAMPLFGRTKKRTLGAFSRPPQRQPVSSRNGLRGVELEASPAQSGNPEETDKLLKRIEVLGFGTVNCGECGLSFSKMTNLLSHQRIHSGEKPYVCGVCEKGFSLKKSLARHQKAHSGEKPIVCRECGRGFNRKSTLIIHERTHSGEKPYMCSECGRGFSQKSNLIIHQRTHSGEKPYVCRECGKGFSQKSAVVRHQRTHLEEKTIVCSDCGLGFSDRSNLISHQRTHSGEKPYACKECGRCFRQRTTLVNHQRTHSKEKPYVCGVCGHSFSQNSTLISHRRTHTGEKPYVCGVCGRGFSLKSHLNRHQNIHSGEKPIVCKDCGRGFSQQSNLIRHQRTHSGEKPMVCGECGRGFSQKSNLVAHQRTHSGERPYVCRECGRGFSHQAGLIRHKRKHSREKPYMCRQCGLGFGNKSALITHKRAHSEEKPCVCRECGQGFLQKSHLTLHQMTHTGEKPYVCKTCGRGFSLKSHLSRHRKTTSVHHRLPVQPDPEPCAGQPSDSLYSL

SEQ ID NO: 23799 - protein, 962 aa, Homo sapiens
MEDGKPVWAPHPTDGFQMGNIVDIGPDSLTIEPLNQKGKTFLALINQVFPAEEDSKKDVEDNCSLMYLNEATLLHNIKVRYSKDRIYTYVANILIAVNPYFDIPKIYSSEAIKSYQGKSLGTRPPHVFAIADKAFRDMKVLKMSQSIIVSGESGAGKTENTKFVLRYLTESYGTGQDIDDRIVEANPLLEAFGNAKTVRNNNSSRFGKFVEIHFNEKSSVVGGFVSHYLLEKSRICVQGKEERNYHIFYRLCAGASEDIREKLHLSSPDNFRYLNRGCTRYFANKETDKQILQNRKSPEEDEYLKAGSMKDPLLDDHGDFIRMCTAMKKIGLDDEEKLDLFRVVAGVLHLGNIDFEEAGSTSGGCNLKNKSAQSLEYCAELLGLDQDDLRVSLTTRVMLTTAGGTKGTVIKVPLKVEQANNARDALAKTVYSHLFDHVVNRVNQCFPFETSSYFIGVLDIAGFEYFEHNSFEQFCINYCNEKLQQFFNERILKEEQELYQKEGLGVNEVHYVDNQDCIDLIEAKLVGILDILDEENRLPQPSDQHFTSAVHQKHKDHFRLTIPRKSKLAVHRNIRDDEGFIIRHFAGAVCYETTQFVEKNNDALHMSLESLICESRDKFIRELFESSTNNNKDTKQKAGKLSFISVGNKFKTQLNLLLDKLRSTGASFIRCIKPNLKMTSHHFEGAQILSQLQCSGMVSVLDLMQGGYPSRASFHELYNMYKKYMPDKLARLDPRLFCKALFKALGLNENDYKFGLTKVFFRPGKFAEFDQIMKSDPDHLAELVKRVNHWLTCSRWKKVQWCSLSVIKLKNKIKYRAEACIKMQKTIRMWLCKRRHKPRIDGLVKVGTLKKRLDKFNEVVSVLKDGKPEMNKQIKNLEISIDTLMAKIKSTMMTQEQIQKEYDALVKSSEELLSALQKKKQQEEEAERLRRIQEEMEKERKRREEDEKRRRKEEEERRMKLE

SEQ ID NO: 23800 - protein, 680 aa, Homo sapiens
MALSLEEFVHSLDLRTLPRVLEIQAGIYLEGSIYEMFGNECCFSTGEVIKITGLKVKKIIAEICEQIEGCESLQPFELPMNFPGLFKIVADKTPYLTMEEITRTIHIGPSRLGHPCFYHQKDIKLENLIIKQGEQIMLNSVEEIDGEIMVSCAVARNHQTHSFNLPLSQEGEFYECEDERIYTLKEIVEWKIPKNRTRTVNLTDFSNKWDSTNPFPKDFYGTLILKPVYEIQGVMKFRKDIIRILPSLDVEVKDITDSYDANWFLQLLSTEDLFEMTSKEFPIVTEVIEAPEGNHLPQSILQPGKTIVIHKKYQASRILASEIRSNFPKRHFLIPTSYKGKFKRRPREFPTAYDLEIAKSEKEPLHVVATKAFHSPHDKLSSVSVGDQFLVHQSETTEVLCEGIKKVVNVLACEKILKKSYEAALLPLYMEGGFVEVIHDKKQYPISELCKQFRLPFNVKVSVRDLSIEEDVLAATPGLQLEEDITDSYLLISDFANPTECWEIPVGRLNMTVQLVSNFSRDAEPFLVRTLVEEITEEQYYMMRRYESSASHPPPRPPKHPSVEETKLTLLTLAEERTVDLPKSPKAGVQWRDLGSLQPLPPGFKQFSASASHVAGITGTPHHVQRHHVDITKKLHPNQAGLDSKVLIGSQNDLVDEEKERSNRGATAIAETFKNEKHQK

SEQ ID NO: 23801 - protein, 860 aa, Homo sapiens
MATAAVLRGPAAHWVESFQKAREEGSGSGTWRGRWRRRSVISFGSKNRTIGVAAKNQQITHANNTVSNFKRFHGRAFNDPFIQKEKENLSYDLVPLKNGGVGIKVMYMGEEHLFSVEQITAMLLTKLKETAENSLKKPVTDCVISVPSFFTDAERRSVLDAAQIVGLNCLRLMNDMTAVALNYGIYKQDLPSLDEKPRIVVFVDMGHSAFQVSACAFNKGKLKVLGTAFDPFLGGKNFDEKLVEHFCAEFKTKYKLDAKSKIRALLRLYQECEKLKKLMSSNSTDLPLNIECFMNDKDVSGKMNRSQFEELCAELLQKIEVPLYSLLEQTHLKVEDVSAVEIVGGATRIPAVKERIAKFFGKDISTTLNADEAVARGCALQCAILSPAFKVREFSVTDAVPFPISLIWNHDSEDTEGVHEVFSRNHAAPFSKVLTFLRRGPFELEAFYSDPQGVPYPEAKIGRFVVQNVSAQKDGEKSRVKVKVRVNTHGIFTISTASMVEKVPTEENEMSSEADMECLNQRPPENPDTDKNVQQDNSEAGTQPQVQTDAQQTSQSPPSPELTSEENKIPDADKANEKKVDQPPEAKKPKIKVVNVELPIEANLVWQLGKDLLNMYIETEGKMIMQDKLEKERNDAKNAVEEYVYEFRDKLCGPYEKFICEQDHQNFLRLLTETEDWLYEEGEDQAKQAYVDKLEELMKIGTPVKVRFQEAEERPKMFEELGQRLQHYAKIAADFRNKDEKYNHIDESEMKKVEKSVNEVMEWMNNVMNAQAKKSLDQDPVVRAQEIKTKIKELNNTCEPVVTQPKPKIESPKLERTPNGPNIDKKEEDLEDKNNFGAEPPHQNGECYPNEKNSVNMDLD

SEQ ID NO: 23802 - protein, 588 aa, Homo sapiens
MDLARKEFLRGNGLAAGKMNISIDLDTNYAELVLNVGRVTLGENNRKKMKDCQLRKQQNENVSRAVCALLNSGGGVIKAEVENKGYSYKKDGIGLDLENSFSNMLPFVPNFLDFMQNGNYFHIFVKSWSLETSGPQIATLSSSLYKRDVTSAKVMNASAALEFLKDMEKTGGRAYLRPEFPAKRACVDVQEESNMEALAADFFNRTELGYKEKLTFTESTHVEIKNFSTEKLLQRITEILPQYVSAFANTDGGYLFVGLNEDKEVIGFKAEKSYLTKLEEVTKNSIGKLPVHHFCVEKGTINYLCKFLGVYDKGRLCGYVYALRVERFCCAVFAKKPDSWHVKDNRVKQLTEKEWIQFMVDSEPVCEELPSPASTSSPVSQSYPLREYINFKIQPLRYHLPGLSEKITCAPKTFCRNLFSQHEGLKQLICEEMGSVNKGSLIFSRSWSLDLGLQENHKVLCDALLISQDKPPVLYTFHMVQDEEFKDYSTQTAQTLKQKLAKIGGYTKKVCVMTKIFYLSPEGKTSCQYDLNSQVIYPESYYWTTAQTMKDLEKALSNILPKENQIFLFVCLFRFCLFVCWFVCFFLR

SEQ ID NO: 23803 - protein, 366 aa, Homo sapiens
MSSSVEQKKGPTRQRKCGFCKSNRDKECGQLLISENQKVAAHHKCMLFSSALVSSHSDNESLGGFSIEDVQKEIKRGTKLMCSLCHCPGATIGCDVKTCHRTYHYHCALHDKAQIREKPSQGIYMVYCRKHKKTAHNSEAADLEESFNEHELEPSSPKSKKKSRKGRPRKTNFKGLSEDTRSTSSHGTDEMESSSYRDRSPHRSSPSDTRPKCGFCHVGEEENEARGKLHIFNAKKAAAHYKCMLFSSGTVQLTTTSRAEFGDFDIKTVLQEIKRGKRMKCTLCSQPGATIGCEIKACVKTYHYHCGVQDKAKYIENMSRGIYKLYCKNHSGNDERDEEDEERESKSRGKVEIDQQQLTQQQLNGN

SEQ ID NO: 23804 - protein, 495 aa, Homo sapiens
MEKASIEPPEEEEEERPVVNGNGVVVTPESSEHEDKSAGASGEMPSQPYPAPVYSQPEELKEQMDDTKPTKPEDNEEPDPLPDNWEMAYTEKGEVYFIDHNTKTTSWLDPRLAKKAKPPEECKENELPYGWEKIDDPIYGTYYVDHINRRTQFENPVLEAKRKLQQHNMPHTELGTKPLQAPGFREKPLFTRDASQLKGTFLSTTLKKSNMGFGFTIIGGDEPDEFLQVKSVIPDGPAAQDGKMETGDVIVYINEVCVLGHTHADVVKLFQSVPIGQSVNLVLCRGYPLPFDPEDPANSMVPPLAIMERPPPVMVNGRHNYETYLEYISRTSQSVPDITDRPPHSLHSMPTDGQLDGTYPPPVHDDNVSMASSGATQAELMTLTIVKGAQGFGFTIADSPTGQRVKQILDIQGCPGLCEGDLIVEINQQNVQNLSHTEVVDILKDCPIGSETSLIIHRGGKTNTGSAIKYVGKIVGSFNNIVKMQISLELNEIIL

SEQ ID NO: 23805 - protein, 1504 aa, Homo sapiens
MNSPVDPGARQALRKKPPERTPEDLNTIYSYLHGMEILSNLREHQLRLMSARARYERYSGNQVLFCSETIARCWYILLSGSVLVKGSMVLPPCSFGKQFGGKRGCDCLVLEPSEMIVVENAKDNEDSILQREIPARQSRRRFRKINYKGERQTITDDVEVNSYLSLPADLTKMHLTENPHPQVTHVSSSQSGCSIASDSGSSSLSDIYQATESEVGDVDLTRLPEGPVDSEDDEEEDEEIDRTDPLQGRDLVRECLEKEPADKTDDDIEQLLEFMHQLPAFANMTMSVRRELCSVMIFEVVEQAGAIILEDGQELDSWYVILNGTVEISHPDGKVENLFMGNSFGITPTLDKQYMHGIVRTKVDDCQFVCIAQQDYWRILNHVEKNTHKVEEEGEIVMVHEHRELDRSGTRKGHIVIKATPERLIMHLIEEHSIVDPTYIEDFLLTYRTFLESPLDVGIKLLEWFKIDSLRDKVTRIVLLWVNNHFNDFEGDPAMTRFLEEFEKNLEDTKMNGHLRLLNIACAAKAKWRQVVLQKASRESPLQFSLNGGSEKGFGIFVEGVEPGSKAADSGLKRGDQIMEVNGQNFENITFMKAVEILRNNTHLALTVKTNIFVFKELLFRTEQEKSGVPHIPKIAEKKSNRHSIQHVPGDIEQTSQEKGSKKVKANTVSGGRNKIRKILDKTRFSILPPKLFSDGGLSQSQDDSIVGTRHCRHSLAIMPIPGTLSSSSPDLLQPTTSMLDFSNPSDIPDQVIRVFKVDQQSCYIIISKDTTAKEVVFHAVHEFGLTGASDTYSLCEVSVTPEGVIKQRRLPDQFSKLADRIQLNGRYYLKNNMETETLCSDEDAQELVKESQLSMLQLSTIEVATQLSMRDFDLFRNIEPTEYIDDLFKLNSKTGNTHLKRFEDIVNQETFWVASEILTEANQLKRMKIIKHFIKIALHCRECKNFNSMFAIISGLNLASVARLRGTWEKLPSKYEKHLQDLQDIFDPSRNMAKYRNILSSQSMQPPIIPLFPVVKKDMTFLHEGNDSKVDGLVNFEKLRMISKEIRQVVRMTSANMDPAMMFRQRKKRWRSLGSLSQGSTNSNMLDVQGGAHKKRARRSSLLNAKKLYEDAQMARKVKQYLSSLDVETDEEKFQMMSLQWEPAYGTLTKNLSEKRSAKSSEMSPVPMRSAGQTTKAHLHQPHRVSQVLQVPAVNLHPIRKKGQTKDPALNTSLPQKVLGTTEEISGKKHTEDTISVASSLHSSPPASPQGSPHKGYTLIPSAKSDNLSDSSHSEISSRSSIVSNCSVDSMSAALQDERCSSQALAVPESTGALEKTEHASGIGDHSQHGPGWTLLKPSLIKCLAVSSSVSNEEISQEHIIIEAADSGRGSWTSCSSSSHDNFQSLPNPKSWDFLNSYRHTHLDDPIAEVEPTDSEPYSCSKSCSRTCGQCKGSLERKSWTSSSSLSDTYEPNYGTVKQRVLESTPAESSEGLDPKDATDPVYKTVTSSTEKGLIENEQVSAV

SEQ ID NO: 23806 - protein, 2498 aa, Homo sapiens
MDPSGVKVLETAEDIQERRQQVLDRYHRFKELSTLRRQKLEDSYRFQFFQRDAEELEKWIQEKLQIASDENYKDPTNLQGKLQKHQAFEAEVQANSGAIVKLDETGNLMISEGHFASETIRTRLMELHRQWELLLEKMREKGIKLLQAQKLVQYLRECEDVMDWINDKEAIVTSEELGQDLEHVEVLQKKFEEFQTDMAAHEERVNEVNQFAAKLIQEQHPEEELIKTKQDEVNAAWQRLKGLALQRQGKLFGAAEVQRFNRDVDETISWIKEKEQLMASDDFGRDLASVQALLRKHEGLERDLAALEDKVKALCAEADRLQQSHPLSATQIQVKREELITNWEQIRTLAAERHARLNDSYRLQRFLADFRDLTSWVTEMKALINADELASDVAGAEALLDRHQEHKGEIDAHEDSFKSADESGQALLAAGHYASDEVREKLTVLSEERAALLELWELRRQQYEQCMDLQLFYRDTEQVDNWMSKQEAFLLNEDLGDSLDSVEALLKKHEDFEKSLSAQEEKITALDEFATKLIQNNHYAMEDVATRRDALLSRRNALHERAMRRRAQLADSFHLQQFFRDSDELKSWVNEKMKTATDEAYKDPSNLQGKVQKHQAFEAELSANQSRIDALEKAGQKLIDVNHYAKDEVAARMNEVISLWKKLLEATELKGIKLREANQQQQFNRNVEDIELWLYEVEGHLASDDYGKDLTNVQNLQKKHALLEADVAAHQDRIDGITIQARQFQDAGHFDAENIKKKQEALVARYEALKEPMVARKQKLADSLRLQQLFRDVEDEETWIREKEPIAASTNRGKDLIGVQNLLKKHQALQAEIAGHEPRIKAVTQKGNAMVEEGHFAAEDVKAKLHELNQKWEALKAKASQRRQDLEDSLQAQQYFADANEAESWMREKEPIVGSTDYGKDEDSAEALLKKHEALMSDLSAYGSSIQALREQAQSCRQQVAPTDDETGKELVLALYDYQEKSPREVTMKKGDILTLLNSTNKDWWKVEVNDRQGFVPAAYVKKLDPAQSASRENLLEEQGSIALRQEQIDNQTRITKEAGSVSLRMKQVEELYHSLLELGEKRKGMLEKSCKKFMLFREANELQQWINEKEAALTSEEVGADLEQVEVLQKKFDDFQKDLKANESRLKDINKVAEDLESEGLMAEEVQAVQQQEVYGMMPRDETDSKTASPWKSARLMVHTVATFNSIKELNERWRSLQQLAEERSQLLGSAHEVQRFHRDADETKEWIEEKNQALNTDNYGHDLASVQALQRKHEGFERDLAALGDKVNSLGETAERLIQSHPESAEDLQEKCTELNQAWSSLGKRADQRKAKLGDSHDLQRFLSDFRDLMSWINGIRGLVSSDELAKDVTGAEALLERHQEHRTEIDARAGTFQAFEQFGQQLLAHGHYASPEIKQKLDILDQERADLEKAWVQRRMMLDQCLELQLFHRDCEQAENWMAAREAFLNTEDKGDSLDSVEALIKKHEDFDKAINVQEEKIAALQAFADQLIAAGHYAKGDISSRRNEVLDRWRRLKAQMIEKRSKLGESQTLQQFSRDVDEIEAWISEKLQTASDESYKDPTNIQLSKLLSKHQKHQAFEAELHANADRIRGVIDMGNSLIERGACAGSEDAVKARLAALADQWQFLVQKSAEKSQKLKEANKQQNFNTGIKDFDFWLSEVEALLASEDYGKDLASVNNLLKKHQLLEADISAHEDRLKDLNSQADSLMTSSAFDTSQVKDKRDTINGRFQKIKSMAASRRAKLNESHRLHQFFRDMDDEESWIKEKKLLVGSEDYGRDLTGVQNLRKKHKRLEAELAAHEPAIQGVLDTGKKLSDDNTIGKEEIQQRLAQFVEHWKELKQLAAARGQRLEESLEYQQFVANVEEEEAWINEKMTLVASEDYGDTLAAIQGLLKKHEAFETDFTVHKDRVNDVCTNGQDLIKKNNHHEENISSKMKGLNGKVSDLEKAAAQRKAKLDENSAFLQFNWKADVVESWIGEKENSLKTDDYGRDLSSVQTLLTKQETFDAGLQAFQQEGIANITALKDQLLAAKHVQSKAIEARHASLMKRWSQLLANSAARKKKLLEAQSHFRKVEDLFLTFAKKASAFNSWFENAEEDLTDPVRCNSLEEIKALREAHDAFRSSLSSAQADFNQLAELDRQIKSFRVASNPYTWFTMEALEETWRNLQKIIKERELELQKEQRRQEENDKLRQEFAQHANAFHQWIQETRTYLLDGIAYRRVIRVYQYEVGDDLSGRSCMVEESGTLESQLEATKRKHQEIRAMRSQLKKIEDLGAAMEEALILDNKYTEHSTVGLAQQWDQLDQLGMRMQHNLEQQIQARNTTGVTEEALKEFSMMFKHFDKDKSGRLNHQEFKSCLRSLGYDLPMVEEGEPDPEFEAILDTVDPNRDGHVSLQEYMAFMISRETENVKSSEEIESAFRALSSEGKPYVTKEELYQNLTREQADYCVSHMKPYVDGKGRELPTAFDYVEFTRSLFVN

SEQ ID NO: 23807 - protein, 1106 aa, Homo sapiens
MELEKSGALLESGTYEDNYYGTPKPPAEPAPLLLNVTDQILPGATPSAEGKRKRNKSVSNMEKASIEPPEEEEEERPVVNGNGVVVTPESSEHEDKSAGASGEMPSQPYPAPVYSQPEELKEQMDDTKPTKPEDNEEPDPLPDNWEMAYTEKGEVYFIDHNTKTTSWLDPRLAKKAKPPEECKENELPYGWEKIDDPIYGTYYVDHINRRTQFENPVLEAKRKLQQHNMPHTELGTKPLQAPGFREKPLFTRDASQLKGTFLSTTLKKSNMGFGFTIIGGDEPDEFLQVKSVIPDGPAAQDGKMETGDVIVYINEVCVLGHTHADVVKLFQSVPIGQSVNLVLCRGYPLPFDPEDPANSMVPPLAIMERPPPVMVNGRHNYETYLEYISRTSQSVPDITDRPPHSLHSMPTDGQLDGTYPPPVHDDNVSMASSGATQAELMTLTIVKGAQGFGFTIADSPTGQRVKQILDIQGCPGLCEGDLIVEINQQNVQNLSHTEVVDILKDCPIGSETSLIIHRGGFFSPWKTPKPIMDRWENQGSPQTSLSAPAIPQNLPFPPALHRSSFPDSTEAFDPRKPDPYELYEKSRAIYESRRPDYKELDVHLRRMESGFGFRILGGDEPGQPILIGAVIAMGSADRDGRLHPGDELVYVDGIPVAGKTHRYVIDLMHHAARNGQVNLTVRRKVLCGGEPCPENGRSPGSVSTHHSSPRSDYATYTNSNHAAPSSNASPPEGFASHSLQTSDVVIHRKENEGFGFVIISSLNRPESGSTITVPHKIGRIIDGSPADRCAKLKVGDRILAVNGQSIINMPHADIVKLIKDAGLSVTLRIIPQEELNSPTSAPSSEKQSPMAQQSPLAQQSPLAQPSPATPNSPIAQPAPPQPLQLQGHENSYRSEVKARQDVKPDIRQPPFTDYRQPPLDYRQPPGGDYQQPPPLDYRQPPLLDYRQHSPDTRQYPLSDYRQPQDFDYFTVDMEKGAKGFGFSIRGGREYKMDLYVLRLAEDGPAIRNGRMRVGDQIIEINGESTRDMTHARAIELIKSGGRRVRLLLKRGTGQVPEYGMVPSSLSMCMKSDKHGSPYFYLLGHPKDTTNPPPGVLPLPPPQVCRK

SEQ ID NO: 23808 - protein, 533 aa, Homo sapiens [sequence omitted]

SEQ ID NO: 23809 - protein, 679 aa, Homo sapiens
MDEEIVSEKQAEESHRQDSANLLIFILLLTLTILTIWLFKHRRARFLHETGLAMIYGLLVGLVLRYGIHVPSDVNNVTLSCEVQSSPTTLLVNVSGKFYEYMLKGEISSHELNNVQDNEMLRKVTFDPEVFFNILLPPIIFYAGYSLKRRHFFRNLGSILAYAFLGTAISCFVIGSIMYGCVTLMKVTGQLAGDFYFTDCLLFGAIVSATDPVTVLAIFHELQVDVELYALLFGESVLNDAVAIVLSSSIVAYQPAGDNSHTFDVTAMFKSIGIFLGIFSGSFAMGAATGVVTALVTKFTKLREFQLLETGLFFLMSWSTFLLAEAWGFTGVVAVLFCGITQAHYTYNNLSTESQHRTKQLFELLNFLAENFIFSYMGLTLFTFQNHVFNPTFVVGAFVAIFLGRAANIYPLSLLLNLGRRSKIGSNFQHMMMFAGLRGAMAFALAIRDTATYARQMMFSTTLLIVFFTVWVFGGGTTAMLSCLHIRYCARLWGYRDELRHGLYPQGTHSLFGETDRVGVDSDQEHLGVPENERRTTKAESAWLFRMWYNFDHNYLKPLLTHSGPPLTTTLPACCGPIARCLTSPQAYENQEQLKDDDSDLILNDGDISLTYGDSTVNTEPATSSAPRRFMGNSSEDALDRELAFGDHELVIRGTRLVLPMDDSEPPLNLLDNTRHGPA

SEQ ID NO: 23810 - protein, 526 aa, Homo sapiens
MTKTYNDIDAVTRLLEEKERDLELAARIGQSLLKKNKTLTERNELLEEQVEHIREEVSQLRHELSMKDELLQFYTSAAEESEPESVCSTPLKRNESSSSVQNYFHLDSLQKKLKDLEEENVVLRSEASQLKTETITYEEKEQQLVNDCVKELRDANVQIASISEELAKKTEDAARQQEEITHLLSQIVDLQKKAKACAVENEELVQHLGAAKDAQRQLTAELRELEDKYAECMEMLHEAQEELKNLRNKTMPNTTSRRYHSLGLFPMDSLAAEIEGTMRKELQLEEAESPDITHQKRVFETVRNINQVVKQRSLTPSPMNIPGSNQSSAMNSLLSSCVSTPRSSFYGSDIGNVVLDNKTNSIILETEAADLGNDERSKKPGTPGTPGSHDLETALRRLSLRRENYLSERRFFEEEQERKLQELAEKGELRSGSLTPTESIMSLGTHSRFSEFTGFSGMSFSSRSYLPEKLQIVKPLEGDHAGPRPLSVLLGDSLWSLIHLRKAGHLCHAYSFFFRDSHPRCWFEFL

SEQ ID NO: 23811 - protein, 584 aa, Homo sapiens
MPQLNGGGGDDLGANDELISFKDEGEQEEKSSENSSAERDLADVKSSLVNESETNQNSSSDSEAERRPPPRSESFRDKSRESLEEAAKRQDGGLFKGPPYPGYPFIMIPDLTSPYLPNGSLSPTARTYLQMKWPLLDVQAGSLQSRQALKDARSPSPAHIVSNKVPVVQHPHHVHPLTPLITYSNEHFTPGNPPPHLPADVDPKTGIPRPPHPPDISPYYPLSPGTVGQIPHPLGWLVPQQGQPVYPITTGGFRHPYPTALTVNASMSSFLSSRFPPHMVPPHHTLHTTGIPHPAIVTPTVKQESSQSDVGSLHSSKHQDSKKEEEKKKPHIKKPLNAFMLYMKEMRAKVVAECTLKESAAINQILGRRWHALSREEQAKYYELARKERQLHMQLYPGWSARDNYGKKKKRKRDKQPGETNDANTPKKCRALFGLDRQTLWCKPCRRKKKCVRYIQGEGSCLSPPSSDGSLLDSPPPSPNLLGSPPRDAKSQTEQTQPLSLSLKPDPLAHLSMMPPPPALLLAEATHKASALCPNGALDLPPAALQPAAPSSSIAQPSTSSLHSHSSLAGTQPQPLSLVTKSLE

SEQ ID NO: 23812 - protein, 390 aa, Homo sapiens
MNGVTLDLEERAKVTSGFISGCSGHCTSYGTNCENGGKCLERYHGYSCDCSNTAYDGTFCNKDVGAFFEEGMWLRYNFQAPATNARDSSSRVDNAPDQQNSHPDLAQEEIRFSFSTTKAPCILLYISSFTTDFLAVLVKPTGSLQIRYNLGGTREPYNIDVDHRNMANGQPHSVNITRHEKTIFLKLDHYPSVSYHLPSSSDTLFNSPKSLFLGKVIETGKIDQEIHKYNTPGFTGCLSRVQFNQIAPLKAALRQTNASAHVHIQGELVESNCGASPLTLSPMSSATDPWHLDHLDSASADFPYNPGQGQAIRNGVNRNSAIIGGVIAVVIFTILCTLVFLIRYMFRHKGTYHTNEAKGAESAESADAAIMNNDPNFTETIDESKKEWLI

SEQ ID NO: 23813 - protein, 454 aa, Homo sapiens
MDPGQQPPPQPAPQGQGQPPSQPPQGQGPPSGPGQPAPAATQAAPQAPPAGHQIVHVRGDSETDLEALFNAVMNPKTANVPQTVPMRLRKLPDSFFKPPEPKSHSRQASTDAGTAGALTPQHVRAHSSPASLQLGAVSPGTLTPTGVVSGPAATPTAQHLRQSSFEIPDDVPLPAGWEMAKTSSGQRYFLNHIDQTTTWQDPRKAMLSQMNVTAPTSPPVQQNMMNSASAMNQRISQSAPVKQPPPLAPQSPQGGVMGGSNSNQQQQMRLQQLQMEKERLRLKQQELLRQVRPQELALRSQLPTLEQDGGTQNPVSSPGMSQELRTMTTNSSDPFLNSGTYHSRDESTDSGLSMSSYSVPRTPDDFLNSVDEMDTGDTINQSTLPSQQNRFPDYLEAIPGTNVDLGTLEGDGMNIEGEELMPSLQEALSSDILNDMESVLAATKLDKESFLTWL

SEQ ID NO: 23814 - protein, 1317 aa, Homo sapiens [sequence omitted]

SEQ ID NO: 23815 - protein, 471 aa, Homo sapiens
MGRKKIQITRIMDERNRQVTFTKRKFGLMKKAYELSVLCDCEIALIIFNSTNKLFQYASTDMDKVLLKYTEYNEPHESRTNSDIVEALNKKENKGCESPDPDSSYALTPRTEEKYKKINEEFDNMIKSHKIPAVPPPNFEMPVSIPVSSHNSLVYSNPVSSLGNPNLLPLAHPSLQRNSMSPGVTHRPPSAGNTGGLMGGDLTSGAGTSAGNGYGNPRNSPGLLVSPGNLNKNMQAKSPPPMNLGMNNRKPDLRVLIPPGSKNTMPSVSEDVDLLLNQRINNSQSAQSLATPVVSVATPTLPGQGMGGYPSAISTTYGTEYSLSSADLSSLSGFNTASALHLGSVTGWQQQHLHNMPPSALSQLGACTSTHLSQSSNLSLPSTQSLNIKSEPVSPPRDRTTTPSRYPQHTRHEAGRSPVDSLSSCSSSYDGSDREDHRNEFHSPIGLTRPSPDERESPSVKRMRLSEGWAT

SEQ ID NO: 23816 - protein, 1253 aa, Homo sapiens
MQADKCRTSSRSVKKELVIESPLQYKDAAQGEVEAESPGPVPAKPKLIEPLDYENVIVQKKTQILNDCLREMLLFPYDDFQTAILRRQGRYICSTVPAKAEEEAQSLFVTECIKTYNSDWHLVNYKYEDYSGEFRQLPNKVVKLDKLPVHVYEVDEEVDKDEDAASLGSQKGGITKHGWLYKGNMNSAISVTMRSFKRRFFHLIQLGDGSYNLNFYKDEKISKEPKGSIFLDSCMGVVQNNKVRRFAFELKMQDKSSYLLAADSEVEMEEWITILNKILQLNFEAAMQEKRNGDSHEDDEQSKLEGSGSGLDSYLPELAKSAREAEIKLKSESRVKLFYLDPDAQKLDFSSAEPEVKSFEEKFGKRILVKCNDLSFNLQCCVAENEEGPTTNVEPFFVTLSLFDIKYNRKISADFHVDLNHFSVRQMLATTSPALMNGSGQSPSVLKGILHEAAMQYPKQGIFSVTCPHPDIFLVARIEKVLQGSITHCAEPYMKSSDSSKVAQKVLKNAKQACQRLGQYRMPFAWAARTLFKDASGNLDKNARFSAIYRQDSNKLSNDDMLKLLADFRKPEKMAKLPVILGNLDITIDNVSSDFPNYVNSSYIPTKQFETCSKTPITFEVEEFVPCIPKHTQPYTIYTNHLYVYPKYLKYDSQKSFAKARNIAICIEFKDSDEEDSQPLKCIYGRPGGPVFTRSAFAAVLHHHQNPEFYDEIKIELPTQLHEKHHLLLTFFHVSCDNSSKGSTKKRDVVETQVGYSWLPLLKDGRVVTSEQHIPVSANLPSGYLGYQELGMGRHYGPEIKWVDGGKPLLKISTHLVSTVYTQDQHLHNFFQYCQKTESGAQALGNELVKYLKSLHAMEGHVMIAFLPTILNQLFRVLTRATQEEVAVNVTRVIIHVVAQCHEEGLESHLRSYVKYAYKAEPYVASEYKTVHEELTKSMTTILKPSADFLTSNKLLKYSWFFFDVLIKSMAQHLIENSKVKLLRNQRFPASYHHAVETVVNMLMPHITQKFRDNPEASKNANHSLAVFIKRCFTFMDRGFVFKQINNYISCFAPGDPKTLFEYKFEFLRVVCNHEHYIPLNLPMPFGKGRIQRYQDLQLDYSLTDEFCRNHFLVGLLLREVGTALQEFREVRLIAISVLKNLLIKHSFDDRYASRSHQARIATLYLPLFGLLIENVQRINVRDVSPFPVNAGMTVKDESLALPAVNPLVTPQKGSTLDNSLHKDLLGAISGIGNAPCSCGLLSTITLKVSWSQ

SEQ ID NO: 23817 - protein, 1526 aa, Homo sapiens
MAFSKGFRIYHKLDPPPFSLIVETRHKEECLMFESGAVAVLSSAEKEAIKGTYSKVLDAYGLLGVLRLNLGDTMLHYLVLVTGCMSVGKIQESEVFRVTSTEFISLRIDSSDEDRISEVRKVLNSGNFYFAWSASGISLDLSLNAHRSMQEQTTDNRFFWNQSLHLHLKHYGVNCDDWLLRLMCGGVEIRTIYAAHKQAKACLISRLSCERAGTRFNVRGTNDDGHVANFVETEQVVYLDDSVSSFIQIRGSVPLFWEQPGLQVGSHRVRMSRGFEANAPAFDRHFRTLKNLYGKQIIVNLLGSKEGEHMLSKAFQSHLKASEHAADIQMVNFDYHQMVKGGKAEKLHSVLKPQVQKFLDYGFFYFNGSEVQRCQSGTVRTNCLDCLDRTNSVQAFLGLEMLAKQLEALGLAEKPQLVTRFQEVFRSMWSVNGDSISKIYAGTGALEGKAKAGKLKDGARSVTRTIQNNFFDSSKQEAIDVLLLGNTLNSDLADKARALLTTGSLRASSKVLKSMCENFYKYSKPKKIRVCVGTWNVNGGKQFRSIAFKNQTLTDWLLDAPKLAGIQEFQDKRSKPTDIFAIGFEEMVELNAGNIVSASTTNQKLWAVELQKTISRDNKYVLLASEQLVGVCLFVFIRPQHAPFIRDVAVDTVKTGMGGATGNKGAVAIRMLFHTTSLCFVCSHFAAGQSQVKERNEDFIEIARKLSFPMGRMLFSHDYVFWCGDFNYRIDLPNEEVKELIRQQNWDSLIAGDQLINQKNAGQVFRGFLEGKVTFAPTYKYDLFSDDYDTSEKCRTPAWTDRVLWRRRKWPFDRSAEDLDLLNASFQDESKILYTWTPGTLLHYGRAELKTSDHRPVVALIDIDIFEVEAEERQNIYKEVIAVQGPPDGTVLVSIKSSLPENNFFDDALIDELLQQFASFGEVILIRFVEDKMWVTFLEGSSALNVLSLNGKELLNRTITIALKSPDWIKNLEEEMSLEKISIALPSSTSSTLLGEDAEVAADFDMEGDVDDYSAEVEELLPQHLQPSSSSGLGTSPSSSPRTSPCQSPTISEGPVPSLPIRPSRAPSRTPGPPSAQSSPIDAQPATPLPQKDPAQPLEPKRPPPPRPVAPPTRPAPPQRPPPPSGRSQPSPQAGLAGPGPAGYSTARPTIPPRAGVISAPQSHARASAGRLTPESQSKTSETSKGSTFLPEPLKPQAAFPPQSSLPPPAQRLQEPLVPVAAPMPQSGPQPNLETPPQPPPRSRSSHSLPSEASSQPQVKTNGISDGKRESPLKIDPFEDLSFNLLAVSKAQLSVQTSPVPTPDPKRLIQLPSATQSNVLSSVSCMPTMPPIPARSQSQENMRSSPNPFITGLTRTNPFSDRTAAPGNPFRAKSEESEATSWFSKEEPVTISPFPSLQPLGHNKSRASSSLDGFKDSFDLQGQSTLKISNPKGWVTFEEEEDFGVKGKSKSACSDLLGNQPSSFSGSNLTLNDDWNKGTNVSFCVLPSRRPPPPPVPLLPPGTSPPVDPFTTLASKASPTLDFTER

SEQ ID NO: 23818 - protein, 425 aa, Homo sapiens
MMRNKDKSQEEDSSLHSNASSHSASEEASGSDSGSQSESEQGSDPGSGHGSESNSSSESSESQSESESESAGSKSQPVLPEAKEKPASKKERIADVKKMWEEYPDVYGVRRSNRSRQEPSRFNIKEEASSGSESGSPKRRGQRQLKKQTVPKPRVKKQPKTQRGKRKKQDSSDEDDDDDEAPKRQTRRRAAKNVSYKEDDDFETDSDDLIEMTGEGVDEQQDNSETIEKVLDSRLGKKGATGASTTVYAIEANGDPSGDFDTEKDEGEIQYLIKWKGWSYIHSTWESEESLQQQKVKGLKKLENFKKKEDEIKQWLGKVSPEDVEYFNCQQELASELNKQYQIVERVIAVKTSKSTLGQTDFPAHSRKPAPSNEPEYLCKWMGLPYSECSWEDEALIGKKFQNCIDSFHSRNNSKTIPTRECKVW

SEQ ID NO: 23819 - protein, 1980 aa, Homo sapiens
MAARLLAPPGPDSFKPFTPESLANIERRIAESKLKKPPKADGSHREDDEDSKPKPNSDLEAGKSLPFIYGDIPQGLVAVPLEDFDPYYLTQKTFVVLNRGKTLFRFSATPALYILSPFNLIRRIAIKILIHSVFSMIIMCTILTNCVFMTFSNPPDWSKNVEYTFTGIYTFESLVKIIARGFCIDGFTFLRDPWNWLDFSVIMMAYVTEFVDLGNVSALRTFRVLRALKTISVIPGLKTIVGALIQSVKKLSDVMILTVFCLSVFALIGLQLFMGNLRNKCVVWPINFNESYLENGTKGFDWEEYINNKTNFYTVPGMLEPLLCGNSSDAGQCPEGYQCMKAGRNPNYGYTSFDTFSWAFLALFRLMTQDYWENLYQLTLRAAGKTYMIFFVLVIFVGSFYLVNLILAVVAMAYEEQNQATLEEAEQKEAEFKAMLEQLKKQQEEAQAAAMATSAGTVSEDAIEEEGEEGGGSPRSSSEISKLSSKSAKERRNRRKKRKQKELSEGEEKGDPEKVFKSESEDGMRRKAFRLPDNRIGRKFSIMNQSLLSIPGSPFLSRHNSKSSIFSFRGPGRFRDPGSENEFADDEHSTVEESEGRRDSLFIPIRARERRSSYSGYSGYSQGSRSSRIFPSLRRSVKRNSTVDCNGVVSLIGGPGSHIGGRLLPEATTEVEIKKKGPGSLLVSMDQLASYGRKDRINSIMSVVTNTLVEELEESQRKCPPCWYKFANTFLIWECHPYWIKLKEIVNLIVMDPFVDLAITICIVLNTLFMAMEHHPMTPQFEHVLAVGNLVFTGIFTAEMFLKLIAMDPYYYFQEGWNIFDGFIVSLSLMELSLADVEGLSVLRSFRLLRVFKLAKSWPTLNMLIKIIGNSVGALGNLTLVLAIIVFIFAVVGMQLFGKSYKECVCKINQDCELPRWHMHDFFHSFLIVFRVLCGEWIETMWDCMEVAGQAMCLIVFMMVMVIGNLVVLNLFLALLLSSFSADNLAATDDDGEMNNLQISVIRIKKGVAWTKLKVHAFMQAHFKQREADEVKPLDELYEKKANCIANHTGADIHRNGDFQKNGNGTTSGIGSSVEKYIIDEDHMSFINNPNLTVRVPIAVGESDFENLNTEDVSSESDPEGSKDKLDDTSSSEGSTIDIKPEVEEVPVEQPEEYLDPDACFTEGCVQRFKCCQVNIEEGLGKSWWILRKTCFLIVEHNWFETFIIFMILLSSGALAFEDIYIEQRKTIRTILEYADKVFTYIFILEMLLKWTAYGFVKFFTNAWCWLDFLIVAVSLVSLIANALGYSELGAIKSLRTLRALRPLRALSRFEGMRVVVNALVGAIPSIMNVLLVCLIFWLIFSIMGVNLFAGKYHYCFNETSEIRFEIEDVNNKTECEKLMEGNNTEIRWKNVKINFDNVGAGYLALLQVATFKGWMDIMYAAVDSRKPDEQPKYEDNIYMYIYFVIFIIFGSFFTLNLFIGVIIDNFNQQKKKFGGQDIFMTEEQKKYYNAMKKLGSKKPQKPIPRPLNKIQGIVFDFVTQQAFDIVIMMLICLNMVTMMVETDTQSKQMENILYWINLVFVIFFTCECVLKMFALRHYYFTIGWNIFDFVVVILSIVGMFLADIIEKYFVSPTLFRVIRLARIGRILRLIKGAKGIRTLLFALMMSLPALFNIGLLLFLVMFIFSIFGMSNFAYVKHEAGIDDMFNFETFGNSMICLFQITTSAGWDGLLLPILNRPPDCSLDKEHPGSGFKGDCGNPSVGIFFFVSYIIISFLIVVNMYIAIILENFSVATEESADPLSEDDFETFYEIWEKFDPDATQFIEYCKLADFADALEHPLRVPKPNTIELIAMDLPMVSGDRIHCLDILFAFTKRVLGDSGELDILRQQMEERFVASNPSKVSYEPITTTLRRKQEEVSAVVLQRAYRGHLARRGFICKKTTSNKLENGGTHREKKESTPSTASLPSYDSVTKPEKEKQQRAEEGRRERAKRQKEVRESKC

SEQ ID NO: 23820 - protein, 221 aa, Homo sapiens
VVWVEESDKRSFLLDLLNATGKDSLTLVFVETKKGADSLEDFLYHEGYACTSIHGDRSQRDREEALHQFRSGKSPILVATAVAARGLDISNVKHVINFDLPSDIEEYVHRIGRTGRVGNLGLATSFFNERNINITKDLLDLLVEAKQEVPSWLENMAYEHHYKGSSRGRSKSRFSGGFGARDYRQSSGASSSSFSSSRASSSRSGGGGHGSSRGFGGELGA

SEQ ID NO: 23821 - protein, 23 aa, Homo sapiens
MDASSSEMKAPVLPEPILPIQPK

SEQ ID NO: 23822 - protein, 1144 aa, Homo sapiens
MMRQAPTARKTTTRRPKPTRPASTGVAGASSSLGPSGSASAGELSSSEPSTPAQTPLAAPIIPTPVLTSPGAVPPLPSPSKEEEGLRAQVRDLEEKLETLRLKRAEDKAKLKELEKHKIQLEQVQEWKSKMQEQQADLQRRLKEARKEAKEALEAKERYMEEMADTADAIEMATLDKEMAEERAESLQQEVEALKERVDELTTDLEILKAEIEEKGSDGAASSYQLKQLEEQNARLKDALVRMRDLSSSEKQEHVKLQKLMEKKNQELEVVRQQRERLQEELSQAESTIDELKEQVDAALGAEEMVEMLTDRNLNLEEKVRELRETVGDLEAMNEMNDELQENARETELELREQLDMAGARVREAQKRVEAAQETVADYQQTIKKYRQLTAHLQDVNRELTNQQEASVERQQQPPPETFDFKIKFAETKAHAKAIEMELRQMEVAQANRHMSLLTAFMPDSFLRPGGDHDCVLVLLLMPRLICKAELIRKQAQEKFELSENCSERPGLRGAAGEQLSFAAGLVYSLSLLQATLHRYEHALSQCSVDVYKKVGSLYPEMSAHERSLDFLIELLHKDQLDETVNVEPLTKAIKYYQHLYSIHLAEQPEDCTMQLADHIKFTQSALDCMSVEVGRLRAFLQGGQEATDIALLLRDLETSCSDIRQFCKKIRRRMPGTDAPGIPAALAFGPQVSDTLLDCRKHLTWVVAVLQEVAAAAAQLIAPLAENEGLLVAALEELAFKASEQIYGTPSSSPYECLRQSCNILISTMNKLATAMQEGEYDAERPPSKPPPVELRAAALRAEITDAEGLGLKLEDRETVIKELKKSLKIKGEELSEANVRLSLLEKKLDSAAKDADERIEKVQTRLEETQALLRKKEKEFEETMDALQADIDQLEAEKAELKQRLNSQSKRTIEGLRGPPPSGIATLVSGIAGEEQQRGAIPGQAPGSVPGPGLVKDSPLLLQQISAMRLHISQLQHENSILKGAQMKASLASLPPLHVAKLSHEGPGSELPAGALYRKTSQLLETLNQLSTHTHVVDITRTSPAAKSPSAQLMEQVAQLKSLSDTVEKLKDEVLKETVSQRPGATVPTDFATFPSSAFLRAKEEQQDDTVYMGKVTFSCAAGFGQRHRLVLTQEQLHQLHSRLIS

SEQ ID NO: 23823 - protein, 1530 aa, Homo sapiens
MKEASGVGGGHSPMCPPHCHMPPGPAGEWPGATVQQPRQRAPTALLQPDAAGPGGGGVSAGVAVLGACPSASEGVLPRPPGRSAPQPPEYPGRPDMAVPGWSAMVRSRLTATSTSQATDHTFLQKSHYHHGDHPSYAKPRLPLPVFTVRHYAGTVTYQVHKFLNRNRDQLDPAVVEMLGQSQLQLVGSLFQEAEPQSRGGRGRPTLASRFQQALEDLIARLGRSHVYFIQCLTPNPGKLPGLFDVGHVTEQLHQAAILEAVGTRSANFPVRVPFEAFLASFQALGSEGQEDLSDREKCGAVLSQVLGAESPLYHLGATKVLLQEQGWQRLEELRDQQRSQALVDLHRSFHTCISRQRVLPRMQARMRGFQARKRYLRRRAALGQLNTILLVAQPLLQRRQRLQLGRWQGWHSSERALERVPSMELGRLEIPAELAVMLKTAESHRDALAGSITECLPPEVPARPSLTLPADIDLFPFSSFVAIGFQEPSLPRPGQPLAKPLTQLDGDNPQRALDINKVMLRLLGDGSLESWQRQIMGAYLVRQGQCRPGLRNELFSQLVAQLWQNPDEQQSQRGWALMAVLLSAFPPLPVLQKPLLKFVSDQAPRGMAALCQHKLLGALEQSQLASGATRAHPPTQLEWLAGWRRGRMALDVFTFSEECYSAEVESWTTGEQLAGWILQSRGLEAPPRGWSVSLHSRDAWQDLAGCDFVLDLISQTEDLGDPARPRSYPITPLGSAEAIPLAPGIQAPSLPPGPPPGPAPTLPSRDHTGEVQRSGSLDGFLDQIFQPVISSGLSDLEQSWALSSRMKGGGAIGPTQQGYPMVYPGMIQMPAYQPGMVPAPMPMMPAMGTVPAMPAMVVPPQPPLPSLDAGQLAVQQQNFIQQQALILAQQMTAQAMSLSLEQQMQQRQQQARASEAASQASPSAVTSKPRKPPTPPEKPQRDLGSEGGCLRETSEEAEDRPYQPKSFQQKRNYFQRMGQPQITVRTMKPPAKVHIPQGEAQEEEEEEEEEEEQEEQEVETRAVPSPPPPPIVKKPLKQGGAKAPKEAEAEPAKETAAKGHGQGPAQGRGTVVRSSDSKPKRPQPSREIGNIIRMYQSRPGPVPVPVQPSRPPKAFLRKIDPKDEALAKLGINGAHSSPPMLSPSPGKGPPPAVAPRPKAPLQLGPSSSIKEKQGPLLDLFGQKLPIAHTPPPPPAPPLPLPEDPGTLSAERRCLTQPVEDQGVSTQLLAPSGSVCFSYTGTPWKLFLRKEVFYPRENFSHPYYLRLLCEQILRDTFSESCIRISQNERRKMKDLLGGLEVDLDSLTTTEDSVKKRIVVAARDNWANYFSRFFPVSGESGSDVQLLAVSHRGLRLLKVTQGPGLRPDQLKILCSYSFAEVLGVECRGGSTLELSLKSEQLVLHTARARAIEALVELFLNELKKDSGYVIALRSYITDNCSLLSFHRGDLIKLLPVATLEPGWQFGSAGGRSGLFPADIVQPAAAPDFSFSKEQRSGWHKGQLSNGEPGLARWDRASEVRKMGEGQAEARPA

SEQ ID NO: 23824 - protein, 242 aa, Homo sapiens
LPCEFLRPGCGAPLSPGAQLGRGAPTSAFPPPAAEAHPAARRGLRSPQLPSGAMSQNGAPGMQEESLQGSWVELHFSNNGNGGSVPASVSIYNGDMEKILLDAQHESGRSSSKSSHCDSPPRSQTPQDTNRASETDTHSIGEKNSSQSEEDDIERRKEVESILKKNSDWIWDWSSRPENIPPKEFLFKHPKRTATLSMRNTSVMKKGGIFSAEFLKVFLPSLLLSHLLAIGLGDGASPRCPG

SEQ ID NO: 23825 - protein, 1074 aa, Homo sapiens
MAPGMSGRGGAALLCLSALLAHASGRSHPASPSPPGPQASPVLPVSYRLSHTRLAFFLREARPPSPAVANSSLQRSEPFVVFQTKELPVLNVSLGPFSTSQVVARELLQPSSTLDIPERLTVNWKVRAFIVRSHVPASQPVVQVLFYVAGRDWDDFGVTERLPCVRLHAFRDAREVKSSCRLSGGLATCLVRAELPLAWFGPPAPAAPPTARRKSPDGLEPEATGESQQAELYYTLHAPDASGGCGGSRRGAGPGVGARAESPTQHPLLRIGSISLFRPPPRRTLQEHRLDSNLMIRLPDRPLKPGEVLSILLYLAPNSSSPSSPSVEHFTLRVKAKKGVTLLGTKSRSGQWHVTSELLTGAKHSTATVDVAWAQSTPLPPREGQGPLEILQLDFEMENFTSQSVKRRIMWHIDYRGHGALPDLERAVTELTVIQRDVQAILPLAMDTEIINTAILTGRTVAIPVKVIAIEVNGLVLDISALVECESDNEDIIKVSSSCDYVFVSGKESRGSMNARVTFRYDVLNAPLEMTVWVPKLPLHIELSDARLSQVKGWRVPILPDRRSVRESEDEDEEEEERRQSASRGCTLQYQHATLQVFTQFHTTSSEGTDQVVTMLGPDWLVEVTDLVSDFMRVGDPRVAHMVDSSTLAGLEPGTTPFKVVSPLTEAVLGETLLTVTEEKVSITQLQAQVVASLALSLRPSPGSSHTILATTAAQQTLSFLKQEALLSLWLSYSDGTTAPLSLYSPRDYGLLVSSLDEHVATVTQDRAFPLVVAEAEGSGELLRAELTIAESCQKTKRKSVLATTPVGLRVHFGRDEEDPTYDYPGPSQPGPGGGEDEARGAGPPGSALPAPEAPGPGTASPVVPPTEDFLPLPTGFLQVPRGLTDLEIGMYALLGVFCLAILVFLINCIVFVLRYRHKRIPPEGQTSMDHSHHWVFLGNGQPLRVQGELSPPAGNPLETVPAFCHGDHHSSGSSQTSVQSQVHGRGDGSSGGSARDQAEDPASSPTSKRKRVKFTTFTTLPSEELAYDSVPAGEEDEEEEEDLGWGCPDVAGPTRPTAPPDLHNYMRRIKEIA

SEQ ID NO: 23826 - protein, 1543 aa, Homo sapiens
MGRNQRKAPQRLERPGRPASGEQESGSASADGAPSRERRSDRGQADRAKPAAEPATAGGQGTPGGRRKPTAEGNGGCRRPGAGLSPKAQERQSNAQRQGRGPRGGRGGRLEEGSLSGGEELGGRRRRKRKDKGPSARRGRRTPRSLNGDTSGGDGGSSCPDSETREAQESGSQRGTARELRPTPEPTDMGSEGTKTGPESALEPSSDGLDSDWPHADTRGREGSSGTGPLGASEHSGGDSDSSPLGTGPGRGSRAAMASRTFEDSSRAPRDTGPAKDASDNRAQRGAEPETMQASTARAPRHQVGKAVGQVPAAAGEGEAGAAAGAGPEDPAPLAALLVVRRLLARPPPGAASQAVGPRRAGLKERLLSVARALGLLRWLRRRLRLRRRPPEGEGQGTGPRASEGWGRRKPDEGRGHGRGSKGRGRGKADEGRGHERGDEGRGRGKADEGRGHERGYEGRGCGKADEGRGHERGDEGRDHQRGYEGWGREPGLRHRLALRLAGLAGLGGMPRASPGGRSPQVPTSPVPGDPFDQEDETPDPKFAVVFPRIHRAGRASSSRSSEEASADAPTGEGRGWPRAGVGGHSEGCRTSGEGVSGLRRGSLLAPTAPDGPSLDESGSSSEAELETLNDEPPVRWAQGSGPHEGPRLGAAVLLPRLSLETRLQQEGDPGLRGSLRELWEPEDEDEAVLERDLELSLRPGLEAPPFPGAKGRSLGDGLEDMEDLARLRHIFAIVASAYDLAQNTGQDPCILLCGHSGSGKTEAAKKIMQFLSSLEQDQTGNRECQVEDMLPILSSFGHAKTILNANASRFGQVFCLYLQQGVIVGASVSHYLLETSRVVFQAQAERSFHVFYKLLAGLDSIERERLSLQGPETYYYLNQGQACRLQGKEDAQDFEGLLKALQGLGLCPEELNAVWAVLAAILQLGNICFSSSERESQEVAAVSSWAEIHTAARLLRVPPECLEGAVTRRVTETPYGQVSRSLPVESAFDARDALAKALYSRLFHRLLRRTNARLAPPGEGGSIGTVTVVDAYGFEALRVNGLEQLCNNLASERLQLFSSQMLLAQEEPPRESCLDLLVDQPHSLLSILDAQTWLSQATDHTFLQKSHYHHGDHPSYAKPRLPLPVFTVRHYAGTVTYQVHKFLNRNRDQLDPAVVEMLGQSQLQLVGSLFQEAEPQSRGGRGRPTLASRFQQALEDLIARLGRSHVYFIQCLTPNPGKLPGLFDVGHVTEQLHQAAILEAVGTRSANFPVRVPFEAFLASFQALGSEGQEDLSDREKCGAVLSQVLGAESPLYHLGATKVLLQEQGWQRLEELRDQQRSQALVDLHRSFHTCISRQRVLPRMQARMRGFQARSAGVGARAEVGGPVFTHSSNSCWLTVCLIYPWARCWKRYLRRRAALGQLNTILLVAQPLLQRRQRLQELGRLEIPAELAVMLKTAESHRDALAGSITECLPPEVPARPSLTLPADIDLFPFSSFVAIGFQARAATGEAPNPAGWRQPSACPGHQQSDAAAPGGRIPGVLAEADHGRIPGAAGAVPARAAE

SEQ ID NO: 23827 - protein, 308 aa, Homo sapiens
MLELSAPELEPPKAALSPSQVEVPEDEEDYTGVCHPECGDKGCDGPNADQCLNCVHFSLGSVKTSRKCVSVCPLGYFGDTAARRCRRCHKGCETCSSRAATQCLSCRRGFYHHQEMNTCVTLCPAGFYADESQKNCLKCHPSCKKCVDEPEKCTVCKEGFSLARGSCIPDCEPGTYFDSELIRCGECHHTCGTCVGPGREECIHCAKNFHFHDWKCVPACGEGFYPEEMPGLPHKVCRRCDENCLSCAGSSRNCSRCKTGFTQLGTSCITNHTCSNADETFCEMVKSNRLCERKLFIQFCCRTCLLAG

SEQ ID NO: 23828 - protein, 1902 aa, Homo sapiens
MKVFKRRYFYLTQLPDGSYILNSYKDEKNSKESKGCIYLDACIDVVQCPKMRRHAFELKMLDKYSHYLAAETEQEMEEWLITLKKIIQINTDSLVQEKKETVETAQDDETSSQGKAENIMASLERSMHPELMKYGRETEQLNKLSRGDGRQNLFSFDSEVQRLDFSGIEPDIKPFEEKCNKRFLVNCHDLTFNILGQIGDNAKGPPTNVEPFFINLALFDVKNNCKISADFHVDLNPPSVREMLWGSSTQLASDGSPKGSSPESYIHGIAESQLRYIQQGIFSVTNPHPEIFLVARIEKVLQGNITHCAEPYIKNSDPVKTAQKVHRTAKQVCSRLGQYRMPFAWAARPIFKDTQGSLDLDGRFSPLYKQDSSKLSSEDILKLLSEYKKPEKTKLQIIPGQLNITVECVPVDLSNCITSSYVPLKPFEKNCQNITVEVEEFVPEMTKYCYPFTIYKNHLYVYPLQLKYDSQKTFAKARNIAVCVEFRDSDESDASALKCIYGKPAGSVFTTNAYAVVSHHNQNPEFYDEIKIELPIHLHQKHHLLFTFYHVSCEINTKGTTKKQDTVETPVGFAWVPLLKDGRIITFEQQLPVSANLPPGYLNLNDAESRRQCNVDIKWVDGAKPLLKIKSHLESTIYTQDLHVHKFFHHCQLIQSGSKEVPGELIKYLKCLHAMEIQVMIQFLPVILMQLFRVLTNMTHEDDVPINCTMVLLHIVSKCHEEGLDSYLRSFIKYSFRPEKPSAPQAQLIHETLATTMIAILKQSADFLSINKLLKYSWFFFEIIAKSMATYLLEENKIKLPRGQRFPETYHHVLHSLLLAIIPHVTIRYAEIPDESRNVNYSLASFLKRCLTLMDRGFIFNLINDYISGFSPKDPKVLAEYKFEFLQTICNHEHYIPLNLPMAFAKPKLQRVQDFFSFAVDRLTSVDSNLEYSLSDEYCKHHFLVGLLLRETSIALQDNYEIRYTAISVIKNLLIKHAFDTRYQHKNQQAKIAQLYLPFVGLLLENIQRLAGRDTLYSCAAMPNSASRDEFPCGFTSPANRGSLSTDKDTAYGSFQNGHGIKREDSRGSLIPEGATGFPDQGNTGENTRQSSTRSSVSQYNRLDQYEIRSLLMCYLYIVKMISEDTLLTYWNKVSPQELINILILLEVCLFHFRYMGKRNIARVHDAWLSKHFGIDRKSQTMPALRNRSGVMQARLQHLSSLESSFTLNHSSTTTEADIFHQALLEGNTATEVSLTVLDTISFFTQCFKTQLLNNDGHNPLMKKVFDIHLAFLKNGQSEVSLKHVFASLRAFISKFPSAFFKGRVNMCAAFCYEVLKCCTSKISSTRNEASALLYLLMRNNFEYTKRKTFLRTHLQIIIAVSQLIADVALSGGSRFQESLFIINNFANSDRPMKATAFPAEVKDLTKRIRTVLMATAQMKEHEKDPEMLIDLQYSLAKSYASTPELRKTWLDSMAKIHVKNGDFSEAAMCYVHVAALVAEFLHRKKLFPNGCSAFKKITPNIDEEGAMKEDAGMMDVHYSEEVLLELLEQCVDGLWKAERYEIISEISKLIVPIYEKRREFEKLTQVYRTLHGAYTKILEVMHTKKRLLGTFFRVAFYGQSFFEEEDGKEYIYKEPKLTGLSEISLRLVKLYGEKFGTENVKIIQDSDKVNAKELDPKYAHIQVTYVKPYFDDKELTERKTEFERNHNISRFVFEAPYTLSGKKQGCIEEQCKRRTILTTSNSFPYVKKRIPINCEQQINLKPIDVATDEIKDKTAELQKLCSSTDVDMIQLQLKLQGCVSVQVNAGPLAYARAFLNDSQASKYPPKKVSELKDMFRKFIQACSIALELNERLIKEDQVEYHEGLKSNFRDMVKELSDIIHEQILQEDTMHSPWMSNTLHVFCAISGTSSDRGYGSPRYAEV

SEQ ID NO: 23829 - protein, 835 aa, Homo sapiens
MERTDSVTLFWIRGGHSNSPAGSVAHSTTSDIRPSHSVPEGVHGRVAVGQDARFPSLTSPVLRTPSSEPDEPHQARSGPNPPGMESMGMVYSVPSSCNGPTESTFSTSWKGDAFTYMTPSATSQSNQVNENGKNPSCGNSWVSLNKVPPLVPKEAATLLVARDNPAGCSGSAGYPERLIQQRHMPERPSKIGLLTSGTSRLETGPGGASRFRERSLSVPTDSGTTDVDYDEEQKANEACALPFASTSSEGSNSADNIASLSAQQEAQHRRQRSKSISLRKAKKKPSPPTRSVSLVKDEPGLLPEGGSALPKDQRPKSLCLSLEHQGHHSSHPDAQGHPAIPNHKDPESTQFSHHWYLTDWKSGDTYQSLSSSSTATGTTVIECTQVQGSSESLASPSTSRATTPSQLSIEVEAREISSPGRPPGLMSPSSGYSSQSETPTPTVSMSLTLGHLPPPSSSVRVRPVVPERKSSLPPTSPMEKFPKSRLSFDLPLTSSPNLDLSGMSISIRSKTKVSRHHSETNFGVKLAQKTNPNQPIMPMVTQSDLRSVRLRSVSKSEPEDDIESPEYAEEPRAEEVFTLPERKTKPPVAEKPPVARRPPSLVHKPPSVPEEYALTSPTLAMPPRSSIQHARPLPQDSYTVVRKPKPSSFPDGRSPGESTAPSSLVFTPFASSSDAFFSGTQQPPQGSVEDEGPKVRVLPERISLQSQEEAEKKKGKIPPPVPKKPSVLYLPLTSPTAQMEAYVAEPRLPLSPIITLEEDTKCPATGDDLQSLGQRVTSTPQADSEREASPLGSSVEPGTEEKSLISDKTAEWIAEDDDDVFVASRTTEDLFTVIH

SEQ ID NO: 23830 - protein, 216 aa, Homo sapiens
MNPASDGGTSESIFDLDYASWGIRSTLMVAGFVFYLGVFVVCHQLSSSLNATYRSLVAREKVFWDLAATRAVFGVQSTAAGLWALLGDPVLHADKARGQQNWCWFHITTATGFFCFENVAVHLSNLIFRTFDLFLVIHHLFAFLGFLGCLVNLQAGHYLAMTTLLLEMSTPFTCVSWMLLKETGSLERKNKHNKSLLPSGSRRAGPSLCFGSSTSG

SEQ ID NO: 23831 - protein, 1121 aa, Homo sapiens
MSAPVGPRGRLAPIPAASQPPLQPEMPDLSHLTEEERKIILAVMDRQKKEEEKEQSVLKKLHQQFEMYKEQVKKMGEESQQQQEQKGDAPTCGICHKTKFADGCGHNCSYCQTKFCARCGGRVSLRSNKEDKVVMWVCNLCRKQQEILTKSGAWFYNSGSNTPQQPDQKVLRGLRNEEAPQEKKPKLHEQTQFQGPSGDLSVPAVEKSRSHGLTRQHSIKNGSGVKHHIASDIASDRKRSPSVSRDQNRRYDQREEREEYSQYATSDTAMPRSPSDYADRRSQHEPQFYEDSDHLSYRDSNRRSHRHSKEYIVDDEDVESRDEYERQRREEEYQSRYRSDPNLARYPVKPQPYEEQMRIHAEVSRARHERRHSDVSLANADLEDSRISMLRMDRPSRQRSISERRAAMENQRSYSMERTREAQGPSSYAQRTTNHSPPTPRRSPLPIDRPDLRRTDSLRKQHHLDPSSAVRKTKREKMETMLRNDSLSSDQSESVRPPPPKPHKSKKGGKMRQISLSSSEEELASTPEYTSCDDVEIESESVSEKGDMDYNWLDHTSWHSSEASPMSLHPVTWQPSKDGDRLIGRILLNKRLKDGSVPRDSGAMLGLKVVGGKMTESGRLCAFITKVKKGSLADTVGHLRPGDEVLEWNGRLLQGATFEEVYNIILESKPEPQVELVVSRPIGDIPRIPDSTHAQLESSSSSFESQKMDRPSISVTSPMSPGMLRDVPQFLSGQLSIKLWFDKVGHQLIVTILGAKDLPSREDGRPRNPYVKIYFLPDRSDKNKRRTKTVKKTLEPKWNQTFIYSPVHRREFRERMLEITLWDQARVREEESEFLGEILIELETALLDDEPHWYKLQTHDVSSLPLPHPSPYMPRRQLHGESPTRRLQRSKRISDSEVSDYDCDDGIGVVSDYRHDGRDLQSSTLSVPEQVMSSNHCSPSGSPHRVDVIGRTRSWSPSVPPPQSRNVEQGLRGTRTMTGHYNTISRMDRHRVMDDHYSPDRDSHFLTLPRSRYSQTIDHHHRDGRDCEAADRQPYHRSRSTEQRPLLERTTTRSRSTERPDTNLMRSMPSLMTGRSAPPSPALSRSHPRTGSVQTSPSSTPVAGRRGRQLPQLPPKGTLDR

SEQ ID NO: 23832 - protein, 852 aa, Homo sapiens
MNYVGQLAETVFGTVKELYRGLNPATLSGGIDVLVVKQVDGSFRCSPFHVRFGKLGVLRSREKVVDIELNGEPVDLHMKLGDSGEAFFVQELESDDEHVPPGLCTSPIPWGGLSGFPSDSQLGTASEPEGLVMAGTASTGRRKRRRRRKPKQKEDAVATDSSPEELEAGAESELSLPEKLRPEPPGSVQLEEKSSLQPKDIYPYSDGEWPPQASLSAGELTSPKSDSELEVRTPEPSPLRAESHMQWAWGRLPKVARAERPESSVVLEGRAGATSPPRGGPSTPSTSVAGGVDPLGLPIQQTEAGADLQPDTEDPTLVGPPLHTPETEESKTQSSGDMGLPPASKSWSWATLEVPVPTGQPERVSRGKGSPKRSQHLGPSDIYLDDLPSLDSENAALYFPQSDSGLGARRWSEPSSQKSLRDPNPEHEPEPTLDTVDTIALSLCGGLADSRDISLEKFNQHSVSYQDLTKNPGLLDDPNLVVKINGKHYNWAVAAPMILSLQAFQKNLPKSTMDKLEREKMPRKGGRWWFSWRRRDFLAEERSAQKEKTAAKEQQGEKTEVLSSDDDAPDSPVILEIPSLPPSTPPSTPTYKKSLRLSSDQIRRLNLQEGANDVVFSVTTQYQGTCRCKATIYLWKWDDKVVISDIDGTITKSDALGHILPQLGKDWTHQGITSLYHKIQLNGYKFLYCSARAIGMADLTKGYLQWVSEGGCSLPKGPILLSPSSLFSALHREVIEKKPEVFKVACLSDIQQLFLPHGQPFYAAFGNRPNDVFAYRQVGLPESRIFTVNPRGELIQELIKNHKSTYERLGEVVELLFPPVARGPSTDLANPEYSNFCYWREPLPAVDLDTLD

SEQ ID NO: 23833 - protein, 394 aa, Homo sapiens
MDAPRASAAKPPTGRKMKARAPPPPGKAATLHVHSDQKPPHDGALGSQQNLVRMKEALRASTMDVTVVLPSGLEKRSVLNGSHAMMDLLVELCLQNHLNPSHHALEIRSSETQQPLSFKPNTLIGTLNVHTVFLKEKVPEEKVKPGPPKVPEKSVRLVVNYLRTQKAVVRVSPEVPLQNILPVICAKCEVSPEHVVLLRDNIAGEELELSKSLNELGIKELYAWDNRRVRLSKTQSEPSLSCQETFRKSSLGNDETDKEKKKFLGFFKVNKRSNSKGCLTTPNSPSMHSRSLTLGPSLSLGSISGVSVKSEMKKRRAPPPPGSGPPVQDKASEKVSLGSQIDLQKKKRRAPAPPPPQPPPPSPLIPNRTEDKEENRKSTMVYCCASFPTQAKRF

SEQ ID NO: 23834 - protein, 55 aa, Homo sapiens
MVHLTPEEKSAVTALWGKVNVDEVGGCWWSTLGPRGSLSPLGICPLLMLLWATLR

SEQ ID NO: 23835 - protein, 2131 aa, Homo sapiens
MPLSPPAQGDPGEPSPCRPPKKHTTFHLWRSKKKQQPAPPDCGVFVPHPLPAPAGEARALDVVDGKYVVRDSQEFPLHCGESQFFHTTSEALGSLLLESGIFKKSRAQPPEDNRRKPVLGKLGTLFTAGRRRNSRNGLESPTRSNAKPLSPKDVVASPKLPERESERSRSQSSQLKQTDTSEEGSPRENPREAEGELPESGGPAAPPDAELSPRWSSSAAAVAVQQCHENDSPQLEPLEAEGEPFPDATTTAKQLHSSPGNSSRQENAETPARSPGEDASPGAGHEQEAFLGVRGAPGSPTQERPAGGLGEAPNGAPSVCAEEGSLGPRNARSQPPKGASDLPGEPPAEGAAHTASSAQADCTARPKGHAHPAKVLTLDIYLSKTEGAQVDEPVVITPRAEDCGDWDDMEKRSSGRRSGRRRGSQKSTDSPGADAELPESAARDDAVFDDEVAPNAASDNASAEKKVKSPRAALDGGVASAASPESKPSPGTKGQLRGESDRSKQPPPASSPTKRKGRSRALEAVPAPPASGPRAPAKESPPKRVPDPSPVTKGTAAESGEEAARAIPRELPVKSSSLLPEIKPEHKRGPLPNHFNGRAEGGRSRELGRAAGAPGASDADGLKPRNHFGVGRSTVTTKVTLPAKPKHVELNLKTPKNLDSLGNEHNPFSQPVHKGNTATKISLFENKRTNSSPRHTDIRGQRNTPASSKTFVGRAKLNLAKKAKEMEQPEKKVMPNSPQNGVLVKETAIETKVTVSEEEILPATRGMNGDSSENQALGPQPNQDDKADVQTDAGCLSEPVASALIPVKDHKLLEKEDSEAADSKSLVLENVTDTAQDIPTTVDTKDLPPTAMPKPQHTFSDSQSPAESSPGPSLSLSAPAPGDVPKDTCVQSPISSFPCTDLKVSENHKGCVLPVSRQNNEKMPLLELGGETTPPLSTERSPEAVGSECPSRVLVQVRSFVLPVESTQDVSSQVIPESSEVREVQLPTCHSNEPEVVSVASCAPPQEEVLGNEHSHCTAELAAKSGPQVIPPASEKTLPIQAQSQGSRTPLMAESSPTNSPSSGNHLATPQRPDQTVTNGQDSPASLLNISAGSDDSVFDSSSDMEKFTEIIKQMDSAVCMPMKRKKARMPNSPAPHFAMPPIHEDHLEKVFDPKVFTFGLGKKKESQPEMSPALHLMQNLDTKSKLRPKRASAEQSVLFKSLHTNTNGNSEPLVMPEINDKENRDVTNGGIKRSRLEKSALFSSLLSSLPQDKIFSPSVTSVNTMTTAFSTSQNGSLSQSSVSQPTTEGAPPCGLNKEQSNLLPDNSLKVFNFNSSSTSHSSLKSPSHMEKYPQKEKTKEDLDSRSNLHLPETKFSELSKLKNDDMEKANHIESVIKSNLPNCANSDTDFMGLFKSSRYDPSISFSGMSLSDTMTLRGSVQNKLNPRPGKVVIYSEPDVSEKCIEVFSDIQDCSSWSLSPVILIKVVRGCWILYEQPNFEGHSIPLEEGELELSGLWGIEDILERHEEAESDKPVVIGSIRHVVQDYRVSHIDLFTEPEGLGILSSYFDDTEEMQGFGVMQKTCSMKVHWGTWLIYEEPGFQGVPFILEPGEYPDLSFWDTEEAYIGSMRPLKMGGRKVEFPTDPKVVVYEKPFFEGKCVELETGMCSFVMEGGETEEATGDDHLPFTSVGSMKVLRGIWVAYEKPGFTGHQYLLEEGEYRDWKAWGGYNGELQSLRPILGDFSNAHMIMYSEKNFGSKGSSIDVLGIVANLKETGYGVKTQSINVLSGVWVAYENPDFTGEQYILDKGFYTSFEDWGGKNCKISSVQPICLDSFTGPRRRNQIHLFSEPQFQGHSQSFEETTSQIDDSFSTKSCRVSGGSWVVYDGENFTGNQYVLEEGHYPCLSAMGCPPGATFKSLRFIDVEFSEPTIILFEREDFKGKKIELNAETVNLRSLGFNTQIRSVQVIGGIWVTYEYGSYRGRQFLLSPAEVPNWYEFSGCRQIGSLRPFVQKRIYFRLRNKATGLFMSTNGNLEDLKLLRIQVMEDVGADDQIWIYQEGCIKCRIAEDCCLTIVGSLVTSGSKLGLALDQNADSQFWSLKSDGRIYSKLKPNLVLDIKGGTQYDQNHIILNTVSKEKFTQVWEAMVLYT

SEQ ID NO: 23836 - protein, 993 aa, Homo sapiens
MAMNFGDHASGFRHDDVIRFINNEVLRNGGSPAFYTAFRSRPWNEVEDRLRAIVADPRVPRAIKRACTWSALALSVQVAARQQEELLYQVWWLQGHVEECQATSWALTSQLQQLRLEHEEVATQLHLTQAALQQVLNERDGLCGRLLEVERSMQVYPMPQDFVPGPEAGQYGPVAGTLNAEQSEAVATEAQGMPHSEAQVAAPTAVYYMPEPQSGRVQGMQPLLLMQAPHPVPFHMPSPMGLPYSTPLPPPVVMESAAAIAPQMPPAGIYPPGLWATVGSQEETAPPWDQKCHGQDGYPENFQGVYHPGDNRSCNQKEGSECPQGMTSQGDSSSHSLKKDPVMQEGTAPPEFSRSHSLEKKPVMPKEMVPLGDSNSHSLKKDPVVPKEIVPIGDSNSHSLTKNPVVHKEMVSLGDSNSHSMKKDPVMPQKMVPLGDSNSHSLKKDPMMCQEMVPLGDSNSHSLKKDPVVAQGTAPLMYSRRHSQKKVPMMPKEMVPLGESHSHSLKKDLVVPKELVPLGDSKSHRMKKDPVMPQKMVPLGDSRSHSLKKDPVMPQNMIPLEDSNSHSLKKDPVMPQNMIPLEDSNSHSLKKDPMMHQEMVPLGDSNSHSLKKDPVVPQDTAPLMFSRRHSLKKVPVMPKEMVPLGDSHSLKKDPVMPQNMVPLEDSNSHSLKKDPVVPQGTAPLMFSRRHSLKKVPVMPKEMVPLGDSNSHSLKKDPVVPQGTAPLMFSRRHSLKKVPVMPKEMVPLGDSHSLKKDPVMPQNMVPLEDSNSHSLKKDPVVPQGTAPLTFSRRHSLKKVPVVPQGTASLGFSRIHSLKKELVMPEEMVPLGDSNSHSMKKDLVMPKEMVPLGDSNSHSLKKDPVVHQEVVSLGDSNSHSLKKHPVIPQGTASLRFSKSHSQKEDQERPQVTPLEDSKSHGVKNSPWKHQPQGQKVKEQKRKKASESQQQKPASCSSPVNWACPWCNAMNFPRNKVCSKCKRVRMPVENGSVDPA

SEQ ID NO: 23837 - protein, 707 aa, Homo sapiens
MAAEVYFGDLELFEPFDHPEESIPKPVHTRFKDDDGDEEDENGVGDAELRERLRQCEETIEQLRAENQELKRKLNILTRPSGILVNDTKLDGPILQILFMNNAISKQYHQEIEEFVSNLVKRFEEQQKNDVEKTSFNLLPQPSSIVLEEDHKVEESCAIKNNKEAFSVVGSVLYFTNFCLDKLGQPLLNENPQLSEGWEIPKYHQVFSHIVSLEGQEIQVKAKRPKPHCFNCGSEEHQMKDCPMPRNAARISEKRKEYMDACGEANNQNFQQRYHAEEVEERFGRFKPGVISEELQDALGVTDKSLPPFIYRMRQLGYPPGWLKEAELENSGLALYDGKDGTDGETEVGEIQQNKSVTYDLSKLVNYPGFNISTPRGIPDEWRIFGSIPMQACQQKDVFANYLTSNFQAPGVKSGNKRSSSHSSPGSPKKQKNESNSAGSPADMELDSDMEVPHGSQSSESFQFQPPLPPDTPPLPRGTPPPVFTPPLPKGTPPLTPSDSPQTRTASGAVDEDALTLEELEEQQRRIWAALEQAESVNSDSDVPVDTPLTGNSVASSPCPNELDLPVPEGKTSEKQTLDEPEVPEIFTKKSEAGHASSPDSEVTSLCQKEKAELAPVNTEGALLDNGSVVPNCDISNGGSQKLFPADTSPSTATKIHSPIPDMSKFATGITPFEFENMAESTGMYLRIRSLLKNSPRNQQKNKKASE

SEQ ID NO: 23838 - protein, 246 aa, Homo sapiens
MNLLLILTFVAAAVAAPFDDDDKIVGGYICEENSVPYQVSLNSGYHFCGGSLISEQWVVSAGHCYKSAINSKLSGRGCEYHRIQVRLGEHNIEVLEGNEQFINAAKIIRHPKYNSRTLDNDILLIKLSSPAVINSRESLISGWGNTLSSGADYPDELQCLDAPVLSQAECEASYPGKITNNMFCVGFLEGGKDSCQGDSGGPVVSNGELQGIVSWGYGCAQKNRPGVYTKVYNYVDWIKDTIAANS

SEQ ID NO: 23839 - protein, 962 aa, Homo sapiens
PQEKLCKNPCAMFAAGEIKTPTGEGLLDSPSKTMSIKERLALLKKSGEEDWRNRLSRRQEGGKAPASSLHTQEAGRSLIKKEEGGVADDSAISNLLWRVTESRESQMTIEERKQLITVREEAWKTRGRGAANDSTQFTVAGRMVKKGLASPTAITPVASPICGKTRGTTPVSKPLEDIEARPDMQLESDLKLDRLETFLRRLNNKVGGMHETVLTVTGKSVKEVMKPDDDETFAKFYRSVDYNMPRSPVEMDEDFDVIFDPYAPKLTSSVAEHKRAVRPKRRVQASKNPLKMLAAREDLLQEYTEQRLNVAFMESKRMKVEKMSSNSNFSEVTLAGLASKENFSNVSLRSVNLTEQNSNNSAVPYKRLMLLQIKGRRHVQTRLVEPRASALNSGDCFLLLSPHCCFLWVGEFANVIEKAKASELATLIQTKRELGCRATYIQTIEEGINTHTHAAKDFWKLLGGQTSYQSAGDPKEDELYEAAIIETNCIYRLMDDKLVPDDDYWGKIPKCSLLQPKEVLVFDFGSEVYVWHGKEVTLAQRKIAFQLAKHLWNGTFDYENCDINPLDPGECNPLIPRKGQGRPDWAIFGRLTEHNETILFKEKFLDWTELKRSNEKNPGELAQHKEDPRTDVKAYDVTRMVSMPQTTAGTILDGVNVGRGYGLVEGHDRRQFEITSVSVDVWHILEFDYSRLPKQSIGQFHEGDAYVVKWKFMVSTAVGSRQKGEHSVRAAGKEKCVYFFWQGRHSTVSEKGTSALMTVELDEERGAQVQVLQGKEPPCFLQCFQGGMVVHSGRREEEEENVQSEWRLYCVRGEVPVEGNLLEVACHCSSLRSRTSMVVLNVNKALIYLWHGCKAQAHTKEVGRTAANKIKEQCPLEAGLHSSSKVTIHECDEGSEPLGFWDALGRRDRKAYDCMLQDPGSFNFAPRLFILSSSSGDFAATEFVYPARAPSVVSSMPFLQED

SEQ ID NO: 23840 - protein, 407 aa, Homo sapiens
MPRGQKSKLRARGKRRETHDQPQGLTGPQATAEKQEESRSSSSSSAVCQGARRRSSGSSVPQESQGASPTGYPDAGASCSKYDVAAMGQDEKSPSTSRDASVSQESQGASPIGPPDAGISCSKSDEAAKGQNEKSPSTSRDASVPQESQGASPTGSPDADVSGSKSDVAAKGQDEESLSSSKRAAFFTTTDGDPIKRKANKMVQFLQKKFEKKEPILKADMLKRLRRQYKPCFPEILKRTSEHLTVFFGVELKETDSSGESYTLVSKLGLSNEGSLSGDNALPKSGLLMSILGLIFMRGNRATEEEVWKFLGLLGIYDGILHSIYGDARKIITEDLVQDKYVVYRQVCNSDPPCYEFLWGPRAYAETTKMRVLRVLAEINNTSPGLYPHLYEDALTDEVERALRLRA

SEQ ID NO: 23841 - protein, 118 aa, Homo sapiens
MTFGQSKLYRSEDYGKNFKDITDLINNTFIRTEFGMAIGPENSGKVVLTAEVSGGSRGGRIFRSSDFAKNFVQTDLPFHPLTQMMYSPQNSDYLLALSTENGLWVSKNFGGKWEEIHK

SEQ ID NO: 23842 - protein, 334 aa, Homo sapiens
MVDYYEVLGVQRHASPEDIKKAYRKLALKWHPDKNPENKEEAERKFKQVAEAYEVLSDAKKRDIYDKYGKEGLNGGGGGGSHFDSPFEFGFTFRNPDDVFREFFGGRDPFSFDFFEDPFEDFFGNRRGPRGSRSRGTGSFFSAFSGFPSFGSGFSSFDTGFTSFGSLGHGGLTSFSSTSFGGSGMGNFKSISTSTKMVNGRKITTKRIVENGQERVEVEEDGQLKSLTINGVADDDALAEERMRRGQNALPAQPAGLRPPKPPRPASLLRHAPHCLSEEEGEQDRPRAPGPWDPLASAAGVQREAAVEQAQSETSLGARGQRGHKPRLGCCVLT

SEQ ID NO: 23843 - protein, 578 aa, Homo sapiens
MLQDWCRRMGVNAERSLLILDIPDDCEEHEFQEAVRAALSPLGRYRVLIKVFRKELGARAALVEFAEGLNQSLIPRQIAGKGGPWKVISLPQALDAEFQDIPSFPAQPQGQAVARGAGEAGAAGEAGSVGEAGGVNEERSAGEDEAGGIGEAGGVGEAGAAGEAGAAGEAGAAGEAGGAGEAGGAGEAGGAGEEGGTGEEGGAGEAGGAGEEGGEDEAGAAGEAVGAGVVEAWTQSWRQTLRPLVKTMAYRELRPFSGREQPGCVEESFESWLEDAKDMLQLWCHASERERRRRLLDSLDGLALDIVSGLLEEDPDFSAQDCLTALGQVFRSRDTWMTSRMKFLTCTQGPQEGLFAFVVRLEGLLQKAVEKGAVHPAMANHLRLRQVLSRARPSEALQDTLRRMQLERRPPDFLRLLRLIRDMEAWAASLARSQQGVAWAAAPVESEDPAAAQASPAQGDASEADPGAEDADEAASTTKEAARVAPATGEDENAPAGLEGLGQGRSPDAPGGLPARMGSAVDMAPGGPSWEPEGLVQVGGQEAEEPPQEGLKPILEESENEDEDGAGEAGKPKSPPGK

SEQ ID NO: 23844 - protein, 247 aa, Homo sapiens
MNLLLILTFVAAAVAAPFDDDDKIVGGYICEENSVPYQVSLNSGYHFCGGSLISEQWVVSAGHCYKSRIQVRLGEHNIEVLEGNEQFINAAKIIRHPKYNSRTLDNDILLIKLSSPAVINSRVSAISLPTAPPAAGTESLISGWGNTLSSGADYPDELQCLDAPVLSQAECEASYPGKITNNMFCVGFLEGGKDSCQGDSGGPVVSNGELQGIVSWGYGCAQKNRPGVYTKVYNYVDWIKDTIAANS

SEQ ID NO: 23845 - protein, 431 aa, Homo sapiens
MSSIRFLCQRCHQALKLSGSSESRSLPAAPAPTSGQAEPGDTREPGVTTREVTDAEEQQDGASSRSPPGDGSVSKGHANIFTLLGELGAMHMLSSIQKAAGDIFDIVSGQAVVDHPLCEECTDSLLEQLDIQLALTEADSQNYQRCLETGELATSEDEAAALRAELRDLELEEARLVQELEDVDRNNARAAADLQAAQAEAAELDQQERQHYRDYSALKRQQLELLDQLGNVENQLQYARVQRDRLKEINCFTATFEIWVEGPLGVINNFRLGRLPTVRVGWNEINTAWGQAALLLLTLANTIGLQFQRYRLIPCGNHSYLKSLTDDRTELPLFCYGGQDVFLNNKYDRAMVAFLDCMQQFKEEAEKGELGLSLPYGIQVETGLMEDVGGRGECYSIRTHLNTQELWTKALKFMLINFKWSLIWVASRYQK

SEQ ID NO: 23846 - protein, 369 aa, Homo sapiens
SVPRDSGAMLGLKVVGGKMTESGRLCAFITKVKKGSLADTVGHLRPGDEVLEWNGRLLQGATFEEVYNIILESKPEPQVELVVSRPIGDIPRIPDSTHAQLESSSSSFESQKMDRPSISVTSPMSPGMLRDVPQFLSGQLSIKLWFDKVGHQLIVTILGAKDLPSREDGRPRNPYVKIYFLPDRSDKNKRRTKTVKKTLEPKWNQTFIYSPVHRREFRERMLEITLWDQARVREEESEFLGEILIELETALLDDEPHWYKLQTHDVSSLPLPHPSPYMPRRQLHGESPTRRLQRSKRISDSEVSDYDCDDGIGVVSDYRHDGRDLQSSTLSVPEQVMSSNHCSPSGSPHRVDVIGRTRSWSPSVPPPQR

SEQ ID NO: 23847 - protein, 369 aa, Homo sapiens
MALAMLRDWCRWMGANAERSLLILGIPDDCKEHEFQEAVRAALSPLGRREQPGCEEESFESWVEHAKDMLQLWCHASEREKKRWLLESLGGPALEVVSGLLEEDTNLSALDCLAALGQVFRNQDTRMTSRLKFLTCTQGPQEGLFAFVVRLEGLLQRAVEKGAVCPALANYLRLQQVLSWARPSEALQDTLRGMQLEKRPPGFLGLLRLIREMEAWAAFPARSQQGVAWAAAPVESEDPAAAQASPAQGNASEAGPGAEDAAEAASATKEAARGAPAAGEGESAPAGPEGLGQARPIEVPWGSSPARMSSAVWVFPRGLSWGPEGLIQVRGQEARKPPLEGLQTILEEPENEDEDGAGDEGQPKSSQGK

SEQ ID NO: 23848 - protein, 261 aa, Homo sapiens
MNLLLILTFVAAAVAAPFDDDDKIVGGYICEENSVPYQVSLNSGYHFCGGSLISEQWVVSAGHCYKSAINSKLSGRGCEYHRIQVRLGEHNIEVLEGNEQFINAAKIIRHPKYNSRTLDNDILLIKLSSPAVINSRVSAISLPTAPPAAGTESLISGWGNTLSSGADYPDELQCLDAPVLSQAECEASYPGKITNNMFCVGFLEGGKDSCQGDSGGPVVSNGELQGIVSWGYGCAQKNRPGVYTKVYNYVDWIKDTIAANS

SEQ ID NO: 23849 - protein, 158 aa, Homo sapiens
SAVRTVRTQGLFSYREDYRTQVDTSTLPPPDPWLEPAIDTVETGRMSPCRRDGSWFLKLLHAETKRMEGWCKEMEREAEENDLSEEKLLPAHALQENALALCQREVDGGDDGRRMLGRCCLPRDPQSPQHGCMGLVQVSTAVFRSFTRRLHFSWLGYI

SEQ ID NO: 23850 - protein, 1372 aa, Homo sapiens
MSAPDEGRRDPPKPKGKTLGSFFGSLPGFSSARNLVANAHSSARARPAADPTGAPAAEAAQPQAQVAAHPEQTAPWTEKELQPSEKQMVSGAKDLVCSKMSRAKDAVSSGVASVVDVAKGVVQGGLDTTRSALTGTKEVVSSGVTGAMDMAKGAVQGGLDTSKAVLTGTKDTVSTGLTGAVNVAKGTVQAGVDTTKTVLTGTKDTVTTGVMGAVNLAKGTVQTGVETSKAVLTGTKDAVSTGLTGAVNVARGSIQTGVDTSKTVLTGTKDTVCSGVTGAMNVAKGTIQTGVDTSKTVLTGTKDTVCSGVTGAMNVAKGTIQTGVDTSKTVLTGTKDTVCSGVTGAMNVAKGTIQTGVDTTKTVLTGTKNTVCSGVTGAVNLAKEAIQGGLDTTKSMVMGTKDTMSTGLTGAANVAKGAMQTGLNTTQNIATGTKDTVCSGVTGAMNLARGTIQTGVDTTKIVLTGTKDTVCSGVTGAANVAKGAVQGGLDTTKSVLTGTKDAVSTGLTGAVNVAKGTVQTGVDTTKTVLTGTKDTVCSGVTSAVNVAKGAVQGGLDTTKSVVIGTKDTMSTGLTGAANVAKGAVQTGVDTAKTVLTGTKDTVTTGLVGAVNVAKGTVQTGMDTTKTVLTGTKDTIYSGVTSAVNVAKGAVQTGLKTTQNIATGTKNTFGSGVTSAVNVAKGAAQTGVDTAKTVLTGTKDTVTTGLMGAVNVAKGTVQTSVDTTKTVLTGTKDTVCSGVTGAANVAKGAIQGGLDTTKSVLTGTKDAVSTGLTGAVKLAKGTVQTGMDTTKTVLTGTKDAVCSGVTGAANVAKGAVQMGVDTAKTVLTGTKDTVCSGVTGAANVAKGAVQTGLKTTQNIATGTKNTLGSGVTGAAKVAKGAVQGGLDTTKSVLTGTKDAVSTGLTGAVNLAKGTVQTGVDTSKTVLTGTKDTVCSGVTGAVNVAKGTVQTGVDTAKTVLSGAKDAVTTGVTGAVNVAKGTVQTGVDASKAVLMGTKDTVFSGVTGAMSMAKGAVQGGLDTTKTVLTGTKDAVSAGLMGSGNVATGATHTGLSTFQNWLPSTPATSWGGLTSSRTTDNGGEQTALSPQEAPFSGISTPPDVLSVGPEPAWEAAATTKGLATDVATFTQGAAPGREDTGLLATTHGPEEAPRLAMLQNELEGLGDIFHPMNAEEQAQLAASQPGPKVLSAEQGSYFVRLGDLGPSFRQRAFEHAVSHLQHGQFQARDTLAQLQDCFRLIEKAQQAPEGQPRLDQGSGASAEDAAVQEERDAGVLSRVCGLLRQLHTAYSGLVSSLQGLPAELQQPVGRARHSLCELYGIVASAGSVEELPAERLVQSREGVHQAWQGLEQLLEGLQHNPPLSWLVGPFALPAGGQ

SEQ ID NO: 23851 - protein, 647 aa, Homo sapiens
MALAMLRDWCRWMGANAERSLLILGIPDDCKEHEFQEAVRAALSPLGRYRVLTKHFRKELGAKAALVEFAEYLNRSLIPHQIPGNGGPWKVIFLPQVPVIEFQDMPSFPAQPQGQAVAKAAGEGGGAGEAGGVGEVGAAGEAGGTGEAGATGEAGAAGEAGGAGEAGGVGEAGAAGEAGGAGEAGAAGEGGAAGEAGGAGEAGGVGEAGAAGEAGGAGEAGGVGEAGAAGEAGGAGEAGAAGEAGGAGEGRAAGEAGAAGEAGAVGEAGAAGEAGAVGEAGAAGEAGAVGEAGGTNVTKAWVQPWRCTLQPVLENRAYRELRPFSRREQPGCEEESFESWVEHAKDMLQLWCHASEREKKRWLLESLGGPALEVVSGLLEEDTNLSALDCLAALGQVFRNQDTRMTSRLKFLTCTQGPQEGLFAFVVRLEGLLQRAVEKGAVCPALANYLRLQQVLSWARPSEALQDTLRGMQLEKRPPGFLGLLRLIREMEAWAAFPARSQQGVAWAAAPVESEDPAAAQASPAQGNASEAGPGAEDAAEAASATKEAARGAPAAGEGESAPAGPEGLGQARPIEVPWGSSPARMSSAVWVFPRGLSWGPEGLIQVRGQEARKPPLEGLQTILEEPENEDEDGAGDEGQPKSSQGK

SEQ ID NO: 23852 - protein, 1191 aa, Homo sapiens
MSAADEVDGLGVARPHYGSVLDNERLTAEEMDERRRQNVAYEYLCHLEEAKRWMEACLGEDLPPTTELEEGLRNGVYLAKLGNFFSPKVVSLKKIYDREQTRYKATGLHFRHTDNVIQWLNAMDEIGLPKIFYPETTDIYDRKNMPRCIYCIHALSLYLFKLGLAPQIQDLYGKVDFTEEEINNMKTELEKYGIQMPAFSKIGGILANELSVDEAALHAAVIAINEAIDRRIPADTFAALKNPNAMLVNLEEPLASTYQDILYQAKQDKMTNAKNRTENSERERDVYEELLTQAEIQGNINKVNTFSALANIDLALEQGDALALFRALQSPALGLRGLQQQNSDWYLKQLLSDKQQKRQSGQTDPLQKEELQSGVDAANSAAQQYQRRLAAVALINAAIQKGVAEKTVLELMNPEAQLPQVYPFAADLYQKELATLQRQSPEHNLTHPELSVAVEMLSSVALINRALESGDVNTVWKQLSSSVTGLTNIEEENCQRYLDELMKLKAQAHAENNEFITWNDIQACVDHVNLVVQEEHERILAIGLINEALDEGDAQKTLQALQIPAAKLEGVLAEVAQHYQDTLIRAKREKAQEIQDESAVLWLDEIQGGIWQSNKDTQEAQKFALGIFAINEAVESGDVGKTLSALRSPDVGLYGVIPECGETYHSDLAEAKKKKLAVGDNNSKWVKHWVKGGYYYYHNLETQEGGWDEPPNFVQNSMQLSREEIQSSISGVTAAYNREQLWLANEGLITRLQARCRGYLVRQEFRSRMNFLKKQIPAITCIQSQWRGYKQKKAYQDRLAYLRSHKDEVVKIQSLARMHQARKRYRDRLQYFRDHINDIIKIQAFIRANKARDDYKTLINAEDPPMVVVRKFVHLLDQSDQDFQEELDLMKMREEVITLIRSNQQLENDLNLMDIKIGLLVKNKITLQDVVSHSKKLTKKNKEQLSDMMMINKQKGGLKALSKEKREKLEAYQHLFYLLQTNPTYLAKLIFQMPQNKSTKFMDSVIFTLYNYASNQREEYLLLRLFKTALQEEIKSKVDQIQEIVTGNPTVIKMVVSFNRGARGQNALRQILAPVVKEIMDDKSLNIKTDPVDIYKSWVNQMESQTGEASKLPYDVTPEQALAHEEVKTRLDSSIRNMRAVTDKFLSAIVSSVDKIPYGMRFIAKVLKDSLHEKFPDAGEDELLKFCAFLQ

SEQ ID NO: 23853 - protein, 3064 aa, Homo sapiens
MGRNQRKAPQRLERPGRPASGEQESGSASADGAPSRERRSDRGQADRAKPAAEPATAGGQGTPGGRRKPTAEGNGGCRRPGAGLSPKAQERQSNAQRQGRGPRGGRGGRLEEGSLSGGEELGGRRRRKRKDKGPSARRGRRTPRSLNGDTSGGDGGSSCPDSETREAQESGSQRGTARELRPTPEPTDMGSEGTKTGPESALEPSSDGLDSDWPHADTRGREGSSGTGPLGASEHSGGDSDSSPLGTGPGRGSRAAMASRTFEDSSRAPRDTGPAKDASDNRAQRGAEPETMQASTARAPRHQVGKAVGQVPAAAGEGEAGAAAGAGPEDPAPLAALLVVRRLLARPPPGAASQAVGPRRAGLKERLLSVARALGLLRWLRRRLRLRRRPPEGEGQGTGPRASEGWGRRKPDEGRGHGRGSKGRGRGKADEGRGHERGDEGRGRGKADEGRGHERGYEGRGCGKADEGRGHERGDEGRDHQRGYEGWGREPGLRHRLALRLAGLAGLGGMPRASPGGRSPQVPTSPVPGDPFDQEDETPDPKFAVVFPRIHRAGRASSSRSSEEASADAPTGEGRGWPRAGVGGHSEGCRTSGEGVSGLRRGSLLAPTAPDGPSLDESGSSSEAELETLNDEPPVRWAQGSGPHEGPRLGAAVLLPRLSLETRLQQEGDPGLRGSLRELWEPEDEDEAVLERDLELSLRPGLEAPPFPGAKGRSLGDGLEDMEDLARLRHIFAIVASAYDLAQNTGQDPCILLCGHSGSGKTEAAKKIMQFLSSLEQDQTGNRECQVEDMLPILSSFGHAKTILNANASRFGQVFCLYLQQGVIVGASVSHYLLETSRVVFQAQAERSFHVFYKLLAGLDSIERERLSLQGPETYYYLNQGQACRLQGKEDAQDFEGLLKALQGLGLCPEELNAVWAVLAAILQLGNICFSSSERESQEVAAVSSWAEIHTAARLLRVPPECLEGAVTRRVTETPYGQVSRSLPVESAFDARDALAKALYSRLFHRLLRRTNARLAPPGEGGSIGTVTVVDAYGFEALRVNGLEQLCNNLASERLQLFSSQMLLAQEEPPRESCLDLLVDQPHSLLSILDAQTWLSQTEFGSCCPGWSAMVRSRLTATSTSQATDHTFLQKSHYHHGDHPSYAKPRLPLPVFTVRHYAGTVTYQVHKFLNRNRDQLDPAVVEMLGQSQLQLVGSLFQEAEPQSRGGRGRPTLASRFQQALEDLIARLGRSHVYFIQCLTPNPGKLPGLFDVGHVTEQLHQAAILEAVGTRSANFPVRVPFEAFLASFQALGSEGQEDLSDREKCGAVLSQVLGAESPLYHLGATKVLLQEQGWQRLEELRDQQRSQALVDLHRSFHTCISRQRVLPRMQARMRGFQARSAGVGARAEVGGPVFTHSSNSCWLTVCLIYPWARCWKRYLRRRAALGQLNTILLVAQPLLQRRQRLQLGRWQGWHSSERALERVPSMELGRLEIPAELAVMLKTAESHRDALAGSITECLPPEVPARPSLTLPADIDLFPFSSFVAIGFQEPSLPRPGQPLAKPLTQLDGDNPQRALDINKVMLRLLGDGSLESWQRQIMGAYLVRQGQCRPGLRNELFSQLVAQLWQNPDEQQSQRGWALMAVLLSAFPPLPVLQKPLLKFVSDQAPRGMAALCQHKLLGALEQSQLASGATRAHPPTQLEWLAGWRRGRMALDVFTFSEECYSAEVESWTTGEQLAGWILQSRDAWQDLAGCDFVLDLISQTEDLGDPARPRSYPITPLGSAEAIPLAPGIQAPSLPPGPPPGPAPTLPSRDHTGEVQRSGSLDGFLDQIFQPVISSGLSDLEQSWALSSRMKGGGAIGPTQQGYPMVYPGMIQMPAYQPGMVPAPMPMMPAMGTVPAMPAMVVPPQPPLPSLDAGQLAVQQQNFIQQQALILAQQMTAQAMSLSLEQQMQQRQQQARASEAASQASPSAVTSKPRKPPTPPEKPQRDLGSEGGCLRETSEEAEDRPYQPKSFQQKRNYFQRMGQPQITVRTMKPPAKVHIPQGEAQEEEEEEEEEEEQEEQEVETRAVPSPPPPPIVKKPLKQGGAKAPKEAEAEPAKETAAKGHGQGPAQGRGTVVRSSDSKPKRPQPSREIGNIIRMYQSRPGPVPVPVQPSRPPKAFLRKIDPKDEALAKLGINGAHSSPPMLSPSPGKGPPPAVAPRPKAPLQLGPSSSIKEKQGPLLDLFGQKLPIAHTPPPPPAPPLPLPEDPGTLSAERRCLTQPVEDQGVSTQLLAPSGSVCFSYTGTPWKLFLRKEVFYPRENFSHPYYLRLLCEQILRDTFSESCIRISQNERRKMKDLLGGLEVDLDSLTTTEDSVKKRIVVAARDNWANYFSRFFPVSGESGSDVQLLAVSHRALAHDPGLEVGAGGKVTSVHARSLRSFAEVLGVECRGGSTLELSLKSEQLVLHTARARAIEALVELFLNELKKDSGYVIALRSYITDNCSLLSFHRGDLIKLLPVATLEPGWQFGSAGGRSGLFPADIVQPAAAPDFSFSKEQRSGWHKGQLSNGEPGLARWDRASERPAHPWSQAHSDDSEATSLSSVAYAFLPDSHSYTMQEFARRYFRRSQALLGQTDGGAAGKDTDSLVQYTKAPIQESLLSLSDDVSKLAVASFLALMRFMGDQSKPRGKDEMDLLYELLKLCQQEKLRDEIYCQVIKQVTGHPRPEHCTRGWSFLSLLTGFFPPSTRLMPYLTKFLQDSGPSQELARSSQEHLQRTVKYGGRRRMPPPGEMKAFLVAAEVQEELCRQMGITEPQEVQEFALFLIKEKSQLVRPLQPAEYLNSVVVDQDVSLHSRRLHWETPLHFDNSTYISTHYSQVLWDYLQGKLPVSAKADAQLARLAALQHLSKANRNTPSGQDLLAYVPKQLQRQVNTASIKNLMGQELRRLEGHSPQEAQISFIADLGDQAEQVPGPQQSDFLPAPSPPAEAMSQLPLFGYTVYGVLRVSMQALSGPTLLGLNRQHLILMDPSSQSLYCRIALKSLQRLHLLSPLEEKGPPGLEVNYGSADNPQTIWFELPQAQELLYTTVFLIDSSASCTEWPSIN

SEQ ID NO: 23854 - protein, 756 aa, Homo sapiens
MQCKVILLDGSEYTCDVEKRSRGQVLFDKVCEHLNLLEKDYFGLTYRDAENQKNWLDPAKEIKKQVRSGAWHFSFNVKFYPPDPAQLSEDITRYYLCLQLRDDIVSGRLPCSFVTLALLGSYTVQSELGDYDPDECGSDYISEFRFAPNHTKELEDKVIELHKSHRGMTPAEAEMHFLENAKKLSMYGVDLHHAKDSEGVEIMLGVCASGLLIYRDRLRINRFAWPKVLKISYKRNNFYIKIRPGEFEQFESTIGFKLPNHRAAKRLWKVCVEHHTFFRLLLPEAPPKKFLTLGSKFRYSGRTQAQTRRASALIDRPAPYFERSSSKRYTMSRSLDGASVNENHEIYMKDSMSAAEVGTGQYATTKGISQTNLITTVTPEKKAEEERDEEEDKRRKGEEVTPISAIRHEGKTDSERTDTAADGETTATEELEKTQDDLMKHQTNISELKRTFLETSTDTAVTNEWEKRLSTSPVRLAARQEDAPMIEPLVPEEKMETKTESSGIETEPTVHHLPLSTEKVVQETVLVEERRVVHASGDASYSAGDSGDAAAQPAFTGIKGKEGSALTEGAKEEGGEEVAKAVLEQEETAAASRERQEEQSAAIHISETLEQKPHFESSTVKTETISFGSVSPGGVKLEISTKEVPVVHTETKTITYESSQVDPGTDLEPGVLMSAQTITSETTSTTTTTHITKTVKGGISETRIEKRIVITGDADIDHDQALAQAIKEAKEQHPDMSVTKVVVHKETEITPEDGED

SEQ ID NO: 23855 - protein, 175 aa, Homo sapiens
TATDSDTESRGLREYHSVGVQVEDEKRHGRFKRSNSVTAAVQADLELEGFPGHITTEDKGLQFGSSFQRHSEPSTPTQYSAVRTVRTQGLFSYREDYRTQVDTSTLPPPDPWLEPAIDTVETGRMSPCRRDGSWFLKLLHAETKRMEGWCKEMEREAEENDLSEESKSSGFPRAS

SEQ ID NO: 23856 - protein, 1225 aa, Homo sapiens
MPFYRRTVVPQRLCPRNPPQQLAELRDVSHLAALSLLRQLADLCGHSLALLEDLEGHLLALGRRTDSLYRRTVRLRRRLPCRLLGPEEDEEELAAANSGRENATATAHSRSSWRQPVNVFLSSGRPPSVEELLREAQLNLQSLLQEEYEEQYSEARLVGQTFRSSDEATKPTPNPRPQSARRLEFILMPTKRQLSEDETTTQGVRAPEASLSLSTTADKQTAWNSLFPLPILEEKRWPQLCSTQSDIVPINISGQQFDKHASLRHSLFNTETAVNPKSTLRRRRTIIGFSNFSQRDQGHSNSPAGSVAHSTTSDIRPSHSVPEGVHGRVAVGQDARFPSLTSPVLRTPSSEPDEPHQARSGPNPPGMESMGMVYSVPSSCNGPTESTFSTSWKGDAFTYMTPSATSQSNQVNENGKNPSCGNSWVSLNKVPPLVPKEAATLLVARDNPAGCSGSAGYPERLIQQRHMPERPSKIGLLTSGTSRLETGPGGASRFRERSLSVPTDSGTTDVDYDEEQKANEACALPFASTSSEGSNSADNIASLSAQQEAQHRRQRSKSISLRKAKKKPSPPTRSVSLVKDEPGLLPEGGSALPKDQRPKSLCLSLEHQGHHSSHPDAQGHPAIPNHKDPESTQFSHHWYLTDWKSGDTYQSLSSSSTATGTTVIECTQVQGSSESLASPSTSRATTPSQLSIEVEAREISSPGRPPGLMSPSSGYSSQSETPTPTVSMSLTLGHLPPPSSSVRVRPVVPERKSSLPPTSPMEKFPKSRLSFDLPLTSSPNLDLSGMSISIRSKTKVSRHHSETNFGVKLAQKTNPNQPIMPMVTQSDLRSVRLRSVSKSEPEDDIESPEYAEEPRAEEVFTLPERKTKPPVAEKPPVARRPPSLVHKPPSVPEEYALTSPTLAMPPRSSIQHARPLPQDSYTVVRKPKPSSFPDGRSPGESTAPSSLVFTPFASSSDAFFSGTQQPPQGSVEDEGPKVRVLPERISLQSQEEAEKKKGKIPPPVPKKPSVLYLPLTSPTAQMEAYVAEPRLPLSPIITLEEDTKCPATGDDLQSLGQRVTSTPQADSEREASPLGSSVEPGTEEKSLISDKTAEWIAEDDDDVFVASRTTEDLFTVIHRSKRKLLGWKEPGEAFVGGRTSSHSPIKNTAESPISESTATAGSGSSANLDAGRNDDFKALLQKKGSKATPRSRPSAAELLKTTNPLARRIIAQFSKDYETTDNPST

SEQ ID NO: 23857 - protein, 129 aa, Homo sapiens
KPTPFSRACWQILPHLSAGVPLLGWEHPVQGKSFQATNCCPQGNGVRKIPPWQPPGACAGGAQDPPPEYDSPERPTELTSNSFNFQNRLCRIFHEGTHEGEIASSEVQSRKCIAAGNPHSSAQTLTKSQ

SEQ ID NO: 23858 - protein, 714 aa, Homo sapiens
MAMNFGDHASGFRHNDVIRFINNEVLMDGSGPAFYVAFRSRPWNEVEDSLQAIVADSQVPRAIKRACTWSALALSVRVATRQREELLHHVRRLQRHAEERQATSWALTSQLQQLRLEHEVAATQLHLAQAALQQALNERDGLYGRLLQIERFPQAAPLAHEIMSGPQAEQNGAAACPLATEQQSDMVAMGTHANAQMPTPTDVLYVPGPLSPWAQGMQPPLPVPHPFPHPPPFPMKFPSLPPLPPAVVTGAEAAAVPLQMPPTEIHPPCPWPAVGFQEEMAPLWYQRSYIQEEDSKILQGSFPLGDSRSHSQGEGSERSQRMPLPGDSGCHNPLSESPQGTAPLGSSGCHSQEEGTEGPQGMDPLGNRERQNQKEGPKRARRMHTLVFRRSHKSEGPEGPQGTVPQGDSRSYSQEGCSDRAQEMATLVFIRRCKPEGPKRPQWTVPLGDSRSHIKEEGPEGPQRIVLQGDNRSYSQEGSPERAQGMATLVFSRSCKPEEGPERPQDTPLGDSRSHIKEEGPEGPQRIVLQGDNRSYSQEGSPERAQGMATLVFSRSCKPEEGPERPQDTPLGDSRSHIKEEGPEGPQRIVLQGDNRSYSQEGSRERAQGMATLVFSRSCKPEEGPERPQGTPLGDSRSHGVRESPKKWQPQRQKAKKPKVNKVSGSQQQEKPASFPVPVNWKCPWCKAINFSWRTACYKCKKACVPFESGGQTQ

SEQ ID NO: 23859 - protein, 950 aa, Homo sapiens
MMGNSHHKQPRSKSQSRMHSATGHSNSPAGSVAHSTTSDIRPSHSVPEGVHGRVAVGQDARFPSLTSPVLRTPSSEPDEPHQARSGPNPPGMESMGMVYSVPSSCNGPTESTFSTSWKGDAFTYMTPSATSQSNQVNENGKNPSCGNSWVSLNKVPPLVPKEAATLLVARDNPAGCSGSAGYPERLIQQRHMPERPSKIGLLTSGTSRLETGPGGASRFRERSLSVPTDSGTTDVDYDEEQKANEACALPFASTSSEGSNSADNIASLSAQQEAQHRRQRSKSISLRKAKKKPSPPTRSVSLVKDEPGLLPEGGSALPKDQRPKSLCLSLEHQGHHSSHPDAQGHPAIPNHKDPESTQFSHHWYLTDWKSGDTYQSLSSSSTATGTTVIECTQVQGSSESLASPSTSRATTPSQLSIEVEAREISSPGRPPGLMSPSSGYSSQSETPTPTVSMSLTLGHLPPPSSSVRVRPVVPERKSSLPPTSPMEKFPKSRLSFDLPLTSSPNLDLSGMSISIRSKTKVSRHHSETNFGVKLAQKTNPNQPIMPMVTQSDLRSVRLRSVSKSEPEDDIESPEYAEEPRAEEVFTLPERKTKPPVAEKPPVARRPPSLVHKPPSVPEEYALTSPTLAMPPRSSIQHARPLPQDSYTVVRKPKPSSFPDGRSPGESTAPSSLVFTPFASSSDAFFSGTQQPPQGSVEDEGPKVRVLPERISLQSQEEAEKKKGKIPPPVPKKPSVLYLPLTSPTAQMEAYVAEPRLPLSPIITLEEDTKCPATGDDLQSLGQRVTSTPQADSEREASPLGSSVEPGTEEKSLISDKTAEWIAEDDDDVFVASRTTEDLFTVIHRSKRKLLGWKEPGEAFVGGRTSSHSPIKNTAESPISESTATAGSGSSANLDAGRNDDFKALLQKKGSKATPRSRPSAAELLKTTNPLARRIIAQFSKDYETTDNPST

SEQ ID NO: 23860 - protein, 247 aa, Homo sapiens
MNPLLILAFVGAAVAAPFDDDDKIVGGYICEENSVPYQVSLNSGYHFCGGSLISEQWVVSAGHCYKSRIQVRLGEHNIEVLEGNEQFINAAKIIRHPKYNSRTLDNDILLIKLSSPAVINSRVSAISLPTAPPAAGTESLISGWGNTLSSGADYPDELQCLDAPVLSQAECEASYPGKITNNMFCVGFLEGGKDSCQGDSGGPVVSNGELQGIVSWGYGCAQKNRPGVYTKVYNYVDWIKDTIAANS

SEQ ID NO: 23861 - protein, 1077 aa, Homo sapiens
MAPRKRSHHGLGFLCCFGGSDIPEINLRDNHPLQFMEFSSPIPNAEELNIRFAELVDELDLTDKNREAMFALPPEKKWQIYCSKKKEQEDPNKLATSWPDYYIDRINSMAAMQSLYAFDEEETEMRNQVVEDLKTALRTQPMRFVTRFIELEGLTCLLNFLRSMDHATCESRIHTSLIGCIKALMNNSQGRAHVLAQPEAISTIAQSLRTENSKTKVAVLEILGAVCLVPGGHKKVLQAMLHYQVYAAERTRFQTLLNELDRSLGRYRDEVNLKTAIMSFINAVLNAGAGEDNLEFRLHLRYEFLMLGIQPVIDKLRQHENAILDKHLDFFEMVRNEDDLELARRFDMVHIDTKSASQMFELIHKKLKYTEAYPCLLSVLHHCLQMPYKRNGGYFQQWQLLDRILQQIVLQDERGVDPDLAPLENFNVKNIVNMLINENEVKQWRDQAEKFRKEHMELVSRLERKERECETKTLEKEEMMRTLNKMKDKLARESQELRQARGQVAELVAQLSELSTGPVSSPPPPGGPLTLSSSMTTNDLPPPPPPLPFACCPPPPPPPLPPGGPPTPPGAPPCLGMGLPLPQDPYPSSDVPLRKKRVPQPSHPLKSFNWVKLNEERVPGTVWNEIDDMQVFRILDLEDFEKMFSAYQRHQELITNPSQQKELGSTEDIYLASRKVKELSVIDGRRAQNCIILLSKLKLSNEEIRQAILKMDEQEDLAKDMLEQLLKFIPEKSDIDLLEEHKHEIERMARADRFLYEMSRIDHYQQRLQALFFKKKFQERLAEAKPKVEAILLASRELVRSKRLRQMLEVILAIGNFMNKGQRGGAYGFRVASLNKIADTKSSIDRNISLLHYLIMILEKHFPDILNMPSELQHLPEAAKVNLAELEKEVGNLRRGLRAVEVELEYQRRQVREPSDKFVPVMSDFITVSSFSFSELEDQLNEARDKFAKALMHFGEHDSKMQPDEFFGIFDTFLQAFSEARQDLEAMRRRKEEEERRARMEAMLKEQRERERWQRQRKVLAAGSSLEEGGEFDDLVSALRSGEVFDKDLCKLKRSRKRSGSQALEVTRERAINRLNY

SEQ ID NO: 23862 - protein, 1664 aa, Homo sapiens
MSSTLHSVFFTLKVSILLGSLLGLCLGLEFMGLPNQWARYLRWDASTRSDLSFQFKTNVSTGLLLYLDDGGVCDFLCLSLVDGRVQLRFSMDCAETAVLSNKQVNDSSWHFLMVSRDRLRTVLMLDGEGQSGELQPQRPYMDVVSDLFLGGVPTDIRPSALTLDGVQAMPGFKGLILDLKYGNSEPRLLGSRGVQMDAEGPCGERPCENGGICFLLDGHPTCDCSTTGYGGKLCSEGLSHLMMSEQGRSKAREENVATFRGSEYLCYDLSQNPIQSSSDEITLSFKTWQRNGLILHTGKSADYVNLALKDGAVSLVINLGSGAFEAIVEPVNGKFNDNAWHDVKVTRNLRQVTISVDGILTTTGYTQEDYTMLGSDDFFYVGGSPSTADLPGSPVSNNFMGCLKEVVYKNNDIRLELSRLARIADTKMKIYGEVVFKCENVATLDPINFETPEAYISLPKWNTKRMGSISFDFRTTEPNGLILFTHGKPQERKDARSQKNTKVDFFAVELLDGNLYLLLDMGSGTIKVKATQKKANDGEWYHVDIQRDGRSGTISVNSRRTPFTASGESEILDLEGDMYLGGLPENRAGLILPTELWTAMLNYGYVGCIRDLFIDGRSKNIRQLAEMQNAAGVKSSCSRMSAKQCDSYPCKNNAVCKDGWNRFICDCTGTGYWGRTCEREASILSYDGSMYMKIIMPMVMHTEAEDVSFRFMSQRAYGLLVATTSRDSADTLRLELDGGRVKLMVNLGKGPETLYAGQKLNDNEWHTVRVVRRGKSLKLTVDDDVAEGTMVGDHTRLEFHNIETGIMTEKRYISVVPSSFIGHLQSLMFNGLLYIDLCKNGDIDYCELKARFGLRNIIADPVTFKTKSSYLSLATLQAYTSMHLFFQFKTTSPDGFILFNSGDGNDFIAVELVKGYIHYVFDLGNGPNVIKGNSDRPLNDNQWHNVVITRDNSNTHSLKVDTKVVTQVINGAKNLDLKGDLYMAGLAQGMYSNLPKLVASRDGFQGCLASVDLNGRLPDLINDALHRSGQIERGCEGPSTTCQEDSCANQGVCMQQWEGFTCDCSMTSYSGNQCNDPGATYIFGKSGGLILYTWPANDRPSTRSDRLAVGFSTTVKDGILVRIDSAPGLGDFLQLHIEQGKIGVVFNIGTVDISIKEERTPVNDGKYHVVRFTRNGGNATLQVDNWPVNEHYPTGNTDNERFQMVKQKIPFKYNRPVEEWLQEKGRQLTIFNTQAQIAIGGKDKGRLFQGQLSGLYYDGLKVLNMAAENNPNIKINGSVRLVGEVPSILGTTQTTSMPPEMSTTVMETTTTMATTTTRKNRSTASIQPTSDDLVSSAECSSDDEDFVECEPSTGRSGGELVIPLLVEDPLATPPIATRAPSITLPPTFRPLLTIIETTKDSLSMTSEAGLPCLSDQGSDGCDDDGLVISGYGSGETFDSNLPPTDDEDFYTTFSLVTDKSLSTSIFEGGYKAHAPKWESKDFRPNKVSETSRTTTTSLSPELIRFTASSSSGMVPKLPAGKMNNRDLKPQPDIVLLPLPTAYELDSTKLKSPLITSPMFRNVPTANPTEPGIRRVPGASEVIRESSSTTGMVVGIVAAAALCILILLYAMYKYRNRDEGSYQVDETRNYISNSAQSNGTLMKEKQQSSKSGHKKQKNKDREYYV

SEQ ID NO: 23863 - protein, 714 aa, Homo sapiens
MAYYGKCIETVIEQLDKFTPKRDNPEQFLEAAATSLQALSPQKQSFVLEVLSGCLEYRKLLTVVVDAFYVEDGRLCLRVDHSRFEVICYLATFLLEELGFQLFCNIIKSQPVDKMCKFLRFFFNPLHLCSWIKDEWSLIYEPAHVKENWIDPLMRWQPEVQELINHLEGVSASQSSPLKTKAKVTEPKEFNLTAPRPRTIPAPEPVPVVAKPRPVPQSTYQPPKEQQQLETVKRYNRRKAEELLLRANIEELRCAMPRSCRERVQGSKQQLRLQFPPRIRKTPKLTFYRPDNILVKLNTTAILREGALYQRQVEQELQRVDKLVDGAGDFSEFFEWQKKMQAKDREEQLAASECRRLQGKLSHEEAVLARQSLMQENKQRVEQQKEQMAKLMLQRAERRLREDRSRKELVEQVIEGQKNAKAAQTKLAKGRQQTVQEAIEESRGLLQRRAQAAQEEQRRRCELISQLRALETQPTRKGKLVDLTQIPGYGLEGEMSIVELRERLALLKENQRRKEEEKRDQIIQGKHTKSQELQNMVEQISLCRAAMGRSAALRWEEKKALAAAPAAPSQDERVQQLRRRISERAAERSRQAALLHVSAPRTARPKPRVSPDWWEEPGRLKAGAGWGWRARRAGTGVPGRGWRGDRVRSAAGRYAAAGAGGGGGVPARADAFPGLQAQLEAQHWLELERSRERRLQALQQGGSGPGPARRLEAA

SEQ ID NO: 23864 - protein, 410 aa, Homo sapiens
MDDLMLSPDDIEQWFTEDPGPDEAPRMPEAAPPVAPAPAAPTPAAPAPAPSWPLSSSVPSQKTYQGSYGFRLGFLHSGTAKSVTCTYSPALNKMFCQLAKTCPVQLWVDSTPPPGTRVRAMAIYKQSQHMTEVVRRCPHHERCSDSDGLAPPQHLIRVEGNLRVEYLDDRNTFRHSVVVPYEPPEVGSDCTTIHYNYMCNSSCMGGMNRRPILTIITLEDSSGNLLGRNSFEVRVCACPGRDRRTEEENLRKKGEPHHELPPGSTKRALPNNTSSSPQPKKKPLDGEYFTLQIRGRERFEMFRELNEALELKDAQAGKEPGGSRAHSRECQTLSPGDPDPPLSETFNLNICPYPAGKLELLKLSPCPCLCRQVTLMSFLFFFLIFFYFRLYWGIIDPPKLHTFKVCSVMI

SEQ ID NO: 23865 - protein, 589 aa, Homo sapiens
MMQESATETISNSSMNQNGMSTLSSQLDAGSRDGRSSGDTSSEVSTVELLHLQQQQALQAARQLLLQQQTSGLKSPKSSDKQRPLQVPVSVAMMTPQVITPQQMQQILQQQVLSPQQLQALLQQQQAVMLQQQQQQQQQQQQQQQQQQQQQQQQQQQQQQQQQQQQQQQQHPGKQAKEQQQQQQQQQQQLAAQQLVFQQQLLQMQQLQQQQHLLSLQRQGLISIPPGQAALPVQSLPQAGLSPAEIQQLWKEVTGVHSMEDNGIKHGGLDLTTNNSSSTTSSNTSKASPPITHHSIVNGQSSVLSARRDSSSHEETGASHTLYGHGVCKWPGCESICEDFGQFLKHLNNEHALDDRSTAQCRVQMQVVQQLEIQLSKERERLQAMMTHLHMRPSEPKPSPKPLNLVSSVTMSKNMLETSPQSLPQTPTTPTAPVTPITQGPSVITPASVPNVGAIRRRHSDKYNIPMSSEIAPNYEFYKNADVRPPFTYATLIRQAIMESSDRQLTLNEIYSWFTRTFAYFRRNAATWKNAVRHNLSLHKCFVRVENVKGAVWTVDEVEYQKRRSQKITGSPTLVKNIPTSLGYGAALN

SEQ ID NO: 23866 - protein, 1047 aa, Homo sapiens
MAEGRRREDEEEELRERRELGGQRRARGRALSGHSAADRNERNKPEHRSSSQGPLSSIRAVIKRSSRTSIQSELHRDRRRPEITIVAAEPLRPASWFPGTPPPGLGFPTSSAAGSWRPNELVPAELPPSYEQVIKEINQVQVNTTNNNNAAATPRHTITSATQTDFSEEIDNDLPQTLQAPLKPLQPFSAVSSGNLPTNVAPLIVFDISEEPNCPENPSATRCPVPKPRSKSNLRPIPRDSHIKEQSQQKISPAAVGEESSPGRPQSLLDNASTSDSQAVMNIMNTEQSQNSIVSRIKVFEGQTNIETSGLPKKPEITPRSLPPKPTVSSGKPSVAPKPAANRASGEWDSGTENRLKVTSKEGLTPYPPLQEAGSIPVTKPELPKKPNPGLIRSVNPEIPGRGPLAESSDSGKKVPTPAPRPLLLKKSVSSENPTYPSAPLKPVTVPPRLAGASQAKAYKSLGEGPPANPPVPVLQSKPLVDIDLISFDDDVLPTPSGNLAEESVGSEMVLDPFQLPAKTEPIKERAVQPAPTRKPTVIRIPAKPGKCLHEDPQSPPPLPAEKPIGNTFSTVSGKLSNVERTRNLESNHPGQTGGFVRVPPRLPPRPVNGKTIPTQQPPTKVPPERPPPPKLSATRRSNKKLPFNRSSSDMDLQKKQSNLATGLSKAKSQVFKNQDPVLPPRPKPGHPLYSKYMRGDVLVMLKQTENNYLECQKGEDTGRVHLSQMKIITPLDEHLRSRPNDPSHAQKPVDSGAPHAVVLHDFPAEQVDDLNLTSGEIVYLLEKIDTDWYRGNCRNQIGIFPANYVKVIIDIPEGGNGKRECVSSHCVKGSRCVARFEYIGEQKDELSFSEGEIIILKEYVNEEWARGEVRGRTGIFPLNFVEPVEDYPTSGANVLSTKVPLKTKKEDSGSNSQVNSLPAEWCEALHSFTAETSDDLSFKRGDRIQILERLDSDWCRGRLQDREGIFPAVFVRPCPAEAKSMLAIVPKGRKAKALYDFRGENEDELSFKAGDIITELESVDDDWMSGELMGKSGIFPKNYIQFLQIS

SEQ ID NO: 23867 - protein, 302 aa, Homo sapiens
MILLNNSERLLALFKSLARSIPESLKVYGSLFHINHGNPFNMEVLVDSWPEYQMVIIRPQKQEMTDDMDSYTNVYRVFSKDPQKSQEVLKNSEIINWKQKLQIQGFQESLGEGIRAAAFSNSVKVEHSRALLFVTEDILKLYATNKSKLGSWAETGHPDDELESETPNFKYAQLNVSYSGLVNDNWKLGMNKRSLRYIKRCLGALPAACMLGPEGVPVSWVTMDPSCEIGMGYSVEKYRRRGNGTRLIMRCMKYLCQKNIPFYGSVLEENQGVIRKTSALGFLEASCQWHQWNCYPQNLVPL

SEQ ID NO: 23868 - protein, 2509 aa, Homo sapiens
MEEVVIAGMSGKLPESENLQEFWDNLIGGVDMVTDDDRRWKAGLYGLPRRSGKLKDLSRFDASFFGVHPKQAHTMDPQLRLLLEVTYEAIVDGGINPDSLRGTHTGVWVGVSGSETSEALSRDPETLVGYSMVGCQRAMMANRLSFFFDFRGPSIALDTACSSSLMALQNAYQAIHSGQCPAAIVGGINVLLKPNTSVQFLRLGMLSPEGTCKAFDTAGNGYCRSEGVVAVLLTKKSLARRVYATILNAGTNTDGFKEQGVTFPSGDIQEQLIRSLYQSAGVAPESFEYIEAHGTGTKVGDPQELNGITRALCATRQEPLLIGSTKSNMGHPEPASGLAALAKVLLSLEHGLWAPNLHFHSPNPEIPALLDGRLQVVDQPLPVRGGNVGINSFGFGGSNVHIILRPNTQPPPAPAPHATLPRLLRASGRTPEAVQKLLEQGLRHSQDLAFLSMLNDIAAVPATAMPFRGYAVLGGERGGPEVQQVPAGERPLWFICSGMGTQWRGMGLSLMRLDRFRDSILRSDEAVKPFGLKVSQLLLSTDESTFDDIVHSFVSLTAIQIGLIDLLSCMGLRPDGIVGHSLGEVACGYADGCLSQEEAVLAAYWRGQCIKEAHLPPGAMAAVGLSWEECKQRCPPGVVPACHNSKDTVTISGPQAPVFEFVEQLRKEGVFAKEVRTGGMAFHSYFMEAIAPPLLQELKKVIREPKPRSARWLSTSIPEAQWHSSLARTSSAEYNVNNLVSPVLFQEALWHVPEHAVVLEIAPHALLQAVLKRGLKPSCTIIPLMKKDHRDNLEFFLAGIGRLHLSGIDANPNALFPPVEFPAPRGTPLISPLIKWDHSLAWDVPAAEDFPNGSGSPSAAIYNIDTSSESPDHYLVDHTLDGRVLFPATGYLSIVWKTLARALGLGVEQLPVVFEDVVLHQATILPKTGTVSLEVRLLEASRAFEVSENGNLVVSGKVYQWDDPDPRLFDHPESPTPNPTEPLFLAQAEVYKELRLRGYDYGPHFQGILEASLEGDSGRLLWKDNWVSFMDTMLQMSILGSAKHGLYLPTRVTAIHIDPATHRQKLYTLQDKAQVADVVVSRWLRVTVAGGVHISGLHTESAPRRQQEQQVPILEKFCFTPHTEEGCLSERAALQEELQLCKGLVQALQTKVTQQGLKMVVPGLDGAQIPRDPSQQELPRLLSAACRLQLNGNLQLELAQVLAQERPKLPEDPLLSGLLDSPALKACLDTAVENMPSLKMKVVLAGHGHLYSRIPGLLSPHPLLQLSYTATDRHPQALEAAQAELQQHDVAQGQWDPADPAPSALGSADLLVCNCAVAALGDPASALSNMVAALREGGFLLLHTLLRGHPLGDIVAFLTSTEPQYGQGILSQDAWESLFSRVSLRLVGLKKSFYGSTLFLCRRPTPQDSPIFLPVDDTSFRWVESLKGILADEDSSRPVWLKAINCATSGVVGLVNCLRREPGGNRLRCVLLSNLSSTSHVPEVDPGSAELQKVLQGDLVMNVYRDGAWGAFRHFLLEEDKPEEPTAHAFVSTLTRGDLSSIRWVCSSLRHAQPTCPGAQLCTVYYASLNFRDIMLATGKLSPDAIPGKWTSQDSLLGMEFSGRDASGKRVMGLVPAKGLATSVLLSPDFLWDVPSNWTLEEAASVPVVYSTAYYALVVRGRVRPGETLLIHSGSGGVGQAAIAIALSLGCRVFTTVGSAEKRAYLQARFPQLDSTSFANSRDTSFEQHVLWHTGGKGVDLVLNSLAEEKLQASVRCLATHGRFLEIGKFDLSQNHPLGMAIFLKNVTFHGVLLDAFFNESSADWREVWALVQAGIRDGVVRPLKCTVFHGAQVEDAFRYMAQGKHIGKVVVQVLAEEPEAVLKGAKPKLMSAISKTFCPAHKSYIIAGGLGGFGLELAQWLIQRGVQKLVLTSRSGIRTGYQAKQVRRWRRQGVQVQVSTSNISSLEGARGLIAEAAQLGPVGGVFNLAVVLRDGLLENQTPEFFQDVCKPKYSGTLNLDRVTREACPELDYFVVFSSVSCGRGNAGQSNYGFANSAMERICEKRRHEGLPGLAVQWGAIGDVGILVETMSTNDTIVSGTLPQRMASCLEVLDLFLNQPHMVLSSFVLAEKAAAYRDRDSQRDLVEAVAHILGIRDLAAVNLDSSLADLGLDSLMSVEVRQTLERELNLVLSVREVRQLTLRKLQELSSKADEASELACPTPKEDGLAQQQTQLNLRSLLVNPEGPTLMRLNSVQSSERPLFLVHPIEGSTTVFHSLASRLSIPTYGLQCTRAAPLDSIHSLAAYYIDCIRQVQPEGPYRVAGYSYGACVAFEMCSQLQAQQSPAPTHNSLFLFDGSPTYVLAYTQSYRAKLTPGCEAEAETEAICFFVQQFTDMEHNRVLEALLPLKGLEERVAAAVDLIIKSHQGLDRQELSFAARSFYYKLRAAEQYTPKAKYHGNVMLLRAKTGGAYGEDLGADYNLSQVCDGKVSVHVIEGDHRTLLEGSGLESIISIIHSSLAEPRVSVREG

SEQ ID NO: 23869 - protein, 289 aa, Homo sapiens
MTQQPLRGVTSLRFNQDQSCFCCAMETGVRIYNVEPLMEKGHLDHEQVGSMGLVEMLHRSNLLALVGGGSSPKFSEISGLCDLCPSLEKQLLVFPGHKCGSLQLVDLASTKPGTSSAPFTINAHQSDIACVSLNQPGTVVASASQKGTLIRLFDTQSKEKLVELRRGTDPATLYCHDSSFLCASSDKGTVHIFALKDTRLNRRSALARVGKVGPMIGQYVDSQWSLASFTVPAESACICAFGRNTSKNVNSVIAICVDGTFHKYVFTPDGNCNREAFDVYLDICDDDDF

SEQ ID NO: 23870 - protein, 173 aa, Homo sapiens
ATYLRYVRRLDFFEKPDYEYLRTLFTDLFEKKGYTFDYAYDWVGRPIPTPVGSVHVDSGASAITRESHTHRDRPSQQQPLRNQNVSSERRGEWEIQPSRQTNTSYLTSHLAADRHGGSVQPRSLTSRVFCPAVRPLFPLPSTHINRNNVLEMKPGGRSSYTCKRSLIGSTLTR

SEQ ID NO: 23871 - protein, 506 aa, Homo sapiens
PLSVPRSKSEMSYIDGEKVVKRSATLPLPARSSSLKSSSERNDWEPPDKKVDTRKYRAEPKSIYEYQPGKSSVLTNEKMSRDISPEEIDLKNEPWYKFFSELEFGKPSSAISPTPEISSETPGYIYSSNFHAVKRESDGAPGDLTSLENERQIYKSVLEGGDIPLQGLSGLKRPSSSASTKDSESPRHFIPADYLESTEEFIRRRHDDKEKLLADQRRLKREQEEADIAARRHTGVIPTHHQFITNERFGDLLNIDDTAKRKSGSEMRPARAKFDFKAQTLKELPLQKGDIVYIYKQIDQNWYEGEHHGRVGIFPRTYIELLPPAEKAQPKKLTPVQVLEYGEAIAKFNFNGDTQVEMSFRKGERITLLRQVDENWYEGRIPGTSRQGIFPITYVDVIKRPLVKNPVDYMDLPFSSSPSRSATASPQQPQAQQRRVTPDRSQTSQDLFSYQALYSYIPQNDDELELRDGDIVDVMEKCDDGWFVGTSRRTKQFGTFPGNYVKPLYL

SEQ ID NO: 23872 - protein, 1304 aa, Homo sapiens
MRRLICKRICDYKSFDDEESVDGNRPSSAASAFKVPAPKTSGNPANSARKPGSAGGPKVGGASKEGGAGAVDEDDFIKAFTDVPSIQIYSSRELEETLNKIREILSDDKHDWDQRANALKKIRSLLVAGAAQYDCFFQHLRLLDGALKLSAKDLRSQVVREACITVAHLSTVLGNKFDHGAEAIVPTLFNLVPNSAKVMATSGCAAIRFIIRHTHVPRLIPLITSNCTSKSVPVRRRSFEFLDLLLQEWQTHSLERHAAVLVETIKKGIHDADAEARVEARKTYMGLRNHFPGEAETLYNSLEPSYQKSLQTYLKSSGSVASLPQSDRSSSSSQESLNRPFSSKWSTANPSTVAGRVSAGSSKASSLPGSLQRSRSDIDVNAAAGAKAHHAAGQSVRSGRLGAGALNAGSYASLEDTSDKLDGTASEDGRVRAKLSAPLAGMGNAKADSRGRSRTKMVSQSQRSSSPDKNEGSQSANTIGAGSRSGSPGRVLTTTALSTVSSGVQRVLVNSASAQKRSKIPRSQGCSREASPSRLSVARSSRIPRPSVSQGCSREASRESSRDTSPVRSFQPLGPGYGISQSSRLSSSVSAMRVLNTGSDVEEAVADALLLGDIRTKKKPARRRYESYGMHSDDDANSDASSACSERSYSSRNGSIPTYMRQTEDVAEVLNRCASSNWSERKEGLLGLQNLLKNQRTLSRVELKRLCEIFTRMFADPHGKVFSMFLETLVDFIQVHKDDLQDWLFVLLTQLLKKMGADLLGSVQAKVQKALDVTRESFPNDLQFNILMRFTVDQTQTPSLKVKVAILKYIETLAKQMDPGDFINSSETRLAVSRVITWTTEPKSSDVRKAAQSVLISLFELNTPEFTMLLGALPKTFQDGATKLLHNHLRNTGNGTQSSMGSPLTRPTPRSPANWSSPLTSPTNTSQNTLSPSAFDYDTENMNSEDIYSSLRGVTEAIQNFSFRSQEDMNEPLKRDSKKDDGDSMCGGPGMSDPRAGGDATDSSQTALDNKASLLHSMPTHSSPRSRDYNPYNYSDSISPFNKSALKEAMFDDDADQFPDDLSLDHSDLVAELLKELSNHNERVEERKIALYELMKLTQEESFSVWDEHFKTILLLLLETLGDKEPTIRALALKVLREILRHQPARFKNYAELTVMKTLEAHKDPHKEVVRSAEEAASVLATSISPEQCIKVLCPIIQTADYPINLAAIKMQTKVIERVSKETLNLLLPEIMPGLIQGYDNSESSVRKACVFCLVAVHAVIGDELKPHLSQLTGSKMKLLNLYIKRAQTGSGGADPTTDVSGQS

SEQ ID NO: 23873 - protein, 1052 aa, Homo sapiens
MDSSLLQAIEEIEKFFQHLSERHTEQAETPDAPEPQNCMPLTAHAEESQHESTQSKTMPPLGSTMMTSACTNIPGTVLTQDLTMHPLKALEDLSETYSMGQKVTSFDQVKHTAGSQMTDVTVTPKSSPTDCQKTTITASNMTISNESSQLNTPSSDQTLNESQIPALLGDQMKTLSDNQTLCGDQVTFSSDQTLTDGHTVTSGSDETLSGGQMTTSLDLYGGQMMTSIDNQTLCGEQMTTSSGNQAFYGRQMTTSTGNQTLCGEQMTTSTGNQALYGGQMTTSASNQTLCGEQMTTSTSNQTLCGEQVMTSTGNQALCGGQMTTSTGNQNLYGGQMMTSTGNQTLYWGQMMTSTGNQNLCGEQVMTSTGNQALCGGQMTTSTGNQNLYGGQMMTSTGNQTLYWGQMMTSTGNQNLCGEQVMTSTGNQALCGGQMTTSTGNQNLCGEQVMTSTSNQTLCGEQTTTSTSNQTLCGEQVTTSTGNQALYGGQMMTSTGNQTLYWGQMMTSTGNQNLCGEQMTTSTGNQALYGGQMTTSTSNQTLCGEQMTTPTSNQTLCGEQVTTSTGNQALYGGQITTSTSNQTLCGEQMTTSTSNQTLCGEQVTTSTGNQALYGGQMMTSTGNQALYGGQMTTSASNQTLCGEQMTTSTSNQTLCEEQVMTSTGNQALCGEQMTTSTGNQALYGGQMTTSTSNQTLCGEQTTTSTSNQTLCGEQVTTSTGNQALYGGQMMTSTGNQTLYWGQMMTSTGNQNLCGEQMTTSTGNQALYGGQMTTSTSNQTLCGEQMTTPTSNQTLCGEQVTTSTGNQALYRGQITTSTSNQTLCGEQMTTSTSNQTLCGEQVTTSTGNQALYGGQMMTSTGNQNLYGGQNMTSTDNQALYGGQMATYSGNQTLYGDQMLTLQVGNMTTLTDDHSLYGGYMMSHQFSSLPYPGFLCFSSSHLIQGQLPKQKTQSCQFWKNPEVSRPYVCTYEDCKMSYSKACHLRTHMRKHTGEKPYVCDVEGCTWKFARSDELNRHKKRHTGERPYLCSICSKNFARSDHLKQHAKVHNIRPGL

SEQ ID NO: 23874 - protein, 2676 aa, Homo sapiens
MGKPLSRPDCLRQNPPCVGKGEEEEDLNIEDCYVPQRSIYDTVRLNEQIDSGSKGSLSSRHFTDRTLPYSHRTLDVSSLCSNGALTSSSVFELRGREANKLDEKMIFDALKLNSDIIRTTGLPKAKSHAEKKEHRRSWRMFVPANFMDYANKSESSFVEPADMSDAVTKASKCRWGTNSLTSEEDDSGLCSPPAEREEKQGILTGDQSRIKSLSSTEDILVTDQYRPFFSVNSISEQKIPLLSCQSAHPDENFKMILHDVSPLEEAKHVNGQREIHDENCCLQNNLKESPVKCDPLIMPRNRENEHIFNLGEEDETYGPGESQITAQSRELLKDSPQDLDLSHTDLGESDVDCGSTSLVENVTLLTQYDSGECNIASKEEVEAPLSAQESEMLYKKFSLKFVSARKKAAPRKTGAQAGILDTVCNGFQLVQVFQKEEIEPLQGKQQDVNWLGQGLIQSAAKSTSTQGLEHDLDDVNARWKTLNKKVAQRAAQLQEALLHCGRFQDALESLLSWMVDTEELVANQKPPSAEFKVVKAQIQEQKLLQRLLDDRKSTVEVIKREGEKIATTAEPADKVKILKQLSLLDSRWEALLNKAETRNRQLEGISVVAQQFHETLEPLNEWLTTIEKRLVNCEPIGTQASKLEEQIAQHKALEDDIINHNKHLHQAVSIGQSLKVLSSREDKDMVQSKLDFSQVWYIEIQEKSHSRSELLQQALCNAKIFGEDEVELMNWLNEVHDKLSKLSVQDYSTEGLWKQQSELRVLQEDILLRKQNVDQALLNGLELLKQTTGDEVLIIQDKLEAIKARYKDITKLSTDVAKTLEQALQLARRLHSTHEELCTWLDKVEVELLSYETQVLKGEEASQAQMRPKELKKEAKNNKALLDSLNEVSSALLELVPWRAREGLEKMVAEDNERYRLVSDTITQKVEEIDAAILRSQQFDQAADAELSWITETEKKLMSLGDIRLEQDQTSAQLQVQKTFTMEILRHKDIIDDLVKSGHKIMTACSEEEKQSMKKKLDKVLKNYDTICQINSERYLQLERAQSLVNQFWETYEELWPWLTETQSIISQLPAPALEYETLRQQQEEHRQLRELIAEHKPHIDKMNKTGPQLLELSPGEGFSIQEKYVAADTLYSQIKEDVKKRAVALDEAISQSTQFHDKIDQILESLERIVERLRQPPSISAEVEKIKEQISENKNVSVDMEKLQPLYETLKQRGEEMIARSGGTDKDISAKAVQDKLDQMVFIWENIHTLVEEREAKLLDVMELAEKFWCDHMSLIVTIKDTQDFIRDLEDPGIDPSVVKQQQEAAETIREEIDGLQEELDIVINLGSELIAACGEPDKPIVKKSIDELNSAWDSLNKAWKDRIDKLEEAMQAAVQYQDGLQAVFDWVDIAGGKLASMSPIGTDLETVKQQIEELKQFKSEAYQQQIEMERLNHQAELLLKKVTEESDKHTVQDPLMELKLIWDSLEERIINRQHKLEGALLALGQFQHALDELLAWLTHTEGLLSEQKPVGGDPKAIEIELAKHHVLQNDVLAHQSTVEAVNKAGNDLIESSAGEEASNLQNKLEVLNQRWQNVLEKTEQRKQQLDGALRQAKGFHGEIEDLQQWLTDTERHLLASKPLGGLPETAKEQLNVHMEVCAAFEAKEETYKSLMQKGQQMLARCPKSAETNIDQDINNLKEKWESVETKLNERKTKLEEALNLAMEFHNSLQDFINWLTQAEQTLNVASRPSLILDTVLFQIDEHKVFANEVNSHREQIIELDKTGTHLKYFSQKQDVVLIKNLLISVQSRWEKVVQRLVERGRSLDDARKRAKQFHEAWSKLMEWLEESEKSLDSELEIANDPDKIKTQLAQHKEFQKSLGAKHSVYDTTNRTGRSLKEKTSLADDNLKLDDMLSELRDKWDTICGKSVERQNKLEEALLFSGQFTDALQALIDWLYRVEPQLAEDQPVHGDIDLVMNLIDNHKAFQKELGKRTSSVQALKRSARELIEGSRDDSSWVKVQMQELSTRWETVCALSISKQTRLEAALRQAEEFHSVVHALLEWLAEAEQTLRFHGVLPDDEDALRTLIDQHKEFMKKLEEKRAELNKATTMGDTVLAICHPDSITTIKHWITIIRARFEEVLAWAKQHQQRLASALAGLIAKQELLEALLAWLQWAETTLTDKDKEVIPQEIEEVKALIAEHQTFMEEMTRKQPDVDKVTKTYKRRAADPSSLQSHIPVLDKGRAGRKRFPASSLYPSGSQTQIETKNPRVNLLVSKWQQVWLLALERRRKLNDALDRLEELREFANFDFDIWRKKYMRWMNHKKSRVMDFFRRIDKDQDGKITRQEFIDGILSSKFPTSRLEMSAVADIFDRDGDGYIDYYEFVAALHPNKDAYKPITDADKIEDEVTRQVAKCKCAKRFQVEQIGDNKYRFFLGNQFGDSQQLRLVRILRSTVMVRVGGGWMALDEFLVKNDPCRVHHHGSKMLRSESNSSITTTQPTIAKGRTNMELREKFILADGASQGMAAFRPRGRRSRPSSRGASPNRSTSVSSQAAQAASPQVPATTTPKGTPIQGSKLRLPGYLSGKGFHSGEDSGLITTAAARVRTQFADSKKTPSRPGSRAGSKAGSRASSRRGSDASDFDISEIQSVCSDVETVPQTHRPTPRAGSRPSTAKPSKIPTPQRKSPASKLDKSSKR

SEQ ID NO: 23875 - protein, 603 aa, Homo sapiens
QSELQFKDAEMNELRTKLQTSERANKLAAPSVSHVSPRKNPSVVIKPEACSPQFGKTSFPTKESFSANMSLPHPCQTESGYKPLVGREDSKPHSLRGDSIKQEEAQKSFVDSWRQRSNTQGSILINLLLKQPLIPGSSLSLCHLLSSSSESPAGTPLQPPGFGSTLAGMSGLRTTGSYDGSFSLSALREAQNLAFTGLNLVARNECSRDGDPAEGGRRAFPLCQLPGAVHFLPLVQFFIGLHCQALQDLAAAKRSGAPGDSPTHSSCVSSGVETNPEDSVCILEGFSVTALSILQHLVCHSGAVVSLLLSGVGADSAAGEGNRSLVHRLSDGDMTSALRGVADDQGQHPLLKMLLHLLAFSSAATGHLQASVLTQCLKVLVKLAENTSCDFLPRFQCVFQVLPKCLSPETPLPSVLLAVELLSLLADHDQLAPQLCSHSEGCLLLLLYMYITSRPDRVALETQWLQLEQEVVWLLAKLGVQSPLPPVTGSNCQCNVEVVRALTVMLHRQWLTVRRAGGPPRTDQQRRTVRCLRDTVLLLHGLSQKDKLFMMHCVEVLHQFDQVMPGVSMLIRGLPDVTDCEEAALDDLCAAETDVEDPEVECG

SEQ ID NO: 23876 - protein, 1967 aa, Homo sapiens
MEKFKAAMLLGSVGDALGYRNVCKENSTVGMKIQEELQRSGGLDHLVLSPGEWPVSDNTIMHIATAEALTTDYWCLDDLYREMVRCYVEIVEKLPERRPDPATIEGCAQLKPNNYLLAWHTPFNEKGSGFGAATKAMCIGLRYWKPERLETLIEVSVECGRMTHNHPTGFLGSLCTALFVSFAAQGKPLVQWGRDMLRAVPLAEEYCRKTIRHTAEYQEHWFYFEAKWQFYLEERKISKDSENKAIFPDNYDAEEREKTYRKWSSEGRGGRRGHDAPMIAYDALLAAGNSWTELCHRAMFHGGESAATGTIAGCLFGLLYGLDLVPKGLYQDLEDKEKLEDLGAALYRLSTEENRKSSKTCSDVMSVDAQTLKKKMGKLACDPAAHSILSSLLLYVTGRADRPPGTEAGGSRPSHQPQTQEATQRPTRFQLLQAKFLGTGRERYLKRTREVGRLISKDKQGPGGGLVGATINKLLEKTKEPAPKPCLSEKPRWGHPAGKSTVKNILKIFLAAEEKEAKEKEAREKPPVERPKAARGLLPKIMGKSSVLSKLREKFEQNSCLCSEASALRLHTQERKKRNLQRKRMHRPEVRVLHTATMASTCVKMPPARFLACTAEPLPALSIATVVCGPRSWLSHCTKISHSEARRPPRGEASVPPSARETGPSGNKAVGKGPLEEEPQRQPRPSKPVTPQVMAQRDGHAVPSLAFSCAPCTGGVLPGLVPASSPLGPASPWGTGSAGGDGTADPTAESTAGGVQEVRGARLTWPPGPPGECAGEGPEITMTVCSSEDEREGAGFPDPGRDPLFATQKYFPEQKVPEHIPPLNAPSVQAARRTQPATEPPRITVQIPVVHEMPAPPTRLQNMSSGENKPCICGGENVVENAHTEFPTVTENRRGHRAPVELSKLSGMQAGLSASSPQGPRAAPRLAAARGAVGADHSVPETLLTQRLQTDPAGGKENKGSFENSHGPRNPDDISGERTSELRDVKHPLPESNEISMQKKGSATNDPAASQNLLRGNTSHASSSQQVPSPTGRNPTGAPTSLAASSKGRTGPEGVTPMGMTVPGALEECRRPLLIESSQPLKAAEEITSHDVRENPLSSLNEPPKPGMKACGAMAAAGSVASRATPAPAPGSTQSPGDRTAGEPETLGQWGSRALSESHPRGEALPRDPHSHGLLAPGGSLEPKSGAAGRSLLRGVALVQHPEDIATLARHPEDAAALARHPEAARLYISNTSAASRHTAAVGGRKDVAVEGNLLGFSTESGIPASDHPRPQARSVAESPSYGPGLPPSPPENPQAKGREGVRFPRGAEPDHLLPAVPPAEVDMGWVGGTHQRGPPHLQAHLPPTAGDTQAKLRASVPEPRTQAGESQERPLTQADLGRQQSHQAQEETPQPGDAGKRVAPSGSKVVLNPAKEPQTWWAQDLAGDKGMAIGVGGACQRSDQGQQHLQGPWEERGRSTAWGEGTRAARNPAVPPGEPEGPGSPAAQGQAQKQVQEWDRGQVQGHAQEQAQWQTQIEAQGQAQEQAQGGTQGHSQGQAQKQFQNWAQGQAQGHAQEQAQWQTQIEAQGQAQEPAQGGAQGQVQGQAQKWAQGQIQGQAQKQVQGEVQKWAQEEAQGQAQWQTQIKAQKWAQEQTQKGAQERVQGQAQKGAQERAQEQAQEQTQIEAQGQAQKGAQERAREQAQKGAQERAREQAQKGAQERAREQAQKGAQERAREQAQKGAQERAREQAQKGAQERAREQAQKGAQERAQEQGREQTHIEAQGQAQKGAQEWARDRARDQGWEQTQIETQRQTQKGAQERAWEQGREQALTSGMAPRAWEQPISGIAEGVDAAGRSGGSRSPAPRDGGQSGGSGLGEPSAGYPPPGSRPLRGKSIATSPLGLGKSPTEPKPEAGGCGTPQAPAQEGSPDHPGAERALQDRMEASEPERRGRSRHLAKYKAQSFRDQRAFDLSFRPMSVRASDTSELPK

SEQ ID NO: 23877 - protein, 204 aa, Homo sapiens
QKIGDTKRNTPIEALCENFPEEMATYLRYVRRLDFFEKPDYEYLRTLFTDLFEKKGYTFDYAYDWVGRPIPTPVGSVHVDSGASAITRESHTHRDRPSQQQPLRNQNVSSERRGEWEIQPSRQTNTSYLTSHLAADRHGGSVQVVSSTNGELNVDDPTGAHSNAPITAHAEVEVVEEANCLKMLNLWCCCFFKRKRKKTAQRHK

SEQ ID NO: 23878 - protein, 1774 aa, Homo sapiens
VKKIHRHRLSPATEKGAASSGEGDKDPPPPAHEDIAVKGTATAAGTGPGTGAAAAAAAAVPPPHPAAAAAAAAAAAAAAAAAVPPPHPNIRALQTQAPQQIPRGPVQQPLEDRIFTPAVSAVYSTVTQVARQPGTPTPSPYSAHEINKGHPNLAATPPGHASSPGLSQTPYPSGQNAGPTTLVYPQTPQTMNSQPQTRSPFFQRPQIQPPRATIPNSSPSIRPGAQTPTAVYQANQHIMMVNHLPMPYPVPQGPQYCIPQYRHSGPPYVGPPQQYPVQPPGPGPFYPGPGPGDFPNAYGTPFYPSQPVYQSAPIIVPTQQQPPPAKREKKTIRIRDPNQGGKDITEEIMSGGGSRNPTPPIGRPTSTPTPPQLPSQVPEHSPVVYGTVESAHLAASTPVTAASDQKQEEKPKPDPVLKSPSPVLRLVLSGEKKEQEGQTSETTAIVSIAELPLPPSPTTVSSVARSTIAAPTSSALSSQPIFTTAIDDRCELSSPREDTIPIPSLTSCTETSDPLPTNENDDDICKKPCSVAPNDIPLVSSTNLINEINGVSEKLSATESIVEIVKQEVLPLTLELEILENPPEEMKLECIPAPITPSTVPSFPPTPPTPPASPPHTPVIVPAAATTVSSPSAAITVQRVLEEDESIRTCLSEDAKEIQNKIEVEADGQTEEILDSQNLNSRRSPVPAQIAITVPKTWKKPKDRTRTTEEMLEAELELKAEEELSIDKVLESEQDKMSQGFHPERDPSDLKKVKAVEENGEEAEPVRNGAESVSEGEGIDANSGSTDSSGDGVTFPFKPESWKPTDTEGKKQYDREFLLDFQFMPACIQKPEGLPPISDVVLDKINQPKLPMRTLDPRILPRGPDFTPAFADFGRQTPGGRGVPLLNVGSRRSQPGQRREPRKIITVSVKEDVHLKKAENAWKPSQKRDSQADDPENIKTQELFRKVRSILNKLTPQMFNQLMKQVSGLTVDTEERLKGVIDLVFEKAIDEPSFSVAYANMCRCLVTLKVPMADKPGNTVNFRKLLLNRCQKEFEKDKADDDVFEKKQKELEAASAPEERTRLHDELEEAKDKARRRSIGNIKFIGELFKLKMLTEAIMHDCVVKLLKNHDEESLECLCRLLTTIGKDLDFEKAKPRMDQYFNQMEKIVKERKTSSRIRFMLQDVIDLRLCNWVSRRADQGPKTIEQIHKEAKIEEQEEQRKVQQLMTKEKRRPGVQRVDEGGWNTVQGAKNSRVLDPSKFLKITKPTIDEKIQLVPKAQLGSWGKGSSGGAKASETDALRSSASSLNRFSALQPPAPSGSTPSTPVEFDSRRTLTSRGSMGREKNDKPLPSATARPNTFMRGGSSKDLLDNQSQEEQRREMLETVKQLTGGVDVERNSTEAERNKTRESAKPEISAMSAHDKAALSEEELERKSKSIIDEFLHINDFKEAMQCVEELNAQGLLHVFVRVGVESTLERSQITRDHMGQLLYQLVQSEKLSKQDFFKGFSETLELADDMAIDIPHIWLYLAELVTPMLKEGGISMRELTIEFSKPLLPVGRAGVLLSEILHLLCKQMSHKKVGALWREADLSWKDFLPEGEDVHNFLLEQKLDFIESDSPCSSEALSKKELSAEELYKRLEKLIIEDKANDEQIFDWVEANLDEIQMSSPTFLRALMTAVCKAAIIADSSTFRVDTAVIKQRVPILLKYLDSDTEKELQALYALQASIVKLDQPANLLRMFFDCLYDEEVISEDAFYKWESSKDPAEQNGKGVALKSVTAFFTWLREAEEESEDN

SEQ ID NO: 23879 - protein, 49 aa, Homo sapiens
MSSRRGSFLSTKLHCSSCLPCPLSFEKFKPSEKLQEHDMRKEPQLTLKM

SEQ ID NO: 23880 - protein, 315 aa, Homo sapiens
MVSASGTSFFKGMLLGSISWVLITMFGQIHIRHRGQTQDHEHHHLRPPNRNDFLNTSKVILLELSKSIRVFCIIFGESEDESYWAVLKETWTKHCDKAELYDTKNDNLFNIESNDRWVQMRTAYKYVFEKYGDNYNWFFLALPTTFAVIENLKYLLFTRDASQPFYLGHTVIFGDLEYVTVEGGIVLSRELMKRLNRLLDNSETCADQSVIWKLSEDKQLAICLKYAGVHAENAEDYEGRDVFNTKPIAQLIEEALSNNPQQVVEGCCSDMAITFNGLTPQKMEVMMYGLYRLRAFGHYFNDTLVFLPPVGSEND

SEQ ID NO: 23881 - protein, 716 aa, Homo sapiens
MMQESATETISNSSMNQNGMSTLSSQLDAGSRDGRSSGDTSSEVSTVELLHLQQQQALQAARQLLLQQQTSGLKSPKSSDKQRPLQVPVSVAMMTPQVITPQQMQQILQQQVLSPQQLQALLQQQQAVMLQQQQLQEFYKKQQEQLHLQLLQQQQQQQQQQQQQQQQQQQQQQQQQQQQQQQQQQQQQQQQHPGKQAKEQQQQQQQQQQQLAAQQLVFQQQLLQMQQLQQQQHLLSLQRQGLISIPPGQAALPVQSLPQAGLSPAEIQQLWKEVTGVHSMEDNGIKHGGLDLTTNNSSSTTSSNTSKASPPITHHSIVNGQSSVLSARRDSSSHEETGASHTLYGHGVCKWPGCESICEDFGQFLKHLNNEHALDDRSTAQCRVQMQVVQQLEIQLSKERERLQAMMTHLHMRPSEPKPSPKPLNLVSSVTMSKNMLETSPQSLPQTPTTPTAPVTPITQGPSVITPASVPNVGAIRRRHSDKYNIPMSSEIAPNYEFYKNADVRPPFTYATLIRQAIMESSDRQLTLNEIYSWFTRTFAYFRRNAATWKNAVRHNLSLHKCFVRVENVKGAVWTVDEVEYQKRRSQKITGSPTLVKNIPTSLGYGAALNASLQAALAESSLPLLSNPGLINNASSGLLQAVHEDLNGSLDHIDSNGNSSPGCSPQPHIHSIHVKEEPVIAEDEDCPMSLVTTANHSPELEDDREIEEEPLSEDLE

SEQ ID NO: 23882 - protein, 293 aa, Homo sapiens
MTQQPLRGVTSLRFNQDQSCFCCAMETGVRIYNVEPLMEKGHLDHEQVGSMGLVEMLHRSNLLALVGGGSSPKFSEISGLCDLCPSLEKQLLVFPGHKCGSLQLVDLASTKPGTSSAPFTINAHQSDIACVSLNQPGTVVASASQKGTLIRLFDTQSKEKLVELRRGTDPATLYCINFSHDSSFLCASSDKGTVHIFALKDTRLNRRSALARVGKVGPMIGQYVDSQWSLASFTVPAESACICAFGRNTSKNVNSVIAICVDGTFHKYVFTPDGNCNREAFDVYLDICDDDDF

SEQ ID NO: 23883 - protein, 1194 aa, Homo sapiens
SDSNASFLRAARAGNLDKVVEYLKGGIDINTCNQNGLNALHLAAKEGHVGLVQELLGRGSSVDSATKKGNTALHIASLAGQAEVVKVLVKEGANINAQSQNGFTPLYMAAQENHIDVVKYLLENGANQSTATEDGFTPLAVALQQGHNQAVAILLENDTKGKVRLPALHIAARKDDTKSAALLLQNDHNADVQSKMMVNRTTESGFTPLHIAAHYGNVNVATLLLNRGAAVDFTARNGITPLHVASKRGNTNMVKLLLDRGGQIDAKTRDGLTPLHCAARSGHDQVVELLLERGAPLLARTKNGLSPLHMAAQGDHVECVKHLLQHKAPVDDVTLDYLTALHVAAHCGHYRVTKLLLDKRANPNARALNGFTPLHIACKKNRIKVMELLVKYGASIQAITESGLTPIHVAAFMGHLNIVLLLLQNGASPDVTNIRGETALHMAARAGQVEVVRCLLRNGALVDARAREEQTPLHIASRLGKTEIVQLLLQHMAHPDAATTNGYTPLHISAREGQVDVASVLLEAGAAHSLATKKGFTPLHVAAKYGSLDVAKLLLQRRAAADSAGKNGLTPLHVAAHYDNQKVALLLLEKGASPHATAKNGYTPLHIAAKKNQMQIASTLLNYGAETNIVTKQGVTPLHLASQEGHTDMVTLLLDKGANIHMSTKSGLTSLHLAAQEDKVNVADILTKHGADQDAHTKLGYTPLIVACHYGNVKMVNFLLKQGANVNAKTKNGYTPLHQAAQQGHTHIINVLLQHGAKPNATTANGNTALAIAKRLGYISVVDTLKVVTEEVTTTTTTITEKHKLNVPETMTEVLDVSDEEGDDTMTGDGGEYLRPEDLKELGDDSLPSSQFLDGMNYLRYSLEGGRSDSTMPSSDRSHTLSHASYLRDSAVMDDSVVIPSHQVSTLAKEAERNSYRLSWGTENLDNVALSSSPIHSGFLVSFMVDARGGAMRGCRHNGLRIIIPPRKCTAPTRVTCRLVKRHRLATMPPMVEGEGLASRLIEVGPSGAQFLGKLHLPTAPPPLNEGESLVSRILQLGPPGTKFLGPVIVEIPHFAALRGKERELVVLRSENGDSWKEHFCDYTEDELNEILNGMDEVLDSPEDLEKKRICRIITRDFPQYFAVVSRIKQDSNLIGPEGGVLSSTVVPQVQAVFPEGALTKRIRVGLQAQPMHSELVKKILGNKATFSPIVTLE

SEQ ID NO: 23884 - protein, 1276 aa, Homo sapiens
LKERMDEPNAEQVYNPSQFENLRKFWDLEANSNSKDNDKNITTTSQKNSAPFNRQKHKEFSDIKLSGKNTHEAEVLLSPKKVMAREEMEKLNSKGILQVLPDEITFPLSPLRKYTYQLPGNESSKENVEKNTEGIVTPVFKEEKDYSEQEIQESIIKTNVLSKDCKDTFNDSLQKLLSETSTPAIQPSGGKVHGKQVLEPSVSENRTWPQKTDFADTEEEVKGPEKIINEHVDKTVVHPKVKRNSLTASLDKLLKEATGTSPSPLQAKLAPVITGTNSKLEEGRFFGKGIEQSHNTSADKREILAPFPVRDETFGNTALLKKAESGECQLSTQNLIQMAAEDSHPLDPTSQLSRKGSFGDVASPPQDMLFPQDAHLVPQARVHPSQTEISETVEKVILPPRPVLNDVSAALQKLCGEVWLSYPAGREVGPGEVNPEFPEAVQPVCSPLNPPGVISPWATMDTIVPDRKDFYSSNVVPDKTHEVGSYLAAQMSPSDQTLSSFASIVAQYGKGLPQEVEEIVRETIVQPKSEFLEFSAGLEKLLKEETETFPSKYESDTGNLSPSKLIGSTEEPRRATSECHPEELKETVEKAEAPLITESAFDAGFEKLLKEITEAPPYQPQVSVREETHEKESSQSEQTRFLGTVPHFYRAASQTSEMKDKSNGLESQVNQCDKMLGGDALVTDLLVDFCGSRSGVEIPRTPQLYVAHEIGTIKTVTPPEDRDSESGVAGGQGTLQEPGFGEASEAISVSRNRQPIPLLMNKENSTKTSKVELTLASPYMKQEKEEEKEGFSESDFSDGNTSSNAESWRNPSSSEEEPSPVLKTLERSAARKMPSKSLEDISSDSSNQAKVDNQPEELVRSAEDDEKPDQKPVTNECVPRISTVPTQPDNPFSHPDKLKRMSKSVPAFLQDESDDRETDTASESSYQLSRHKKSPSSLTNLSSSSGMTSLSSVSGSVMSVYSGDFGNLEVKGNIQFAIEYVESLKELHVFVAQCKDLAAADVKKQRSDPYVKAYLLPDKGKMGKKKTLVVKKTLNPVYNEILRYKIEKQILKTQKLNLSIWHRDTFKRNSFLGEVELDLETWDWDNKQNKQLRWYPLKRKTAPVALEAENRGEMKLALQYVPEPVPGKKLPTTGEVHIWVKECLDLPLLRGSHLNSFVKCTILPDTSRKSRQKTRAVGKTTNPIFNHTMVYDGFRPEDLMEACVELTVWDHYKLTNQFLGGLRIGFGTGKSYGTEVDWMDSTSEEVALWEKMVNSPNTWIEATLPLRMLLIAKISK

SEQ ID NO: 23885 - protein, 856 aa, Homo sapiens
MGNRGMEDLIPLVNRLQDAFSAIGQNADLDLPQIAVVGGQSAGKSSVLENFVGRDFLPRGSGIVTRRPLVLQLVNATTEYAEFLHCKGKKFTDFEEVRLEIEAETDRVTGTNKGISPVPINLRVYSPHVLNLTLVDLPGMTKVPVGDQPPDIEFQIRDMLMQFVTKENCLILAVSPANSDLANSDALKVAKEVDPQGQRTIGVITKLDLMDEGTDARDVLENKLLPLRRGYIGVVNRSQKDIDGKKDITAALAAERKFFLSHPSYRHLADRMGTPYLQKVLNQQLTNHIRDTLPGLRNKLQSQLLSIEKEVEEYKNFRPDDPARKTKALLQMVQQFAVDFEKRIEGSGDQIDTYELSGGARINRIFHERFPFELVKMEFDEKELRREISYAIKNIHGIRTGLFTPDMAFETIVKKQVKKIREPCLKCVDMVISELISTVRQCTKKLQQYPRLREEMERIVTTHIREREGRTKEQVMLLIDIELAYMNTNHEDFIGFANAQQRSNQMNKKKTSGNQDEILVIRKGWLTINNIGIMKGGSKEYWFVLTAENLSWYKDDEEKEKKYMLSVDNLKLRDVEKGFMSSKHIFALFNTEQRNVYKDYRQLELACETQEEVDSWKASFLRAGVYPERVGDKEKASETEENGSDSFMHSMDPQLERQVETIRNLVDSYMAIVNKTVRDLMPKTIMHLMINNTKEFIFSELLANLYSCGDQNTLMEESAEQAQRRDEMLRMYHALKEALSIIGDINTTTVSTPMPPPVDDSWLQVQSVPAGRRSPTSSPTPQRRAPAVPPARPGSRGPAPGPPPAGSALGGAPPVPSRPGASPDPFGPPPQVPSRPNRAPPGVPSQPIGSGKSIPS

SEQ ID NO: 23886 - protein, 932 aa, Homo sapiens
EVPPSFKQFFSSSLALMHINLSGTKLSPEPLKALLLGLACNHNLKGVSLDLSNCELGHCLRSGGAQVLEGCIAEIHNITSLDISDNGLESDLSTLIVWLSKNRSIQHLALGKNFNNMKSKNLTPVLDNLVQMIQDEESPLQSLSLADSKLKTEVTIIINALGSNTSLTKVDISGNGMGDMGAKMLAKALQINTKLRTVIWDKNNITAQGFQDIAVAMEKNYTLRFMPIPMYDASQALKTNPEKTEDALQKIENYLLRNHETRKYLQEQAYRLQQGIVTSTTQQMIDRICVKVQDHLNSLRNCGGDAIQEDLKSAERLMRDAKNSKTLLPNLYHVGGASWAGASGLLSSPIQETLESMAGEVTRVVDEQLKALLESMVDAAENLCPNVMKKAHIRQDLIHASTEKISIPRTFVKNVLLEQSGIDILNKISEVKLTVASFLSDRIVDEILDALSHCHHKLADHFSRRGKTLPQQESLEIELAEEKPVKRSIITVEELTEIERLEDLDTCMTLCCTSMTPKSKRKSIHSRMLRPVSRAFEMEFDLDKALEEVPIHIEDPPFPSLRQEKRSSGFISELPSEEGKKLEHFTKLRPKRNKKQQPTQAAVCAANIVSQDGEQNGLMGRVDEGVDEFFTKKVTKMDSKKWSTRGSESHELNEGGDEKKKRDSRKSSGFLNLIKSRSKSERPPTILMTEEPSSPKGAVRSPPVDCPRKDTKAAEHNGNSERIEEIKTPDSFEESQGEEIGKVERSDSKSSPQAGRRYGVQVMGSGLLAEMKAKQEKRAACAQKKLGNDAVSQDSSSPALSGVERSDGGGAVPKLHPGLPENRFGLGTPEKNTKAEPKAEAGSRSRSSSSTPTSPKPLLQSPKPSLAARPVIPQKPRTASRPDDIPDSPSSPKVALLPPVLKKVPSDKERDGQSSPQPSPRTFSQEACPTNF

SEQ ID NO: 23887 - protein, 459 aa, Homo sapiens
MDHPSREKDERQRTTKPMAQRSAHCSRPSGSSSSSGVLMVGPNFRVGKKIGCGNFGELRLGKNLYTNEYVAIKLEPIKSRAPQLHLEYRFYKQLGSAGEGLPQVYYFGPCGKYNAMVLELLGPSLEDLFDLCDRTFTLKTVLMIAIQLLSRMEYVHSKNLIYRDVKPENFLIGRQGNKKEHVIHIIDFGLAKEYIDPETKKHIPYREHKSLTGTARYMSINTHLGKEQSRRDDLEALGHMFMYFLRGSLPWQGLKADTLKERYQKIGDTKRNTPIEALCENFPEEMATYLRYVRRLDFFEKPDYEYLRTLFTDLFEKKGYTFDYAYDWVGRPIPTPVGSVHVDSGASAITRESHTHRDRPSQQQPLRNQNVSSERRGEWEIQPSRQTNTSYLTSHLAADRHGGSVQVVSSTNGELNVDDPTGAHSNAPITAHAEVEVVEEAKCCCFFKRKRKKTAQRHK

SEQ ID NO: 23888 - protein, 933 aa, Homo sapiens
MESMLNKLKSTVTKVTADVTSAVMGNPVTREFDVGRHIASGGNGLAWKIFNGTKKSTKQEVAVFVFDKKLIDKYQKFEKDQIIDSLKRGVQQLTRLRHPRLLTVQHPLEESRDCLAFCTEPVFASLANVLGNWENLPSPISPDIKDYKLYDVETKYGLLQVSEGLSFLHSSVKMVHGNITPENIILNKSGAWKIMGFDFCVSSTNPSEQEPKFPCKEWDPNLPSLCLPNPEYLAPEYILSVSCETASDMYSLGTVMYAVFNKGKPIFEVNKQDIYKSFSRQLDQLSRLGSSSLTNIPEEVREHVKLLLNVTPTVRPDADQMTKIPFFDDVGAVTLQYFDTLFQRDNLQKSQFFKGLPKVLPKLPKRVIVQRILPCLTSEFVNPDMVPFVLPNVLLIAEECTKEEYVKLILPELGPVFKQQEPIQASNMILLIFLQKMDLLLTKTPPDEIKNSVLPMVYRALEAPSIQIQELCLNIIPTFANLIDYPSMKNALIPRIKNACLQTSSLAVRVNSLVCLGKILEYLDKWFVLDDILPFLQQIPSKEPAVLMGILGIYKCTFTHKKLGITKEQLAGKVLPHLIPLSIENNLNLNQFNSFISVIKEMLNRLESEHKTKLEQLHIMQEQQKSLDIGNQMNVSEEMKVTNIGNQQIDKVFNNIGADLLTGSESENKEDGLQNKHKRASLTLEEKQKLAKEQEQAQKLKSQQPLKPQVHTPVATVKQTKDLTDTLMDNMSSLTSLSVSTPKSSASSTFTSVPSMGIGMMFSTPTDNTKRNLTNGLNANMGFQTSGFNMPVNTNQNFYSSPSTVGVTKMTLGTPPTLPNFNALSVPPAGAKQTQQRPTDMSALNNLFGPQKPKVSMNQLSQQKPNQWLNQFVPPQGSPTMGSSVMGTQMNVIGQSAFGMQGNPFFNPQNFAQPPTTMTNSSSASNDLKDLFG

SEQ ID NO: 23889 - protein, 2140 aa, Homo sapiens
MAERRAFAQKISRTVAAEVRKQISGQYSGSPQLLKNLNIVGNISHHTTVPLTEAVDPVDLEDYLITHPLAVDSGPLRDLIEFPPDDIEVVYSPRDCRTLVSAVPEESEMDPHVRDCIRSYTEDWAIVIRKYHKLGTGFNPNTLDKQKERQKGLPKQVFESDEAPDGNSYQDDQDDLKRRSMSIDDTPRGSWACSIFDLKNSLPDALLPNLLDRTPNEEIDRQNDDQRKSNRHKELFALHPSPDEEEPIERLSVPDIPKEHFGQRLLVKCLSLKFEIEIEPIFASLALYDVKEKKKISENFYFDLNSEQMKGLLRPHVPPAAITTLARSAIFSITYPSQDVFLVIKLEKVLQQGDIGECAEPYMIFKEADATKNKEKLEKLKSQADQFCQRLGKYRMPFAWTAIHLMNIVSSAGSLERDSTEVEISTGERKGSWSERRNSSIVGRRSLERTTSGDDACNLTSFRPATLTVTNFFKQEGDRLSDEDLYKFLADMRRPSSVLRRLRPITAQLKIDISPAPENPHYCLTPELLQVKLYPDSRVRPTREILEFPARDVYVPNTTYRNLLYIYPQSLNFANRQGSARNITVKVQFMYGEDPSNAMPVIFGKSSCSEFSKEAYTAVVYHNRSPDFHEEIKVKLPATLTDHHHLLFTFYHVSCQQKQNTPLETPVGYTWIPMLQNGRLKTGQFCLPVSLEKPPQAYSVLSPEVPLPGMKWVDNHKGVFNVEVVAVSSIHTQDPYLDKFFALVNALDEHLFPVRIGDMRIMENNLENELKSSISALNSSQLEPVVRFLHLLLDKLILLVIRPPVIAGQIVNLGQASFEAMASIINRLHKNLEGNHDQHGRNSLLASYIHYVFRLPNTYPNSSSPGPGGLGGSVHYATMARSAVRPASLNLNRSRSLSNSNPDISGTPTSPDDEVRSIIGSKGLDRSNSWVNTGGPKAAPWGSNPSPSAESTQAMDRSCNRMSSHTETSSFLQTLTGRLPTKKLFHEELALQWVVCSGSVRESALQQAWFFFELMVKSMVHHLYFNDKLEAPRKSRFPERFMDDIAALVSTIASDIVSRFQKDTEMVERLNTSLAFFLNDLLSVMDRGFVFSLIKSCYKQVSSKLYSLPNPSVLVSLRLDFLRIICSHEHYVTLNLPCSLLTPPASPSPSVSSATSQSSGFSTNVQDQKIANMFELSVPFRQQHYLAGLVLTELAVILDPDAEGLFGLHKKVINMVHNLLSSHDSDPRYSDPQIKARVAMLYLPLIGIIMETVPQLYDFTETHNQRGRPICIATDDYESESGSMISQTVAMAIAGTSVPQLTRPGSFLLTSTSGRQHTTFSAESSRSLLICLLWVLKNADETVLQKWFTDLSVLQLNRLLDLLYLCVSCFEYKGKKVFERMNSLTFKKSKDMRAKLEEAILGSIGARQEMVRRSRGQLGTYTIASPPERSPSGSAFGSQENLRWRKDMTHWRQNTEKLDKSRAEIEHEALIDGNLATEANLIILDTLEIVVQTVSVTESKESILGGVLKVLLHSMACNQSAVYLQHCFATQRALVSKFPELLFEEETEQCADLCLRLLRHCSSSIGTIRSHASASLYLLMRQNFEIGNNFARVKMQVTMSLSSLVGTSQNFNEEFLRRSLKTILTYAEEDLELRETTFPDQVQDLVFNLHMILSDTVKMKEHQEDPEMLIDLMYRIAKGYQTSPDLRLTWLQNMAGKHSERSNHAEAAQCLVHSAALVAEYLSMLEDRKYLPVGCVTFQNISSNVLEESAVSDDVVSPDEEGICSGKYFTESGLVGLLEQAAASFSMAGMYEAVNEVYKVLIPIHEANRDAKKLSTIHGKLQEAFSKIVHQSTGWERMFGTYFRVGFYGTKFGDLDEQEFVYKEPAITKLAEISHRLEGFYGERFGEDVVEVIKDSNPVDKCKLDPNKAYIQITYVEPYFDTYEMKDRITYFDKNYNLRRFMYCTPFTLDGRAHGELHEQFKRKTILTTSHAFPYIKTRVNVTHKEEIILTPIEVAIEDMQKKTQELAFATHQDPADPKMLQMVLQGSVGTTVNQGPLEVAQVFLSEIPSDPKLFRHHNKLRLCFKDFTKRCEDALRKNKSLIGPDQKEYQRELERNYHRLKEALQPLINRKIPQLYKAVLPVTCHRDSFSRMSLRKMDL

SEQ ID NO: 23890 - protein, 276 aa, Homo sapiens
METGVRIYNVEPLMEKGHLDHEQVGSMGLVEMLHRSNLLALVGGGSSPKFSEISVLIWDDAREGKDSKEKLVLEFTFTKPVLSVRMRHDKIVIVLKNRIYVYSFPDNPRKLFEFDTRDNPKGLCDLCPSLEKQLLVFPGHKCGSLQLVDLASTKPGTSSAPFTINAHQSDIACVSLNQPGTVVASASQKGTLIRLFDTQSKEKLVELRRGTDPATLYCINFSHDSSFLCASSDKGTVHIFALKDTRLNRRSAAACRLARVGKVGPMIGQYVDSQWS

SEQ ID NO: 23891 - protein, 138 aa, Homo sapiens
AITALRQTPQKVRLVVYRDEAHYRDEENLEIFPVDLQKKAGRGLGLSIVGKRNGSGVFISDIVKGGAADLDGRLIQGDQILSVNGEDMRNASQETVATILKCAQGLVQLEIGRLRAGSWTSARTTSQNSQVVDGFSSD

SEQ ID NO: 23892 - protein, 280 aa, Homo sapiens
EALGQGVARLVLPKLEGHTCEKCRELLKPGEYGVFAARAGEQRCWHQPCFACQACGQALINLIYFYHDGQLYCGRHHAELLRPRCPACDQLIFSWRCTEAEGQRWHENHFCCQDCAGPLGGGRYALPGGSPCCPSCFENRYSDAGSSWAGALEGQAFLGKGEDAEQSGRELGLGCGGSPGLGPSPRSHAVPSLQERPHRTPQTQASGPAALTAHPWPERSKGRPNPPRAAVGVAAPDSLPGAGGGRPLVEAGDPGEDSRRRRRRARPRGWAGREAGPHPH

SEQ ID NO: 23893 - protein, 698 aa, Homo sapiens
MMQESATETISNSSMNQNGMSTLSSQLDAGSRDGRSSGDTSSEVSTVELLHLQQQQALQAARQLLLQQQTSGLKSPKSSDKQRPLQVPVSVAMMTPQVITPQQMQQILQQQVLSPQQLQALLQQQQAVMLQQLLQQQQQQQQQQQQQQQQQQQQQQQQQQQQQQQQQQQQQQQQHPGKQAKEQQQQQQQQQQLAAQQLVFQQQLLQMQQLQQQQHLLSLQRQGLISIPPGQAALPVQSLPQAGLSPAEIQQLWKEVTGVHSMEDNGIKHGGLDLTTNNSSSTTSSNTSKASPPITHHSIVNGQSSVLSARRDSSSHEETGASHTLYGHGVCKWPGCESICEDFGQFLKHLNNEHALDDRSTAQCRVQMQVVQQLEIQLSKERERLQAMMTHLHMRPSEPKPSPKPLNLVSSVTMSKNMLETSPQSLPQTPTTPTAPVTPITQGPSVITPASVPNVGAIRRRHSDKYNIPMSSEIAPNYEFYKNADVRPPFTYATLIRQAIMESSDRQLTLNEIYSWFTRTFAYFRRNAATWKNAVRHNLSLHKCFVRVENVKGAVWTVDEVEYQKRRSQKITGSPTLVKNIPTSLGYGAALNASLQAALAESSLPLLSNPGLINNASSGLLQAVHEDLNGSLDHIDSNGNSSPGCSPQPHIHSIHVKEEPVIAEDEDCPMSLVTTANHSPELEDDREIEEEPLSEDLE

SEQ ID NO: 23894 - protein, 1607 aa, Homo sapiens [sequence omitted]

SEQ ID NO: 23895 - protein, 593 aa, Homo sapiens
MVQGGFPEKIRQRYADLPGELHIIELEKDKNGLGLSLAGNKDRSRMSIFVVGINPEGPAAADGRMRIGDELLEINNQILYGRSHQNASAIIKTAPSKVKLVFIRNEDAVNQMAVTPFPVPSSSPSSIEDQSGTEPISSEEDGSVEVGIKQLPESESFKLAVSQMKQQKYPTKVSFSSQEIPLAPASSYHSTDADFTGYGGFQAPLSVDPATCPIVPGQEMIIEISKGRSGLGLSIVGGKDTPLNAIVIHEVYEEGAAARDGRLWAGDQILEVNGVDLRNSSHEEAITALRQTPQKVRLVVYRDEAHYRDEENLEIFPVDLQKKAGRGLGLSIVGKRNGSGVFISDIVKGGAADLDGRLIQGDQILSVNGEDMRNASQETVATILKCAQGLVQLEIGRLRAGSWTSARTTSQNSQGSQQSAHSSCHPSFAPVITGLQNLVGTKRVSDPSQKNSGTDMEPRTVEINRELSDALGISIAGGRGSPLGDIPVFIAMIQASGVAARTQKLKVGDRIVSINGQPLDGLSHADVVNLLKNAYGRIILQVVADTNISAIAAQLENMSTGYHLGSPTAEHHPEDTERCCNCPMDSPCPLLLG

SEQ ID NO: 23896 - protein, 430 aa, Homo sapiens
MDHPSREKDERQRTTKPMAQRSAHCSRPSGSSSSSGVLMVGPNFRVGKKIGCGNFGELRLGKNLYTNEYVAIKLEPIKSRAPQLHLEYRFYKQLGSAGEGLPQVYYFGPCGKYNAMVLELLGPSLEDLFDLCDRTFTLKTVLMIAIQLLSRMEYVHSKNLIYRDVKPENFLIGRQGNKKEHVIHIIDFGLAKEYIDPETKKHIPYREHKSLTGTARYMSINTHLGKEQSRRDDLEALGHMFMYFLRGSLPWQGLKADTLKERYQKIGDTKRNTPIEALCENFPEEMATYLRYVRRLDFFEKPDYEYLRTLFTDLFEKKGYTFDYAYDWVGRPIPTPVGSVHVDSGASAITRESHTHRDRPSQQQPLRNQVVSSTNGELNVDDPTGAHSNAPITAHAEVEVVEEANCLKMLNLWCCCFFKRKRKKTAQRHK

SEQ ID NO: 23897 - protein, 279 aa, Homo sapiens
NNFVIRRNPADPQRIPSNPSHRIQCAAGYEQSEHNVCQDIDECTAGTHNCRADQVCINLRGSFACQCPPGYQKRGEQCVDIDECRTSSYLCQYQCVNEPGKFSCMCPQGYQVVRSRTCQDINECETTNECREDEMCWNYHGGFRCYPRNPCQDPYILTPENRCVCPVSNAMCRELPQSIVYKYMSIRSDRSVPSDIFQIQATTIYANTINTFRIKSGNENGEFYLRQTSPVSAMLVLVKSLSGPREHIVDLEMLTVSSIGTFRTSSVLRLTIIVGPFSF

SEQ ID NO: 23898 - protein, 1137 aa, Homo sapiens
MSTGDSFETRFEKMDNLLRDPKSEVNSDCLLDGLDALVYDLDFPALRKNKNIDNFLSRYKDTINKIRDLRMKAEDYEVVKVIGRGAFGEVQLVRHKSTRKVYAMKLLSKFEMIKRSDSAFFWEERDIMAFANSPWVVQLFYAFQDDRYLYMVMEYMPGGDLVNLMSNYDVPEKWARFYTAEVVLALDAIHSMGFIHRDVKPDNMLLDKSGHLKLADFGTCMKMNKEGMVRCDTAVGTPDYISPEVLKSQGGDGYYGRECDWWSVGVFLYEMLVGDTPFYADSLVGTYSKIMNHKNSLTFPDDNDISKEAKNLICAFLTDREVRLGRNGVEEIKRHLFFKNDQWAWETLRDTVAPVVPDLSSDIDTSNFDDLEEDKGEEETFPIPKAFVGNQLPFVGFTYYSNRRYLSSANPNDNRTSSNADKSLQESLQKTIYKLEEQLHNEMQLKDEMEQKCRTSNIKLDKIMKELDEEGNQRRNLESTVSQIEKEKMLLQHRINEYQRKAEQENEKRRNVENEVSTLKDQLEDLKKVSQNSQLANEKLSQLQKQLEEANDLLRTESDTAVRLRKSHTEMSKSISQLESLNRELQERNRILENSKSQTDKDYYQLQAILEAERRDRGHDSEMIGDLQARITSLQEEVKHLKHNLEKVEGERKEAQDMLNHSEKEKNNLEIDLNYKLKSLQQRLEQEVNEHKVTKARLTDKHQSIEEAKSVAMCEMEKKLKEEREAREKAENRVVQIEKQCSMLDVDLKQSQQKLEHLTGNKERMEDEVKNLTLQLEQESNKRLLLQNELKTQAFEADNLKGLEKQMKQEINTLLEAKRLLEFELAQLTKQYRGNEGQMRELQDQLEAEQYFSTLYKTQVKELKEEIEEKNRENLKKIQELQNEKETLATQLDLAETKAESEQLARGLLEEQYFELTQESKKAASRNRQEITDKDHTVSRLEEANSMLTKDIEILRRENEELTEKMKKAEEEYKLEKEEEISNLKAAFEKNINTERTLKTQAVNKLAEIMNRKDFKIDRKKANTQDLRKKEKENRKLQLELNQEREKFNQMVVKHQKELNDMQAQLVEECAHRNELQMQLASKESDIEQLRAKLLDLSDSTSVASFPSADETDGNLPVDSACIPYLFIFYSCLLVKN

SEQ ID NO: 23899 - protein, 332 aa, Homo sapiens
MAAVGAGGSTAAPGPGAVSAGALEPGTASAGNVKHLVLFLHEAVLVQYVDTLKLAVPSLIYTLQNNLQYVAISNLPAATFQVTYQLKILTTALFSVLMLNRSLSRLQWASLLLLFTGVAIVQAQQAGGGGPRPLDQNPGAGLAAVVASCLSSGFAGVYFEKILKGSSGSVWLRNLQLGLFGTALGLVGLWWAEGTAVATRGFFFGYTPAVWGVVLNQAFGGLLVAVVVKYADNILKGFATSLSIVLSTVASIRLFGFHVDPLFALGAGLVIGAVYLYSLPRGAAKAIASASASASGPCVHQQPPGQPPPPQLSSHRGDLITEPFLPKSVLVK

SEQ ID NO: 23900 - protein, 464 aa, Homo sapiens
MAGTSAPGSKRRSEPPAPRPGPPPGTGHPPSKRARGFSAAAAPDPDDPFGAHGDFTADDLEELDTLASQALSQCPAAARDVSSDHKVHRLLDGMSKNPSGKNRETVPIKDNFELEVLQAQYKELKEKMKVMEEEVLIKNGEIKILRDSLHQTESVLEEQRRSHFLLEQEKTQALSDKEKEFSKKLQSLQSELQFKDAEMNELRTKLQTSERANKLAAPSVSHVSPRKNPSVVIKPEACSPQFGKTSFPTKESFSANMSLPHPCQTESGYKPLVGREDSKPHSLRGDSIKQEEAQKSFVDSWRQRSNTQGSILINLLLKQPLIPGSSLSLCHLLSSSSESPAGTPLQPPGFGSTLAGMSGLRTTGSYDGSFSLSALREAQNLAFTGLNLVARNECSRDGDPAEGGRRAFPLCQLPGAVHFLPLVQFFIGLHCQALQDLAAAKRSGAPGDSPTHSSCQQVTFKPVS

SEQ ID NO: 23901 - protein, 145 aa, Homo sapiens
VQSLSSTPRVIPNVHNKANKITGNQNQDTQEKKEKRQGTAPPPMKLPPPYKALTDDSDENEEEDAFTDQKIRQRYADLPGELHIIELEKDKNGLGLSLAGNKDRSRMSIFVVGINPEGPAAADGRMRIGDELLETLTQNRIYSHP

SEQ ID NO: 23902 - protein, 1622 aa, Homo sapiens
MADRSLEGMALPLEVRARLAELELELSEGDITQKGYEKKRSKLIGAYLPQPPTANGAAVVRCRLQHSEGAPRRTFRSAHIGVCDVREAAARERVASTAGNRPLFYFRFGVDQALPQERRAPVTPSSASRYHRRRSSGSRDERYRSDVHTEAVQAALAKHKERKMAVPMPSKRRSLVVQTSMDAYTPPDTSSGSEDEGSVQGDSQGTPTSSQGSINMEHWISQAIHGSTTSTTSSSSTQSGGSGAAHRLADVMAQTHIENHSAPPDVTTYTSEHSIQVERPQGSTGSRTAPKYGNAELMETGDGVPVSSRVSAKIQQLVNTLKRPKRPPLREFFVDDFEELLEVQQPDPNQPKPEGAQMLAMRGEQLGVVTNWPPSLEAALQRWGTISPKAPCLTTMDTNGKPLYILTYGKLWTRSMKVAYSILHKLGTKQEPMVRPGDRVALVFPNNDPAAFMAAFYGCLLAEVVPVPIEVPLTRKDAGSQQIGFLLGSCGVTVALTSDACHKGLPKSPTGEIPQFKGWPKLLWFVTESKHLSKPPRDWFPHIKDANNDTAYIEYKTCKDGSVLGVTVTRTALLTHCQALTQACGYTEAETIVNVLDFKKDVGLWHGILTSVMNMMHVISIPYSLMKVNPLSWIQKVCQYKAKVACVKSRDMHWALVAHRDQRDINLSSLRMLIVADGANPWSISSCDAFLNVFQSKGLRQEVICPCASSPEALTVAIRRPTDDSNQPPGRGVLSMHGLTYGVIRVDSEEKLSVLTVQDVGLVMPGAIMCSVKPDGVPQLCRTDEIGELCVCAVATGTSYYGLSGMTKNTFEVFPMTSSGAPISEYPFIRTGLLGFVGPGGLVFVVGKMDGLMVVSGRRHNADDIVATALAVEPMKFVYRGRIAVFSVTVLHDERIVIVAEQRPDSTEEDSFQWMSRVLQAIDSIHQVGVYCLALVPANTLPKTPLGGIHLSETKQLFLEGSLHPCNVLMCPHTCVTNLPKPRQKQPEIGPASVMVGNLVSGKRIAQASGRDLGQIEDNDQARKFLFLSEVLQWRAQTTPDHILYTLLNCRGAIANSLTCVQLHKRAEKIAVMLMERGHLQDGDHVALVYPPGIDLIAAFYGCLYAGCVPITVRPPHPQNIATTLPTVKMIVEVSRSACLMTTQLICKLLRSREAAAAVDVRTWPLILDTDDLPKKRPAQICKPCNPDTLAYLDFSVSTTGMLAGVKMSHAATSAFCRSIKLQCELYPSREVAICLDPYCGLGFVLWCLCSVYSGHQSILIPPSELETNPALWLLAVSQYKVRDTFCSYSVMELCTKGLGSQTESLKARGLDLSRVRTCVVVAEERPRIALTQSFSKLFKDLGLHPRAVSTSFGCRVNLAICLQPHRLWTLAEQGTSGPDPTTVYVDMRALRHDRVRLVERGSPHSLPLMESGKILPGVRIIIANPETKGPLGDSHLGEIWVHSAHNASGYFTIYGDESLQSDHFNSRLSFGDTQTIWARTGYLGFLRRTELTDANGERHDALYVVGALDEAMELRGMRYHPIDIETSVIRAHKSVTECAVFTWTNLLVVVVELDGSEQEALDLVPLVTNVVLEEHYLIVGVVVVVDIGVIPINSRGEKQRMHLRDGFLADQLDPIYVAYNM

SEQ ID NO: 23903 - protein, 565 aa, Homo sapiens
MVYRYCCKLNKKLKSYSLSRKKIVHYTCFDQRKRANAAFLIGAYAVIYLKKTPEEAYRALLSGSNPPYLPFRDASFGNCTYNLTILDCLQGIRKGLQHGFFDFETFDVDEYEHYERVENGDFNWIVPGKFLAFSGPHPKSKIENGYPLHAPEAYFPYFKKHNVTAVVRLNKKIYEAKRFTDAGFEHYDLFFIDGSTPSDNIVRRFLNICENTEGAIAVHCKAGLGRTGTLIACYVMKHYRFTHAEIIAWIRICRPGSIIGPQQHFLEEKQASLWVQGDIFRSKLKNRPSSEGSINKILSGLDDMSIGGNLSKTQNMERFGEDNLEDDDVEMKNGITQGDKLRALKSQRQPRTSPSCAFRSDDTKGHPRAVSQPFRLSSSLQGSAVTLKTSKMALSPSATAKRINRTSLSSGATVRSFSINSRLASSLGNLNAATDDPENKKTSSSSKAGFTASPFTNLLNGSSQPTTRNYPELNNNQYNRSSNSNGGNLNSPPGPHSAKTEEHTTILRPSYTGLSSSSARFLSRSIPVSAQTPPPGPQNPECNFCALPSQPRLPPKKFNSAKEAF

SEQ ID NO: 23904 - protein, 882 aa, Homo sapiens
MAGNVKKSSGAGGGSGSGGSGSGGLIGLMKDAFQPHHHHHHHLSPHPPGTVDKKMVEKCWKLMDKVVRLCQNPKLALKNSPPYILDLLPDTYQHLRTILSRYEGKMETLGENEYFRVFMENLMKKTKQTISLFKEGKERMYEENSQPRRNLTKLSLIFSHMLAELKGIFPSGLFQGDTFRITKADAAEFWRKAFGEKTIVPWKSFRQALHEVHPISSGLEAMALKSTIDLTCNDYISVFEFDIFTRLFQPWSSLLRNWNSLAVTHPGYMAFLTYDEVKARLQKFIHKPGSYIFRLSCTRLGQWAIGYVTADGNILQTIPHNKPLFQALIDGFREGFYLFPDGRNQNPDLTGLCEPTPQDHIKVTQEQYELYCEMGSTFQLCKICAENDKDVKIEPCGHLMCTSCLTSWQESEGQGCPFCRCEIKGTEPIVVDPFDPRGSGSLLRQGAEGAPSPNYDDDDDERADDTLFMMKELAGAKVERPPSPFSMAPQASLPPVPPRLDLLPQRVCVPSSASALGTASKAASGSLHKDKPLPVPPTLRDLPPPPPPDRPYSVGAESRPQRRPLPCTPGDCPSRDKLPPVPSSRLGDSWLPRPIPKVPVSAPSSSDPWTGRELTNRHSLPFSLPSQMEPRPDVPRLGSTFSLDTSMSMNSSPLVGPECDHPKIKPSSSANAIYSLAARPLPVPKLPPGEQCEGEEDTEYMTPSSRPLRPLDTSQSSRACDCDQQIDSCTYEAMYNIQSQAPSITESSTFGEGNLAAAHANTGPEESENEDDGYDVPKPPVPAVLARRTLSDISNASSSFGWLSLDGDPTTNVTEGSQVPERPPKPFPRRINSERKAGSCQQGSGPAASAATASPQLSKQSPKANLRSPDLAAEEISRVLIA

SEQ ID NO: 23905 - protein, 3564 aa, Homo sapiens
MTAWRRFQSLLLLLGLLVLCARLLTAAKGQNCGGLVQGPNGTIESPGFPHGYPNYANCTWIIITGERNRIQLSFHTFALEEDFDILSVYDGQPQQGNLKVRLSGFQLPSSIVSTGSILTLWFTTDFAVSAQGFKALYEVLPSHTCGNPGEILKGVLHGTRFNIGDKIRYSCLPGYILEGHAILTCIVSPGNGASWDFPAPFCRAEGACGGTLRGTSSSISSPHFPSEYENNADCTWTILAEPGDTIALVFTDFQLEEGYDFLEISGTEAPSIWLTGMNLPSPVISSKNWLRLHFTSDSNHRRKGFNAQFQVKKAIELKSRGVKMLPSKDGSHKNSVLSQGGVALVSDMCPDPGIPENGRRAGSDFRVGANVQFSCEDNYVLQGSKSITCQRVTETLAAWSDHRPICRARTCGSNLRGPSGVITSPNYPVQYEDNAHCVWVITTTDPDKVIKLAFEEFELERGYDTLTVGDAGKVGDTRSVLYVLTGSSVPDLIVSMSNQMWLHLQSDDSIGSPGFKAVYQEIEKGGCGDPGIPAYGKRTGSSFLHGDTLTFECPAAFELVGERVITCQQNNQWSGNKPSCVFSCFFNFTASSGIILSPNYPEEYGNNMNCVWLIISEPGSRIHLIFNDFDVEPQFDFLAVKDDGISDITVLGTFSGNEVPSQLASSGHIVRLEFQSDHSTTGRGFNITYTTFGQNECHDPGIPINGRRFGDRFLLGSSVSFHCDDGFVKTQGSESITCILQDGNVVWSSTVPRCEAPCGGHLTASSGVILPPGWPGYYKDSLHCEWIIEAKPGHSIKITFDRFQTEVNYDTLEVRDGPASSSPLIGEYHGTQAPQFLISTGNFMYLLFTTDNSRSSIGFLIHYESVTLESDSCLDPGIPVNGHRHGGDFGIRSTVTFSCDPGYTLSDDEPLVCERNHQWNHALPSCDALCGGYIQGKSGTVLSPGFPDFYPNSLNCTWTIEVSHGKGVQMIFHTFHLESSHDYLLITEDGSFSEPVARLTGSVLPHTIKAGLFGNFTAQLRFISDFSISYEGFNITFSEYDLEPCDDPGVPAFSRRIGFHFGVGDSLTFSCFLGYRLEGATKLTCLGGGRRVWSAPLPRCVAECGASVKGNEGTLLSPNFPSNYDNNHECIYKIETEAGKGIHLRTRSFQLFEGDTLKVYDGKDSSSRPLGTFTKNELLGLILNSTSNHLWLEFNTNGSDTDQGFQLTYTSFDLVKCEDPGIPNYGYRIRDEGHFTDTVVLYSCNPGYAMHGSNTLTCLSGDRRVWDKPLPSCIAECGGQIHAATSGRILSPGYPAPYDNNLHCTWIIEADPGKTISLHFIVFDTEMAHDILKVWDGPVDSDILLKEWSGSALPEDIHSTFNSLTLQFDSDFFISKSGFSIQFSTSIAATCNDPGMPQNGTRYGDSREAGDTVTFQCDPGYQLQGQAKITCVQLNNRFFWQPDPPTCIAACGGNLTGPAGVILSPNYPQPYPPGKECDWRVKVNPDFVIALIFKSFNMEPSYDFLHIYEGEDSNSPLIGSYQGSQAPERIESSGNSLFLAFRSDASVGLSGFAIEFKEKPREACFDPGNIMNGTRVGTDFKLGSTITYQCDSGYKILDPSSITCVIGADGKPSWDQVLPSCNAPCGGQYTGSEGVVLSPNYPHNYTAGQICLYSITVPKEFVVFGQFAYFQTALNDLAELFDGTHAQARLLSSLSGSHSGETLPLATSNQILLRFSAKSGASARGFHFVYQAVPRTSDTQCSSVPEPRYGRRIGSEFSAGSIVRFECNPGYLLQGSTALHCQSVPNALAQWNDTIPSCVVPCSGNFTQRRGTILSPGYPEPYGNNLNCIWKIIVTEGSGIQIQVISFATEQNWDSLEIHDGGDVTAPRLGSFSGTTVPALLNSTSNQLYLHFQSDISVAAAGFHLEYKTVGLAACQEPALPSNSIKIGDRYMVNDVLSFQCEPGYTLQGRSHISCMPGTVRRWNYPSPLCIATCGGTLSTLGGVILSPGFPGSYPNNLDCTWRISLPIGYGAHIQFLNFSTEANHDFLEIQNGPYHTSPMIGQFSGTDLPAALLSTTHETLIHFYSDHSQNRQGFKLAYQAYELQNCPDPPPFQNGYMINSDYSVGQSVSFECYPGYILIGHPVLTCQHGINRNWNYPFPRCDAPCGYNVTSQNGTIYSPGFPDEYPILKDCIWLITVPPGHGVYINFTLLQTEAVNDYIAVWDGPDQNSPQLGVFSGNTALETAYSSTNQVLLKFHSDFSNGGFFVLNFHAFQLKKCQPPPAVPQAEMLTEDDDFEIGDFVKYQCHPGYTLVGTDILTCKLSSQLQFEGSLPTCEAQCPANEVRTGSSGVILSPGYPGNYFNSQTCSWSIKVEPNYNITIFVDTFQSEKQFDALEVFDGSSGQSPLLVVLSGNHTEQSNFTSRSNQLYLRWSTDHATSKKGFKIRYAAPYCSLTHPLKNGGILNRTAGAVGSKVHYFCKPGYRMVGHSNATCRRNPLGMYQWDSLTPLCQAVSCGIPESPGNGSFTGNEFTLDSKVVYECHEGFKLESSQQATAVCQEDGLWSNKGKPPTCKPVACPSIEAQLSEHVIWRLVSGSLNEYGAQVLLSCSPGYYLEGWRLLRCQANGTWNIGDERPSCRVISCGSLSFPPNGNKIGTLTVYGATAIFTCNTGYTLVGSHVRECLANGLWSGSETRCLAGHCGSPDPIVNGHISGDGFSYRDTVVYQCNPGFRLVGTSVRICLQDHKWSGQTPVCVPITCGHPGNPAHGFTNGSEFNLNDVVNFTCNTGYLLQGVSRAQCRSNGQWSSPLPTCRVVNCSDPGFVENAIRHGQQNFPESFEYGMSILYHCKKGFYLLGSSALTCMANGLWDRSLPKCLAISCGHPGVPANAVLTGELFTYGAVVHYSCRGSESLIGNDTRVCQEDSHWSGALPHCTGNNPGFCGDPGTPAHGSRLGDDFKTKSLLRFSCEMGHQLRGSPERTCLLNGSWSGLQPVCEAVSCGNPGTPTNGMIVSSDGILFSSSVIYACWEGYKTSGLMTRHCTANGTWTGTAPDCTIISCGDPGTLANGIQFGTDFTFNKTVSYQCNPGYVMEAVTSATIRCTKDGRWNPSKPVCKAVLCPQPPPVQNGTVEGSDFRWGSSISYSCMDGYQLSHSAILSCEGRGVWKGEIPQCLPVFCGDPGIPAEGRLSGKSFTYKSEVFFQCKSPFILVGSSRRVCQADGTWSGIQPTCIDPAHNTCPDPGTPHFGIQNSSRGYEVGSTVFFRCRKGYHIQGSTTRTCLANLTWSGIQTECIPHACRQPETPAHADVRAIDLPTFGYTLVYTCHPGFFLAGGSEHRTCKADMKWTGKSPVCKSKGVREVNETVTKTPVPSDVFFVNSLWKGYYEYLGKRQPATLTVDWFNATSSKVNATFSEASPVELKLTGIYKKEEAHLLLKAFQIKGQADIFVSKFENDNWGLDGYVSSGLERGGFTFQGDIHGKDFGKFKLERQDPLNPDQDSSSHYHGTSSGSVAAAILVPFFALILSGFAFYLYKHRTRPKVQYNGYAGHENSNGQASFENPMYDTNLKPTEAKAVRFDTTLNTVCTVV

SEQ ID NO: 23906 - protein, 411 aa, Homo sapiens
MPPYPGLRATRPAFMCHRRQAIKLQVDDTEDSDEEWTPRQQVKPPWMALRVEQRKHQKGMPKASFSNESSLKELSRTANLLNASGSEQAQKPVSPSGEASTSGQHSRLKLELRKKETERKMYSLRERKGHAYKEVSEPQDDDYLYCEMCQNFFIDSCAAHGPPTFVKDSAVDKGHPNRSALSLPPGLRIGPSGIPQAGLGVWNEASDLPLGLHFGPYEGRITEDEEAANNGYSWLITKGRNCYEYVDGKDKSWANWMRYVNCARDDEEQNLVAFQYHRQIFYRTCRVIRPGCELLVWYGDEYGQELGIKWGSKWKKELMAGREPKPEIHPCPSCCLAFSSQKFLSQHVERNHSSQNFPGPSARKLLQPENPCPGDQNQEQQYPDPHSRNDKTKGQEIKERSKLLNKRTWQR

SEQ ID NO: 23907 - protein, 712 aa, Homo sapiens
MMQESATETISNSSMNQNGMSTLSSQLDAGSRDGRSSGDTSSEVSTVELLHLQQQQALQAARQLLLQQQTSGLKSPKSSDKQRPLQVPVSVAMMTPQVITPQQMQQILQQQVLSPQQLQALLQQQQAVMLQQDFLDSGLENFRAALEKNQQQQQQQQQQQQQQQQQQQQQQQQQQQQQQQQQQQQQQQHPGKQAKEQQQQQQQQQQLAAQQLVFQQQLLQMQQLQQQQHLLSLQRQGLISIPPGQAALPVQSLPQAGLSPAEIQQLWKEVTGVHSMEDNGIKHGGLDLTTNNSSSTTSSNTSKASPPITHHSIVNGQSSVLSARRDSSSHEETGASHTLYGHGVCKWPGCESICEDFGQFLKHLNNEHALDDRSTAQCRVQMQVVQQLEIQLSKERERLQAMMTHLHMRPSEPKPSPKPLNLVSSVTMSKNMLETSPQSLPQTPTTPTAPVTPITQGPSVITPASVPNVGAIRRRHSDKYNIPMSSEIAPNYEFYKNADVRPPFTYATLIRQAIMESSDRQLTLNEIYSWFTRTFAYFRRNAATWKNAVRHNLSLHKCFVRVENVKGAVWTVDEVEYQKRRSQKITGSPTLVKNIPTSLGYGAALNASLQAALAESSLPLLSNPGLINNASSGLLQAVHEDLNGSLDHIDSNGNSSPGCSPQPHIHSIHVKEEPVIAEDEDCPMSLVTTANHSPELEDDREIEEEPLSEDLE

SEQ ID NO: 23908 - protein, 451 aa, Homo sapiens
MAAGETQLYAKVSNKLKSRSSPSLLEPLLAMGFPVHTALKALAATGRKTAEEALAWLHDHCNDPSLDDPIPQEYALFLCPTGPLLEKLQEFWRESKRQCAKNRAHEVFPHVTLCDFFTCEDQKVECLYEALKRAGDRLLGSFPTAVPLALHSSISYLGFFVSGSPADVIREFAMTFATEASLLADCSVKPCTKQLHLTLAHKFYPHHQRTLEQLARAIPLGHSCQWTAALYSRDMRFVHYQTLRALFQYKPQNVDELTLSPGDYIFVDPTQQDEASEGWVIGISQRTGCRGFLPENYTDRASESDTWVKHRMYTFSLATDLNSRKDGEASSRCSGEFLPQTARSLSSLQALQATVARKSVLVVRHGERVDQIFGKAWLQQCSTPDGKYYRPDLNFPCSLPRRSRGIKDFENDPPLSSCGIFQSRIAGMFEDCLVGKVTITATLIMASRHPA

SEQ ID NO: 23909 - protein, 108 aa, Homo sapiens
MRPSVWAAVAAGLWVLCTVIAEGPPALPALALPLAGAPDAGGCQGAEGPLPUAGTARLLQEGPRGPEEASQTPESGLASVPQSQRGLQPPAPAHVGAPAGCTLWALPL

SEQ ID NO: 23910 - protein, 3432 aa, Homo sapiens
MASERPEPEVEEAGQVFLLMKKDYRISRNVRLAWFLSHLHQTVQATPQEMLLQSEQELEVLSVLPPGWQPDEPVVPRPFLLVPSTRVTFLAWQYRFVIELDLSPSTGIVDDSTGEILFDEVFHALSRCLGGLLRPFRVPGSCIDFQPEIYVTIQAYSSIIGLQSHQVLVQGCLLDPSQREVFLQQIYEQLCLFEDKVATMLQQQYDPQSQAEDQSPDSGDLLGRKVGVSMVTADLGLVSMIRQGILALQLLPSNSSAGIIVITDGVTSVPDVAVCETLLNQLRSGTVACSFVQVGGVYSYDCSFGHVPNVELMKFIAMATFGSYLSTCPEPEPGNLGLTVYHRAFLLYSFLRSGEALNPEYYCGSQHRLFNEHLVSASSNPALALRRKKHTEKEVPADLVSTVSVRLREGYSVREVTLAKGGSQLEVKLVLLWKHNMRIEYVAMAPWPLEPEGPRVTRVEVTMEGGYDILHDVSCALRQPIRSLYRTHVIRRFWNTLQSINQTDQMLAHLQSFSSVPEHFTLPDSTKSGVPLFYIPPGSTTPVLSLQPSGSDSSHAQFAAYWKPVLSMDANSWQRWLHMHRLVLILEHDTPIPKHLHTPGSNGRYSTIQCRISHSSLTSLLRDWSSFVLVEGYSYVKLLSSAPDQPPNSFYMVRIISKAPCMVLRLGFPIGTPAPARHKIVSGLREEILRLRFPHRVQSKEPTPKVKRKGLGGAGGGSSPSKSPPVLGPQQALSDRPCLVVLHKPLDKLLIRYEKLPLDYRAPFLLTLEPPGPLPLVSGRSASSSLASLSRYLYHQRWLWSVPSGLAPALPLSAIAQLLSILTEVRLSEGFHFACSGEGIINMVLELPIQNEPPGQAAAEEKHTCVVQYILFPPHSTSTKDSFSTDDDNDVEVEALEGDSELNLVTEVWVEPQYGRVGPGPGIWKHLQDLTYSEIPQALHPRDAACIGSMLSFEYLIQLCQSKEWGPLPPEPRVSDGLDQGGDTCVHEIPFHFDLMGLLPQCQQLQMFFLLLAREPEGVPFAEGSCPANDMVLCLLHSCLGQELSDREIPLTPVDQAAFLSEVLRRTCHVPGAEGPLLGVHGIPKEQAVGSTQATGDSAFTSLSVGLPETLKPLISAQPPQWRCYARLVNPQHVFLTFLPATFSDVQRLAACGLEGPPQEETKPKFGDWSGAPSLKDLGGTGIKATKSHVPVLSVTLASDNAQNQGELSPPFRRDLQAYAGRQASQTESADGPRTRCPVYIYSCSLEALREQMVGMQPPQAPRDLIFRTQFLDHPSPSSAWMEPRYKEAANHCALLQEHAQRCYVRGLFRSLQQAQSVTSQDLLTAVDACEELLQEIDITPFLLALCGHTWGLPHAPPSPGPLSPGPFSSSMEEGAEPRERAILASESSIETEDLSEPEFQSTRVPGIPDPGPEISLTDVCQLRGEAHGALHSVIQEKFLEISRLHFRTVPSNPHYFFYCPPSSRREDEGPRDTVDRKISDLEFSEAELMGEEGDTSACCVVTESDPELEVEYRESRESDLGPAGLDSASLSDVDTVNPDEDSFSILGGDSPTGPESFLHDLPPLFLHLTCSVRLRGQHSSVPVCSLPTCLGQVLSSLEGPPVGGRVPLRDLSVTLDVFMLTLPLEVELPTASDPQHHRSTSESSASFPRSPGQPSSLRSDDGLGPPLPPPEEERHPGLSNLATPHRLAIETTMNEIRWLLEDEMVGALRRGGIPQSPALHRAAAHIHSSPGRSTCLRQTLPLSFVFGPERSLTQFKEEFRRLHLPGHVLLEDPDSGFFFVAAGQQPGGSHGEPSSAAWAWHSHEDRAEGIEGETLTASPQAPGSPEDSEGVPLISLPRVPQGGSQPGPSRGLSLMSSQGSVDSDHLGYDGGSSGSDSEGPNDTLGEKAPFTLRTPPGPAPPQPSLSGLPGPCLPDFWLIVRVLQDRVEVYAHARSLIREDGGPGTECRHLQQLLVRRVGEICREVNQRLLLQDLHDSHVCNSLLVAESEEDLWRSETPFHSRQRAPLPSDDYAADESCAPRGYLAATMQFVPGHFSCDVVWGTVIRVHSRLKMGPSMGVSRAIQALRSVLNAFSVVNRKNMFVYQERATKAVYYLRLLETSCSDRPWKGDALPPSLALSRSQEPIYSEEASGPRSPLDMVSSRSSDAARPVGQVDRHIQLLVHGVGQAGPEITDELVRVLCRRLDEATLDVITVMLVRNCKLTPADVEFIQPPGSLPSEVLHLALPTSCRPWLPALAWYLRQNLLIFLHSPKYTDSNSRNHFQHPLPPQGGLPDLDIYLYNKPGGQGTGGKGVACITLAFVDEGGAPLSLALWPPSSPGPPDPLREEEFEQLTQVIRCPVVVDSSSAQNGAPRLRLDVWEKGNISIVQLEEKLRGAARQALADAIIELQLLPASLCTEDTPTGSLRNGSLETKSSAGRASTFPPAPVPGEPVTPPSKAGRRSFWDMLSKTECGDLGSPKTTDDIVLDRPEDTRGRRRHKTESVRTPGGAERAPGSDSGAQRQKRRTTQLEEGEVGTLHPVFARVAQRWMEFMVQIGCASVSRSSAHMVSRFLLPSILSEFTALVTSMAGDTSVRIFEQHLGSEPEIFGPCSPGQLGPSPRPAAERHLLLLGRNFLQWRRPTQQAAKAMQRFEPGGDGSSGRNAPRQRLLLLEVVDKKLQLLTYNWAPDLGAALGRALVRLVQWQNARAHLIFCLLSQKLGLFHHYGQLDFPVRDEKEPNPFLLPTMEVETLIRSASPPLSREQGRLSGSSRGGGPLPLDTFPFDEALRDITAARPSSVLGPVPRPPDPVTYHGQQFLEIKMAERRELERQMKMENLFVTWQQRSTPATMPISAGELETLKQSSRLVHYCATAMLFDPAAWLHGPPETSGPPDGQRRHRPESGSGSREAPTSCESLDVSPPGAREEPWLKELSLAFLQQYVQYLQSIGFVLVPLRPPSPARSTSRPRAMAILGTEGRGSFSCPKTKTDGSPKSTSSPVTTYHLQRALPGGIILMELAFQGCYFCVKQFALECSRIPMGQAVNSQLSMLFTEECDKVRDLMHVHSFSYDFHLRLVHQHVLGAHLVLRHGYHLTTFLRHFLAHHPDGPHFGRNHIYQGTLELPTPLIAAHQLYNYVADHASSYHMKPLRMARPGGPEHNEYALVSAWHSSGSYLDSEGLRHQDDFDVSLLVCHCAAPFEEQGEAERHVLRLQFFVVLTSQRELFPRLTADMRRFRKPPRLPPEPEAPGSSAGSPGEASGLILAPGPAPLFPPLAAEVGMARARLAQLVRLAGGHCRRDTLWKRLFLLEPPGPDRLRLGGRLALAELEELLEAVHAKSIGDIDPQLDCFLSMTVSWYQSLIKVLLSRFPQSCRHFQSPDLGTQYLVVLNQKFTDCFVLVFLDSHLGKTSLTVVFREPFPVQPQDSESPPAQLVSTYHHLESVINTACFTLWTRLL

SEQ ID NO: 23911 - protein, 1428 aa, Homo sapiens
MSTPTDPGAMPHPGPSPGPGPSPGPILGPSPGPGPSPGSVHSMMGPSPGPPSVSHPMPTMGSTDFPQEGMHQMHKPIDGIHDKGIVEDIHCGSMKGTGMRPPHPGMGPPQSPMDQHSQGYMSPHPSPLGAPEHVSSPMSGGGPTPPQMPPSQPGALIPGDPQAMSQPNRGPSPFSPVQLHQLRAQILAYKMLARGQPLPETLQLAVQGKRTLPGLQQQQQQQQQQQQQQQQQQQQQQQPQQQPPQPQTQQQQQPALVNYNRPSGPGPELSGPSTPQKLPVPAPGGRPSPAPPAAAQPPAAAVPGPSVPQPAPGQPSPVLQLQQKQSRISPIQKPQGLDPVEILQEREYRLQARIAHRIQELENLPGSLPPDLRTKATVELKALRLLNFQRQLRQEVVACMRRDTTLETALNSKAYKRSKRQTLREARMTEKLEKQQKIEQERKRRQKHQEYLNSILQHAKDFKEYHRSVAGKIQKLSKAVATWHANTEREQKKETERIEKERMRRLMAEDEEGYRKLIDQKKDRRLAYLLQQTDEYVANLTNLVWEHKQAQAAKEKKKRRRRKKKAEENAEGGESALGPDGEPIDESSQMSDLPVKVTHTETGKVLFGPEAPKASQLDAWLEMNPGYEVAPRSDSEESDSDYEEEDEEEESSRQETEEKILLDPNSEEVSEKDAKQIIETAKQDVDDEYSMQYSARGSQSYYTVAHAISERVEKQSALLINGTLKHYQLQGLEWMVSLYNNNLNGILADEMGLGKTIQTIALITYLMEHKRLNGPYLIIVPLSTLSNWTYEFDKWAPSVVKISYKGTPAMRRSLVPQLRSGKFNVLLTTYEYIIKDKHILAKIRWKYMIVDEGHRMKNHHCKLTQVLNTHYVAPRRILLTGTPLQNKLPELWALLNFLLPTIFKSCSTFEQWFNAPFAMTGERVDLNEEETILIIRRLHKVLRPFLLRRLKKEVESQLPEKVEYVIKCDMSALQKILYRHMQAKGILLTDGSEKDKKGKGGAKTLMNTIMQLRKICNHPYMFQHIEESFAEHLGYSNGVINGAELYRASGKFELLDRILPKLRATNHRVLLFCQMTSLMTIMEDYFAFRNFLYLRLDGTTKSEDRAALLKKFNEPGSQYFIFLLSTRAGGLGLNLQAADTVVIFDSDWNPHQDLQAQDRAHRIGQQNEVRVLRLCTVNSVEEKILAAAKYKLNVDQKVIQAGMFDQKSSSHERRAFLQAILEHEEENEEEDEVPDDETLNQMIARREEEFDLFMRMDMDRRREDARNPKRKPRLMEEDELPSWIIKDDAEVERLTCEEEEEKIFGRGSRQRRDVDYSDALTEKQWLRAIEDGNLEEMEEEVRLKKRKRRRNVDKDPAKEDVEKAKKRRGRPPAEKLSPNPPKLTKQMNAIIDTVINYKDRCNVEKVPSNSQLEIEGNRKGFVIISTGA

SEQ ID NO: 23912 - protein, 62 aa, Homo sapiens
MDMRWHCENLQTTDDILVASAECPSDDEDIDPCEPSSGTKQTMWKTSRDHRILPNARRERKD

SEQ ID NO: 23913 - protein, 4870 aa, Homo sapiens
MAEGGEGGEDEIQFLRTEDEVVLQCIATIHKEQRKFCLAAEGLGNRLCFLEPTSEAKYIPPDLCVCNFVLEQSLSVRALQEMLANTGENGGEGAAQGGGHRTLLYGHAVLLRHSFSGMYLTCLTTSRSQTDKLAFDVGLREHATGEACWWTIHPASKQRSEGEKVRIGDDLILVSVSSERYLHLSVSNGNIQVDASFMQTLWNVHPTCSGSSIEEGYLLGGHVVRLFHGHDECLTIPSTDQNDSQHRRIFYEAGGAGTRARSLWRVEPLRISWSGSNIRWGQAFRLRHLTTGHYLALTEDQGLILQDRAKSDTKSTAFSFRASKELKEKLDSSHKRDIEGMGVPEIKYGDSVCFVQHIASGLWVTYKAQDAKTSRLGPLKRKVILHQEGHMDDGLTLQRCQREESQAARIIRNTTALFSQFVSGNNRTAAPITLPIEEVLQTLQDLIAYFQPPEEEMRHEDKQNKLRSLKNRQNLFKEEGMLALVLNCIDRLNVYNSVAHFAGIAREESGMAWKEILNLLYKLLAALIRGNRNNCAQFSNNLDWLISKLDRLESSSGILEVLHCILTESPEALNLIAEGHIKSIISLLDKHGRNHKVLDILCSLCLCNGVAVRANQNLICDNLLPRRNLLLQTRLINDVTSIRPNIFLGVAEGSAQYKKWYFELIIDQVDPFLTAEPTHLRVGWASSSGYAPYPGGGEGWGGNGVGDDLYSYGFDGLHLWSGRIPRAVASINQHLLRSDDVVSCCLDLGVPSISFRINGQPVQGMFENFNTDGLFFPVMSFSAGVKVRFLMGGRHGEFKFLPPSGYAPCYEALLPKEKMRLEPVKEYKRDADGIRDLLGTTQFLSQASFIPCPVDTSQVILPPHLEKIRDRLAENIHELWGMNKIELGWTFGKIRDDNKRQHPCLVEFSKLPETEKNYNLQMSTETLKTLLALGCHIAHVNPAAEEDLKKVKLPKNYMMSNGYKPAPLDLSDVKLLPPQEILVDKLAENAHNVWAKDRIKQGWTYGIQQDLKNKRNPRLVPYALLDERTKKSNRDSLREAVRTFVGYGYNIEPSDQELADSAVEKVSIDKIRFFRVERSYAVRSGKWYFEFEVVTGGDMRVGWARPGCRPDVELGADDQAFVFEGNRGQRWHQGSGYFGRTWQPGDVVGCMINLDDASMIFTLNGELLITNKGSELAFADYEIENGFVPICCLGLSQIGRMNLGTDASTFKFYTMCGLQEGFEPFAVNMNRDVAMWFSKRLPTFVNVPKDHPHIEVMRIDGTMDSPPCLKVTHKTFGTQNSNADMIYCRLSMPVECHSSFSHSPCLDSEAFQKRKQMQEILSHTTTQCYYAIRIFAGQDPSCVWVGWVTPDYHLYSEKFDLNKNCTVTVTLGDERGRVHESVKRSNCYMVWGGDIVASSQRSNRSNVDLEIGCLVDLAMGMLSFSANGKELGTCYQVEPNTKVFPAVFLQPTSTSLFQFELGKLKNAMPLSAAIFRSEEKNPVPQCPPRLDVQTIQPVLWSRMPNSFLKVETERVSERHGWVVQCLEPLQMMALHIPEENRCVDILELCEQEDLMRFHYHTLRLYSAVCALGNSRVAYALCSHVDLSQLFYAIDNKYLPGLLRSGFYDLLISIHLASAKERKLMMKNEYIIPITSTTRNIRLFPDESKRHGLPGVGLRTCLKPGFRFSTPCFVVTGEDHQKQSPEIPLESLRTKALSMLTEAVQCSGAHIRDPVGGSVEFQFVPVLKLIGTLLVMGVFDDDDVRQILLLIDPSVFGEHSAGTEEGAEKEEVTQVEEKAVEAGEKAGKEAPVKGLLQTRLPESVKLQMCELLSYLCDCELQHRVEAIVAFGDIYVSKLQANQKFRYNELMQALNMSAALTARKTKEFRSPPQEQINMLLNFQLGENCPCPEEIREELYDFHEDLLLHCGVPLEEEEEEEEDTSWTGKLCALVYKIKGPPKPEKEQPTEEEERCPTTLKELISQTMICWAQEDQIQDSELVRMMFNLLRRQYDSIGELLQALRKTYTISHTSVSDTINLLAALGQIRSLLSVRMGKEEELLMINGLGDIMNNKVFYQHPNLMRVLGMHETVMEVMVNVLGTEKSQIAFPKMVASCCRFLCYFCRISRQNQKAMFEHLSYLLENSSVGLASPSMRGSTPLDVAASSVMDNNELALSLEEPDLEKVVTYLAGCGLQSCPMLLAKGYPDVGWNPIEGERYLSFLRFAVFVNSESVEENASVVVKLLIRRPECFGPALRGEGGNGLLAAMQGAIKISENPALDLPSQGYKREVSTGDDEEEEEIVHMGNAIMSFYSALIDLLGRCAPEMHLIQTGKGEAIRIRSILRSLVPTEDLVGIISIPLKLPSLNKDGSVSEPDMAANFCPDHKAPMVLFLDRVYGIKDQTFLLHLLEVGFLPDLRASASLDTVSLSTTEAALALNRYICSAVLPLLTRCAPLFAGTEHCTSLIDSTLQTIYRLSKGRSLTKAQRDTIEECLLAICNHLRPSMLQQLLRRLVFDVPQLNEYCKMPLKLLTNHYEQCWKYYCLPSGWGSYGLAVEEELHLTEKLFWGIFDSLSHKKYDPDLFRMALPCLSAIAGALPPDYLDTRITATLEKQISVDADGNFDPKPINTMNFSLPEKLEYIVTKYAEHSHDKWACDKSQSGWKYGISLDENVKTHPLIRPFKTLTEKEKEIYRWPARESLKTMLAVGWTVERTKEGEALVQQRENEKLRSVSQANQGNSYSPAPLDLSNVVLSRELQGMVEVVAENYHNIWAKKKKLELESKGGGSHPLLVPYDTLTAKEKFKDREKAQDLFKFLQVNGIIVSRGMKDMELDASSMEKRFAYKFLKKILKYVDSAQEFIAHLEAIVSSGKTEKSPRDQEIKFFAKVLLPLVDQYFTSHCLYFLSSPLKPLSSSGYASHKEKEMVAGLFCKLAALVRHRISLFGSDSTTMVSCLHILAQTLDTRTVMKSGSELVKAGLRAFFENAAEDLEKTSENLKLGKFTHSRTQIKGVSQNINYTTVALLPILTSIFEHVTQHQFGMDLLLGDVQISCYHILCSLYSLGTGKNIYVERQRPALGECLASLAAAIPVAFLEPTLNRYNPLSVFNTKTPRERSILGMPDTVEDMCPDIPQLEGLMKEINDLAESGARYTEMPHVIEVILPMLCNYLSYWWERGPENLPPSTGPCCTKVTSEHLSLILGNILKIINNNLGIDEASWMKRIAVYAQPIISKARPDLLRSHFIPTLEKLKKKAVKTVQEEEQLKADGKGDTQEAELLILDEFAVLCRDLYAFYPMLIRYVDNNRSNWLKSPDADSDQLFRMVAEVFILWCKSHNFKREEQNFVIQNEINNLAFLTGDSKSKMSKAMQVKSGGQDQERKKTKRRGDLYSIQTSLIVAALKKMLPIGLNMCTPGDQELISLAKSRYSHRDTDEEVREHLRNNLHLQEKSDDPAVKWQLNLYKDVLKSEEPFNPEKTVERVQRISAAVFHLEQVEQPLRSKKAVWHKLLSKQRKRAVVACFRMAPLYNLPRHRSINLFLHGYQRFWIETEEYSFEEKLVQDLAKSPKVEEEEEEETEKQPDPLHQIILYFSRNALTERSKLEDDPLYTSYSSMMAKSCQSGEDEEEDEDKEKTFEEKEMEKQKTLYQQARLHERGAAEMVLQMISASKGEMSPMVVETLKLGIAILNGGNAGVQQKMLDYLKEKKDAGFFQSLSGLMQSCSVLDLNAFERQNKAEGLGMVTEEGTLIVRERGEKVLQNDEFTRDLFRFLQLLCEGHNSDFQNFLRTQMGNTTTVNVIISTVDYLLRLQESISDFYWYYSGKDIIDESGQHNFSKALAVTKQIFNSLTEYIQGPCIGNQQSLAHSRLWDAVVGFLHVFANMQMKLSQDSSQIELLKELLDLLQDMVVMLLSLLEGNVVNGTIGKQMVDTLVESSTNVEMILKFFDMFLKLKDLTSSDTFKEYDPDGKGIISKKEFQKAMEGQKQYTQSEIDFLLSCAEADENDMFNYVDFVDRFHEPAKDIGFNVAVLLTNLSEHMPNDSRLKCLLDPAESVLNYFEPYLGRIEIMGGAKKIERVYFEISESSRTQWEKPQVKESKRQFIFDVVNEGGEQEKMELFVNFCEDTIFEMQLASQISESDSADRPEEEEEDEDSSYVLEIAGEEEEDGSLEPASAFAMACASVKRNVTDFLKRATLKNLRKQYRNVKKMTAKELVKVLFSFFWMLFVGLFQLLFTILGGIFQILWSTVFGGGLVEGAKNIRVTKILGDMPDPTQFGIHDDTMEAERAEVMEPGITTELVHFIKGEKGDTDIMSDLFGLHPKKEGSLKHGPEVGLGDLSEIIGKDEPPTLESTVQKKRKAQAAEMKAANEAEGKVESEKADMEDGEKEDKDKEEEQAEYLWTEVTKKKKRRCGQKVEKPEAFTANFFKGLEIYQTKLLHYLARNFYNLRFLALFVAFAINFILLFYKVTEEPLEEETEDVANLWNSFNDEEEEEAMVFFVLQESTGYMAPTLRALAIIHTIISLVCVVGYYCLKVPLVVFKREKEIARKLEFDGLYITEQPSEDDIKGQWDRLVINTPSFPNNYWDKFVKRKVINKYGDLYGAERIAELLGLDKNALDFSPVEETKAEAASLVSWLSSIDMKYHIWKLGVVFTDNSFLYLAWYTTMSVLGHYNNFFFAAHLLDIAMGFKTLRTILSSVTHNGKQLVLTVGLLAVVVYLYTVVAFNFFRKFYNKSEDDDEPDMKCDDMMTCYLFHMYVGVRAGGGIGDEIEDPAGDPYEMYRIVFDITFFFFVIVILLAIIQGLIIDAFGELRDQQEQVREDMETKCFICGIGNDYFDTTPHGFETHTLQEHNLANYLFFLMYLINKDETEHTGQESYVWKMYQERCWDFFPAGDCFRKQYEDQLG

SEQ ID NO: 23914 - protein, 707 aa, Homo sapiens
MIPPQEASARRREIEDKLKQEEETLSFIRDSLEKSDQLTKNMVSILSSFESRLMKLENSIIPVHKQTENLQRLQENVEKTLSCLDHVISYYHVASDTEKIIREGPTGRLEEYLGSMAKIQKAVEYFQDNSPDSPELNKVKLLFERGKEALESEFRSLMTRHSKVVSPVLILDLISGDDDLEAQEDVTLEHLPESVLQDVIRISRWLVEYGRNQDFMNVYYQIRSSQLDRSIKGLKEHFHKSSSSSGVPYSPAIPNKRKDTPTKKPVKRPGTIRKAQNLLKQYSQHGLDGKKGGSNLIPLEGHEHDFRVKHLSEALNDKHGPLAGRDDMLDVETDAYIHCVSAFVKLAQSEYQLLADIIPEHHQKKTFDSLIQDALDGLMLEGENIVSAARKAIVRHDFSTVLTVFPILRHLKQTKPEFDQVLQGTAASTKNKLPGLITSMETIGAKALEDFADNIKNDPDKEYNMPKDGTVHELTSNAILFLQQLLDFQETAGAMLASQETSSSATSYSSEFSKRLLSTYICKVLGNLQLNLLSKSKVYEDPALSAIFLHNNYNYILKSLEKSELIQLVAVTQKTAERSYREHIEQQIQTYQRSWLKVTDYIAEKNLPVFQPGVKLRDKERQIIKERFKGFNDGLEELCKIQKAWAIPDTEQRDRIRQAQKTIVKETYGAFLQKFGSVPFTKNPEKYIKYGVEQVGDMIDRLFDTSA

SEQ ID NO: 23915 - protein, 346 aa, Homo sapiens
MTQQPLRGVTSLRFNQDQSCFCCAMETGVRIYNVEPLMEKGHLDHEQVGSMGLVEMLHRSNLLALVGGGSSPKFSEISVLIWDDAREGKDSKEKLVLEFTFTKPVLSVRMRHDKIVIVLKNRIYVYSFPDNPRKLFEFDTRDNPKGLCDLCPSLEKQLLVFPGHKCGSLQLVDLASTKPGTSSAPFTINAHQSDIACVSLNQPGTVVASASQKGTLIRLFDTQSKEKLVELRRGTDPATLYCDKGTVHIFALKDTRLNRRSALARVGKVGPMIGQYVDSQWSLASFTVPAESACICAFGRNTSKNVNSVIAICVDGTFHKYVFTPDGNCNREAFDVYLDICDDDDF

SEQ ID NO: 23916 - protein, 2223 aa, Homo sapiens
MIDLSFLTEEEQEAIMKVLQRDAALKRAEEERVRHLPEKIKDDQQLKNMSGQWFYEAKAKRHRDKIHGADIIRASMRKKRPQIAAEQSKDRENGAKESWVNNVNKDAFLPPELAGVVEEPEEDAAPASPSSSVVNPASSVIDMSQENTRKPNVSPEKQRKNPFNSSKLPEGHSSQQTKNEQSKNGRTGLFQTSKEDELSESKEKSTVADTSIQKLEKSKQTLPGLSNGSQIKAPIPKARKMIYKSTDLNKDDNQSFPRQRTDSLKARGAPRGILKRNSSSSSTDSETLRYNHNFEPKSKIVSPGLTIHERISEKEHSLEDNSSPNSLEPLKHVRFSAVKDELPQSPGLIHGREVGEFSVLESDRLKNGMEDAGDTEEFQSDPKPSQYRKPSLFHQSTSSPYVSKSETHQPMTSGSFPINGLHSHSEVLTARPQSMENSPTINEPKDKSSELTRLESVLPRSPADELSHCVEPEPSQVPGGSSRDRQQGKPPPLPALKAKTSSRSGPYATEIKKSTDDSIFKVLDWFNRSSYSDDNKSFLQHPRGIESKEKTDSKSQVAVDLVTDDTTLRENGSKTLSPSKIELKPVRSDSPFQAEGDMLVSESCQDNNVNIKSKFMNLSQKGTPKEGPGILQPFESYGTPSQGSKNMDYSQDSKSPGKGNGASPSNSNYSYSVLKESDAENQVPCNTNNIGNLGEEEPKFHAHEENRGHSEVNFDSSTVVKEPGLKDNMNAERKSKVGNTYILKASLEPENIKSTPGVANNGSPWKKPEVQFQQEAGEVPKNQVQREKYKRVSDRISFWEGEKAGAKITHEKPTSSCSQEQPSAKAYQPVKKSQGVSSMDSLSTDQSEYNQAIPKRVVLDEDDQASQLSNSYSSNKSKETKPQIAGPSRYYLSAEQSDKVSLFQNKKNEPIKRSQVADSLPSRRNITLPALQPPSNVGSERHAPLEKDRPLVRESNANFKVMSLKERMDEPNAEQVYNPSQFENLRKFWDLEANSNSKDNDKNITTTSQKNSAPFNRQKHKEFSDIKLSGKNTHEAEVLLSPKKVMAREEMEKLNSKGILQVLPDEITFPLSPLRKYTYQLPGNESSKENVEKNTEGIVTPVFKEEKDYSEQEIQESIIKTNVLSKDCKDTFNDSLQKLLSETSTPAIQPSGGKVHGKQVLEPSVSENRTWPQKTDFADTEEEVKGPEKIINEHVDKTVVHPKVKRNSLTASLDKLLKEATGTSPSPLQAKLAPVITGTNSKLEEGRFFGKGIEQSHNTSADKREILAPFPVRDETFGNTALLKKAESGECQLSTQNLIQMAAEDSHPLDPTSQLSRKGSFGDVASPPQDMLFPQDAHLVPQARVHPSQTEISETVEKVILPPRPVLNDVSAALQKLCGEVWLSYPAGREVGPGEVNPEFPEAVQPVCSPLNPPGVISPWATMDTIVPDRKDFYSSNVVPDKTHEVGSYLAAQMSPSDQTLSSFASIVAQYGKGLPQEVEEIVRETIVQPKSEFLEFSAGLEKLLKEETETFPSKYESDTGNLSPSKLIGSTEEPRRATSECHPEELKETVEKAEAPLITESAFDAGFEKLLKEITEAPPYQPQVSVREETHEKESSQSEQTRFLGTVPHFYRAASQTSEMKDKSNGLESQVNQCDKMLGGDALVTDLLVDFCGSRSGVEIPRTPQLYVAHEIGTIKTVTPPEDRDSESGVAGGQGTLQEPGFGEASEAISVSRNRQPIPLLMNKENSTKTSKVELTLASPYMKQEKEEEKEGFSESDFSDGNTSSNAESWRNPSSSEEEPSPVLKTLERSAARKMPSKSLEDISSDSSNQAKVDNQPEELVRSAEDVSTVPTQPDNPFSHPDKLKRMSKSVPAFLQDESDDRETDTASESSYQLSRHKKSPSSLTNLSSSSGMTSLSSVSGSVMSVYSGDFGNLEVKGNIQFAIEYVESLKELHVFVAQCKDLAAADVKKQRSDPYVKAYLLPDKGKMGKKKTLVVKKTLNPVYNEILRYKIEKQILKTQKLNLSIWHRDTFKRNSFLGEVELDLETWDWDNKQNKQLRWYPLKRKTAPVALEAENRGEMKLALQYVPEPVPGKKLPTTGEVHIWVKECLDLPLLRGSHLNSFVKCTILPDTSRKSRQKTRAVGKTTNPIFNHTMVYDGFRPEDLMEACVELTVWDHYKLTNQFLGGLRIGFGTGKSYGTEVDWMDSTSEEVALWEKMVNSPNTWIEATLPLRMLLIAKISK

SEQ ID NO: 23917 - protein, 64 aa, Homo sapiens
LSCGRLGQDNITVLHVKLTETAIRALETYQSHKNLIPFRPSIQFQGLHGMPVFFKRTLQTSHKA

SEQ ID NO: 23918 - protein, 2100 aa, Homo sapiens
MAERRAFAQKISRTVAAEVRKQISGQYSGSPQLLKNLNIVGNISHHTTVPLTEAVDPVDLEDYLITHPLAVDSGPLRDLIEFPPDDIEVVYSPRDCRTLVSAVPEESEMDPHVRDCIRSYTEDWAIVIRKYHKLGTGFNPNTLDKQKERQKGLPKQVFESDEAPDGNSYQDDQDDLKRRSMSIDDTPRGSWACSIFDLKNSLPDALLPNLLDRTPNEEIDRQNDDQRKSNRHKELFALHPSPDEEEPIERLSVPDIPKEHFGQRLLVKCLSLKFEIEIEPIFASLALYDVKEKKKISENFYFDLNSEQMKGLLRPHVPPAAITTLARSAIFSITYPSQDVFLVIKLEKVLQQGDIGECAEPYMIFKEADATKNKEKLEKLKSQADQFCQRLGKYRMPFAWTAIHLMNIVSSAGSLERDSTEVEISTGERKGSWSERRNSSIVGRRSLERTTSGDDACNLTSFRPATLTVTNFFKQEGDRLSDEDLYKFLADMRRPSSVLRRLRPITAQLKIDISPAPENPHYCLTPELLQVKLYPDSRVRPTREILEFPARDVYVPNTTYRNLLYIYPQSLNFANRQGSARNITVKVQFMYGEDPSNAMPVIFGKSSCSEFSKEAYTAVVYHNRSPDFHEEIKVKLPATLTDHHHLLFTFYHVSCQQKQNTPLETPVGYTWIPMLQNGRLKTGQFCLPVSLEKPPQAYSVLSPEVPLPGMKWVDNHKGVFNVEVVAVSSIHTQDPYLDKFFALVNALDEHLFPVRIGDMRIMENNLENELKSSISALNSSQLEPVVRFLHLLLDKLILLVIRPPVIAGQIVNLGQASFEAMASIINRLHKNLEGNHDQHGRNSLLASYIHYVFRLPNTYPNSSSPGPGGLGGSVHYATMARSAVRPASLNLNRSRSLSNSNPDISGTPTSPDDEVRSIIGSKAMDRSCNRMSSHTETSSFLQTLTGRLPTKKLFHEELALQWVVCSGSVRESALQQAWFFFELMVKSMVHHLYFNDKLEAPRKSRFPERFMDDIAALVSTIASDIVSRFQKDTEMVERLNTSLAFFLNDLLSVMDRGFVFSLIKSCYKQVSSKLYSLPNPSVLVSLRLDFLRIICSHEHYVTLNLPCSLLTPPASPSPSVSSATSQSSGFSTNVQDQKIANMFELSVPFRQQHYLAGLVLTELAVILDPDAEGLFGLHKKVINMVHNLLSSHDSDPRYSDPQIKARVAMLYLPLIGIIMETVPQLYDFTETHNQRGRPICIATDDYESESGSMISQTVAMAIAGTSVPQLTRPGSFLLTSTSGRQHTTFSAESSRSLLICLLWVLKNADETVLQKWFTDLSVLQLNRLLDLLYLCVSCFEYKGKKVFERMNSLTFKKSKDMRAKLEEAILGSIGARQEMVRRSRGQLERSPSGSAFGSQENLRWRKDMTHWRQNTEKLDKSRAEIEHEALIDGNLATEANLIILDTLEIVVQTVSVTESKESILGGVLKVLLHSMACNQSAVYLQHCFATQRALVSKFPELLFEEETEQCADLCLRLLRHCSSSIGTIRSHASASLYLLMRQNFEIGNNFARVKMQVTMSLSSLVGTSQNFNEEFLRRSLKTILTYAEEDLELRETTFPDQVQDLVFNLHMILSDTVKMKEHQEDPEMLIDLMYRIAKGYQTSPDLRLTWLQNMAGKHSERSNHAEAAQCLVHSAALVAEYLSMLEDRKYLPVGCVTFQNISSNVLEESAVSDDVVSPDEEGICSGKYFTESGLVGLLEQAAASFSMAGMYEAVNEVYKVLIPIHEANRDAKKLSTIHGKLQEAFSKIVHQSTGWERMFGTYFRVGFYGTKFGDLDEQEFVYKEPAITKLAEISHRLEGFYGERFGEDVVEVIKDSNPVDKCKLDPNKAYIQITYVEPYFDTYEMKDRITYFDKNYNLRRFMYCTPFTLDGRAHGELHEQFKRKTILTTSHAFPYIKTRVNVTHKEEIILTPIEVAIEDMQKKTQELAFATHQDPADPKMLQMVLQGSVGTTVNQGPLEVAQVFLSEIPSDPKLFRHHNKLRLCFKDFTKRCEDALRKNKSLIGPDQKEYQRELERNYHRLKEALQPLINRKIPQLYKAVLPVTCHRDSFSRMSLRKMDL

SEQ ID NO: 23919 - protein, 988 aa, Homo sapiens
EHEEDEESRRREAKAPRMGTFIGVYLPCLQNILGVILFLRLTWIVGVAGVLESFLIVAMCCTCTMLTAISMSAIATNGVVPAGGSYYMISRSLGPEFGGAVGLCFYLGTTFAGAMYILGTIEIFLTYISPGAAIFQAEAAGGEAAAMLHNMRVYGTCTLVLMALVVFVGVKYVNKLALVFLACVVLSILAIYAGVIKSAFDPPDIPVCLLGNRTLSRRSFDACVKAYGIHNNSATSALWGLFCNGSQPSAACDEYFIQNNVTEIQGIPGAASGVFLENLWSTYAHAGAFVEKKGVPSVPVAEESRASALPYVLTDIAASFTLLVGIYFPSVTGIMAGSNRSGDLKDAQKSIPTGTILAIVTTSFIYLSCIVLFGACIEGVVLRDKFGEALQGNLVIGMLAWPSPWVIVIGSFFSTCGAGLQSLTGAPRLLQAIARDGIVPFLQVFGHGKANGEPTWALLLTVLICETGILIASLDSVAPILSMFFLMCYLFVNLACAVQTLLRTPNWRPRFKFYHWTLSFLGMSLCLALMFICSWYYALSAMLIAGCIYKYIEYRGAEKEWGDGIRGLSLNAARYALLRVEHGPPHTKNWRPQVLVMLNLDAEQAVKHPRLLSFTSQLKAGKGLTIVGSVLEGTYLDKHMEAQRAEENIRSLMSTEKTKGFCQLVVSSSLRDGMSHLIQSAGLGGLKHNTVLMAWPASWKQEDNPFSWKNFVDTVRDTTAAHQALLVAKNVDSFPQNQERFGGGHIDVWWIVHDGGMLMLLPFLLRQHKVWRKCRMRIFTVAQVDDNSIQMKKDLQMFLYHLRISAEVEVVEMVENDISAFTYERTLMMEQRSQMLKQMQLSKNEQEREAQLIHDRNTASHTAAAARTQAPPTPDKVQMTWTREKLIAEKYRSRDTSLSGFKDLFSMKPEWGNLDQSNVRRMHTAVKLNGVVLNKSQDAQLVLLNMPGPPKNRQGDENYMEFLEVLTEGLNRVLLVRGGGREVITIYS

SEQ ID NO: 23920 - protein, 1361 aa, Homo sapiens
MAWKTLPIYLLLLLSVFVIQQVSSQDLSSCAGRCGEGYSRDATCNCDYNCQHYMECCPDFKRVCTAELSCKGRCFESFERGRECDCDAQCKKYDKCCPDYESFCAEVHNPTSPPSSKKAPPPSGASQTIKSTTKRSPKPPNKKKTKKVIESEEITEVKDNKKNRTKKKPTPKPPVVDEAGSGLDNGDFKVTTPDTSTTQHNKVSTSPKITTAKPINPRPSLPPNSDTSKETSLTVNKETTVETKETTTTNKQTSTDGKEKTTSAKETQSIEKTSAKDLAPTSKVLAKPTPKAETTTKGPALTTPKEPTPTTPKEPASTTPKEPTPTTIKSAPTTPKEPAPTTTKSAPTTPKEPAPTTTKEPAPTTPKEPAPTTTKEPAPTTTKSAPTTPKEPAPTTPKKPAPTTPKEPAPTTPKEPTPTTPKEPAPTTKEPAPTTPKEPAPTAPKKPAPTTPKEPAPTTPKEPAPTTTKEPSPTTPKEPAPTTTKSAPTTTKEPAPTTTKSAPTTPKEPSPTTTKEPAPTTPKEPAPTTPKKPAPTTPKEPAPTTPKEPAPTTTKKPAPTTPKEPAPTTPKETAPTTPKKLTPTTPEKLAPTTPEKPAPTTPEELAPTTPEEPTPTTPEEPAPTTPKAAAPNTPKEPAPTTPKEPAPTTPKEPAPTTPKETAPTTPKGTAPTTLKEPAPTTPKKPAPKELAPTTTKEPTSTTSDKPAPTTPKGTAPTTPKEPAPTTPKEPAPTTPKGTAPTTLKEPAPTTPKKPAPKELAPTTTKGPTSTTSDKPAPTTPKETAPTTPKEPAPTTPKKPAPTTPETPPPTTSEVSTPTTTKEPTTIHKSPDESTPELSAEPTPKALENSPKEPGVPTTKTPAATKPEMTTTAKDKTTERDLRTTPETTTAAPKMTKETATTTEKTTESKITATTTQVTSTTTQDTTPFKITTLKTTTLAPKVTTTKKTITTTEIMNKPEETAKPKDRATNSKATTPKPQKPTKAPKKPTSTKKPKTMPRVRKPKTTPTPRKMTSTMPELNPTSRIAEAMLQTTTRPNQTPNSKLVEVNPKSEDAGGAEGETPHMLLRPHVFMPEVTPDMDYLPRVPNQGIIINPMLSDETNICNGKPVDGLTTLRNGTLVAFRGHYFWMLSPFSPPSPARRITEVWGIPSPIDTVFTRCNCEGKTFFFKDSQYWRFTNDIKDAGYPKPIFKGFGGLTGQIVAALSTAKYKNWPESVYFFKRGGSIQQYIYKQEPVQKCPGRRPALNYPVYGETTQVRRRRFERAIGPSQTHTIRIQYSPARLAYQDKGVLHNEVKVSILWRGLPNVVTSAISLPNIRKPDGYDYYAFSKDQYYNIDVPSRTARAITTRSGQTLSKVWYNCP

SEQ ID NO: 23921 - protein, 198 aa, Homo sapiens
GDIFFMEVCDDCVVLRSNIGTVYERWWYEKLINMTYCPKTKVLCLWRRNGSETQLNKFYTKKCRELYYCVKDSMERAAARQQSIKPGPELGGEFPVQDLKTGEGGLLQVTLEGINLKFMHNQERKVFIELNHIKKCNTVRGVFVLEEFVPEIKEVVSHKYKTPMAHEICYSVLCLFSYVAAVHSSEEDLRTPPRPVSS

SEQ ID NO: 23922 - protein, 1916 aa, Homo sapiens
MIEDKGPRVADYFVVAGLTDVSKPLEEEIHFNDACHKVAKPKEPITDVSVIIKSLGEEVPQDYICIDVTPTGLSADLNNGSLVGPQIYLCYRRGRDKPPLTDLGVLYDWKERLKQGCEIIQSTPYGRPANISGSTSSQRIYITYRRASENMTQNTLAVTDICIIIPSKGESPPHTFCKVDKNLNNSMWGSAVYLCYKKSVAKTNTVSYKAGLICRYPQEDYESFSLPESVPLFCLPMGATIECWPSNSKYPLPVFSTFVLTGASAEKVYGAAIQFYEPYSEENLTEKQRLLLGLTSADGKSDSSKTIHTNKCICLLSHWPFFDAFRKFLTFLYRYSISGPHVLPIEKHISHFMHKVPFPSPQRPRILVQLSPHDNLILSQPVSSPLPLSGGKFSTLLQNLGPENAVTLLVFAVTEHKILIHSLRPSVLTSVTEALVSMIFPFHWPCPYVPLCPLALADVLSAPCPFIVGIDSRYFDLYDPPPDVSCVDVDTNTISQIGDKKNVAWKILPKKPCKNLMNTLNNLHQQLAKLQQRPRDDGLMDLAINDYDFNSGKRLHMIDLEIQEAFLFFMASILKGYRSYLRPITQAPSETATDAASLFALQAFLRSRDRSHQKFYNMMTKTQMFIRFIEECSFVSDKDASLAFFDDCVDKVDMDKSGEVRLIELDESFKSEHTVFVTPPEIPHLPNGEEPPLQYSYNGFPVLRNNLFERPEGFLQAKKNKLPSKSSSPNSPLPMFRRTKQEIKSAHKIAKRYSSIPQMWSRCLLRHCYGLWFICLPAYVKVCHSKVRALKTAYDVLKKMQSKKMDPPDEVCYRILMQLCGQYDQPVLAVRVLFEMQKAGIDPNAITYGYYNKAVLESTWPSRSRSGYFLWTKVRNVVLGVTQFKRALKKHAHLSQTTLSADGSDLDAVSHGSMDSGHGTHTVEQAPFNTGLIKVYATDDRSSTGGQSDLGYNSLSKDEVRRGDTSTEDIQEEKDKKGSDCSSLSESESTKGSADCLPKLSYQNSSSIVRLTGTSNNSAGKISGESMESTPELLLISSLEDTNETRNIQSRCFRKRHKSDNETNLQQQVVWGNRNRNLSGGVLMGFMLNRINQEATPGDIVEKLGADAKILSNVISKSTRPNTLDIGKPPLRSKRDSLEKESSDDDTPFDGSNYLADKVDSPVIFDLEDLDSETDVSKAGCVATQNPKRIQRMNSSFSVKPFEKTDVATGFDPLSLLVAETEQQQKEEEEEDEDDSKSISTPSARRDLAEEIVMYMNNMSSPLTSRTPSIDLQRACDDKLNKKSPPLVKACRRSSLPPNSPKPVRLTKSKSYTKSEEKPRDRLWSSPAFSPTCPFREESQDTLTHSSPSFNLDTLLVPKLDVLRNSMFTAGKGVAEKASKWYSRFTMYTTSSKDQSSDRTSLSSVGAQDSESTSLTDEDVCHELEGPISSQETSATSGTKRIDLSRISLESSASLEGSLSKFALPGKSEVTSSFNASNTNIFQNYAMEVLISSCSRCRTCDCLVHDEEIMAGWTADDSNLNTTCPFCGNIFLPFLNIEIRDLRRPGRYFLKSSPSTENMHFPSSISSQTRQSCISTSASGLDTSALSVQGNFDLNSKSKLQENFCTRSIQIPANRSKTAMSKCPIFPMARSISTSGPLDKEDTGRQKLISTGSLPATLQGATDSLGLEWHLPSPDPVTVPYLSPLVVWKELESLLENEGDHAITVADFVDHHPIVFWNLVWYFRRLDLPSNLPGLILSSEHCNKYSKIPRHCMSEDSKYVLIQMLWDNMKLHQDPGQPLYILWNAHSQSRTLLFETQKYPMVHLLQKSDNSFNQELLKSMVKSIKMNDVYGPMSQILETLNKCPHFKRQRSLYREILFLSLVALGRENIDIDAFDKEYKMAYDRLTPSQVKSTHNCDRPPSTGVMECRKTFGEPYL

SEQ ID NO: 23923 - protein, 862 aa, Homo sapiens
MAGNVKKSSGAGGGSGSGGSGSGGLIGLMKDAFQPHHHHHHHLSPHPPGTVDKKMVEKCWKLMDKVVRLCQNPKLALKNSPPYILDLLPDTYQHLRTILSRYEGKMETLGENEYFRVFMENLMKKTKQTISLFKEGKERMYEENSQPRRNLTKLSLIFSHMLAELKGIFPSGLFQGDTFRITKADAAEFWRKAFGEKTIVPWKSFRQALHEVHPISSGLEAMALKSTIDLTCNDYISVFEFDIFTRLFQPWSSLLRNWNSLAVTHPGYMAFLTYDEVKARLQKFIHKPGSYIFRLSCTRLGQWAIGYVTADGNILQTIPHNKPLFQALIDGFREGFYLFPDGRNQNPDLTGLCEPTPQDHIKVTQEQYELYCEMGSTFQLCKICAENDKDVKIEPCGHLMCTSCLTSWQESEGQGCPFCRCEIKGTEPIVVDPFDPRGSGSLLRQGAEGAPSPNYDDDDDERADDTLFMMKELAGAKAASGSLHKDKPLPVPPTLRDLPPPPPPDRPYSVGAESRPQRRPLPCTPGDCPSRDKLPPVPSSRLGDSWLPRPIPKVPVSAPSSSDPWTGRELTNRHSLPFSLPSQMEPRPDVPRLGSTFSLDTSMSMNSSPLVGPECDHPKIKPSSSANAIYSLAARPLPVPKLPPGEQCEGEEDTEYMTPSSRPLRPLDTSQSSRACDCDQQIDSCTYEAMYNIQSQAPSITESSTFGEGNLAAAHANTGPEESENEDDGYDVPKPPVPAVLARRTLSDISNASSSFGWLSLDGDPTTNVTEGSQVPERPPKPFPRRINSERKAGSCQQGSGPAASAATASPQLSSEIENLMSQGYSYQDIQKALVIAQNNIEMAKNILREFVSISSPAHVAT

SEQ ID NO: 23924 - protein, 683 aa, Homo sapiens
MPENPATDKLQVLQVLDRLKMKLQEKGDTSQNEKLSMFYETLKSPLFNQILTLQQSIKQLKGQLNHIPSDCSANFDFSRKGLLVFTDGSITNGNVHRPSNNSTVSGLFPWTPKLGNEDFNSVIQQMAQGRQIEYIDIERPSTGGLGFSVVALRSQNLGKVDIFVKDVQPGSVADRDQRLKENDQILAINHTPLDQNISHQQAIALLQQTTGSLRLIVAREPVHTKSSTSSSLNDTTLPETVCWGHVEEVELINDGSGLGFGIVGGKTSGVVVRTIVPGGLADRDGRLQTGDHILKIGGTNVQGMTSEQVAQVLRNCGNSVRMLVARDPAGDISVTPPAPAALPVALPTVASKGPGSDSSLFETYNVELVRKDGQSLGIRIVGYVGTSHTGEASGIYVKSIIPGSAAYHNGHIQVNDKIVAVDGVNIQGFANHDVVEVLRNAGQVVHLTLVRRKTSSSTSPLEPPSDRGTVVEPLKPPALFLTGAVETETNVDGEDEEIKERIDTLKNDNIQALEKLEKVPDSPENELKSRWENLLGPDYEVMVATLDTQIADDAELQKYSKLLPIHTLRLGVEVDSFDGHHYISSIVSGGPVDTLGLLQPEDELLEVNGMQLYGKSRREAVSFLKEVPPPFTLVCCRRLFDDEASVDEPRRTETSLPETENSLKYKRLTTIWMSILKKMMMGN

SEQ ID NO: 23925 - protein, 615 aa, Homo sapiens
RVTKILGDMPDPTQFGIHDDTMEAERAEVMEPGITTELVHFIKGEKGDTDIMSDLFGLHPKKEGSLKHGPEVGLGDLSEIIGKDEPPTLESTVQKKRKAQAAEMKAANEAEGKVESEKADMEDGEKEDKDKEEEQAEYLWTEVTKKKKRRCGQKVEKPEAFTANFFKGLEIYQTKLLVTEEPLEEETEDVANLWNSFNDEEEEEAMVFFVLQESTGYMAPTLRALAIIHTIISLVCVVGYYCLKVPLVVFKREKEIARKLEFDGLYITEQPSEDDIKGQWDRLVINTPSFPNNYWDKFVKRKVINKYGDLYGAERIAELLGLDKNALDFSPVEETKAEAASLVSWLSSIDMKYHIWKLGVVFTDNSFLYLAWYTTMSVLGHYNNFFFAAHLLDIAMGFKTLRTILSSVTHNGKQLVLTVGLLAVVVYLYTVVAFNFFRKFYNKSEDDDEPDMKCDDMMTCYLFHMYVGVRAGGGIGDEIEDPAGDPYEMYRIVFDITFFFFVIVILLAIIQGLIIDAFGELRDQQEQVREDMETKCFICGIGNDYFDTTPHGFETHTLQEHNLANYLFFLMYLINKDETEHTGQESYVWKMYQERCWDFFPAGDCFRKQYEDQLG

SEQ ID NO: 23926 - protein, 716 aa, Homo sapiens
MASTRSIELEHFEERDKRPRPGSRRGAPSSSGGSSSSGPKGNGLIPSPAHSAHCSFYRTRTLQALSSEKKAKKARFYRNGDRYFKGLVFAISSDRFRSFDALLIELTRSLSDNVNLPQGVRTIYTIDGSRKVTSLDELLEGESYVCASNEPFRKVDYTKNINPNWSVNIKGGTSRALAAASSVKSEVKESKDFIKPKLVTVIRSGVKPRKAVRILLNKKTAHSFEQVLTDITEAIKLDSGVVKRLCTLDGKQVTCLQDFFGDDDVFIACGPEKFRYAQDDFVLDHSECRVLKSSYSRSSAVKYSGSKSPGPSRRSKSPASVKRGGHYSSAYSTAKSPVNGTPSSQLSTPKSTKSSSSSPTSPGSFRGLKISAHGRSSSNVNGGPELDRCISPEGVNGNRCSESSTLLEKYKIGKVIGDGNFAVVKECIDRSTGKEFALKIIDKAKCCGKEHLIENEVSILRRVKHPNIIMLVEEMETATELFLVMELVKGGDLFDAITSSTKYTERDGSAMVYNLANALRYLHGLSIVHRDIKPENLLVCEYPDGTKSLKLGDFGLATVVEGPLYTVCGTPTYVAPEIIAETGYGLKVDIWAAGVITYILLCGFPPFRSENNLQEDLFDQILAGKLEFPAPYWDNITDSAKELISQMLQVNVEARCTAGQILSHPWVSDDASQENNMQAEVTGKLKQHFNNALPKQNSTTTGVSVIMVQGHEHGSR

SEQ ID NO: 23927 - protein, 274 aa, Homo sapiens
MLRYPYFCRMYKECLSCWLESGIPNLGVWPNRIHTTAEKYREYEAREQTDQTQAQELHRSQDRDFETMAKLHIPVMVDEVVHCLSPQKGQIFLDMTFGSGGHTKAILQKESDIVLYALDRDPTAYALAEHLSELYPKQIRAMLGQFSQAEALLMKAGVQPGTFDGVLMDLGCSSMQLDTPERGFSLRKDGPLDMRMDGGRYPDMPTAADVVNALDQQALASILRTYGEEKHAKKIASAIVQARSIYPITRTQQLASIVAGCTGESKLFWRCPKA

SEQ ID NO: 23928 - protein, 1417 aa, Homo sapiens
MPEQERQITAREGASRKILSKLSLPTRAWEPAMKKSFAFDNVGYEGGLDGLGPSSQVATSTVRILGMTCQSCVKSIEDRISNLKGIISMKVSLEQGSATVKYVPSVVCLQQVCHQIGDMGFEASIAEGKAASWPSRSLPAQEAVVKLRVEGMTCQSCVSSIEGKVRKLQGVVRVKVSLSNQEAVITYQPYLIQPEDLRDHVNDMGFEAAIKSKVAPLSLGPIDIERLQSTNPKRPLSSANQNFNNSETLGHQGSHVVTLQLRIDGMHCKSCVLNIEENIGQLLGVQSIQVSLENKTAQVKYDPSCTSPVALQRAIEALPPGNFKVSLPDGAEGSGTDHRSSSSHSPGSPPRNQVQGTCSTTLIAIAGMTCASCVHSIEGMISQLEGVQQISVSLAEGTATVLYNPSVISPEELRAAIEDMGFEASVVSESCSTNPLGNHSAGNSMVQTTDGTPTSVQEVAPHTGRLPANHAPDILAKSPQSTRAVAPQKCFLQIKGMTCASCVSNIERNLQKEAGVLSVLVALMAGKAEIKYDPEVIQPLEIAQFIQDLGFEAAVMEDYAGSDGNIELTITGMTCASCVHNIESKLTRTNGITYASVALATSKALVKFDPEIIGPRDIIKIIEEIGFHASLAQRNPNAHHLDHKMEIKQWKKSFLCSLVFGIPVMALMIYMLIPSNEPHQSMVLDHNIIPGLSILNLIFFILCTFVQAERSPVTFFDTPPMLFVFIALGRWLEHLAKSKTSEALAKLMSLQATEATVVTLGEDNLIIREEQVPMELVQRGDIVKVVPGGKFPVDGKVLEGNTMADESLITGEAMPVTKKPGSTVIAGSINAHGSVLIKATHVGNDTTLAQIVKLVEEAQMSKAPIQQLADRFSGYFVPFIIIMSTLTLVVWIVIGFIDFGVVQRYFPNPNKHISQTEVIIRFAFQTSITVLCIACPCSLGLATPTAVMVGTGVAAQNGILIKGGKPLEMAHKIKTVMFDKTGTITHGVPRVMRVLLLGDVATLPLRKVLAVVGTAEASSEHPLGVAVTKYCKEELGTETLGYCTDFQAVPGCGIGCKVSNVEGILAHSERPLSAPASHLNEAGSLPAEKDAVPQTFSVLIGNREWLRRNGLTISSDVSDAMTDHEMKGQTAILVAIDGVLCGMIAIADAVKQEAALAVHTLQSMGVDVVLITGDNRKTARAIATQVGINKVFAEVLPSHKVAKVQELQNKGKKVAMVGDGVNDSPALAQADMGVAIGTGTDVAIEAADVVLIRNDLLDVVASIHLSKRTVRRIRINLVLALIYNLVGIPIAAGVFMPIGIVLQPWMGSAAMAASSVSVVLSSLQLKCYKKPDLERYEAQAHGHMKPLTASQVSVHIGMDDRWRDSPRATPWDQVSYVSQVSLSSLTSDKPSRHSAAADDDGDKWSLLLNGRDEEQYI

SEQ ID NO: 23929 - protein, 1724 aa, Homo sapiens
MDGPGASAVVVRVGIPDLQQTKCLRLDPAAPVWAAKQRVLCALNHSLQDALNYGLFQPPSRGRAGKFLDEERLLQEYPPNLDTPLPYLEFRYKRRVYAQNLIDDKQFAKLHTKANLKKFMDYVQLHSTDKVARLLDKGLDPNFHDPDSGECPLSLAAQLDNATDLLKVLKNGGAHLDFRTRDGLTAVHCATRQRNAAALTTLLDLGASPDYKDSRGLTPLYHSALGGGDALCCELLLHDHAQLGITDENGWQEIHQACRFGHVQHLEHLLFYGADMGAQNASGNTALHICALYNQESCARVLLFRGANRDVRNYNSQTAFQVAIIAGNFELAEVIKTHKDSDVVPFRETPSYAKRRRLAGPSGLASPRPLQRSASDINLKGEAQPAASPGPSLRSLPHQLLLQRLQEEKDRDRDADQESNISGPLAGRAGQSKIREGAGRPCPAPPAPPAPPPRGPKRKLYSAVPGRKFIAVKAHSPQGEGEIPLHRGEAVKVLSIGEGGFWEGTVKGRTGWFPADCVEEVQMRQHDTRPETREDRTKRLFRHYTVGSYDSLTSHSDYVIDDKVAVLQKRDHEGFGFVLRGAKAETPIEEFTPTPAFPALQYLESVDVEGVAWRAGLRTGDFLIEVNGVNVVKVGHKQVVALIRQGGNRLVMKVVSVTRKPEEDGARRRAPPPPKRAPSTTLTLRSKSMTAELEELASIRRRKGEKLDEMLAAAAEPTLRPDIADADSRAATVKQRPTSRRITPAEISSLFERQGLPGPEKLPGSLRKGIPRTKSVGEDEKLASLLEGRFPRSTSMQDPVREGRGIPPPPQTAPPPPPAPYYFDSGPPPAFSPPPPPGRAYDTVRSSFKPGLEARLGAGAAGLYEPGAALGPLPYPERQKRARSMIILQDSAPESGDAPRPPPAATPPERPKRRPRPPGPDSPYANLGAFSASLFAPSKPQRRKSPLVKQLQVEDAQERAALAVGSPGPGGGSFAREPSPTHRGPRPGGLDYGAGDGPGLAFGGPGPAKDRRLEERRRSTVFLSVGAIEGSAPGADLPSLQPSRSIDERLLGTGPTAGRDLLLPSPVSALKPLVSGPSLGPSGSTFIHPLTGKPLDPSSPLALALAARERALASQAPSRSPTPVHSPDADRPGPLFVDVQARDPERGSLASPAFSPRSPAWIPVPARREAEKVPREERKSPEDKKSMILSVLDTSLQRPAGLIVVHATSNGQEPSRLGGAEEERPGTPELAPAPMQSAAVAEPLPSPRAQPPGGTPADAGPGQGSSEEEPELVFAVNLPPAQLSSSDEETREELARIGLVPPPEEFANGVLLATPLAGPGPSPTTVPSPASGKPSSEPPPAPESAADSGVEEADTRSSSDPHLETTSTISTVSSMSTLSSESGELTDTHTSFADGHTFLLEKPPVPPKPKLKSPLGKGPVTFRDPLLKQSSDSELMAQQHHAASAGLASAAGPARPRYLFQRRSKLWGDPVESRGLPGPEDDKPTVISELSSRLQQLNKDTRSLGEEPVGGLGSLLDPAKKSPIAAARLFSSLGELSSISAQRSPGGPGGGASYSVRPSGRYPVARRAPSPVKPASLERVEGLGAGAGGAGRPFGLTPPTILKSSSLSIPHEPKEVRFVVRSVSARSRSPSPSPLPSPASGPGPGAPGPRRPFQQKPLQLWSKFDVGDWLESIHLGEHRDRFEDHEIEGAHLPALTKDDFVELGVTRVGHRMNIERALRQLDGS

SEQ ID NO: 23930 - protein, 966 aa, Homo sapiens
MSNSNTTQETLEIMKESEKKLVEESVNKNKFISKTPSKEEIEKECEDTSLRQETQDYEFLFDKRRTSNHGHARKRAKSNSKLKLVRSLAVCEESSTPFADGPLETQDIIQLHISCPSDKEEEKSTKDVSEKEDKDKNKEKIPRKMLSRDSSQEYTDSTGIDLHEFLVNTLKKNPRDRMMLLKLEQEILEFINDNNNQFKKFPQMTSYHRMLLHRVAAYFGMDHNVDQTGKAVIINKTSNTRIPEQRFSEHIKDEKNTEFQQRFILKRDDASMDRDDNQTGQNGYLNDIRGNREGLSRTSSSRQSSTDSELKSLEPRPWSSTDSDGSVRSMRPPVTKASSFSGISILTRGDSIGSSKGGSAGRISRPGMALGAPEVCNQVTSSQSVRGLLPCTAQQQQQQQQQQLPALPPTPQQQPPLNNHMISQADDLSNPFGQMSLSRQGSTEAADPSAALFQTPLISQHPQQTSFIMASTGQPLPTSNYSTSSHAPPTQQVLPPQGYMQPPQQIQVSYYPPGQYPNSNQQYRPLSHPVAYSPQRGQQLPQPSQQPGLQPMMPNQQQAAYQGMIGVQQPQNQGLLSSQRSSMGGQMQGLVVQYTPLPSYQVPVGSDSQNVVQPPFQQPMLVPVSQSVQGGLPAAGVPVYYSMIPPAQQNGTSPSVGFLQPPGSEQYQMPQSPSPCSPPQMPQQYSGVSPSGPGVVVMQLNVPNGPQPPQNPSMVQWSHCKYYSMDQRGQKPGDLYSPDSSPQANTQMSSSPVTSPTQSPAPSPVTSLSSVCTGLSPLPVLTQFPRPGGPAQGDGRYSLLGQPLQYNLSICPPLLHGQSTYTVHQGQSGLKHGNRGKRQALKSASTDLGTADVVLGRVLEVTDLPEGITRTEADKLFTQLAMSGAKIQWLKDAQGLPGGGGGDNSGTAENGRHSDLAALYTIVAVFPSPLAAQNASLRLNNSVSRFKLRMAKKNYDLRILERASSQ

SEQ ID NO: 23931 - protein, 693 aa, Homo sapiens
PKAAYDYCEHYSPDCDSSAPKAAQAQEPQIDEYAPEDIIEYDYEYGEAEYKEAESVTEGPTVTEETIAQTEANIVDDFQEYNYGTMESYQTEAPRHVSGTNEPNPVEEIFTEEYLTGEDYDSQRKNSEDTLYENKEIDGRDSDLLVDGDLGEYDFYEYKEYEDKPTSPPNEEFGPGVPAETDITETSINGHGAYGEKGQKGEPAVVEPGMLVEGPPGPAGPAGIMGPPGLQGPTGPPGDPGDRGPPGRPGLPGADGLPGPPGTMLMLPFRYGGDGSKGPTISAQEAQAQAILQQARIALRGPPGPMGLTGRPGPVGGPGSSGAKGESGDPGPQGPRGVQGPPGPTGKPGKRGRPGADGGRGMPGEPGAKGDRGFDGLPGLPGDKGHRGERGPQGPPGPPGDDGMRGEDGEIGPRGLPGEAGPRGLLGPRGTPGAPGQPGMAGVDGPPGPKGNMGPQGEPGPPGQQGNPGPQGLPGPQGPIGPPGEKGPQGKPGLAGLPGADGPPGHPGKEGQSGEKGALGPPGPQGPIGYPGPRGVKGADGVRGLKGSKGEKGEDGFPGFKGDMGLKGDRGEVGQIGPRGEDGPEGPKGRAGPTGDPGPSGQAGEKGKLGVPGLPGYPGRQGPKDFRCHWFHWIPWVSRCQWRERCTGSSWQTRPSGSAWSNGSSRFKRCKRSHWETWAKGHFRWRWPSWPSR

SEQ ID NO: 23932 - protein, 798 aa, Homo sapiens
MDLSALRVEEVQNVINAMQKILECPICLELIKEPVSTKCDHIFCKFCMLKLLNQKKGPSQCPLCKNDITKRSLQESTRFSQLVEELLKIICAFQLDTGLEYANSYNFAKKENNSPEHLKDEVSIIQSMGYRNRAKRLLQSEPENPSLQETSLSVQLSNLGTVRTLRTKQRIQPQKTSVYIELAACEFSETDVTNTEHHQPSNNDLNTTEKRAAERHPEKYQGSSVSNLHVEPCGTNTHASSLQHENSSLLLTKDRMNVEKAEFCNKSKQPGLARSQHNRWAGSKETCNDRRTPSTEKKVDLNADPLCERKEWNKQKLPCSENPRDTEDVPWITLNSSIQKVNEWFSRSDELLGSDDSHDGESESNAKVADVLDVLNEVDEYSGSSEKIDLLASDPHEALICKSERVHSKSVESNIEDKIFGKTYRKKASLPNLSHVTENLIIGAFVTEPQIIQERPLTNKLKRKRRPTSGLHPEDFIKKADLAVQKTPEMINQGTNQTEQNGQVMNITNSGHENKTKGDSIQNEKNPNPIESLEKESAFKTKAEPISSSISNMELELNIHNSKAPKKNRLRRKSSTRHIHALELVVSRNLSPPNCTELQIDSCSSSEEIKKKKYNQMPVRHSRNLQLMEGKEPATGAKKSNKPNEQTSKRHDSDTFPELKLTNAPGSFTKCSNTSELKEFVNPSLPREEKEEKLETVKVSNNAEDPKDLMLSGERVLQTERSVESSSISLVPGTDYGTQESISLLEVSTLGKAKTEPNKCVSQCAAFENPKGLIHGCSKDNRNDTEGFKYPLGHEVNH

SEQ ID NO: 23933 - protein, 285 aa, Homo sapiens
MRKSPGLSDCLWAWILLLSTLTGRSYGQPSLQDELKDNTTVFTRILDRLLDGYDNRLRPGLGERVTEVKTDIFVTSFGPVSDHDMEYTIDVFFRQSWKDERLKFKGPMTVLRLNNLMASKIWTPDTFFHNGKKSVAHNMTMPNKLLRITEDGTLLYTMRLTVRAECPMHLEDFPMDAHACPLKFGSYAYTRAEVVYEWTREPARSVVVAEDGSRLNQYDLLGQTVDSGIVQSSTGEYVVMTTHFHLKRKIGYFVIQTYLPCIMTVILSQVSFWLNRESVPARTVF

SEQ ID NO: 23934 - protein, 815 aa, Homo sapiens
MERGKMAEAESLETAAEHERILREIESTDTACIGPTLRSVYDGEEHGRFMEKLETRIRNHDREIEKMCNFHYQGFVDSITELLKVRGEAQKLKNQVTDTNRKLQHEGKELVIAMEELKQCRLQQRNISATVDKLMLCLPVLEMYSKLRDQMKTKRHYPALKTLEHLEHTYLPQVSHYRFCKVMVDNIPKLREEIKDVSMSDLKDFLESIRKHSDKIGETAMKQAQQQRNLDNIVLQQPRIGSKRKSKKDAYIIFDTEIESTSPKSEQDSGILDVEDEEDDEEVPGAQDLVDFSPVYRCLHIYSVLGARETFENYYRKQRRKQARLVLQPPSNMHETLDGYRKYFNQIVGFFVVEDHILHTTQGLVNRAYIDELWEMALSKTIAALRTHSSYCSDPNLVLDLKNLIVLFADTLQVYGFPVNQLFDMLLEIRDQYSETLLKKWAGIFRNILDSDNYSPIPVTSEEMYKKVVGQFPFQDIELEKQPFPKKFPFSEFVPKVYNQIKEFIYACLKFSEDLHLSSTEVDDMIRKSTNLLLTRTLSNSLQNVIKRKNIGLTELVQIIINTTHLEKSCKYLEEFITNITNVLPETVHTTKLYGTTTFKDARHAAEEEIYTNLNQKIDQFLQLADYDWMTGDLGNKASDYLVDLIAFLRSTFAVFTHLPGKVAQTACMSACKHLATSLMQLLLEAEVRQLTLGALQQFNLDVRECEQFARSGPVPGFQEDTLQLAFIDLRQLLDLFIQWDWSTYLADYGQPNCKYLRVNPVTALTLLEKISREMKDTSRKNNMFAQFRKNERDKQKLIDTVAKQLRGLISSHHS

SEQ ID NO: 23935 - protein, 514 aa, Homo sapiens
MSGGEQKPERYYVGVDVGTGSVRAALVDQSGVLLAFADQPIKNWEPQFNHHEQSSEDIWAACCVVTKKVVQGIDLNQIRGLGFDATCSLVVLDKQFHPLPVNQEGDSHRNVIMWLDHRAVSQVNRINETKHSVLQYVGGVMSVEMQAPKLLWLKENLREICWDKAGHFFDLPDFLSWKATGVTARSLCSLVCKWTYSAEKGWDDSFWKMIGLEDFVADNYSKIGNQVLPPGASLGNGLTPEAARDLGLLPGIAVAASLIDAHAGGLGVIGADVRGHGLICEGQPVTSRLAVICGTSSCHMGISKDPIFVPGVWGPYFSAMVPGFWLNEGGQSVTGKLIDHMVQGHAAFPELQVKATARCQSIYAYLNSHLDLIKKAQPVGFLTVDLHVWPDFHGNRSPLADLTLKGMVTGLKLSQDLDDLAILYLATVQAIALGTRFIIEAMEAAGHSISTLFLCGGLSKNPLFVQMHADITGMPVVLSQEVESVLVGAAVLGACASGDFASVQIRKTKHRAIK

SEQ ID NO: 23936 - protein, 521 aa, Homo sapiens
MSHLSSPPKKHKGEHKGHSLPHGSERGSSSRDKDRSATVSSSVPMPAGGKGSHPSSTPQRVPNRLIHEKSPYLLQHAYNPVDWYPWGQEAFDKARKENKPIFLSVGYSTCHWCHMMEEESFQNEEIGRLLSEDFVSVKVDREERPDVDKVYMTFVQATSSGGGWPMNVWLTPNLQPFVGGTYFPPEDGLTRVGFRTVLLRIREQWKQNKNTLLENSQRVTTALLARSEISVGDRQLPPSAATVNNRCFQQLDEGYDEEYGGFAEAPKFPTPVILSFLFSYWLSHRLTQDGSRAQQMALHTLKMMANGGIRDHVGQGFHRYSTDRQWHVPHFEKMLYDQAQLAVAYSQAFQLSGDEFYSDVAKGILQYVARSLSHRSGGFYSAEDADSPPERGQRPKEGAYYVWTVKEVQQLLPEPVLGATEPLTSGQLLMKHYGLTEAGNISPSQDPKGELQGQNVLTVRYSLELTAARFGLDVEAVRTLLNSGLEKLFQARKHRPKPHLDSKMLAAWNGGAAHLRPSLSA

SEQ ID NO: 23937 - protein, 2098 aa, Homo sapiens
MAERRAFAQKISRTVAAEVRKQISGQYSGSPQLLKNLNIVGNISHHTTVPLTEAVDPVDLEDYLITHPLAVDSGPLRDLIEFPPDDIEVVYSPRDCRTLVSAVPEESEMDPHVRDCIRSYTEDWAIVIRKYHKLGTGFNPNTLDKQKERQKGLPKQVFESDEAPDGNSYQDDQDDLKRRSMSIDDTPRGSWACSIFDLKNSLPDALLPNLLDRTPNEEIDRQNDDQRKSNRHKELFALHPSPDEEEPIERLSVPDIPKEHFGQRLLVKCLSLKFEIEIEPIFASLALYDVKEKKKISENFYFDLNSEQMKGLLRPHVPPAAITTLARSAIFSITYPSQDVFLVIKLEKVLQQGDIGECAEPYMIFKEADATKNKEKLEKLKSQADQFCQRLGKYRMPFAWTAIHLMNIVSSAGSLERDSTEVEISTGERKGSWSERRNSSIVGRRSLERTTSGDDACNLTSFRPATLTVTNFFKQEGDRLSDEDLYKFLADMRRPSSVLRRLRPITAQLKIDISPAPENPHYCLTPELLQVKLYPDSRVRPTREILEFPARDVYVPNTTYRNLLYIYPQSLNFANRQGSARNITVKVQFMYGEDPSNAMPVIFGKSSCSEFSKEAYTAVVYHNRSPDFHEEIKVKLPATLTDHHHLLFTFYHVSCQQKQNTPLETPVGYTWIPMLQNGRLKTGQFCLPVSLEKPPQAYSVLSPEVPLPGMKWVDNHKGVFNVEVVAVSSIHTQDPYLDKFFALVNALDEHLFPVRIGDMRIMENNLENELKSSISALNSSQLEPVVRFLHLLLDKLILLVIRPPVIAGQIVNLGQASFEAMASIINRLHKNLEGNHDQHGRNSLLASYIHYVFRLPNTYPNSSSPGPGGLGGSVHYATMARSAVRPASLNLNRSRSLSNSNPDISGTPTSPDDEVRSIIGSKAMDRSCNRMSSHTETSSFLQTLTGRLPTKKLFHEELALQWVVCSGSVRESALQQAWFFFELMVKSMVHHLYFNDKLEAPRKSRFPERFMDDIAALVSTIASDIVSRFQKDTEMVERLNTSLAFFLNDLLSVMDRGFVFSLIKSCYKQVSSKLYSLPNPSVLVSLRLDFLRIICSHEHYVTLNLPCSLLTPPASPSPSVSSATSQSSGFSTNVQDQKIANMFELSVPFRQQHYLAGLVLTELAVILDPDAEGLFGLHKKVINMVHNLLSSHDSDPRYSDPQIKARVAMLYLPLIGIIMETVPQLYDFTETHNQRGRPICIATDDYESESGSMISQTVAMAIAGTSVPQLTRPGSFLLTSTSGRQHTTFSAESSRSLLICLLWVLKNADETVLQKWFTDLSVLQLNRLLDLLYLCVSCFEYKGKKVFERMNSLTFKKSKDMRAKLEEAILGSIGARQEMVRRSRGQLERSPSGSAFGSQENLRWRKDMTHWRQNTEKLDKSRAEIEHEALIDGNLATEANLIILDTLEIVVQTVSVTESKESILGGVLKVLLHSMACNQSAVYLQHCFATQRALVSKFPELLFEEETEQCADLCLRLLRHCSSSIGTIRSHASASLYLLMRQNFEIGNNFARVKMQVTMSLSSLVGTSQNFNEEFLRRSLKTILTYAEEDLELRETTFPDQVQDLVFNLHMILSDTVKMKEHQEDPEMLIDLMYRIAKGYQTSPDLRLTWLQNMAGKHSERSNHAEAAQCLVHSAALVAEYLSMLEDRKYLPVGCVTFQNISSNVLEESAVSDDVVSPDEEGICSGKYFTESGLVGLLEQAAASFSMAGMYEAVNEVYKVLIPIHEANRDAKKLSTIHGKLQEAFSKIVHQDGKRMFGTYFRVGFYGTKFGDLDEQEFVYKEPAITKLAEISHRLEGFYGERFGEDVVEVIKDSNPVDKCKLDPNKAYIQITYVEPYFDTYEMKDRITYFDKNYNLRRFMYCTPFTLDGRAHGELHEQFKRKTILTTSHAFPYIKTRVNVTHKEEIILTPIEVAIEDMQKKTQELAFATHQDPADPKMLQMVLQGSVGTTVNQGPLEVAQVFLSEIPSDPKLFRHHNKLRLCFKDFTKRCEDALRKNKSLIGPDQKEYQRELERNYHRLKEALQPLINRKIPQLYKAVLPVTCHRDSFSRMSLRKMDL

SEQ ID NO: 23938 - protein, 4859 aa, Homo sapiens
MAEGGEGGEDEIQFLRTEDEVVLQCIATIHKEQRKFCLAAEGLGNRLCFLEPTSEAKYIPPDLCVCNFVLEQSLSVRALQEMLANTGENGGEGAAQGGGHRTLLYGHAVLLRHSFSGMYLTCLTTSRSQTDKLAFDVGLREHATGEACWWTIHPASKQRSEGEKVRIGDDLILVSVSSERYLHLSVSNGNIQVDASFMQTLWNVHPTCSGSSIEEGYLLGGHVVRLFHGHDECLTIPSTDQNDSQHRRIFYEAGGAGTRARSLWRVEPLRISWSGSNIRWGQAFRLRHLTTGHYLALTEDQGLILQDRAKSDTKSTAFSFRASKELKEKLDSSHKRDIEGMGVPEIKYGDSVCFVQHIASGLWVTYKAQDAKTSRLGPLKRKVILHQEGHMDDGLTLQRCQREESQAARIIRNTTALFSQFVSGNNRTAAPITLPIEEVLQTLQDLIAYFQPPEEEMRHEDKQNKLRSLKNRQNLFKEEGMLALVLNCIDRLNVYNSVAHFAGIAREESGMAWKEILNLLYKLLAALIRGNRNNCAQFSNNLDWLISKLDRLESSSGILEVLHCILTESPEALNLIAEGHIKSIISLLDKHGRNHKVLDILCSLCLCNGVAVRANQNLICDNLLPRRNLLLQTRLINDVTSIRPNIFLGVAEGSAQYKKWYFELIIDQVDPFLTAEPTHLRVGWASSSGYAPYPGGGEGWGGNGVGDDLYSYGFDGLHLWSGRIPRAVASINQHLLRSDDVVSCCLDLGVPSISFRINGQPVQGMFENFNTDGLFFPVMSFSAGVKVRFLMGGRHGEFKFLPPSGYAPCYEALLPKEKMRLEPVKEYKRDADGIRDLLGTTQFLSQASFIPCPVDTSQVILPPHLEKIRDRLAENIHELWGMNKIELGWTFGKIRDDNKRQHPCLVEFSKLPETEKNYNLQMSTETLKTLLALGCHIAHVNPAAEEDLKKVKLPKNYMMSNGYKPAPLDLSDVKLLPPQEILVDKLAENAHNVWAKDRIKQGWTYGIQQDLKNKRNPRLVPYALLDERTKKSNRDSLREAVRTFVGYGYNIEPSDQELADSAVEKVSIDKIRFFRVERSYAVRSGKWYFEFEVVTGGDMRVGWARPGCRPDVELGADDQAFVFEGNRGQRWHQGSGYFGRTWQPGDVVGCMINLDDASMIFTLNGELLITNKGSELAFADYEIENGFVPICCLGLSQIGRMNLGTDASTFKFYTMCGLQEGFEPFAVNMNRDVAMWFSKRLPTFVNVPKDHPHIEVMRIDGTMDSPPCLKVTHKTFGTQNSNADMIYCRLSMPVECHSSFSHSPCLDSEAFQKRKQMQEILSHTTTQCYYAIRIFAGQDPSCVWVGWVTPDYHLYSEKFDLNKNCTVTVTLGDERGRVHESVKRSNCYMVWGGDIVASSQRSNRSNVDLEIGCLVDLAMGMLSFSANGKELGTCYQVEPNTKVFPAVFLQPTSTSLFQFELGKLKNAMPLSAAIFRSEEKNPVPQCPPRLDVQTIQPVLWSRMPNSFLKVETERVSERHGWVVQCLEPLQMMALHIPEENRCVDILELCEQEDLMRFHYHTLRLYSAVCALGNSRVAYALCSHVDLSQLFYAIDNKYLPGLLRSGFYDLLISIHLASAKERKLMMKNEYIIPITSTTRNIRLFPDESKRHGLPGVGLRTCLKPGFRFSTPCFVVTGEDHQKQSPEIPLESLRTKALSMLTEAVQCSGAHIRDPVGGSVEFQFVPVLKLIGTLLVMGVFDDDDVRQILLLIDPSVFGEHSAGTEEGAEKEEVTQVEEKAVEAGEKAGKEAPVKGLLQTRLPESVKLQMCELLSYLCDCELQHRVEAIVAFGDIYVSKLQANQKFRYNELMQALNMSAALTARKTKEFRSPPQEQINMLLNFQLGENCPCPEEIREELYDFHEDLLLHCGVPLEEEEEEEEDTSWTGKLCALVYKIKGPPKPEKEQPTEEEERCPTTLKELISQTMICWAQEDQIQDSELVRMMFNLLRRQYDSIGELLQALRKTYTISHTSVSDTINLLAALGQIRSLLSVRMGKEEELLMINGLGDIMNNKVFYQHPNLMRVLGMHETVMEVMVNVLGTEKSQIAFPKMVASCCRFLCYFCRISRQNQKAMFEHLSYLLENSSVGLASPSMRGSTPLDVAASSVMDNNELALSLEEPDLEKVVTYLAGCGLQSCPMLLAKGYPDVGWNPIEGERYLSFLRFAVFVNSESVEENASVVVKLLIRRPECFGPALRGEGGNGLLAAMQGAIKISENPALDLPSQGYKREVTGDDEEEEEIVHMGNAIMSFYSALIDLLGRCAPEMHLIQTGKGEAIRIRSILRSLVPTEDLVGIISIPLKLPSLNKDGSVSEPDMAANFCPDHKAPMVLFLDRVYGIKDQTFLLHLLEVGFLPDLRASASLDTVSLSTTEAALALNRYICSAVLPLLTRCAPLFAGTEHCTSLIDSTLQTIYRLSKGRSLTKAQRDTIEECLLAICNHLRPSMLQQLLRRLVFDVPQLNEYCKMPLKLLTNHYEQCWKYYCLPSGWGSYGLAVEEELHLTEKLFWGIFDSLSHKKYDPDLFRMALPCLSAIAGALPPDYLDTRITATLEKQISVDADGNFDPKPINTMNFSLPEKLEYIVTKYAEHSHDKWACDKSQSGWKYGISLDENVKTHPLIRPFKTLTEKEKEIYRWPARESLKTMLAVGWTVERTKEGEALVQQRENEKLRSVSQANQGNSYSPAPLDLSNVVLSRELQGMVEVVAENYHNIWAKKKKLELESKGGGSHPLLVPYDTLTAKEKFKDREKAQDLFKFLQVNGIIVSRGMKDMELDASSMEKRFAYKFLKKILKYVDSAQEFIAHLEAIVSSGKTEKSPRDQEIKFFAKVLLPLVDQYFTSHCLYFLSSPLKPLSSSGYASHKEKEMVAGLFCKLAALVRHRISLFGSDSTTMVSCLHILAQTLDTRTVMKSGSELVKAGLRAFFENAAEDLEKTSENLKLGKFTHSRTQIKGVSQNINYTTVALLPILTSIFEHVTQHQFGMDLLLGDVQISCYHILCSLYSLGTGKNIYVERQRPALGECLASLAAAIPVAFLEPTLNRYNPLSVFNTKTPRERSILGMPDTVEDMCPDIPQLEGLMKEINDLAESGARYTEMPHVIEVILPMLCNYLSYWWERGPENLPPSTGPCCTKVTSEHLSLILGNILKIINNNLGIDEASWMKRIAVYAQPIISKARPDLLRSHFIPTLEKLKKKAVKTVQEEEQLKADGKGDTQEAELLILDEFAVLCRDLYAFYPMLIRYVDNNRSNWLKSPDADSDQLFRMVAEVFILWCKSHNFKREEQNFVIQNEINNLAFLTGDSKSKMSKSGGQDQERKKTKRRGDLYSIQTSLIVAALKKMLPIGLNMCTPGDQELISLAKSRYSHRDTDEEVREHLRNNLHLQEKSDDPAVKWQLNLYKDVLKSEEPFNPEKTVERVQRISAAVFHLEQVEQPLRSKKAVWHKLLSKQRKRAVVACFRMAPLYNLPRHKINNFFLSTFQQVWLEKVNEKTQYDRLIPILMKSPKVEEEEEEETEKQPDPLHQIILYFSRNALTERSKLEDDPLYTSYSSMMAKSCQSGEDEEEDEDKEKTFEEKEMEKQKTLYQQARLHERGAAEMVLQMISASKGEMSPMVVETLKLGIAILNGGNAGVQQKMLDYLKEKKDAGFFQSLSGLMQSCSVLDLNAFERQNKAEGLGMVTEEGTREKVLQNDEFTRDLFRFLQLLCEGHNSDFQNFLRTQMGNTTTVNVIISTVDYLLRLQESISDFYWYYSGKDIIDESGQHNFSKALAVTKQIFNSLTEYIQGPCIGNQQSLAHSRLWDAVVGFLHVFANMQMKLSQDSSQIELLKELLDLLQDMVVMLLSLLEGNVVNGTIGKQMVDTLVESSTNVEMILKFFDMFLKLKDLTSSDTFKEYDPDGKGIISKKEFQKAMEGQKQYTQSEIDFLLSCAEADENDMFNYVDFVDRFHEPAKDIGFNVAVLLTNLSEHMPNDSRLKCLLDPAESVLNYFEPYLGRIEIMGGAKKIERVYFEISESSRTQWEKPQVKESKRQFIFDVVNEGGEQEKMELFVNFCEDTIFEMQLASQISESDSADRPEEEEEDEDSSYVLEIAGEEEEDGSLEPASAFAMACASVKRNVTDFLKRATLKNLRKQYRNVKKMTAKELVKVLFSFFWMLFVGLFQLLFTILGGIFQILWSTVFGGGLVEGAKNIRVTKILGDMPDPTQFGIHDDTMEAERAEVMEPGITTELVHFIKGEKGDTDIMSDLFGLHPKKEGSLKHGPEVGLGDLSEIIGKDEPPTLESTVQKKRKAQAAEMKAANEAEGKVESEKADMEDGEKEDKDKEEEQAEYLWTEVTKKKKRRCGQKVEKPEAFTANFFKGLEIYQTKLLHYLARNFYNLRFLALFVAFAINFILLFYKVTEEPLEEETEDVANLWNSFNDEEEEEAMVFFVLQESTGYMAPTLRALAIIHTIISLVCVVGYYCLKVPLVVFKREKEIARKLEFDGLYITEQPSEDDIKGQWDRLVINTPSFPNNYWDKFVKRKVINKYGDLYGAERIAELLGLDKNALDFSPVEETKAEAASLVSWLSSIDMKYHIWKLGVVFTDNSFLYLAWYTTMSVLGHYNNFFFAAHLLDIAMGFKTLRTILSSVTHNGKQLVLTVGLLAVVVYLYTVVAFNFFRKFYNKSEDDDEPDMKCDDMMTCYLFHMYVGVRAGGGIGDEIEDPAGDPYEMYRIVFDITFFFFVIVILLAIIQGLIIDAFGELRDQQEQVREDMETKCFICGIGNDYFDTTPHGFETHTLQEHNLANYLFFLMYLINKDETEHTGQESYVWKMYQERCWDFFPAGDCFRKQYEDQLG

SEQ ID NO: 23939 - protein, 353 aa, Homo sapiens
STAKLFVEGRDVRIRSIKKEVQVIEKQRAVVEFEVNEDDVDAHWYKDGIEINFQVQERHKYVVERRIHRMFISETRQSDAGEYTFVAGRNRSSVTLYVNAPEPPQVLQELQPVTVQSGKPARFCAVISGRPQPKISWYKEEQLLSTGFKCKFLHDGQEYTLLLIEAFPEDAAVYTCEAKNDYGVATTSASLSVEVPEVVSPDQEMPVYPPAIITPLQDTVTSEGQPARFQCRVSGTDLKVSWYSKDKKIKPSRFFRMTQFEDTYQLEIAEAYPEDEGTYTFVASNAVGQVSSTANLSLEAKESQARALTKITLGSDTKSIKTLRESQIKTTREVKRESSKKTSSLSLTSCQKP

SEQ ID NO: 23940 - protein, 948 aa, Homo sapiens
MDRSSKRRQVKPLAASLLEALDYDSSDDSDFKVGDASDSEGSGNGSEDASKDSGEGSCSDSEENILEEELNEDIKVKEEQLKNSAEEEVLSSEKQLIKMEKKEEEENGERPRKKKEKEKEKEKEKEKEKEREKEKEKATVSENVAASAAATTPATSPPAVNTSPSVPTTTTATEEQVSEPKKWNLRRNRPLLDFVSMEELNDMDDYDSEDDNDWRPTVVKRKGRSASQKEGSDGDNEDDEDEGSGSDEDENDEGNDEDHSSPASEGGCKKKKSKVLSRNSADDEELTNDSLTLSQSKSNEDSLILEKSQNWSSQKMDHILICCVCLGDNSEDADEIIQCDNCGITVHEGCYGVDGESDSIMSSASENSTEPWFCDACKCGVSPSCELCPNQDGIFKETDAGRWVHIVCALYVPGVAFGDIDKLRPVTLTEMNYSKYGAKECSFCEDPRFARTGVCISCDAGMCRAYFHVTCAQKEGLLSEAAAEEDIADPFFAYCKQHADRLDRKWKRKNYLALQSYCKMSLQEREKQLSPEAQARINARLQQYRAKAELARSTRPQAWVPREKLPRPLTSSASAIRKLMRKAELMGISTDIFPVDNSDTSSSVDGRRKHKQPALTADFVNYYFERNMRMIQIQENMAEQKNIKDKLENEQEKLHVEYNKLCESLEELQNLNGKLRSEGQGIWALLGRITGQKLNIPAILRAPKERKPSKKEGGTQKTSTLPAVLYSCGICKKNHDQHLLLLCDTCKLHYHLGCLDPPLTRMPRKTKNSYWQCSECDQAGSSDMEADMAMETLPDGTKRSRRQIKEPVKFVPQDVPPEPKKIPIRNTRTRGRKRSFVPEEEKHEERVPRERRQRQSVLQKKPKAEDLRTECATCKGTGDNENLVRCDECRLCYHFGCLDPPLKKSPKQTGYGWICQECDSSSSKEDENEAERKNISQELNMEQKNPKK

SEQ ID NO: 23941 - protein, 1571 aa, Homo sapiens
MSSTLHSVFFTLKVSILLGSLLGLCLGLEFMGLPNQWARYLRWDASTRSDLSFQFKTNVSTGLLLYLDDGGVCDFLCLSLVDGRVQLRFSMDCAETAVLSNKQVNDSSWHFLMVSRDRLRTVLMLDGEGQSGELQPQRPYMDVVSDLFLGGVPTDIRPSALTLDGVQAMPGFKGLILDLKYGNSEPRLLGSRGVQMDAEGPCGERPCENGGICFLLDGHPTCDCSTTGYGGKLCSEDVSQDPGLSHLMMSEQAREENVATFRGSEYLCYDLSQNPIQSSSDEITLSFKTWQRNGLILHTGKSADYVNLALKDGAVSLVINLGSGAFEAIVEPVNGKFNDNAWHDVKVTRNLRQVTISVDGILTTTGYTQEDYTMLGSDDFFYVGGSPSTADLPGSPVSNNFMGCLKEVVYKNNDIRLELSRLARIADTKMKIYGEVVFKCENVATLDPINFETPEAYISLPKWNTKRMGSISFDFRTTEPNGLILFTHGKPQERKDARSQKNTKVDFFAVELLDGNLYLLLDMGSGTIKVKATQKKANDGEWYHVDIQRDGRSGTISVNSRRTPFTASGESEILDLEGDMYLGGLPENRAGLILPTELWTAMLNYGYVGCIRDLFIDGRSKNIRQLAEMQNAAGVKSSCSRMSAKQCDSYPCKNNAVCKDGWNRFICDCTGTGYWGRTCEREASILSYDGSMYMKIIMPMVMHTEAEDVSFRFMSQRAYGLLVATTSRDSADTLRLELDGGRVKLMVNLDCIRINCNSSKGPETLYAGQKLNDNEWHTVRVVRRGKSLKLTVDDDVAEGTMVGDHTRLEFHNIETGIMTEKRYISVVPSSFIGHLQSLMFNGLLYIDLCKNGDIDYCELKARFGLRNIIADPVTFKTKSSYLSLATLQAYTSMHLFFQFKTTSPDGFILFNSGDGNDFIAVELVKGYIHYVFDLGNGPNVIKGNSDRPLNDNQWHNVVITRDNSNTHSLKVDTKVVTQVINGAKNLDLKGDLYMAGLAQGMYSNLPKLVASRDGFQGCLASVDLNGRLPDLINDALHRSGQIERGCEGPSTTCQEDSCANQGVCMQQWEGFTCDCSMTSYSGNQCNDPGATYIFGKSGGLILYTWPANDRPSTRSDRLAVGFSTTVKDGILVRIDSAPGLGDFLQLHIEQGKIGVVFNIGTVDISIKEERTPVNDGKYHVVRFTRNGGNATLQVDNWPVNEHYPTGNTDNERFQMVKQKIPFKYNRPVEEWLQEKGRQLTIFNTQAQIAIGGKDKGRLFQGQLSGLYYDGLKVLNMAAENNPNIKINGSVRLVGEVPSILGTTQTTSMPPEMSTTVMETTTTMATTTTRKNRSTASIQPTSDDLVSSAECSSDDEDFVECEPSTDKSLSTSIFEGGYKAHAPKWESKDFRPNKVSETSRTTTTSLSPELIRFTASSSSGMVPKLPAGKMNNRDLKPQPDIVLLPLPTAYELDSTKLKSPLITSPMFRNVPTANPTEPGIRRVPGASEVIRESSSTTGMVVGIVAAAALCILILLYAMYKYRNRDEGSYQVDETRNYISNSAQSNGTLMKEKQQSSKSGHKKQKNKDREYYV

SEQ ID NO: 23942 - protein, 866 aa, Homo sapiens
LKERMDEPNAEQVYNPSQFENLRKFWDLEANSNSKDNDKNITTTSQKNSAPFNRQKHKEFSDIKLSGKNTHEAEVLLSPKKVMAREEMEKLNSKGILQVLPDEITFPLSPLRKYTYQLPGNESSKENVEKNTEGIVTPVFKEEKDYSEQEIQESIIKTNVLSKDCKDTFNDSLQKLLSETSTPAIQPSGGKVHGKQVLEPSVSENRTWPQKTDFADTEEEVKGPEKIINEHVDKTVVHPKVKRNSLTASLDKLLKEATGTSPSPLQAKLAPVITGTNSKLEEGRFFGKGIEQSHNTSADKREILAPFPVRDETFGNTALLKKAESGECQLSTQNLIQMAAEDSHPLDPTSQLSRKGSFGDVASPPQDMLFPQDAHLVPQARVHPSQTEISETVEKVILPPRPVLNDVSAALQKLCGEVWLSYPAGREVGPGEVNPEFPEAVQPVCSPLNPPGVISPWATMDTIVPDRKDFYSSNVVPDKTHEVGSYLAAQMSPSDQTLSSFASIVAQYGKGLPQEVEEIVRETIVQPKSEFLEFSAGLEKLLKEETETFPSKYESDTGNLSPSKLIGSTEEPRRATSECHPEELKETVEKAEAPLITESAFDAGFEKLLKEITEAPPYQPQVSVREETHEKESSQSEQTRFLGTVPHFYRAASQTSEMKDKSNGLESQVNQCDKMLGGDALVTDLLVDFCGSRSGVEIPRTPQLYVAHEIGTIKTVTPPEDRDSESGVAGGQGTLQEPGFGEASEAISVSRNRQPIPLLMNKENSTKTSKVELTLASPYMKQEKEEEKEGFSESDFSDGNTSSNAESWRNPSSSEEEPSPVLKTLERSAARKMPSKSLEDISSDSSNQAKVDNQPEELVRSAEDDF

SEQ ID NO: 23943 - protein, 132 aa, Homo sapiens
MRPSVWAAVAAGLWVLCTVIAEGPPALPALALPLAGAPDAGGCQGAEGPLRGRGAELGAAQLLLPPQEGSSAAIAUAGTARLLQEGPRGPEEASQTPESGLASVPQSQRGLQPPAPAHVGAPAGCTLWALPL

SEQ ID NO: 23944 - protein, 208 aa, Homo sapiens
MLSPTFVLWDVGYPLYTYGSICIIALIIWQVKKSCQKLSLVPNRSCCRCHRRVQQKSGDRTSRARRTSQEEAEKLWKLLFLMKSQGWLPQEGSVRRILCADPCCQICNVMALEIKQLLAAPEVGLDNKMKLFLHWINPEMKDRRHEESILLSKAETVTQDRTKNIEKSPTVTKDHVWGATTQKTTEDPEAQPPSTEEEGLIFCDAPSA

SEQ ID NO: 23945 - protein, 903 aa, Homo sapiens
MTSGSKCPSTDSGKEEYIATFKGSEYFCYDLSQNPIQSSSDEITLSFKTLQRNGLMLHTGKSADYVNLALKNGAVSLVINLGSGAFEALVEPVNGKFNDNAWHDVKVTRNLRQVTISVDGILTTTGYTQEDYTMLGSDDFFYVGGSPSTADLPGSPVSNNFMGCLKEVVYKNNDVRLELSRLAKQGDPKMKIHGVVAFKCENVATLDPITFETPESFISLPKWNAKKTGSISFDFRTTEPNGLILFSHGKPRHQKDAKHPQMIKVDFFAIEMLDGHLYLLLDMGSGTIKIKALLKKVNDGEWYHVDFQRDGRSGTISVNTLRTPYTAPGESEILDLDDELYLGGLPENKAGLVFPTEVWTALLNYGYVGCIRDLFIDGQSKDIRQMAEVQSTAGVKPSCSKETAKPCLSNPCKNNGMCRDGWNRYVCDCSGTGYLGRSCEREATVLSYDGSMFMKIQLPVVMHTEAEDVSLRFRSQRAYGILMATTSRDSADTLRLELDAGRVKLTVNLGKGPETLFAGYNLNDNEWHTVRVVRRGKSLKLTVDDQQAMTGQMAGDHTRLEFHNIETGIITERRYLSSVPSNFIGHLQSLTFNGMAYIDLCKNGDIDYCELNARFGFRNIIADPVTFKTKSSYVALATLQAYTSMHLFFQFKTTSLDGLILYNSGDGNDFIVVELVKGYLHYVFDLGNGANLIKGSSNKPLNDNQWHNVMISRDTSNLHTVKIDTKITTQITAGARNLDLKSDLYIGGVAKETYKSLPKLVHAKEGFQGCLASVDLNGRLPDLISDALFCNGQIERGCEGPSTTCQEDSCSNQGVCLQQWDGFSCDCSMTSFSGPLCNDPGTTYIFSKGGGQITYKWPPNDRPSTRADRLAIGFSTVQKEAVLVRVDSSSGLGDYLELHITLQ

SEQ ID NO: 23946 - protein, 1165 aa, Homo sapiens
MANDSPAKSLVDIDLSSLRDPAGIFELVEVVGNGTYGQVYKGRHVKTGQLAAIKVMDVTEDEEEEIKLEINMLKKYSHHRNIATYYGAFIKKSPPGHDDQLWLVMEFCGAGSITDLVKNTKGNTLKEDWIAYISREILRGLAHLHIHHVIHRDIKGQNVLLTENAEVKLVDFGVSAQLDRTVGRRNTFIGTPYWMAPEVIACDENPDATYDYRSDLWSCGITAIEMAEGAPPLCDMHPMRALFLIPRNPPPRLKSKKWSKKFFSFIEGCLVKNYMQRPSTEQLLKHPFIRDQPNERQVRIQLKDHIDRTRKKRGEKDETEYEYSGSEEEEEEVPEQEGEPSSIVNVPGESTLRRDFLRLQQENKERSEALRRQQLLQEQQLREQEEYKRQLLAERQKRIEQQKEQRRRLEEQQRREREARRQQEREQRRREQEEKRRLEELERRRKEEEERRRAEEEKRRVEREQEYIRRQLEEEQRHLEVLQQQLLQEQAMLLHDHRRPHPQHSQQPPPPQQERSKPSFHAPEPKAHYEPADRAREVPVRTTSRSPVLSRRDSPLQGSGQQNSQAGQRNSTSIEPRLLWERVEKLVPRPGSGSSSGSSNSGSQPGSHPGSQSGSGERFRVRSSSKSEGSPSQRLENAVKKPEDKKEVFRPLKPAGEVDLTALAKELRAVEDVRPPHKVTDYSSSSEESGTTDEEDDDVEQEGADESTSGPEDTRAASSLNLSNGETESVKTMIVHDDVESEPAMTPSKEGTLIVRQTQSASSTLQKHKSSSSFTPFIDPRLLQISPSSGTTVTSVVGFSCDGMRPEAIRQDPTRKGSVVNVNPTNTRPQSDTPEIRKYKKRFNSEILCAALWGVNLLVGTESGLMLLDRSGQGKVYPLINRRRFQQMDVLEGLNVLVTISGKKDKLRVYYLSWLRNKILHNDPEVEKKQGWTTVGDLEGCVHYKVVKYERIKFLVIALKSSVEVYAWAPKPYHKFMAFKSFGELVHKPLLVDLTVEEGQRLKVIYGSCAGFHAVDVDSGSVYDIYLPTHVRKNPHSMIQCSIKPHAIIILPNTDGMELLVCYEDEGVYVNTYGRITKDVVLQWGEMPTSVAYIRSNQTMGWGEKAIEIRSVETGHLDGVFMHKRAQRLKFLCERNDKVFFASVRSGGSSQVYFMTLGRTSLLSW

SEQ ID NO: 23947 - protein, 465 aa, Homo sapiens
MSLLCVRVKRAKFQGSPDKFNTYVTLKVQNVKSTTVAVRGDQPSWEQDFMFEISRLDLGLSVEVWNKGLIWDTMVGTVWIALKTIRQSDEEGPGEWSTLEAETLMKDDEICGTRNPTPHKILLDTRFELPFDIPEEEARYWTYKWEQINALGADNEYSSQEESQRKPLPTAAAQCSFEDPDSAVDDRDSDYRSETSNSFPPPYHTASQPNASVHQFPVPVRSPQQLLLQGSSRDSCNDSMQSYDLDYPERRAISPTSSSRYGSSCNVSQGSSQLSELDQYHEQDDDHRETDSIHSCHSSHSLSRDGQAGFGEQEKPLEVTGQAEKEAACEPKEMKEDATTHPPPDLVLQKDHFLGPQESFPEENASSPFTQARAHWIRAVTKVRLQLQEKKSEEPFRFQMMVTPLCLSGSRKGQPEGSMALTACQIYAERSHCHLSVIWLCHWSSLGRQESLLQWLHALLLRTKS

SEQ ID NO: 23948 - protein, 338 aa, Homo sapiens
MLSPTFVLWDVGYPLYTYGSICIIALIIWQVKKSCQKLSLVPNRSCCRCHRRVQQKSGDRTSRARRTSQEEAEKLWKLLFLMKSQGWLPQEGSVRRILCADPCCQICNVMALEIKQLLAGENNQISLTSLGPSQGSSCLEALSTSSVSFKHSQDLGSPKSKELSLASVTPTLSQLMDQKSLTQSAARSAGADSVQDSWADHFQRGQRSQVPAVSQVMGSLSSNFEKPGIPLSQQERTKNNSKFVLENQEAPEVGLDNKMKLFLHWINPEMKDRRHEESILLSKAETVTQDRTKNIEKSPTVTKDHVWGATTQKTTEDPEAQPPSTEEEGLIFCDAPSA

SEQ ID NO: 23949 - protein, 615 aa, Homo sapiens
MAAVVQQNDLVFEFASNVMEDERQLGDPAIFPAVIVEHVPGADILNSYAGLACVEEPNDMITESSLDVAEEEIIDDDDDDITLTVEASCHDGDETIETIEAAEALLNMDSPGPMLDEKRINNNIFSSPEDDMVVAPVTHVSVTLDGIPEVMETQQVQEKYADSPGASSPEQPKRKKGRKTKPPRPDSPATTPNISVKKKNKDGKGNTIYLWEFLLALLQDKATCPKYIKWTQREKGIFKLVDSKAVSRLWGKHKNKPDMNYETMGRALRYYYQRGILAKVEGQRLVYQFKEMPKDLIYINDEDPSSSIESSDPSLSSSATSNRNQTSRSRVSSSPGVKGGATTVLKPGNSKAAKPKDPVEVAQPSEVLRTVQPTQSPYPTQLFRTVHVVQPVQAVPEGEAARTSTMQDETLNSSVQSIRTIQAPTQVPVVVSPRNQQLHTVTLQTVPLTTVIASTDPSAGTGSQKFILQAIPSSQPMTVLKENVMLQSQKAGSPPSIVLGPAQVQQVLTSNVQTICNGTVSVASSPSFSATAPVVTFSPRSSQLVAHPPGTVITSVIKTQETKTLTQEVEKKESEDHLKENTEKTEQQPQPYVMVVSSSNGFTSQVAMKQNELLE

SEQ ID NO: 23950 - protein, 786 aa, Homo sapiens
MSHLSSPPKKHKGEHKGHSLPHGSERGSSSRDKDRSATVSSSVPMPAGGKGSHPSSTPQRVPNRLIHEKSPYLLQHAYNPVDWYPWGQEAFDKARKENKPIFLSVGYSTCHWCHMMEEESFQNEEIGRLLSEDFVSVKVDREERPDVDKVYMTFVQATSSGGGWPMNVWLTPNLQPFVGGTYFPPEDGLTRVGFRTVLLRIREQWKQNKNTLLENSQRVTTALLARSEISVGDRQLPPSAATVNNRCFQQLDEGYDEEYGGFAEAPKFPTPVILSFLFSYWLSHRLTQDGSRAQQMALHTLKMMANGGIRDHVGQGFHRYSTDRQWHVPHFEKMLYDQAQLAVAYSQAFQLSGDEFYSDVAKGILQYVARSLSHRSGGFYSAEDADSPPERGQRPKEGAYYVWTVKEVQQLLPEPVLGATEPLTSGQLLMKHYGLTEAGNISPSQDPKGELQGQNVLTVRYSLELTAARFGLDVEAVRTLLNSGLEKLFQARKHRPKPHLDSKMLAAWNGLMVSGYAVTGAVLGQDRLINYATNGAKFLKRHMFDVASGRLMRTCYTGPGGTVEHSNPPCWGFLEDYAFVVRGLLDLYEASQESAWLEWALRLQDTQDKLFWDSQGGGYFCSEAELGAGLPLRLKDDQDGAEPSANSVSAHNLLRLHGFTGHKDWMDKCVCLLTAFSERMRRVPVALPEMVRALSAQQQTLKQIVICGDRQAKDTKALVQCVHSVYIPNKVLILADGDPSSFLSRQLPFLSTLRRLEDQATAYVCENQACSVPITDPCELRKLLHP

SEQ ID NO: 23951 - protein, 577 aa, Homo sapiens
MDRMTEDALRLNLLKRSLDPADERDDVLAKRLKMEGHEAMERLKMLALLKRKDLANLEVPHELPTKQDGSGVKGYEEKLNGNLRPHGDNRTAGRPGKENINDEPVDMSARRSEPERGRLTPSPDIIVLSDNEASSPRSSSRMEERLKAANLEMFKGKGIEERQQLIKQLRDELRLEEARLVLLKKLRQSQLQKENVVQKTPVVQNAASIVQPSPAHVGQQGLSKLPSRPGAQGVEPQNLRTLQGHSVIRSATNTTLPHMLMSQRVIAPNPAQLQGQRGPPKPGLQSSSSVPCQRTTSSAIYMNLASHIQPGTVNRVSSPLPSPSAMTDAANSQAAAKLALRKQLEKTLLEIPPPKPPAPLLHFLPSAANSEFIYMVGLEEVVQSVIDSQGKSCASLLRVEPFVCAQCRTDFTPHWKQEKNGKILCEQCMTSNQKKALKAEHTNRLKNAFVKALQQEQEIEQRLQQQAALSPTTAPAVSSVSKQETIMRHHTLRQAPQPQSSLQRGIPTSARSMLSNFAQAPQLSVPGGLLGMPGVNIAYLNTGIGGHKGPSLADRQREYLLDMIPPRSISQSISGQK

SEQ ID NO: 23952 - protein, 597 aa, Homo sapiens
MTSRRWFHPNITGVEAENLLLTRGVDGSFLARPSKSNPGDFTLSVRRNGAVTHIKIQNTGDYYDLYGGEKFATLAELVQYYMEHHGQLKEKNGDVIELKYPLNCADPTSERWFHGHLSGKEAEKLLTEKGKHGSFLVRESQSHPGDFVLSVRTGDDKGESNDGKSKVTHVMIRCQELKYDVGGGERFDSLTDLVEHYKKNPMVETLGTVLQLKQPLNTTRINAAEIESRVRELSKLAETTDKVKQGFWEEFETLQQQECKLLYSRKEGQRQENKNKNRYKNILPFDHTRVVLHDGDPNEPVSDYINANIIMPEFETKCNNSKPKKSYIATQGCLQNTVNDFWRMVFQENSRVIVMTTKEVERGKSKCVKYWPDEYALKEYGVMRVRNVKESAAHDYTLRELKLSKVGQALLQGNTERTVWQYHFRTWPDHGVPSDPGGVLDFLEEVHHKQESIMDAGPVVVHCSAGIGRTGTFIVIDILIDIIREKGVDCDIDVPKTIQMVRSQRSGMVQTEAQYRFIYMAVQHYIETLQRRIEEEQKSKRKGHEYTNIKYSLADQTSGDQSPLPPCTPTPPCAEMREDSARVYENVGLMQQQKSFR

SEQ ID NO: 23953 - protein, 359 aa, Homo sapiens
MQRAVSVVARLGFRLQAFPPALCRPLSCAQEVLRRTPLYDFHLAHGGKMVAFAGWSLPVQYRDSHTDSHLHTRQHCSLFDVSHMLQGTLSLFTNEAGGILDDLIVTNTSEGHLYVVSNAGCWEKDLALMQDKVRELQNQGRDVGLEVLDNALLALQGPTAAQVLQAGVADDLRKLPFMTSAVMEVFGVSGCRVTRCGYTGEDGVEISVPVAGAVHLATAILKNPEVKLAGLAARDSLRLEAGLCLYGNDIDEHTTPVEGSLSWTLGKRRRAAMDFPGAKVIVPQLKGRVQRRRVGLMCEGAPMRAHSPILNMEGTKIGTVTSGCPSPSLKKNVAMGYVPCEYSRPGTMLLVELPSGPCF

SEQ ID NO: 23954 - protein, 452 aa, Homo sapiens
MYDNLYLHGIEDSEAGSADSYTSRPSDSDVSLEEDREAIRQEREQQAAIQLERAKKYNNDWWIGRLVKEGCEIGFIPSPLRLENIRIQQEQKRGRFHGGKSSGNSSSSLGEMVSGTFRATPTSTAKQKQKVTEHIPPYDVVPSMRPVVLVGPSLKGYEVTDMMQKALFDFLKHRFDGRISITRVTADISLAKRSVLNNPSKRAIIERSNTRSSLAEVQSEIERIFELARSLQLVVLDADTINHPAQLIKTSLAPIIVHVKVSSPKVHVFFYQVLQRLIKSRGKSQSKHLNVQLVAADKLAQCPPEMFDVILDENQLEDACEHLGEYLEAYWRATHTTSSTPMTPLLGRNLGSTALSPYPTAISGLQSQRMRHSNHSTENSPIERRSLMTSDENYHNERARKSRNRLSSSSQHSRDHYPLVEEDYPDSYQDTYKPHRNRGSPGGYSHDSRHRL

SEQ ID NO: 23955 - protein, 293 aa, Homo sapiens
EFSILKSPGSVVFRNGNWPIPGERIPDVAALSMGFSVKEDLSWPGLAVGNLFHRPRATVMVMVKGVNKLALPPGSVISYPLENAVPFSLDSVANSIHSLFSEETPVVLQLAPSEERVYMVGKANSVFEDLSVTLRQLRNRLFQENSVLSSLPLNSLSRNNEVDLLFLSELQVLHDISSLLSRHKHLAKDHSPDLYSLELAGLDEIGKRYGEDSEQFRDASKILVDALQKKNPASPYNLAYKYNFEYSVVFNMVLWIMIALALAVIITSYNIWNMDPGYDSIIYRMTNQKIRMD

SEQ ID NO: 23956 - protein, 630 aa, Homo sapiens
MPSLNVGKLLDKTAFHRSQTLSYRNGYAIVRRPTVGIGGDRLQFNQLSQAELDELASKAPVLTYGQPKQAPPADFIPAHVAFDKKVLKFDAYFQEDVPMSTEEQYRIRQVNIYYYLEDDSMSVIEPVVENSGILQGKLIKRQRLAKNDRGDHYHWKDLNRGINITIYGKTFRVVDCDQFTQVFLESQGIELNPPEKMALDPYTELRKQPLRKYVTPSDFDQLKQFLTFDKQVLRFYAIWDDTDSMYGECRTYIIHYYLMDDTVEIREVHERNDGRDPFPLLMNRQRVPKVLVENAKNFPQCVLEISDQEVLEWYTAKDFIVGKSLTILGRTFFIYDCDPFTRRYYKEKFGITDLPRIDVSKREPPPVKQELPPYNGFGLVEDSAQNCFALIPKAPKKDVIKMLVNDNKVLRYLAVLESPIPEDKDRRFVFSYFLATDMISIFEPPVRNSGIIGGKYLGRTKVVKPYSTVDNPVYYGPSDFFIGAVIEVFGHRFIILDTDEYVLKYMESNAAQYSPEALASIQNHVRKREAPAPEAESKQTEKDPGVQELEALIDTIQKQLKDHSCKDNIREAFQIYDKEASGYVDRDMFFKICESLNVPVDDSLVKELIRMCSHGEGKINYYNFVRAFSN

SEQ ID NO: 23957 - protein, 336 aa, Homo sapiens
MLSAAHDILSHKRTSGNQSHVDPGPTPIPHNSSSRFDCNSVSTAAVLLADILPTLVIKLLAPLGLHLLPYSPRVLVSGICAAGSFVLVAFSHSVGTSLCGVVFASISSGLGEVTFLSLTAFYPSYFLLLTSPEAQDPGGEEEAESAARQPLIRTEAPESKPGSSSSLSLRERWTVFKGLLWYIVPLVVVYFAEYFINQGLFELLFFWNTSLSHAQQYRWYQMLYQAGVFASRSSLRCCRIRFTWALALLQCLNLVFLLADVWFGFLPSIYLVFLIILYEGLLGGAAYVNTFHNIALETSDEHREFAMAATCISDTLGISLSGLLALPLHDFLCQLS

SEQ ID NO: 23958 - protein, 635 aa, Homo sapiens
MVPRLLLRAWPRGPAVGPGAPSRPLSAGSGPGQYLQRSIVPTMHYQDSLPRLPIPKLEDTIRRYLSAQKPLLNDGQFRKTEQFCKSFENGIGKELHEQLVALDKQNKHTSYISGPWFDMYLSARDSVVLNFNPFMAFNPDPKSEYNDQLTRATNMTVSAIRFLKTLRAGLLEPEVFHLNPAKSDTITFKRLIRFVPSSLSWYGAYLVNAYPLDMSQYFRLFNSTRLPKPSRDELFTDDKARHLLVLRKGNFYIFDVLDQDGNIVSPSEIQAHLKYILSDSSPAPEFPLAYLTSENRDIWAELRQKLMSSGNEESLRKVDSAVFCLCLDDFPIKDLVHLSHNMLHGDGTNRWFDKSFNLIIAKDGSTAVHFEHSWGDGVAVLRFFNEVFKDSTQTPAVTPQSQPATTDSTVTVQKLNFELTDALKTGITAAKEKFDATMKTLTIDCVQFQRGGKEFLKKQKLSPDAVAQLAFQMAFLRQYGQTVATYESCSTAAFKHGRTETIRPASVYTKRCSEAFVREPSRHSAGQGFDRHLFALRHLAAAKGIILPELYLDPAYGQINHNVLSTSTLSSPAVNLGGFAPVVSDGFGVGYAVHDNWIGCNVSSYPGRNAREFLQCVEKALEDMFDALEGKSIKS

SEQ ID NO: 23959 - protein, 1206 aa, Homo sapiens
MSKSLKKKSHWTSKVHESVIGRNPEGQLGFELKGGAENGQFPYLGEVKPGKVAYESGSKLVSEELLLEVNETPVAGLTIRDVLAVIKHCKDPLRLKCVKQGGIVDKDLRHYLNLRFQKGSVDHELQQIIRDNLYLRTVPCTTRPHKEGEVPGVDYIFITVEDFMELEKSGALLESGTYEDNYYGTPKPPAEPAPLLLNVTDQILPGATPSAEGKRKRNKSVSNMEKASIEPPEEEEEERPVVNGNGVVVTPESSEHEDKSAGASGEMPSQPYPAPVYSQPEELKEQMDDTKPTKPEDNEEPDPLPDNWEMAYTEKGEVYFIDHNTKTTSWLDPRLAKKAKPPEECKENELPYGWEKIDDPIYGTYYVDHINRRTQFENPVLEAKRKLQQHNMPHTELGTKPLQAPGFREKPLFTRDASQLKGTFLSTTLKKSNMGFGFTIIGGDEPDEFLQVKSVIPDGPAAQDGKMETGDVIVYINEVCVLGHTHADVVKLFQSVPIGQSVNLVLCRGYPLPFDPEDPANSMVPPLAIMERPPPVMVNGRHNYETYLEYISRTSQSVPDITDRPPHSLHSMPTDGQLDGTYPPPVHDDNVSMASSGATQAELMTLTIVKGAQGFGFTIADSPTGQRVKQILDIQGCPGLCEGDLIVEINQQNVQNLSHTEVVDILKDCPIGSETSLIIHRGGFFSPWKTPKPIMDRWENQGSPQTSLSAPAIPQNLPFPPALHRSSFPDSTEAFDPRKPDPYELYEKSRAIYESRRPDYKELDVHLRRMESGFGFRILGGDEPGQPILIGAVIAMGSADRDGRLHPGDELVYVDGIPVAGKTHRYVIDLMHHAARNGQVNLTVRRKVLCGGEPCPENGRSPGSVSTHHSSPRSDYATYTNSNHAAPSSNASPPEGFASHSLQTSDVVIHRKENEGFGFVIISSLNRPESGSTIKLNSPTSAPSSEKQSPMAQQSPLAQQSPLAQPSPATPNSPIAQPAPPQPLQLQGHENSYRSEVKARQDVKPDIRQPPFTDYRQPPLDYRQPPGGDYQQPPPLDYRQPPLLDYRQHSPDTRQYPLSDYRQPQDFDYFTVDMEKGAKGFGFSIRGGREYKMDLYVLRLAEDGPAIRNGRMRVGDQIIEINGESTRDMTHARAIELIKSGGRRVRLLLKRGTGQVPEYDEPAPWSSPAAAAPGLPEIHEAPRPGSIDVKSHVSGVLGRHRINAQT

SEQ ID NO: 23960 - protein, 365 aa, Homo sapiens
MELDFGHFDERDKTSRNMRGSRMNGLPSPTHSAHCSFYRTRTLQALSNEKKAKKVRFYRNGDRYFKGIVYAVSSDRFRSFDALLADLTRSLSDNINLPQGVRYIYTIDGSRKIGSMDELEEGESYVCSSDNFFKKVEYTKNVNPNWSVNVKTSANMKAPQSLASSNSAQARENKDFVRPKLVTIIRSGVKPRKAVRVLLNKKTAHSFEQVLTDITEAIKLETGVVKKLYTLDGKQVTCLHDFFGDDDVFIACGPEKFRYAQDDFSLDENECRVMKGNPSATAGPKASPTPQKTSAKSPGPMRRSKSPADSGNDQDANGTSSSQLSTPKSKQSPISTPTSPGSLRKHKDLYLPLSLDDSDSLGDSM

SEQ ID NO: 23961 - protein, 1486 aa, Homo sapiens
MPPQPPGSQSESSSHPALSQSPMPQERGFMAGTQRNPQMAQYGPQQTGPSMSPHPSPGGQMHAGISSFQQSNSSGTYGPQMSQYGPQGNYSRPPAYSGVPSASYSGPGPGMGISANNQMHGQGPSQPCGAVPLGRMPSAGMQNRPFPGNMSSMTPSSPGMSQQGGPGMGPPMPTVNRKAQEAAAAVMQAAANSAQSRQGSFPGMNQSGLMASSSPYSQPMNNSSSLMNTQAPPYSMAPAMVNSSAASVGLADMMSPGESKLPLPLKADGKEEGTPQPESKSKKSSSSTTTGEKITKVYELGNEPERKLWVDRYLTFMEERGSPVSSLPAVGKKPLDLFRLYVCVKEIGGLAQVNKNKKWRELATNLNVGTSSSAASSLKKQYIQYLFAFECKIERGEEPPPEVFSTGDTKKQPKLQPPSPANSGSLQGPQTPQSTGSNSMAEVPGDLKPPTPASTPHGQMTPMQGGRSSTISVHDPFSDVSDSSFPKRNSMTPNAPYQQGMSMPDVMGRMPYEPNKDPFGGMRKVPGSSEPFMTQGQMPNSSMQDMYNQSPSGAMSNLGMGQRQQFPYGASYDRRHEPYGQQYPGQGPPSGQPPYGGHQPGLYPQQPNYKRHMDGMYGPPAKRHEGDMYNMQYSSQQQEMYNQYGGSYSGPDRRPIQGQYPYPYSRERMQGPGQIQTHGIPPQMMGGPLQSSSSEGPQQNMWAARNDMPYPYQNRQGPGGPTQAPPYPGMNRTDDMMVPDQRINHESQWPSHVSQRQPYMSSSASMQPITRPPQPSYQTPPSLPNHISRAPSPASFQRSLENRMSPSKSPFLPSMKMQKVMPTVPTSQVTGPPPQPPPIRREITFPPGSVEASQPVLKQRRKITSKDIVTPEAWRVMMSLKSGLLAESTWALDTINILLYDDSTVATFNLSQLSGFLELLVEYFRKCLIDIFGILMEYEVGDPSQKALDHNAARKDDSQSLADDSGKEEEDAECIDDDEEDEEDEEEDSEKTESDEKSSIALTAPDAAADPKEKPKQASKFDKLPIKIVKKNNLFVVDRSDKLGRVQEFNSGLLHWQLGGGDTTEHIQTHFESKMEIPPRRRPPPPLSSAGRKKEQEGKGDSEEQQEKSIIATIDDVLSARPGALPEDANPGPQTESSKFPFGIQQAKSHRNIKLLEDEPRSRDETPLCTIAHWQDSLAKRCICVSNIVRSLSFVPGNDAEMSKHPGLVLILGKLILLHHEHPERKRAPQTYEKEEDEDKGVACSKDEWWWDCLEVLRDNTLVTLANISGQLDLSAYTESICLPILDGLLHWMVCPSAEAQDPFPTVGPNSVLSPQRLVLETLCKLSIQDNNVDLILATPPFSRQEKFYATLVRYVGDRKNPVCREMSMALLSNLAQGDALAARAIAVQKGSIGNLISFLEDGVTMAQYQQSQHNLMHMQPPPLEPPSVDMMCRAAKALLAMARVDENRSEFLLHEGRLLDISISAVLNSLVASVICDVLFQIGQL

SEQ ID NO: 23962 - protein, 533 aa, Homo sapiens
MKRTPTAEEREREAKKLRLLEELEDTWLPYLTPKDDEFYQQWQLKYPKLILREASSVSEELHKEVQEAFLTLHKHGCLFRDLVRIQGKDLLTPVSRILIGNPGCTYKYLNTRLFTVPWPVKGSNIKHTEAEIAAACETFLKLNDYLQIETIQALEELAAKEKANEDAVPLCMSADFPRVGMGSSYNGQDEVDIKSRAAYNVTLLNFMDPQKMPYLKEEPYFGMGKMAVSWHHDENLVDRSAVAVYSYSCEGPEEESEDDSHLEGRDPDIWHVGFKISWDIETPGLAIPLHQGDCYFMLDDLNATHQHCVLAGSQPRFSSTHRVAECSTGTLDYILQRCQLALQNVCDDVDNDDVSLKSFEPAVLKQGEEIHNEVEFEWLRQFWFQGNRYRKCTDWWCQPMAQLEALWKKMEGVTNAVLHEVKREGLPVEQRNEILTAILASLTARQNLRREWHARCQSRIARTLPADQKPECRPYWEKDDASMPLPFDLTDIVSELRDRVSPCHVGWSAVVRSRLTAASTSWAQAILLPQPPK

SEQ ID NO: 23963 - protein, 440 aa, Homo sapiens
MDLSSEMNRHGKNPVSHKLEDQKKIYTDWANHYLAKSGHKRLIKDLQQDIADGVLLAEIIQIIANEKVEDINGCPRSQSQMIENVDVCLSFLAARGVNVQGLSAEEIRNGNLKAILGLFFSLSRYKQQQHHQQQYYQSLVELQQRVTHASPPSEASQAKTQQDMQSSLAARYATQSNHSGIATSQKKPTRLPGPSRVPAAGSSSKVQGASNLNRRSQSFNSIDKNKPPNYANGNEKDSSKGPQSSSGVNGNVQPPSTAGQPPASAIPSPSASKPWRSKSMNVKHSATSTMLTVKQSSTATSPTPSSDRLKPPVSEGVKTAPSGQKSMLEKFKLVNARTALRPPQPPSSGPSDGGKDDDAFSESGEMEGFNSGLNSGGSTNSSPKVSPKLAPPKAGSKNLSNKKSLLQPKEKEEKNRDKNKVCTEKPVKEEKDQVTEMAPK

SEQ ID NO: 23964 - protein, 457 aa, Homo sapiens
MKRTPTAEEREREAKKLRLLEELEDTWLPYLTPKDDEFYQQWQLKYPKLILREASSVSEELHKEVQEAFLTLHKHGCLFRDLVRIQGKDLLTPVSRILIGNPGCTYKYLNTRLFTVPWPVKGSNIKHTEAEIAAACETFLKLNDYLQIETIQALEELAAKEKANEDAVPLCMSADFPRVGMGSSYNGQDEVDIKSRAAYNVTLLNFMDPQKMPYLKEEPYFGMGKMAVSWHHDENLVDRSAVAVYSYSCEGPEEESEDDSHLEGRDPDIWHVGFKISWDIETPGLAIPLHQGDCYFMLDDLNATHQHCVLAGSQPRFSSTHRVAECSTGTLDYILQRCQLALQNVCDDVDNDDVSLKSFEPAVLKQGEEIHNEVEFEWLRQFWFQGNRYRKCTDWWCQPMAQLEALWKKMEGVTNAVLHEVKREGLPVEQRNEILTAILASLTARQNLRREWHARVE

SEQ ID NO: 23965 - protein, 287 aa, Homo sapiens
MAASSSEISEMKGVEESPKVPGEGPGHSEAETGPPQVLAGVPDQPEAPQPGPNTTAAPVDSGPKAGLAPETTETPAGASETAQATDLSLSPGGESKANCSPEDPCQETVSKPEVSKEATADQGSRLESAAPPEPAPEPAPQPDPRPDSQPTPKPALQPELPTQEDPTPEILSESVGEKQENGAVVPLQAGDGEEGPAPEPHSPPSKKSPPANGAPPRVLQQLVEEDRMRRAHSGHPGSPRGIPEQPAAGGRGRGPASGPGSQALKHRGAGGGSPHHHRLLRHQLRRV

SEQ ID NO: 23966 - protein, 1100 aa, Homo sapiens
GRCAPEMHLIQTGKGEAIRIRSILRSLVPTEDLVGIISIPLKLPSLNKDGSVSEPDMAANFCPDHKAPMVLFLDRVYGIKDQTFLLHLLEVGFLPDLRASASLDTVSLSTTEAALALNRYICSAVLPLLTRCAPLFAGTEHCTSLIDSTLQTIYRLSKGRSLTKAQRDTIEECLLAICNHLRPSMLQQLLRRLVFDVPQLNEYCKMPLKLLTNHYEQCWKYYCLPSGWGSYGLAVEEELHLTEKLFWGIFDSLSHKKYDPDLFRMALPCLSAIAGALPPDYLDTRITATLEKQISVDADGNFDPKPINTMNFSLPEKLEYIVTKYAEHSHDKWACDKSQSGWKYGISLDENVKTHPLIRPFKTLTEKEKEIYRWPARESLKTMLAVGWTVERTKEGEALVQQRENEKLRSVSQANQGNSYSPAPLDLSNVVLSRELQGMVEVVAENYHNIWAKKKKLELESKGGGSHPLLVPYDTLTAKEKFKDREKAQDLFKFLQVNGIIVSRGMKDMELDASSMEKRFAYKFLKKILKYVDSAQEFIAHLEAIVSSGKTEKSPRDQEIKFFAKVLLPLVDQYFTSHCLYFLSSPLKPLSSSGYASHKEKEMVAGLFCKLAALVRHRISLFGSDSTTMVSCLHILAQTLDTRTVMKSGSELVKAGLRAFFENAAEDLEKTSENLKLGKFTHSRTQIKGVSQNINYTTVALLPILTSIFEHVTQHQFGMDLLLGDVQISCYHILCSLYSLGTGKNIYVERQRPALGECLASLAAAIPVAFLEPTLNRYNPLSVFNTKTPRERSILGMPDTVEDMCPDIPQLEGLMKEINDLAESGARYTEMPHVIEVILPMLCNYLSYWWERGPENLPPSTGPCCTKVTSEHLSLILGNILKIINNNLGIDEASWMKRIAVYAQPIISKARPDLLRSHFIPTLEKLKKKAVKTVQEEEQLKADGKGDTQEAELLILDEFAVLCRDLYAFYPMLIRYVDNNRSNWLKSPDADSDQLFRMVAEVFILWCKSHNFKREEQNFVIQNEINNLAFLTGDSKSKMSKAMQVKVQVKCMTCLFCPSIRGAGLWPPLHCDHHGGGREWIFPPGGPPGLLQGRQLPVKE

SEQ ID NO: 23967 - protein, 692 aa, Homo sapiens
MMESVGVYGFCGCKAKNKMKCDSRWEIAASETAPTSAYSSPARSLGDTGITPLSPSHIVNDTDSNVSEQQSFLVVVAVDFGTTSSGYAYSFTKEPECIHVMRRWEGGDPGVSNQKTPTTILLTPERKFHSFGYAARDFYHDLDPNEAKQWLYLEKFKMKLHTTGDLTMDTDLTAANGKKVKALEIFAYALQYFKEQALKELSDQAGSEFENSDVRWVITVPAIWKQPAKQFMRQAAYQAGLASPENSEQLIIALEPEAASIYCRKLRLHQMIELSSKAAVNGYSGSDTVGAGFTQAKEHIRRNRQSRTFLVENVIGEIWSELEEGDKYVVVDSGGGTVDLTVHQIRLPEGHLKELYKATGGPYGSLGVDYEFEKLLYKIFGEDFIEQFKIKRPAAWVDLMIAFESRKRAAAPDRTNPLNITLPFSFIDYYKKFRGHSVEHALRKSNVDFVKWSSQGMLRMSPDAMNALFKPTIDSIIEHLRDLFQKPEVSTVKFLFLVGGFAEAPLLQQAVQAAFGDQCRIIIPQDVGLTILKGAVLFGLDPAVIKVRRSPLTYGVGVLNRYVEGKHPPEKLLVKDGTRWCTDVFDKFISADQSVALGELVKRSYTPAKPSQLVIVINIYSSEHDNVSFITDPGVKKCGTLRLDLTGTSGTAVPARREIQTLMQFGDTEIKATAIDIATSKSVKVGIDFLNY

SEQ ID NO: 23968 - protein, 4471 aa, Homo sapiens
MVPEEVEVEIDEIPVLSEEGEEEEETYSQKVESVDKVRAKRVSLRTESLGQPLNREDEEMDKEISEKLPSKRTAKHIMEKMHLHMLCTPLPEEFLDQNVVFFLRNTKEAISEATDMKEAMEIMPETLEYGIINANVLHFLKNIICQVFLPALSFNQHRTSTTVGVTSGEVSNSSEHESDLPPMPGEAVEYHSIQLIRDEFLMNVQKFASNIQRTMQQLEGEIKLEMPIISVEGEVSDLAADPETVDILEQCVINWLNQISTAVEAQLKKTPQGKGPLAEIEFWRERNATLSALHEQTKLPIVRKVLDVIKESDSMLVANLQPVFTELFKFHTEASDNVRFLSTVERYFKNITHGSGFHVVLDTIPAMMSALRMVWIISRHYNKDERMIPLMERIAWEIAERVCRVVNLRTLFKENRASAQSKTLEARNTLRLWKKAYFDTRAKIEASGREDRWEFDRKRLFERTDYMATICQDLSDVLQILEEFYNIFGPELKAVTGDPKRIDDVLCRVDGLVTPMENLTFDPFSIKSSQFWKYVMDEFKIEVLIDIINKIFVQNLENPPLYKNHPPVAGAIYWERSLFFRIKHTILRFQEVQEILDSDRGQEVKQKYLEVGRTMKEYEDRKYEQWMEVTEQVLPALMKKSLLTKSSIATEEPSTLERGAVFAINFSPALREIINETKYLEQLGFTVPELARNVALQEDKFLRYTAGIQRMLDHYHMLIGTLNDAESVLLKDHSQELLRVFRSGYKRLNWNSLGIGDYITGCKQAIGKFESLVHQIHKNADDISSRLTLIEAINLFKYPAAKSEEELPGVKEFFEHIERERASDVDHMVRWYLAIGPLLTKVEGLVVHTNTGKAPKLASYYKYWEKKIYEVLTKLILKNLQSFNSLILGNVPLFHTETILTAPEIILHPNTNEIDKMCFHCVRNCVEITKHFVRWMNGSCIECPPQKGEEEEVVIINFYNDISLNPQIIEQAVMIPQNVHRILINLMKYLQKWKRYRPLWKLDKAIVMEKFAAKKPPCVAYDEKLQFYSKIAYEVMRHPLIKDEHCIRLQLRHLANTVQENAKSWVISLGKLLNESAKEELYNLHEEMEHLAKNLRKIPNTLEDLKFVLATIAEIRSKSLVMELRYRDVQERYRTMAMYNLFPPDAEKELVDKIESIWSNLFNDSVNVEHALGDIKRTFTELTRGEIMNYRVQIEEFAKRFYSEGPGSVGDDLDKGVELLGVYERELARHEKSRQELANAEKLFDLPITMYPELLKVQKEMSGLRMIYELYEGLKVAKEEWSQTLWINLNVQILQEGIEGFLRALRKLPRPVRGLSVTYYLEAKMKAFKDSIPLLLDLKNEALRDRHWKELMEKTSVFFEMTETFTLENMFAMELHKHTDVLNEIVTAAIKEVAIEKAVKEILDTWENMKFTVVKYCKGTQERGYILGSVDEIIQSLDDNTFNLQSISGSRFVGPFLQTVHKWEKTLSLIGEVIEIWMLVQRKWMYLESIFIGGDIRSQLPEEAKKFDNIDKVFKRIMGETLKDPVIKRCCEAPNRLSDLQNVSEGLEKCQKSLNDYLDSKRNAFPRFFFISDDELLSILGSSDPLCVQEHMIKMYDNIASLRFNDGDSGEKLVSAMISAEGEVMEFRKILRAEGRVEDWMTAVLNEMRRTNRLITKEAIFRYCEDRSRVDWMLLYQGMVVLAASQVWWTWEVEDVFHKAQKGEKQAMKNYGRKMHRQIDELVTRITMPLSKNDRKKYNTVLIIDVHARDIVDSFIRGSILEAREFDWESQLRFYWDREPDELNIRQCTGTFGYGYEYMGLNGRLVITPLTDRIYLTLTQALSMYLGGAPAGPAGTGKTETTKDLAKALGLLCVVTNCGEGMDYRAVGKIFSGLAQCGAWGCFDEFNRIDASVLSVISSQIQTIRNALIHQLTTFQFEGQEISLDSRMGIFITMNPGYAGRTELPESVKALFRPVVVIVPDLQQICEIMLFSEGFLEAKTLAKKMTVLYKLAREQLSKQYHYDFGLRALKSVLVMAGELKRGSSDLREDVVLMRALRDMNLPKFVFEDVPLFLGLISDLFPGLDCPRVRYPDFNDAVEQVLEENGYAVLPIQVDKVVQMFETMLTRHTTMVVGPTRGGKSVVINTLCQAQTKLGLTTKLYILNPKAVSVIELYGILDPTTRDWTDGVLSNIFREINKPTDKKERKYILFDGDVDALWVENMNSVMDDNRLLTLANGERIRLQAHCALLFEVGDLQYASPATVSRCGMVYVDPKNLKYRPYWKKWVNQIPNKVEQYNLNSLFEKYVPYLMDVIVEGIVDGRQAEKLKTIVPQTDLNMVTQLAKMLDALLEGEIEDLDLLECYFLEALYCSLGASLLEDGRMKFDEYIKRLASLSTVDTEGVWANPGELPGQLPTLYDFHFDNKRNQWVPWSKLVPEYIHAPERKFINILVHTVDTTRTTWILEQMVKIKQPVIFVGESGTSKTATTQNFLKNLSEETNIVLMVNFSSRTTSMDIQRNLEANVEKRTKDTYGPPMGKRLLVFMDDMNMPRVDEYGTQQPIALLKLLLEKGYLYDRGKELNCKSIRDLGFIAAMGKAGGGRNEVDPRFISLFSVFNVPFPSEESLHLIYSSILKGHTSTFHESIVAVSGKLTFCTLALYKNIVQDLPPTPSKFHYIFNLRDLSRVFNGLVLTNPERFQTVAQMVRVWRNECLRVFHDRLISETDKQLVQQHIGSLVVEHFKDDVEVVMRDPILFGDFQMALHEGEPRIYEDIQDYEAAKALFQEILEEYNESNTKMNLVLFDDALEHLTRVHRIIRMDRGHALLVGVGGSGKQSLSRLAAFTASCEVFEILLSRGYSENSFREDLKSLYLKLGIENKAMIFLFTDAHVAEEGFLELINNMLTSGIVPALFSEEEKESILSQIGQEALKQGMGPAKESVWQYFVNKSANNLHIVLGMSPVGDTLRTWCRNFPGMVNNTGIDWFMPWPPQALHAVAKSFLGYNPMIPAENIENVVKHVVLVHQSVDHYSQQFLQKLRRSNYVTPKNYLDFINTYSKLLDEKTQCNIAQCKRLDGGLDKLKEATIQLDELNQKLAEQKIVLAEKSAACEALLEEIAVNTAVAEEKKKLAEEKAMEIEEQNKVIAMEKAEAETTLAEVMPILEAAKLELQKLDKSDVTEIRSFAKPPKQVQTVCECILIMKGYKELNWKTAKGVMSDPNFLRSLMEIDFDSITQSQVKNIKGLLKTLNTTTEEMEAVSKAGLGMLKFVEAVMGYCDVFREIKPKREKVARLERNFYLTKRELERIQNELAAIQKELETLGAKYEAAILEKQKLQEEAEIMERRLIAADKLISGLGSENIRWLNDLDELMHRRVKLLGDCLLCAAFLSYEGAFTWEFRDEMVNRIWQNDILEREIPLSQPFRLESLLTDDVEISRWGSQGLPPDELSVQNGILTTRASRFPLCIDPQQQALNWIKRKEEKNNLRVASFNDPDFLKQLEMSIKYGTPFLFRDVDEYIDPVIDNVLEKNIKVSQGRQFIILGDKEVDYDSNFRLYLNTKLANPRYSPSVFGKAMVINYTVTLKGLEDQLLSVLVAYERRELEEQREHLIQETSENKNLLKDLEDSLLRELATSTGNMLDNVDLVHTLEETKSKATEVSEKLKLAEKTALDIDRLRDGYRPAARRGAILFFVLSEMALVNSMYQYSLIAFLEVFRLSLKKSLPDSILMKRLRNIMDTLTFSIYNHGCTGLFERHKLLFSFNMTIKIEQAEGRVPQEELDFFLKGNISLEKSKRKKPCAWLSDQGWEDIILLSEMFSDNFGQLPDDVENNQTVWQEWYDLDSLEQFPVPLGYDNNITPFQKLLILRCFRVDRVYRAVTDYVTVTMGEKYVQPPMISFEAIFEQSTPHSPIVFILSPGSDPATDLMKLAERSGFGGNRLKFLAMGQGQEKVALQLLETAVARGQWLMLQNCHLLVKWLKDLEKSLERITKPHPDFRLWLTTDPTKGFPIGILQKSLKVVTEPPNGLKLNMRATYFKISHEMLDQCPHPAFKPLVYVLAFFHAVVQERRKFGKIGWNVYYDFNESDFQVCMEILNTYLTKAFQQRDPRIPWGSLKYLIGEVMYGGRAIDSFDRRILTIYMDEYLGDFIFDTFQPFHFFRNKEVDYKIPVGDEKEKFVEAIEALPLANTPEVFGLHPNAEIGYYTQAARDMWAHLLELQPQTGESSSGISRDDYIGQVAKEIENKMPKVFDLDQVRKRLGTGLSPTSVVLLQELERFNKLVVRMTKSLAELQRALAGEVGMSNELDDVARSLFIGHIPNIWRRLAPDTLKSLGNWMVYFLRRFSQYMLWVTESEPSVMWLSGLHIPESYLTALVQATCRKNGWPLDRSTLFTQVTKFQDADEVNERAGQGCFVSGLYLEGADWDIEKGCLIKSKPKVLVVDLPILKIIPIEAHRLKLQNTFRTPVYTTSMRRNAMGVGLVFEADLFTTRHISHWVLQGVCLTLNSD

SEQ ID NO: 23969 - protein, 910 aa, Homo sapiens
MSQEDLKEKNLINSSLQEWAQAHAVSHPNEIETVELRKKKLTMRPLVLQKEESSRELCNVNLGFLLPRSCLELNISKSVTREDAPHFLKEQQRKSEEFSTSHMKYSGRSIKFLLPPLSLLPTRSGVLTIPQNHKFPKEKERNIPSLTSFVPKLSVSVRQSDELSPSNEPPGALVKSLMDPTLRSSDGFIWSRNMCSFPKTNHHRQCLEKEENWKSKEIEECNKIEITHFEKGQSLVSFENLKEGNIPAVREEDIDCHGSKTRKPEEENSQYLSSRKNESSVAKNYEQDPEIVCTIPSKFQETQHSEITPSQDEEMRNNKAASKRVSLHKNEAMEPNNILEECTVLKSLSSVVFDDPIDKLPEGCSSMETNIKISIAERAKPEMSRMVPLIHITFPVDGSPKEPVIAKPSLQTRKGTIHNNHSVNIPVHQENDKHKMNSHRSKLDSKTKTSKKTPQNFVISTEGPIKPTMHKTSIKTQIFPALGLVDPRPWQLPRFQKKMPQIAKKQSTHRTQKPKKQSFPCICKNPGTQKSCVPLSVQPTEPRLNYLDLKYSDMFKEINSTANGPGIYEMFGTPVYCHVRETERDENTYYREICSAPSGRRITNKCRSSHSERKSNIRTRLSQKKTHMKCPKTSFGIKQEHKVLISKEKSSKAVHSNLHDIENGDGISEPDWQIKSSGNEFLSSKDEIHPMNLAQTPEQSMKQNEFPPVSDLSIVEEVSMEESTGDRDISNNQILTTSLRDLQELEELHHQIPFIPSEDSWAVPSEKNSNKYVQQEKQNTASLSKVNASRILTNDLEFDSVSDHSKTLTNFSFQAKQESASSQTYQYWVHYLDHDSLANKSITYQMFGKTLSGTNSISQEIMDSVNNEELTDELLGCLAAELLALDEKDNNSCQKMANETDPENLNLVLR

SEQ ID NO: 23970 - protein, 582 aa, Homo sapiens
MVSNPVHGLPFLPGTSFKDSTKTAFHRSQTLSYRNGYAIVRRPTVGIGGDRLQFNQLSQAELDELASKAPVLTYGQPKQAPPADFIPAHVAFDKKVLKFDAYFQEDVPMSTEEQYRIRQVNIYYYLEDDSMSVIEPVVENSGILQGKLIKRQRLAKNDRGDHYHWKDLNRGINITIYGKTFRVVDCDQFTQVFLESQGIELNPPEKMALDPYTELRKQPLRKYVTPSDFDQLKQFLTFDKQVLRFYAIWDDTDSMYGECRTYIIHYYLMDDTVEIREVHERNDGRDPFPLLMNRQRVPKVLVENAKNFPQCVLEISDQEVLEWYTAKDFIVGKSLTILGRTFFIYDCDPFTRRYYKEKFGITDLPRIDVSKREPPPVKQELPPYNGFGLVEDSAQNCFALIPKAPKKDVIKMLVNDNKVLRYLAVLESPIPEDKDRRFVFSYFLATDMISIFEPPVRNSGIIGGKYLGRTKVVKPYSTVDNPVYYGPSDFFIGAVIEVFGHRFIILDTDEYVLKYMESNAAQYSPEALASIQNHVRKREAPAPEAERFAFTSFHWLHIQILLKGSCVDIPTVSFLFYNSIYI

SEQ ID NO: 23971 - protein, 571 aa, Homo sapiens
MQCKVILLDGSEYTCDVEKRSRGQVLFDKVCEHLNLLEKDYFGLTYRDAENQKNWLDPAKEIKKQVRSGAWHFSFNVKFYPPDPAQLSEDITRYYLCLQLRDDIVSGRLPCSFVTLALLGSYTVQSELGDYDPDECGSDYISEFRFAPNHTKELEDKVIELHKSHRGMTPAEAEMHFLENAKKLSMYGVDLHHAKDSEGVEIMLGVCASGLLIYRDRLRINRFAWPKVLKISYKRNNFYIKIRPGEFEQFESTIGFKLPNHRAAKRLWKVCVEHHTFFRLLLPEAPPKKFLTLGSKFRYSGRTQAQTRRASALIDRPAPYFERSSSKRYTMSRSLDGASVNENHEIYMKDSMSAAEVGTGQYATTKGISQTNLITTVTPEKKAEEERDEEEDKRRKGEEVTPISAIRHEGKTDSERTDTAADGETTATESDQEEDAELKAQELEKTQDDLMKHQTNISELKRTFLETSTDTAVTNEWEKRLSTSPVRLAARQEDAPMIEPLVPEETKEETEISEKVIFLQQGSAPFLESQVKTKHKGFSRRNWSSDFSVIKMLLVFIFPLTFILFKTKVGT

SEQ ID NO: 23972 - protein, 377 aa, Homo sapiens
MAAGGDHGSPDSYRSPLASRYASPEMCFVFSDRYKFRTWRQLWLWLAEAEQTLGLPITDEQIQEMKSNLENIDFKMAAEEEKRLRHDVMAHVHTFGHCCPKAAGIIHLGATSCYVGDNTDLIILRNALDLLLPKSLILSRGVIKAYCNLRLPGSDSSPVSVSQLARVISRLADFAKERASLPTLGFTHFQPAQLTTVGKRCCLWIQDLCMDLQNLKRVRDDLRFRGVKGTTGTQASFLQLFEGDDHKVEQLDKMVTEKAGFKRAFIITGQTYTRKVDIEVLSVLASLGASVHKICTDIRLLANLKEMEEPFEKQQIGSSAMPYKRNPMRSERCCSLARHLMTLVMDPLQTASVQWFERTLDDSANRRICLAEAFLTA

SEQ ID NO: 23973 - protein, 144 aa, Homo sapiens
RAMALFFVLCWIQDHLSEEKNFKESCLFDRDLREQLTTIDKETLQGAAKPDAHFRTMPCGQLLHFLQRNTIIAAVSGVAILMAIVLLLLGLASYIRKKQPSSPLANTTYNIFIMDGKTWWHNSEEKNFTKLAKKQKQLKSSSCV

SEQ ID NO: 23974 - protein, 552 aa, Homo sapiens
MVSNPVHGLPFLPGTSFKDSTKTAFHRSQTLSYRNGYAIVRRPTVGIGGDRLQFNQLSQAELDELASKAPVLTYGQPKQAPPADFIPAHVAFDKKVLKFDAYFQEDVPMSTEEQYRIRQVNIYYYLEDDSMSVIEPVVENSGILQGKLIKRQRLAKNDRGDHYHWKDLNRGINITIYGKTFRVVDCDQFTQVFLESQGIELNPPEKMALDPYTELRKQPLRKYVTPSDFDQLKQFLTFDKQVLRFYAIWDDTDSMYGECRTYIIHYYLMDDTVEIREVHERNDGRDPFPLLMNRQRVPKVLVENAKNFPQCVLEISDQEVLEWYTAKDFIVGKSLTILGRTFFIYDCDPFTRRYYKEKFGITDLPRIDVSKREPPPVKQELPPYNGFGLVEDSAQNCFALIPKAPKKDVIKMLVNDNKVLRYLAVLESPIPEDKDRRFVFSYFLATDMISIFEPPVRNSGIIGGKYLGRTKVVKPYSTVDNPVYYGPSDFFIGAVIEVFGHRFIILDTDEYVLKYMESNAAQYSPEALASIQNHVRKREAPAPEAERCVFDC

SEQ ID NO: 23975 - protein, 518 aa, Homo sapiens
MARRCGPVALLLGFGLLRLCSGVWGTDTEERLVEHLLDPSRYNKLIRPATNGSELVTVQLMVSLAQLISVHEREQIMTTNVWLTQEWEDYRLTWKPEEFDNMKKVRLPSKHIWLPDVVLYNNADGMYEVSFYSNAVVSYDGSIFWLPPAIYKSACKIEVKHFPFDQQNCTMKFRSWTYDRTEIDLVLKSEVASLDDFTPSGEWDIVALPGRRNENPDDSTYVDITYDFIIRRKPLFYTINLIIPCVLITSLAILVFYLPSDCGEKMTLCISVLLALTVFLLLISKIVPPTSLDVPLVGKYLMFTMVLVTFSIVTSVCVLNVHHRSPTTHTMAPWVKVVFLEKLPALLFMQQPRHHCARQRLRLRRRQREREGAGALFFREAPGADSCTCFVNRASVQGLAGAFGAEPAPVAGPGRSGEPCGCGLREAVDGVRFIADHMRSEDDDQSVSEDWKYVAMVIDRLFLWIFVFVCVFGTIGMFLQPLFQNYTTTTFLHSDHSAPSSKLKVWGARLSIRGASEF

SEQ ID NO: 23976 - protein, 734 aa, Homo sapiens
MVPLAYYGQHFVPLDYFYQLSSANTLTHQHTGEKLNQFNNQPMAKVQSHSNHFAVPPLGSNKKVQRCSVLPSPKSQDKISQSFCDRFLNSPLFHAKHQNTPSIGLHWRSSLWPAQRALNSHLLHSKAQTTSSSDLNMTSSLELNQAALSLQLPFCKPQTTSSSLDVCWRSLSLKSHQRVSSSSLFRLQNQEIPSINIIWTSSSLGPKRKALSSTLLQSKPQKTSSLDYLWTSSLQRNQRSLSSPSLNTKLQTSDLFWTSPSFKPNQIALTSPLLDSRLQKTPILNSNPTIGGLPVSHSKARQSASSYFVHPSENLPLFQLNSQSMFMLDCNFQTTNSPVCHSKFQNTTSPNGKHRVTHLPSPHPKTNISGQLLSSSKHCTRNTAASTLGFRLQSKSSFQFSPKTESNKEIPWTLKYSQPCIVKGGTVPDDVVNKIVNSISNTRIQRDLCRQILFRRMRGRPNPHPGPRLSSNYVVCLACASCLKSPCNHLRGKKNPHCATLSVIPTPEANSEGKIEVKLVLILSLPETFSSCLPFPMKENQPNEVPEDNLEGVEKIQQFFPTSERDIQGLNMKQIWWAVAPENKVIGQQPQAIDWLFYVKKNNSQPQSLLPSTSSSTSSSSTTSSSSSVASASSDSSSSSSSSSSFSISSSSSPSKEFMTLTLSRPVFRKVLSYHRLPAGVSWLEFIYSKDYQLHPRKPNRSQSSSLKTKPVRNNNTVKWRKGANTLFKFFRTK

SEQ ID NO: 23977 - protein, 741 aa, Homo sapiens
MCLFRVISFLFSHNTKTTSWLDPRLAKKAKPPEECKENELPYGWEKIDDPIYGTYYVDHINRRTQFENPVLEAKRKLQQHNMPHTELGTKPLQAPGFREKPLFTRDASQLKGTFLSTTLKKSNMGFGFTIIGGDEPDEFLQVKSVIPDGPAAQDGKMETGDVIVYINEVCVLGHTHADVVKLFQSVPIGQSVNLVLCRGYPLPFDPEDPANSMVPPLAIMERPPPVMVNGRHNYETYLEYISRTSQSVPDITDRPPHSLHSMPTDGQLDGTYPPPVHDDNVSMASSGATQAELMTLTIVKGAQGFGFTIADSPTGQRVKQILDIQGCPGLCEGDLIVEINQQNVQNLSHTEVVDILKDCPIGSETSLIIHRGGFFSPWKTPKPIMDRWENQGSPQTSLSAPAIPQNLPFPPALHRSSFPDSTEAFDPRKPDPYELYEKSRAIYESRQQVPPRTSFRMDSSGPDYKELDVHLRRMESGFGFRILGGDEPGQPILIGAVIAMGSADRDGRLHPGDELVYVDGIPVAGKTHRYVIDLMHHAARNGQVNLTVRRKVLCGGEPCPENGRSPGSVSTHHSSPRSDYATYTNSNHAAPSSNASPPEGFASHSLQTSDVVIHRKENEGFGFVIISSLNRPESGSTITVPHKIGRIIDGSPADRCAKLKVGDRILAVNGQSIINMPHADIVKLIKDAGLSVTLRIIPQEELNSPTSAPSSEKQSPMAQQSPLAQQSPLAQPSPATPNSPI

SEQ ID NO: 23978 - protein, 2262 aa, Homo sapiens
MARFGDEMPARYGGGGSGAAAGVVVGSGGGRGAGGSRQGGQPGAQRMYKQSMAQRARTMALYNPIPVRQNCLTVNRSLFLFSEDNVVRKYAKKITEWPPFEYMILATIIANCIVLALEQHLPDDDKTPMSERLDDTEPYFIGIFCFEAGIKIIALGFAFHKGSYLRNGWNVMDFVVVLTGILATVGTEFDLRTLRAVRVLRPLKLVSGIPSLQVVLKSIMKAMIPLLQIGLLLFFAILIFAIIGLEFYMGKFHTTCFEEGTDDIQGESPAPCGTEEPARTCPNGTKCQPYWEGPNNGITQFDNILFAVLTVFQCITMEGWTDLLYNSNDASGNTWNWLYFIPLIIIGSFFMLNLVLGVLSGEFAKERERVENRRAFLKLRRQQQIERELNGYMEWISKAEEVILAEDETDGEQRHPFDVGALRRTTIKKSKTDLLNPEEAEDQLADIASVGSPFARASIKSAKLENSTFFHKKERRMRFYIRRMVKTQAFYWTVLSLVALNTLCVAIVHYNQPEWLSDFLYYAEFIFLGLFMSEMFIKMYGLGTRPYFHSSFNCFDCGVIIGSIFEVIWAVIKPGTSFGISVLRALRLLRIFKVTKYWASLRNLVVSLLNSMKSIISLLFLLFLFIVVFALLGMQLFGGQFNFDEGTPPTNFDTFPAAIMTVFQILTGEDWNEVMYDGIKSQGGVQGGMVFSIYFIVLTLFGNYTLLNVFLAIAVDNLANAQELTKDEQEEEEAANQKLALQKAKEVAEVSPLSAANMSIAVKEQQKNQKPAKSVWEQRTSEMRKQNLLASREALYNEMDPDERWKAAYTRHLRPDMKTHLDRPLVVDPQENRNNNTNKSRAAEPTVDQRLGQQRAEDFLRKQARYHDRARDPSGSAGLDARRPWAGSQEAELSREGPYGRESDHHAREGSLEQPGFWEGEAERGKAGDPHRRHVHRQGGSRESRSGSPRTGADGEHRRHRAHRRPGEEGPEDKAERRARHREGSRPARGGEGEGEGPDGGERRRRHRHGAPATYEGDARREDKERRHRRRKENQGSGVPVSGPNLSTTRPIQQDLGRQDPPLAEDIDNMKNNKLATAESAAPHGSLGHAGLPQSPAKMGNSTDPGPMLAIPAMATNPQNAASRRTPNNPGNPSNPGPPKTPENSLIVTNPSGTQTNSAKTARKPDHTTVDIPPACPPPLNHTVVQVNKNANPDPLPKKEEEKKEEEEDDRGEDGPKPMPPYSSMFILSTTNPLRRLCHYILNLRYFEMCILMVIAMSSIALAAEDPVQPNAPRNNVLRYFDYVFTGVFTFEMVIKMIDLGLVLHQGAYFRDLWNILDFIVVSGALVAFAFTGNSKGKDINTIKSLRVLRVLRPLKTIKRLPKLKAVFDCVVNSLKNVFNILIVYMLFMFIFAVVAVQLFKGKFFHCTDESKEFEKDCRGKYLLYEKNEVKARDREWKKYEFHYDNVLWALLTLFTVSTGEGWPQVLKHSVDATFENQGPSPGYRMEMSIFYVVYFVVFPFFFVNIFVALIIITFQEQGDKMMEEYSLEKNERACIDFAISAKPLTRHMPQNKQSFQYRMWQFVVSPPFEYTIMAMIALNTIVLMMKFYGASVAYENALRVFNIVFTSLFSLECVLKVMAFGILNYFRDAWNIFDFVTVLGSITDILVTEFGNNFINLSFLRLFRAARLIKLLRQGYTIRILLWTFVQSFKALPYVCLLIAMLFFIYAIIGMQVFGNIGIDVEDEDSDEDEFQITEHNNFRTFFQALMLLFRSATGEAWHNIMLSCLSGKPCDKNSGILTRECGNEFAYFYFVSFIFLCSFLMLNLFVAVIMDNFEYLTRDSSILGPHHLDEYVRVWAEYDPAACGRIHYKDMYSLLRVISPPLGLGKKCPHRVACKRLLRMDLPVADDNTVHFNSTLMALIRTALDIKIAKGGADKQQMDAELRKEMMAIWPNLSQKTLDLLVTPHKSTDLTVGKIYAAMMIMEYYRQSKAKKLQAMREEQDRTPLMFQRMEPPSPTQEGGPGQNALPSTQLDPGGALMAHESGLKESPSWVTQRAQEMFQKTGTWSPEQGPPTDMPNSQPNSQSVEMREMGRDGYSDSEHYLPMEGQGRAASMPRLPAENQRRRGRPRGNNLSTISDTSPMKRSASVLGPKARRLDDYSLERVPPEENQRHHQRRRDRSHRASERSLGRYTDVDTGLGTDLSMTTQSGDLPSKERDQERGRPKDRKHRQHHHHHHHHHHPPPPDKDRYAQERPDHGRARARDQRWSRSPSEGREHMAHRQ

SEQ ID NO: 23979 - protein, 339 aa, Homo sapiens
MTARAFWLLCLIVGSSPEAPVAERKTSPPHSRKPDSRGCPSAEETPGPRAQPLLEAPQRPRAAEVAPAARAWPDPRRRKPPPPADNQASFREAARAPAGPPGPRLAQAENRASPRREPASEDAPRRARSRALRFPAARPPALATEGSAGHAHPNRPRAAALAPGPAPAPPPRFSLSFGLSPPQRDAEPGAEPCARACRSDLDEREAFCESEFAVNGIVHDVDVLGAGIRLVTLLVDRDGLYKMNRLYLTPDGFFFRVHMLALDSSSCNKPCPEFKPGSRYIVMGHIYHKRRQLPTALLQVLRGRLRPGDGLLRSSSSYVKRFNRKREGQIQGAIHTQCI

SEQ ID NO: 23980 - protein, 480 aa, Homo sapiens
MAAGGDHGSPDSYRSPLASRYASPEMCFVFSDRYKFRTWRQLWLWLAEAEQTLGLPITDEQIQEMKSNLENIDFKMAAEEEKRLRHDVMAHVHTFGHCCPKAAGIIHLGATSCYVGDNTDLIILRNALDLLLPKLARVISRLADFAKERASLPTLGFTHFQPAQLTTVGKRCCLWIQDLCMDLQNLKRVRDDLRFRGVKGTTGTQASFLQLFEGDDHKVEQLDKMVTEKAGFKRAFIITGQTYTRKVDIEVLSVLASLGASVHKICTDIRLLANLKEMEEPFEKQQIGSSAMPYKRNPMRSERCCSLARHLMTLVMDPLQTASVQWFERTLDDSANRRICLAEAFLTADTILNTLQNISEGLVVYPKVIERRIRQELPFMATENIIMAMVKAGGSRQDCHEKIRVLSQQAASVVKQEGGDNDLIERIQVDAYFSPIHSQLDHLLDPSSFTGRASQQVQRFLEEEVYPLLKPYESVMKTCP

SEQ ID NO: 23981 - protein, 1494 aa, Homo sapiens
NYSRPPAYSGVPSASYSGPGPGMGISANNQMHGQGPSQPCGAVPLGRMPSAGMQNRPFPGNMSSMTPSSPGMSQQGGPGMGPPMPTVNRKAQEAAAAVMQAAANSAQSRPPYIRSPAYPSQSGAGGRPMFSSQHPNYGNSQAPMVHQPDQYGQGSFPGMNQSGLMASSSPYSQPMNNSSSLMNTQAPPYSMAPAMVNSSAASVGLADMMSPGESKLPLPLKADGKEEGTPQPESKSKDSYSSQGISQPPTPGNLPVPSPMSPSSASISSFHGDESDSISSPGWPKTPSSPKSSSSTTTGEKITKVYELGNEPERKLWVDRYLTFMEERGSPVSSLPAVGKKPLDLFRLYVCVKEIGGLAQVNKNKKWRELATNLNVGTSSSAASSLKKQYIQYLFAFECKIERGEEPPPEVFSTGDTKKQPKLQPPSPANSGSLQGPQTPQSTGSNSMAEVPGDLKPPTPASTPHGQMTPMQGGRSSTISVHDPFSDVSDSSFPKRNSMTPNAPYQQGMSMPDVMGRMPYEPNKDPFGGMRKVPGSSEPFMTQGQMPNSSMQDMYNQSPSGAMSNLGMGQRQQFPYGASYDRRHEPYGQQYPGQGPPSGQPPYGGHQPGLYPQQPNYKRHMDGMYGPPAKRHEGDMYNMQYSSQQQEMYNQYGGSYSGPDRRPIQGQYPYPYSRERMQGPGQIQTHGIPPQMMGGPLQSSSSEGPQQNMWAARNDMPYPYQNRQGPGGPTQAPPYPGMNRTDDMMVPDQRINHESQWPSHVSQRQPYMSSSASMQPITRPPQPSYQTPPSLPNHISRAPSPASFQRSLENRMSPSKSPFLPSMKMQKVMPTVPTSQVTGPPPQPPPIRREITFPPGSVEASQPVLKQRRKITSKDIVTPEAWRVMMSLKSGLLAESTWALDTINILLYDDSTVATFNLSQLSGFLELLVEYFRKCLIDIFGILMEYEVGDPSQKALDHNAARKDDSQSLADDSGKEEEDAECIDDDEEDEEDEEEDSEKTESDEKSSIALTAPDAAADPKEKPKQASKFDKLPIKIVKKNNLFVVDRSDKLGRVQEFNSGLLHWQLGGGDTTEHIQTHFESKMEIPPRRRPPPPLSSAGRKKEQEGKGDSEEQQEKSIIATIDDVLSARPGALPEDANPGPQTESSKFPFGIQQAKSHRNIKLLEDEPRSRDETPLCTIAHWQDSLAKRCICVSNIVRSLSFVPGNDAEMSKHPGLVLILGKLILLHHEHPERKRAPQTYEKEEDEDKGVACSKDEWWWDCLEVLRDNTLVTLANISGQLDLSAYTESICLPILDGLLHWMVCPSAEAQDPFPTVGPNSVLSPQRLVLETLCKLSIQDNNVDLILATPPFSRQEKFYATLVRYVGDRKNPVCREMSMALLSNLAQGDALAARAIAVQKGSIGNLISFLEDGVTMAQYQQSQHNLMHMQPPPLEPPSVDMMCRAAKALLAMARVDENRSEFLLHEGRLLDISISAVLNSLVASVICDVLFQIGQL

SEQ ID NO: 23982 - protein, 423 aa, Homo sapiens
MYDNLYLHGIEDSEAGSADSYTSRPSDSDVSLEEDREAIRQEREQQAAIQLERAKSKPVAFAVKTNVSYCGALDEDVPVPSTAISFDAKDFLHIKEKYNNDWWIGRLVKEGCEIGFIPSPLRLENIRIQQEQKRGRFHGGKSSGNSSSSLGEMVSGTFRATPTSTDGAHSSLRCCTVNASGGVSGAVTERLRAEVQSEIERIFELARSLQLVVLDADTINHPAQLIKTSLAPIIVHVKVSSPKVLQRLIKSRGKSQSKHLNVQLVAADKLAQCPPEMFDVILDENQLEDACEHLGEYLEAYWRATHTTSSTPMTPLLGRNLGSTALSPYPTAISGLQSQRMRHSNHSTENSPIERRSLMTSDENYHNERARKSRNRLSSSSQHSRDHYPLVEEDYPDSYQDTYKPHRNRGSPGGYSHDSRHRL

SEQ ID NO: 23983 - protein, 422 aa, Homo sapiens
MAPNGTASSFCLDSTACKITITVVLAVLILITVAGNVVVCLAVGLNRRLRNLTNCFIVSLAITDLLLGLLVLPFSAIYQLSCKWSFGKVFCNIYTSLDVMLCTASILNLFMISLDRYCAVMDPLRYPVLVTPVRVAISLVLIWVISITLSFLSIHLGWNSRNETSKGNHTTSKCKVQVNEVYGLVDGLVTFYLPLLIMCITYYRIFKVARDQAKRINHISSWKAATIREHKATVTLAAVMGAFIICWFPYFTAFVYRGLRGDDAINEVLEAIVLWLGYANSALNPILYAALNRDFRTGYQQLFCCRLANRNSHKTSLRSNASQLSRTQSREPRQQEEKPLKLQVWSGTEVTAPQGATDRKPALSCTTCSSNLLSCCKSLWGLRFLQRHMGGPSEELSGEPLSEEPQKRPPQKAVRTLPSEAV

SEQ ID NO: 23984 - protein, 143 aa, Homo sapiens
MDMRWHCENLQVTTDDILVASAECPSDDEDIDPCEPSSGGLANPTRAGGREPYPGSAEVIRESSSTTGMVVGIVAAAALCILILLYAMYKYRNRDEGSYHVDESRNYISNSAQSNGAVVKEKQPSSAKSSNKNKKNKDKEYYV

SEQ ID NO: 23985 - protein, 1324 aa, Homo sapiens
MALVRGAEPAAGPSRWLPTHVQVTVLRARGLRGKSSGAGSTSDAYTVIQVGREKYSTSVVEKTHGCPEWREECSFELPPGALDGLLRAQEADAGPAPWAASSAAACELVLTTMHRSLIGVDKFLGQATVALDEVFGAGRAQHTQWYKLHSKPGKKEKERGEIEVTIQFTRNNLSASMFDLSMKDKPRSPFSKIRDKMKGKKKYDLESASAILPSSAIEDPDLGSLGKMGKAKGFFLRNKLRKSSLTQSNTSLGSDSTLSSASGSLAYQGPGAELLTRSPSRSSWLSTEGGRDSAQSPKLFTHKRTYSDEANQMRVAPPRALLDLQGHLDAASRSSLCVNGSHIYNEEPQGPVRHRSSISGSLPSSGSLQAVSSRFSEEGPRSTDDTWPRGSRSNSSSEAVLGQEELSAQAKVLAPGASHPGEEEGARLPEGKPVQVATPIVASSEAVAEKEGARKEERKPRMGLFHHHHQGLSRSELGRRSSLGEKGGPILGASPHHSSSGEEKAKSSWFGLREAKDPTQKPSLDVSPQVESDPAALPHHLPCSPWAPAPPTPAPTAAPMLSTNLFAAASPAAATAAAAATTAAPEATPPGLLGLTNPFLTSLQSNPFFEELIADIALNSPSPAPSLPSASRASPTPLASPGKALPEWDNTFNVFAASRLRPEARSEILAPAGVGLEAAGLQDPGPGAMTAKAAEPQGEPGGGGGGGGGGGGRGGSSVWLEPRVPLDLGPNHQSASAADPGLLGSVGAGLPSSSAQLQLRASGSEPDRELPAPEVEAGQSPADSGTSLFSSPEVISVWERLPGPESAAEGQDDESSRGENQLCPDVETADDAWPWDVVTISPAAETASLVFRGESDEPAPQVQPESPETVSPKGSEGLPPPEPEPKPEWVSDKGLQPSTPPPKPPRLFTPSRSQEEEEEKAAVGLSNRGPETEGEDASPSALVVGPPETKEEGEKRESEESDSCSSATLLGQPGLEELVEDASPPVSGPCLSAPASCPEGPAPIPCHSKSLALQSQHIWGTPEVGEGPEAPEAQGQDPVGEGLGSLSATSQQADVWVSKEDALNPFLFQGSRDPPSLSSASPPGSRESSIHSGPEELPTPPEPDFPPPPLPPWASHHRGGPSPPCSPLSEAWPLTTSSAPPGEPALLPGPHEPSPPGGSPALLREDLAAATPASPLVLLPLETRPAEEPQPSASPHPVKPLSAAPVEGSPDRKQSRSSLSIALSSGLEKLKTVTSGSIQPVTQAPQAGQMVDTKRLKDSAVLDQSAKYYHLTHDELISLLLQRERELSQRDEHVQELESYIDRLLVRIMETSPTLLQIPPGPPK

SEQ ID NO: 23986 - protein, 1010 aa, Homo sapiens
PTDGRHFVSQTTGNLYIARTNASDLGNYSCLATSHMDFSTKSVFSKFAQLNLAAEDTRLFAPSIKARFPAETYALVGQQVTLECFAFGNPVPRIKWRKVDGSLSPQWTTAEPTLQIPSVSFEDEGTYECEAENSKGRDTVQGRIIVQAQPEWLKVISDTEADIGSNLRWGCAAAGKPRPTVRWLRNGEPLASQNRVEVLAGDLRFSKLSLEDSGMYQCVAENKHGTIYASAELAVQALAPDFRLNPVRRLIPAARGGEILIPCQPRAAPKAVVLWSKGTEILVNSSRVTVTPDGTLIIRNISRSDEGKYTCFAENFMGKANSTGILSVRDATKITLAPSSADINLGDNLTLQCHASHDPTMDLTFTWTLDDFPIDFDKPGGHYRRTNVKETIGDLTILNAQLRHGGKYTCMAQTVVDSASKEATVLVRGPPGPPGGVVVRDIGDTTIQLSWSRGFDNHSPIAKYTLQARTPPAGKWKQVRTNPANIEGNAETAQVLGLTPWMDYEFRVIASNILGTGEPSGPSSKIRTREAAPSVAPSGLSGGGGAPGELIVNWTPMSREYQNGDGFGYLLSFRRQGSTHWQTARVPGADAQYFVYSNESVRPYTPFEVKIRSYNRRGDGPESLTALVYSAEEEPRVAPTKVWAKGVSSSEMNVTWEPVQQDMNGILLGYEIRYWKAGDKEAAADRVRTAGLDTSARVSGLHPNTKYHVTVRAYNRAGTGPASPSANATTMKPPPRRPPGNISWTFSSSSLSIKWDPVVPFRNESAVTGYKMLYQNDLHLTPTLHLTGKNWIEIPVPEDIGHALVQIRTTGPGGDGIPAEVHIVRNGGAAPPLPLSPREIQDPPRYLRGSFPPRPTPISTRKGKWKAGRNQVQSSLRTASPPPFYPAPRTSPRAREGRRVQGEAEDQPAIANGLQSTVGVGLRRPPSRPLPGLQLALHKHDGGEHGSPPSTTPWHRHFPLRGDADPHRLPGALILEPLPLRRSWTPPPTDTASPFLLPRWPDTVPESGWF

SEQ ID NO: 23987 - protein, 347 aa, Homo sapiens
MQRAVSVVARLGFRLQAFPPALCRPLSCAQTKILGSDRVKLMESLVVGDIAELRPNQGTLSLFTNEAGGILDDLIVTNTSEGHLYVVSNAGCWEKDLALMQDKVRELQNQGRDVGLEVLDNALLALQGPTAAQVLQAGVADDLRKLPFMTSAVMEVFGVSGCRVTRCGYTGEDGVEISVPVAGAVHLATAILKNPEVKLAGLAARDSLRLEAGLCLYGNDIDEHTTPVEGSLSWTLGKRRRAAMDFPGAKVIVPQLKGRVQRRRVGLMCEGAPMRAHSPILNMEGTKIGTVTSGCPSPSLKKNVAMGYVPCEYSRPGTMLLVEVRRKQQMAVVSKMPFVPTNYYTLK

SEQ ID NO: 23988 - protein, 584 aa, Homo sapiens
MAEPQAESEPLLGGARGGGGDWPAGLTTYRSIQVGPGAAARWDLCIDQAVVFIEDAIQYRSINHRVDASSMWLYRRYYSNVCQRTLSFTIFLILFLAFIETPSSLTSTADVRYRAAPWEPPCGLTESVEVLCLLVFAADLSVKGYLFGWAHFQKNLWLLGYLVVLVVSLVDWTVSLSLVCHEPLRIRRLLRPFFLLQNSSMMKKTLKCIRWSLPEMASVGLLLAIHLCLFTMFGMLLFAGGKQDDGQDRERLTYFQNLPESLTSLLVLLTTANNPDVMIPAYSKNRAYAIFFIVFTVIGSLFLMNLLTAIIYSQFRGYLMKSLQTSLFRRRLGTRAAFEVLSSMVGEGGAFPQAVGVKPQNLLQVLQKVQLDSSHKQAMMEKVRSYGSVLLSAEEFQKLFNELDRSVVKEHPPRPEYQSPFLQSAQFLFGHYYFDYLGNLIALANLVSICVFLVLDADVLPAERDDFILGILNCVFIVYYLLEMLLKVFALGLRGYLSYPSNVFDGLLTVVLLEAGDGGPAVAVGHDPHAEHAHRVPLPAYHPQHEADGRGGQYRPGPGAEHACVWRDPGGGLLRICHHWDQLV

SEQ ID NO: 23989 - protein, 376 aa, Homo sapiens
MQRAVSVVARLGFRLQAFPPALCRPLSCAQEVLRRTPLYDFHLAHGGKMVAFAGWSLPVQYRDSHTDSHLHTRQHCSLFDVSHMLQGTLSLFTNEAGGILDDLIVTNTSEGHLYVVSNAGCWEKDLALMQDKVRELQNQGRDVGLEVLDNALLALQGPTAAQVLQAGVADDLRKLPFMTSAVMEVFGVSGCRVTRCGYTGEDGVEISVPVAGAVHLATAILKNPEVKLAGLAARDSLRLEAGLCLYGNDIDEHTTPVEGSLSWTLGKRRRAAMDFPGAKVIVPQLKGRVQRRRVGLMCEGAPMRAHSPILNMEGTKIGTVTSGCPSPSLKKNVAMGYVPCEYSRPGTMLLVEVRRKQQMAVVSKMPFVPTNYYTLK

SEQ ID NO: 23990 - protein, 532 aa, Homo sapiens
MSTEEQYRIRQVNIYYYLEDDSMSVIEPVVENSGILQGKLIKRQRLAKNDRGDHYHWKDLNRGINITIYGKTFRVVDCDQFTQVFLESQGIELNPPEKMALDPYTELRKQPLRKYVTPSDFDQLKQFLTFDKQVLRFYAIWDDTDSMYGECRTYIIHYYLMDDTVEIREVHERNDGRDPFPLLMNRQRVPKVLVENAKNFPQCVLEISDQEVLEWYTAKDFIVGKSLTILGRTFFIYDCDPFTRRYYKEKFGITDLPRIDVSKREPPPVKQELPPYNGFGLVEDSAQNCFALIPKAPKKDVIKMLVNDNKVLRYLAVLESPIPEDKDRRFVFSYFLATDMISIFEPPVRNSGIIGGKYLGRTKVVKPYSTVDNPVYYGPSDFFIGAVIEVFGHRFIILDTDEYVLKYMESNAAQYSPEALASIQNHVRKREAPAPEAESKQTEKDPGVQELEALIDTIQKQLKDHSCKDNIREAFQIYDKEASGYVDRDMFFKICESLNVPVDDSLVKELIRMCSHGEGKINYYNFVRAFSN

SEQ ID NO: 23991 - protein, 2170 aa, Homo sapiens
MEMNLPTFSSDLIFIKSTMYQEIDARYKGKVISEAETKGYFSLAFGEANYARGTRLPLSGEGPTSQPNSSKQTVLSWQAAIDAARQAKAAQTMSTSAPPPVGSLSQRKRQQYAKSKKQGNSSNSRPARALFCLSLNNPIRRACISIVEWKPFDIFILLAIFANCVALAIYIPFPEDDSNSTNHNLEKVEYAFLIIFTVETFLKIIAYGLLLHPNAYVRNGWNLLDFVIVIVGLFSVILEQLTKETEGGNHSSGKSGGFDVKALRAFRVLRPLRLVSGVPSLQVVLNSIIKAMVPLLHIALLVLFVIIIYAIIGLELFIGKMHKTCFFADSDIVAEEDPAPCAFSGNGRQCTANGTECRSGWVGPNGGITNFDNFAFAMLTVFQCITMEGWTDVLYWVNDAIGWEWPWVYFVSLIILGSFFVLNLVLGVLSGEFSKEREKAKARGDFQKLREKQQLEEDLKGYLDWITQAEDIDPENEEEGGEEGKRNTSMPTSETESVNTENVSGEGENRGCCGSLCQAISKSKLSRRWRRWNRFNRRRCRAAVKSVTFYWLVIVLVFLNTLTISSEHYNQPDWLTQIQDIANKVLLALFTCEMLVKMYSLGLQAYFVSLFNRFDCFVVCGGITETILVELEIMSPLGISVFRCVRLLRIFKVTRHWTSLSNLVASLLNSMKSIASLLLLLFLFIIIFSLLGMQLFGGKFNFDETQTKRSTFDNFPQALLTVFQILTGEDWNAVMYDGIMAYGGPSSSGMIVCIYFIILFICGNYILLNVFLAIAVDNLADAESLNTAQKEEAEEKERKKIARKESLENKKNNKPEVNQIANSDNKVTIDDYREEDEDKDPYPPCDVPVGEEEEEEEEDEPEVPAGPRPRRISELNMKEKIAPIPEGSAFFILSKTNPIRVGCHKLINHHIFTNLILVFIMLSSAALAAEDPIRSHSFRNTILGYFDYAFTAIFTVEILLKMTTFGAFLHKGAFCRNYFNLLDMLVVGVSLVSFGIQSSAISVVKILRVLRVLRPLRAINRAKGLKHVVQCVFVAIRTIGNIMIVTTLLQFMFACIGVQLFKGKFYRCTDEAKSNPEECRGLFILYKDGDVDSPVVRERIWQNSDFNFDNVLSAMMALFTVSTFEGWPALLYKAIDSNGENIGPIYNHRVEISIFFIIYIIIVAFFMMNIFVGFVIVTFQEQGEKEYKNCELDKNQRQCVEYALKARPLRRYIPKNPYQYKFWYVVNSSPFEYMMFVLIMLNTLCLAMQHYEQSKMFNDAMDILNMVFTGVFTVEMVLKVIAFKPKGYFSDAWNTFDSLIVIGSIIDVALSEADNSEESNRISITFFRLFRVMRLVKLLSRGEGIRTLLWTFIKSFQALPYVALLIAMLFFIYAVIGMQMFGKVAMRDNNQINRNNNFQTFPQAVLLLFRCATGEAWQEIMLACLPGKLCDPESDYNPGEEYTCGSNFAIVYFISFYMLCAFLIINLFVAVIMDNFDYLTRDWSILGPHHLDEFKRIWSEYDPEAKGRIKHLDVVTLLRRIQPPLGFGKLCPHRVACKRLVAMNMPLNSDGTVMFNATLFALVRTALKIKTEGNLEQANEELRAVIKKIWKKTSMKLLDQVVPPAGDDEVTVGKFYATFLIQDYFRKFKKRKEQGLVGKYPAKNTTIALQAGLRTLHDIGPEIRRAISCDLQDDEPEETKREEEDDVFKRNGALLGNHVNHVNSDRRDSLQQTNTTHRPLHVQRPSIPPASDTEKPLFPPAGNSVCHNHHNHNSIGKQVPTSTNANLNNANMSKAAHGKRPSIGNLEHVSENGHHSSHKHDREPQRRSSVKRTRYYETYIRSDSGDEQLPTICREDPEIHGYFRDPHCLGEQEYFSSEECYEDDSSPTWSRQNYGYYSRYPGRNIDSERPRGYHHPQGFLEDDDSPVCYDSRRSPRRRLLPPTPASHRRSSFNFECLRRQSSQEEVPSSPIFPHRTALPLHLMQQQIMAVAGLDSSKAQKYSPSHSTRSWATPPATPPYRDWTPCYTPLIQVEQSEALDQVNGSLPSLHRSSWYTDEPDISYRTFTPASLTVPSSFRNKNSDKQRSADSLVEAVLISEGLGRYARDPKFVSATKHEIADACDLTIDEMESAASTLLNGNVRPRANGDVGPLSHRQDYELQDFGPGYSDEEPDPGRDEEDLADEMICITTL

SEQ ID NO: 23992 - protein, 832 aa, Homo sapiens
MAGLRYSVKVYVLNEDEEWNNLGTGQVSSTYDEQFQGMSLLVRSDSDGSVILRSQIPPDRPYGKYQETLIVWYEAENQGLVLKFQDPAGCQDIWKEICQAQGKDPSIQTTVNISDEPEEDFNEMSVISNMVVLPDCELNTLDQIADIVTSVFSSPVTDRERLAEILKNEAYIPKLLQLFHTCENLENTEGLHHLYEIIKGILFLNEACLFEIMFSDECIMDVVGCLEYDPALDQPKRHRDFLTNDAKFKEVIPITNSELRQKIHQTYRLQYIYDILLPVPSIFEDNFLSTLTTFIFSNKAEIVSMLQKDHKFLYEVFAQLKDETTHDDRRCELLFFFKELCSFSQALQPQSKDALFETLIQLGVLPALKIVMIRDDLQVRSAAAVICAYLVEYSPSRIREFIISEAHVCKDSDLFINVIIKQMICDTDPELGGAVHLMVVLHTLLDPRNMLTTPEKSERSEFLHFFYKHCMHKFTAPLLAATSEHNCEEDDIAGYDKSKNCPNDNQTAQLLALILELLTFCIQHHTFYIRSYILNKDLLRKALILMNSKHTHLILCVLRFMRRMICLNDEAYNNYIIKGNLFEPVVNALLDNGTRYNMLNSAILELFEYIRVENIKPLVSHIVEKFYNTLESIEYVQTFKGLKIKYEKERDRQSQIQKNLHSVLQNIVVFRGTIEEIGLEEEICFMEDAGEVVMPPLEDDDEFMETKRTQEGEAVMPPLEDDDKFTETKRTHQEGEAVMPPLEDDDEFMETKRNQEHEGKVDSPKRTSSGDFKFSSSYSACAAIGTGSPSGSSVVRLVDHPDDEEEKEEDEEEKEEDKEDETSPKKKPHLSS

SEQ ID NO: 23993 - protein, 1055 aa, Homo sapiens
MSALRKVLPGILQKHCCILPDRNTESQCTLCGEPEEEEAGDLVQPGISFPGPAEEDLDPQYSWSPTQHFNEERYSPAPRSMKGLSGSRTQPPLCSGHTCGLAPPEDCEHLHHGPDARPPYLLSPADSCPGGRHRCSPRSSVHSECVMMPVVLGDHVSSSTFPRMHYSSHYDTRDDCAVAHAGAKINRIPANLLDQFEKQLPLHRDGFHTLQYQRTSAAAEQRSESPGRIRHLVHSVQKLFTKSHSLEGSSKSNANGTKADGRADDHHHAHHAKHSKRSKSKERKPEGKPRPGMSSWWSSDDNLDSDSTYRTPSVLNRHHLGPVAHCYPDALQSPFGDLSLKTSKSNNDVKCSACEGLALTPDAKYLKRSSWSTLTVSQAKEAYRKSSLNLDKPLLHQDAKPALRPCHYLQVPQDEWGGYPTGGKDEEIPCRRMRSGSYIKAMGDEESGESDSSPKTSPKSAILPEPLLKSIGQRPLGEHQTQTYLQAASDVPVGHSLDPAANYNSPKFRSRNQSYMRAVSTLSQASCVSQVSEAEINGQFESVCESVFSEVESQAMDALDLPGCFRTRSHSYLRAIQAGYSQDDECIPMMTPSDITSTIRSTAAVSYTNYKKTPPPVPPRTTSKPLISVTAQSSTESTQDAYQDSRAQRMSPWPQDSRGLYNSTDSLDSNKAMNLALETAAAQRHLPESQSSSVRTSDKAILVSKAEELLKSRCSSIGIQDSEFPEHQPYPRSDVETATDSDTESRGLREYHSVGVQVEDEKRHGRFKRSNSVTAAVQADLELEGFPGHITTEDKGLQFGSSFQRHSEPSTPTQYSAVRTVRTQGLFSYREDYRTQVDTSTLPPPDPWLEPAIDTVETGRMSPCRRDGSWFLKLLHAETKRMEGWCKEMEREAEENDLSEEILGKIRSAVGSAQLLMSQKFQQFYWLCQQNMDPSAMPRPTSQDLAGYWDMLQLSIEDVSMKFDELQRLRLNDWKMMESPERKEERKVPPPIPKKPPKGKFPITREKSLDLPDRQRQEARRRLMAAKRAASFRQNSASERADSIEIYIPEAQTRL

SEQ ID NO: 23994 - protein, 83 aa, Homo sapiens
KTVLLEEIYTHKNLFTERLNKISDGLKEKARNRRTSLWAVSLSSALLLAIAGGGRNRAARMSSRSEQRPQLPPSQSSLISGSR

SEQ ID NO: 23995 - protein, 166 aa, Homo sapiens
MLPLLIICLLPAIEGKNCLRCWPELSALIDYDLQILWVTPGPPTELSQNRDHLEEETAKFFTQVHQAIKTLRDDKTVLLEEIYTHKNLFTERLNKISDGLKEKDIQSTLKVTSCADCRTHFLSCNDPTFCPARNRRTSLWAVSLSSALLLAIAGDVSFTGKGRRRQ

SEQ ID NO: 23996 - protein, 2249 aa, Homo sapiens
MARFGDEMPARYGGGGSGAAAGVVVGSGGGRGAGGSRQGGQPGAQRMYKQSMAQRARTMALYNPIPVRQNCLTVNRSLFLFSEDNVVRKYAKKITEWPPFEYMILATIIANCIVLALEQHLPDDDKTPMSERLDDTEPYFIGIFCFEAGIKIIALGFAFHKGSYLRNGWNVMDFVVVLTGILATVGTEFDLRTLRAVRVLRPLKLVSGIPSLQVVLKSIMKAMIPLLQIGLLLFFAILIFAIIGLEFYMGKFHTTCFEEGTDDIQGESPAPCGTEEPARTCPNGTKCQPYWEGPNNGITQFDNILFAVLTVFQCITMEGWTDLLYNSNDASGNTWNWLYFIPLIIIGSFFMLNLVLGVLSGEFAKERERVENRRAFLKLRRQQQIERELNGYMEWISKAEEVILAEDETDGEQRHPFDGALRRTTIKKSKTDLLNPEEAEDQLADIASVGSPFARASIKSAKLENSTFFHKKERRMRFYIRRMVKTQAFYWTVLSLVALNTLCVAIVHYNQPEWLSDFLYYAEFIFLGLFMSEMFIKMYGLGTRPYFHSSFNCFDCGVIIGSIFEVIWAVIKPGTSFGISVLRALRLLRIFKVTKYWASLRNLVVSLLNSMKSIISLLFLLFLFIVVFALLGMQLFGGQFNFDEGTPPTNFDTFPAAIMTVFQILTGEDWNEVMYDGIKSQGGVQGGMVFSIYFIVLTLFGNYTLLNVFLAIAVDNLANAQELTKDEQEEEEAANQKLALQKAKEVAEVSPLSAANMSIAVKEQQKNQKPAKSVWEQRTSEMRKQNLLASREALYNEMDPDERWKAAYTRHLRPDMKTHLDRPLVVDPQENRNNNTNKSRAAEPTVDQRLGQQRAEDFLRKQARYHDRARDPSGSAGLDARRPWAGSQEAELSREGPYGRESDHHAREGSLEQPGFWEGEAERGKAGDPHRRHVHRQGGSRESRSGSPRTGADGEHRRHRAHRRPGEEGPEDKAERRARHREGSRPARGGEGEGEGPDGGERRRRHRHGAPATYEGDARREDKERRHRRRKENQGSGVPVSGPNLSTTRPIQQDLGRQDPPLAEDIDNMKNNKLATAESAAPHGSLGHAGLPQSPAKMGNSTDPGPMLAIPAMATNPQNAASRRTPNNPGNPSNPGPPKTPENSLIVTNPSGTQTNSAKTARKPDHTTVDIPPACPPPLNHTVVQVNKNANPDPLPKKEEEKKEEEEDDRGEDGPKPMPPYSSMFILSTTNPLRRLCHYILNLRYFEMCILMVIAMSSIALAAEDPVQPNAPRNNVLRYFDYVFTGVFTFEMVIKMIDLGLVLHQGAYFRDLWNILDFIVVSGALVAFAFTGNSKGKDINTIKSLRVLRVLRPLKTIKRLPKLKAVFDCVVNSLKNVFNILIVYMLFMFIFAVVAVQLFKGKFFHCTDESKEFEKDCRGKYLLYEKNEVKARDREWKKYEFHYDNVLWALLTLFTVSTGEGWPQVLKHSVDATFENQGPSPGYRMEMSIFYVVYFVVFPFFFVNIFVALIIITFQEQGDKMMEEYSLEKNERACIDFAISAKPLTRHMPQNKQSFQYRMWQFVVSPPFEYTIMAMIALNTIVLMMKFYGASVAYENALRVFNIVFTSLFSLECVLKVMAFGILNYFRDAWNIFDFVTVLGSITDILVTEFGNNFINLSFLRLFRAARLIKLLRQGYTIRILLWTFVQSFKALPYVCLLIAMLFFIYAIIGMQVFGNIGIDVEDEDSDEDEFQITEHNNFRTFFQALMLLFRSATGEAWHNIMLSCLSGKPCDKNSGILTRECGNEFAYFYFVSFIFLCSFLMLNLFVAVIMDNFEYLTRDSSILGPHHLDEYVRVWAEYDPAAWGRMPYLDMYQMLRHMSPPLGLGKKCPARVAYKRLLRMDLPVADDNTVHFNSTLMALIRTALDIKIAKGGADKQQMDAELRKEMMAIWPNLSQKTLDLLVTPHKSTDLTVGKIYAAMMIMEYYRQSKAKKLQAMREEQDRTPLMFQRMEPPSPTQEGGPGQNALPSTQLDPGGALMAHESGLKESPSWVTQRAQEMFQKTGTWSPEQGPPTDMPNSQPNSQSVEMREMGRDGYSDSEHYLPMEGQGRAASMPRLPAENQTISDTSPMKRSASVLGPKARRLDDYSLERVPPEENQRHHQRRRDRSHRASERSLGRYTDVDTGLGTDLSMTTQSGDLPSKERDQERGRPKDRKHRQHHHHHHHHHHPPPPDKDRYAQERPDHGRARARDQRWSRSPSEGREHMAHRQ

SEQ ID NO: 23997 - protein, 2507 aa, Homo sapiens
MARFGDEMPARYGGGGSGAAAGVVVGSGGGRGAGGSRQGGQPGAQRMYKQSMAQRARTMALYNPIPVRQNCLTVNRSLFLFSEDNVVRKYAKKITEWPPFEYMILATIIANCIVLALEQHLPDDDKTPMSERLDDTEPYFIGIFCFEAGIKIIALGFAFHKGSYLRNGWNVMDFVVVLTGILATVGTEFDLRTLRAVRVLRPLKLVSGIPSLQVVLKSIMKAMIPLLQIGLLLFFAILIFAIIGLEFYMGKFHTTCFEEGTDDIQGESPAPCGTEEPARTCPNGTKCQPYWEGPNNGITQFDNILFAVLTVFQCITMEGWTDLLYNSNDASGNTWNWLYFIPLIIIGSFFMLNLVLGVLSGEFAKERERVENRRAFLKLRRQQQIERELNGYMEWISKAEEVILAEDETDGEQRHPFDGALRRTTIKKSKTDLLNPEEAEDQLADIASVGSPFARASIKSAKLENSTFFHKKERRMRFYIRRMVKTQAFYWTVLSLVALNTLCVAIVHYNQPEWLSDFLYYAEFIFLGLFMSEMFIKMYGLGTRPYFHSSFNCFDCGVIIGSIFEVIWAVIKPGTSFGISVLRALRLLRIFKVTKYWASLRNLVVSLLNSMKSIISLLFLLFLFIVVFALLGMQLFGGQFNFDEGTPPTNFDTFPAAIMTVFQILTGEDWNEVMYDGIKSQGGVQGGMVFSIYFIVLTLFGNYTLLNVFLAIAVDNLANAQELTKDEQEEEEAANQKLALQKAKEVAEVSPLSAANMSIAVKEQQKNQKPAKSVWEQRTSEMRKQNLLASREALYNEMDPDERWKAAYTRHLRPDMKTHLDRPLVVDPQENRNNNTNKSRAAEPTVDQRLGQQRAEDFLRKQARYHDRARDPSGSAGLDARRPWAGSQEAELSREGPYGRESDHHAREGSLEQPGFWEGEAERGKAGDPHRRHVHRQGGSRESRSGSPRTGADGEHRRHRAHRRPGEEGPEDKAERRARHREGSRPARGGEGEGEGPDGGERRRRHRHGAPATYEGDARREDKERRHRRRKENQGSGVPVSGPNLSTTRPIQQDLGRQDPPLAEDIDNMKNNKLATAESAAPHGSLGHAGLPQSPAKMGNSTDPGPMLAIPAMATNPQNAASRRTPNNPGNPSNPGPPKTPENSLIVTNPSGTQTNSAKTARKPDHTTVDIPPACPPPLNHTVVQVNKNANPDPLPKKEEEKKEEEEDDRGEDGPKPMPPYSSMFILSTTNPLRRLCHYILNLRYFEMCILMVIAMSSIALAAEDPVQPNAPRNNVLRYFDYVFTGVFTFEMVIKMIDLGLVLHQGAYFRDLWNILDFIVVSGALVAFAFTGNSKGKDINTIKSLRVLRVLRPLKTIKRLPKLKAVFDCVVNSLKNVFNILIVYMLFMFIFAVVAVQLFKGKFFHCTDESKEFEKDCRGKYLLYEKNEVKARDREWKKYEFHYDNVLWALLTLFTVSTGEGWPQVLKHSVDATFENQGPSPGYRMEMSIFYVVYFVVFPFFFVNIFVALIIITFQEQGDKMMEEYSLEKNERACIDFAISAKPLTRHMPQNKQSFQYRMWQFVVSPPFEYTIMAMIALNTIVLMMKFYGASVAYENALRVFNIVFTSLFSLECVLKVMAFGILNYFRDAWNIFDFVTVLGSITDILVTEFGNNFINLSFLRLFRAARLIKLLRQGYTIRILLWTFVQSFKALPYVCLLIAMLFFIYAIIGMQVFGNIGIDVEDEDSDEDEFQITEHNNFRTFFQALMLLFRSATGEAWHNIMLSCLSGKPCDKNSGILTRECGNEFAYFYFVSFIFLCSFLMLNLFVAVIMDNFEYLTRDSSILGPHHLDEYVRVWAEYDPAACGRIHYKDMYSLLRVISPPLGLGKKCPHRVACKRLLRMDLPVADDNTVHFNSTLMALIRTALDIKIAKGGADKQQMDAELRKEMMAIWPNLSQKTLDLLVTPHKSTDLTVGKIYAAMMIMEYYRQSKAKKLQAMREEQDRTPLMFQRMEPPSPTQEGGPGQNALPSTQLDPGGALMAHESGLKESPSWVTQRAQEMFQKTGTWSPEQGPPTDMPNSQPNSQSVEMREMGRDGYSDSEHYLPMEGQGRAASMPRLPAENQRRRGRPRGNNLSTISDTSPMKRSASVLGPKARRLDDYSLERVPPEENQRHHQRRRDRSHRASERSLGRYTDVDTGLGTDLSMTTQSGDLPSKERDQERGRPKDRKHRQHHHHHHHHHHPPPPDKDRYAQERPDHGRARARDQRWSRSPSEGREHMAHRQGSSSVSGSPAPSTSGTSTPRRGRRQLPQTPSTPRPHVSYSPVIRKAGGSGPPQQQQQQQQQQQQQAVARPGRAATSGPRRYPGPTAEPLAGDRPPTGGHSSGRSPRMERRVPGPARSESPRACRHGGARWPASGPHVSEGPPGPRHHGYYRGSDYDEADGPGSGGGEEAMAGAYDAPPPVRHASSGATGRSPRTPRASGPACASPSRHGRRLPNGYYPAHGLARPRGPGSRKGLHEPYSESDDDWC

SEQ ID NO: 23998 - protein, 1191 aa, Homo sapiens
PNPHMSKQDRNQRPSSMVSETSTAGTASTLEAKPGPKIIKSSSKVHSFGKRDQAIRRNPNVPVVVRGWLHKQDSSGMRLWKRRWFVLADYCLFYYKDSREEAVLGSIPLPSYVISPVAPEDRISRKYSFKAVHTGMRALIYNSSTAGSQAEQSGMRTYYFSADTQEDMNAWVRAMNQAAQVLSRSSLKRDMEKVERQAVPQANHTESCHECGRVGPGHTRDCPHRGHDDIVNFERQEQEGEQYRSQRDPLEGKRDRSKARSPYSPAEEDALFMDLPTGPRGQQAQPQRAEKNGMLPASYGPGEQNGTGGYQRAFPPRTNPEKHSQRKSNLAQVEHWARAQKGDSRSLPLDQTLPRQGPGQSLSFPENYQTLPKSTRHPSGGSSPPPRNLPSDYKYAQDRASHLKMSSEERRAHRDGTVWQLYEWQQRQQFRHGSPTAPICLGSPEFTDQGRSRSMLEVPRSISVPPSPSDIPPPGPPRVFPPRRPHTPAERVTVKPPDQRRSVDISLGDSPRRARGHAVKNSSHVDRRSMPSMGYMTHTVSAPSLHGKSLEELSLLLTRLRRHQAKLASVRNFAISQLLQHQLTFPTCQADDTYLQLKKDLEYLDLKMTGRDLLKDRSLKPVKIAESDTDVKLSIFCEQDRVLQDLEDKIRALKENKDQLESVLEVLHRQMEQYRDQPQHLEKIAYQQKLLQEDLVHIRAELSRESTEMENAWNEYLKLENDVEQLKQTLQEQHRRAFFFQPSPPTSPVRTPLEVRLFPQLQTYVPYRPHPPQLRKVTSPLQSPTKAKPKVQEDEAPPRPPLPELYSPEDQPPAVPPLPREATIIRHTSVRGLKRQSDERKRDRELGQCVNGDSRVELRSYVSEPELATLSGDMAQPSLGLVGPESRYQTLPGRGLSGSTSRLQQSSTIAPYVTLRRGLNAESSKATFPRPKSALERLYSGDHQRGKMSAEEQLERMKRHQKALVRERKRTLGQGERTGLPSSRYLSRPLPGDLGSWKREQDFDLQLLERVVQGEKKDKEENGWLKVQAMPVTELDLEPQDYDLDISRELSKPEKVSIPERYVELDPEEPPSLEELQARYRKAEKIRNILARSSMCNLQPTSGQDQNSVADLDLQLQEQERIINISYALASEASQRSKQVAGPVDLSLTLKPRPFVVGSRAHATPACQMGHLVLQELMRSLTHRLIPVCPI

SEQ ID NO: 23999 - protein, 286 aa, Homo sapiens
MAASSSEISEMKGVEESPKVPGEGPGHSEAETGPPQVLAGVPDQPEAPQPGPNTTAAPVDSGPKAGLAPETTETPAGASETAQATDLSLSPGGESKANCSPEDPCQETVSKPEVSKEATADQGSRLESAAPPEPAPEPAPQPDPRPDSQPTPKPALQPELPTQEDPTPEILSESVGEKQENGAVVPLQAGDGEEGPAPEPHSPPSKKSPPANGAPPRVLQQLVEEDRMRRAHSGHPGSPRVPEQPAAGGRGRGPASGPGSQALKHRGAGGGSPHHHRLLRHQLRRV

SEQ ID NO: 24000 - protein, 490 aa, Homo sapiens
MMNIFVGFVIVTFQEQGEKEYKNCELDKNQRQCVEYALKARPLRRYIPKNPYQYKFWYVVNSSPFEYMMFVLIMLNTLCLAMQHYEQSKMFNDAMDILNMVFTGVFTVEMVLKVIAFKPKGYFSDAWNTFDSLIVIGSIIDVALSEADNSEESNRISITFFRLFRVMRLVKLLSRGEGIRTLLWTFIKSFQALPYVALLIAMLFFIYAVIGMQMFGKVAMRDNNQINRNNNFQTFPQAVLLLFRCATGEAWQEIMLACLPGKLCDPESDYNPGEEYTCGSNFAIVYFISFYMLCAFLIINLFVAVIMDNFDYLTRDWSILGPHHLDEFKRIWSEYDPEAKGRIKHLDVVTLLRRIQPPLGFGKLCPHRVACKRLVAMNMPLNSDGTVMFNATLFALVRTALKIKTEGNLEQANEELRAVIKKIWKKTSMKLLDQVVPPAGDDEVTVGKFYATFLIQDYFRKFKKRKEQGLVGKYPAKNTTIALQMLERML

SEQ ID NO: 24001 - protein, 482 aa, Homo sapiens
MSRLLWRKVAGATVGPGPVPAPGRWVSSSVPASDPSDGQRRRQQQQQQQQQQQQQPQQPQVLSSEGGQLRHNPLDIQMLSRGLHEQIFGQGGEMPGEAAVRRSVEHLQKHGLWGQPAVPLPDVELRLPPLYGDNLDQHFRLLAQKQSLPYLEAANLLLQAQLPPKPPAWAWAEGWTRYGPEGEAVPVAIPEERALVFDVEVCLAEGTCPTLAVAISPSAWYSWCSQRLVEERYSWTSQLSPADLIPLEVPTGASSPTQRDWQEQLVVGHNVSFDRAHIREQYLIQGSRMRFLDTMSMHMAISGLSSFQRSLWIAAKQGKHKVQPPTKQGQKSQRKARRGPAISSWDWLDISSVNSLAEVHRLYVGGPPLEKEPRELFVKGTMKDIRENFQDLMQYCAQDVWATHEVFQQQLPLFLERCPHPVTLAGMLEMGVSYLPVNQNWERYLAEAQGTYEELQREMKKSLMDLANDACQLLSGESGLAL

SEQ ID NO: 24002 - protein, 494 aa, Homo sapiens
MVPQDIYSSMPEAQPVETNSPKALLVLGELSNTDNDINESVFIWGISDKAAQRKTISVDEGLFHLQQEKQQQQQQQQRLEPVHRLGRGKGRLRLPHRLLFKDRHFTCSKIIGRRFACFAQRLSHRRKQSQCDLLNESTGQLPTTCSSAASNSINWNCRVKMTQQMQNLHLCQSKKHSAPSSPNAAKRLYRNLSEKLKGSHSSFDEAYFRTRTDRLSLRKTSVNFQGNEAMFEAVEQQDMDAVQILLYQYTPEELDLNTPNSEGLTPLDIAIMTNNVPIARILLRTGARESPHFVSLESRAMHLNTLVQEAQERVSELSAQVENEGFTLDNTEKEKQLKAWEWRYRLYRRMKTGFEHARAPEMPTNVCLMVTSSTSLTVSFQEPLSVNAAVVTRYKVEWSMSEDFSPLAGEIIMDNLQTLRCTITGLTMGQQYFVQVSAYNMKGWGPAQTTTPACASPSNWKDYDDREPRHKGQSEVLEGLLQQVRALHQHYSCR

SEQ ID NO: 24003 - protein, 710 aa, Homo sapiens
MGMACLTMTEMEGTSTSSIYQNGDISGNANSMKQIDPVLQVYLYHSLGKSEADYLTFPSGEYVAEEICIAASKACGITPVYHNMFALMSETERIWYPPNHVFHIDESTRHNVLYRIRFYFPRWYCSGSNRAYRHGISRGAEAPLLDDFVMSYLFAQWRHDFVHGWIKVPVTHETQEECLGMAVLDMMRIAKENDQTPLAIYNSISYKTFLPKCIRAKIQDYHILTRKRIRYRFRRFIQQFSQCKATARNLKLKYLINLETLQSAFYTEKFEVKEPGSGPSGEEIFATIIITGNGGIQWSRGKHKESETLTEQDLQLYCDFPNIIDVSIKQANQEGSNESRVVTIHKQDGKNLEIELSSLREALSFVSLIDGYYRLTADAHHYLCKEVAPPAVLENIQSNCHGPISMDFAISKLKKAGNQTGLYVLRCSPKDFNKYFLTFAVERENVIEYKHCLITKNENEEYNLSGTKKNFSSLKDLLNCYQMETVRSDNIIFQFTKCCPPKPKDKSNLLVFRTNGVSDVPTSPTLQRPTHMNQMVFHKIRNEDLIFNESLGQGTFTKIFKGVRREVGDYGQLHETEVLLKVLDKAHRNYSESFFEAASMMSKLSHKHLVLNYGVCVCGDENILVQEFVKFGSLDTYLKKNKNCINILWKLEVAKQLAWAMHFLEENTLIHGNVCAKNILLIREEDRKTGNPPFIKLSDPGISITVLPKD

SEQ ID NO: 24004 - protein, 7969 aa, Homo sapiens
MDQPQFSGAPRFLTRPKAFVVSVGKDATLSCQIVGNPTPQVSWEKDQQPVAAGARFRLAQDGDLYRLTILDLALGDSGQYVCRARNAIGEAFAAVGLQVDAEAACAEQAPHFLLRPTSIRVREGSEATFRCRVGGSPRPAVSWSKDGRRLGEPDGPRVRVEELGEASALRIRAARPRDGGTYEVRAENPLGAASAAAALVVDSDAADTASRPGTSTAALLAHLQRRREAMRAEGAPASPPSTGTRTCTVTEGKHARLSCYVTGEPKPETVWKKDGQLVTEGRRHVVYEDAQENFVLKILFCKQSDRGLYTCTASNLVGQTYSSVLVVVREPAVPFKKRLQDLEVREKESATFLCEVPQPSTEAAWFKEETRLWASAKYGIEEEGTERRLTVRNVSADDDAVYICETPEGSRTVAELAVQGNLLRKLPRKTAVRVGDTAMFCVELAVPVGPVHWLRNQEEVVAGGRVAISAEGTRHTLTISQCCLEDVGQVAFMAGDCQTSTQFCVSAPRKPPLQPPVDPVVKARMESSVILSWSPPPHGERPVTIDGYLVEKKKLGTYTWIRCHEAEWVATPELTVADVAEEGNFQFRVSALNSFGQSPYLEFPGTVHLAPKLAVRTPLKAVQAVEGGEVTFSVDLTVASAGEWFLDGQALKASSVYEIHCDRTRHTLTIREVPASLHGAQLKFVANGIESSIRMEVRAAPGLTANKPPAAAAREVLARLHEEAQLLAELSDQAAAVTWLKDGRTLSPGPKYEVQASAGRRVLLVRDVARDDAGLYECVSRGGRIAYQLSVQGLARFLHKDMAGSCVDAVAGGPAQFECETSEAHVHVHWYKDGMELGHSGERFLQEDVGTRHRLVAATVTRQDEGTYSCRVGEDSVDFRLRVSEPKVVFAKEQLARRKLQAEAGASATLSCEVAQAQTEVTWYKDGKKLSSSSKVCMEATGCTRRLVVQQAGQADAGEYSCEAGGQRLSFHLDVKEPKVVFAKDQVAHSEVQAEAGASATLSCEVAQAQTEVMWYKDGKKLSSSLKVHVEAKGCRRRLVVQQAGKTDAGDYSCEARGQRVSFRLHITEPKMMFAKEQSVHNEVQAEAGASAMLSCEVAQAQTEVTWYKDGKKLSSSSKVGMEVKGCTRRLVLPQAGKADAGEYSCEAGGQRVSFHLHITEPKGVFAKEQSVHNEVQAEAGTTAMLSCEVAQPQTEVTWYKDGKKLSSSSKVRMEVKGCTRRLVVQQVGKADAGEYSCEAGGQRVSFQLHITEPKAVFAKEQLVHNEVRTEAGASATLSCEVAQAQTEVTWYKDGKKLSSSSKVRIEAAGCMRQLVVQQAGQADAGEYTCEAGGQRLSFHLDVSEPKAVFAKEQLAHRKVQAEAGAIATLSCEVAQAQTEVTWYKDGKKLSSSSKVRMEAVGCTRRLVVQQACQADTGEYSCEAGGQRLSFSLDVAEPKVVFAKEQPVHREVQAQAGASTTLSCEVAQAQTEVMWYKDGKKLSFSSKVRMEAVGCTRRLVVQQAGQAVAGEYSCEAGSQRLSFHLHVAEPKAVFAKEQPASREVQAEAGTSATLSCEVAQAQTEVTWYKDGKKLSSSSKVRMEAVGCTRRLVVQEAGQADAGEYSCKAGDQRLSFHLHVAEPKVVFAKEQPAHREVQAEAGASATLSCEVAQAQTEVTWYKDGKKLSSSSKVRVEAVGCTRRLVVQQAGQAEAGEYSCEAGGQQLSFRLQVAELEPQISERPCRREPLVVKEHEDIILTATLATPSAATVTWLKDGVEIRRSKRHETASQGDTHTLTVHGAQVLDSAIYSCRVGAEGQDFPVQVEEVAAKFCRLLEPVCGELGGTVTLACELSPACAEVVWRCGNTQLRVGKRFQMVAEGPVRSLTVLGLRAEDAGEYVCESRDDHTSAQLTVSVPRVVKFMSGLSTVVAEEGGEATFQCVVSPSDVAVVWFRDGALLQPSEKFAISQSGASHSLTISDLVLEDAGQITVEAEGASSSAALRVREAPVLFKKKLEPQTVEERSSVTLEVELTRPWPELRWTRNATALAPGKNVEIHAEGARHRLVLHNVGFADRGFFGCETPDDKTQAKLTVEMRQVRLVRGLQAVEAREQGTATMEVQLSHADVDGSWTRDGLRFQQGPTCHLAVRGPMHTLTLSGLRPEDSGLMVFKAEGVHTSARLVVTELPVSFSRPLQDVVTTEKEKVTLECELSRPNVDVRWLKDGVELRAGKTMAIAAQGACRSLTIYRCEFADQGVYVCDAHDAQSSASVKVQGRTYTLIYRRVLAEDAGEIQFVAENAESRAQLRVKELPVTLVRPLRDKIAMEKHRGVLECQVSRASAQVRWFKGSQELQPGPKYELVSDGLYRKLIISDVHAEDEDTYTCDAGDVKTSAQFFVEEQSITIVRGLQDVTVMEPAPAWFECETSIPSVRPPKWLLGKTVLQAGGNVGLEQEGTVHRLMLRRTCSTMTGPVHFTVGKSRSSARLVVSDIPVVLTRPLEPKTGRELQSVVLSCDFRPAPKAVQWYKDDTPLSPSEKFKMSLEGQMAELRILRLMPADAGVYRCQAGSAHSSTEVTVEAREVTVTGPLQDAEATEEGWASFSCELSHEDEEVEWSLNGMPLYNDSFHEISHKGRRHTLVLKSIQRADAGIVRASSLKVSTSARLEVRVKPVVFLKALDDLSAEERGTLALQCEVSDPEAHVVWRKDGVQLGPSDKYDFLHTAGTRGLVVHDVSPEDAGLYTCHVGSEETRARVRVHDLHVGITKRLKTMEVLEGESCSFECVLSHESASDPAMWTVGGKTVGSSSRFQATRQGRKYILVVREAAPSDAGEVVFSVRGLTSKASLIVRERPAAIIKPLEDQWVAPGEDVELRCELSRAGTPVHWLKDRKAIRKSQKYDVVCEGTMAMLVIRGASLKDAGEYTCEVEASKSTASLHVEEKANCFTEELTNLQVEEKGTAVFTCKTEHPAATVTWRKGLLELRASGKHQPSQEGLTLRLTISALEKADSDTYTCDIGQAQSRAQLLVQGRRVHIIEDLEDVDVQEGSSATFRCRISPANYEPVHWFLDKTPLHANELNEIDAQPGGYHVLTLRQLALKDSGTIYFEAGDQRASAALRVTEKPSVFSRELTDATITEGEDLTLVCETSTCDIPVCWTKDGKTLRGSARCQLSHEGHRAQLLITGATLQDSGRYKCEAGGACSSSIVRVHARPVRFQEALKDLEVLEGGAATLRCVLSSVAAPVKWCYGNNVLRPGDKYSLRQEGAMLELVVRNLRPQDSGRYSCSFGDQTTSATLTVTALPAQFIGKLRNKEATEGATATLRCELSKAAPVEWRKGSETLRDGDRYCLRQDGAMCELQIRGLAMVDAAEYSCVCGEERTSASLTIRPMPAHFIGRLRHQESIEGATATLRCELSKAAPVEWRKGRESLRDGDRHSLRQDGAVCELQICGLAVADAGEYSCVCGEERTSATLTVKALPAKFTEGLRNEEAVEGATAMLWCELSKVAPVEWRKGPENLRDGDRYILRQEGTRCELQICGLAMADAGEYLCVCGQERTSATLTIRALPARFIEDVKNQEAREGATAVLQCELNSAAPVEWRKGSETLRDGDRYSLRQDGTKCELQIRGLAMADTGEYSCVCGQERTSAMLTVRALPIKFTEGLRNEEATEGATAVLRCELSKMAPVEWWKGHETLRDGDRHSLRQDGARCELQIRGLVAEDAGEYLCMCGKERTSAMLTVRAMPSKFIEGLRNEEATEGDTATLWCELSKAAPVEWRKGHETLRDGDRHSLRQDGSRCELQIRGLAVVDAGEYSCVCGQERTSATLTVRALPARFIEDVKNQEAREGATAVLQCELSKAAPVEWRKGSETLRGGDRYSLRQDGTRCELQIHGLSVADTGEYSCVCGQERTSATLTVRAPQPVFREPLQSLQAEEGSTATLQCELSEPTATVVWSKGGLQLQANGRREPRLQGCTAELVLQDLQREDTGEYTCTCGSQATSATLTVTAAPVRFLRELQHQEVDEGGTAHLCCELSRAGASVEWRKGSLQLFPCAKYQMVQDGAAAELLVRGVEQEDAGDYTCDTGHTQSMASLSVRVPRPKFKTRLQSLEQETGDIARLCCQLSDAESGAVVQWLKEGVELHAGPKYEMRSQGATRELLIHQLEAKDTGEYACVTGGQKTAASLRVTEPEVTIVRGLVDAEVTADEDVEFSCEVSRAGATGVQWCLQGLPLQSNEVTEVAVRDGRIHTLRLKGVTPEDAGTVSFHLGNHASSAQLTVRAPEVTILEPLQDVQLSEGQDASFQCRLSRASGQEARWALGGVPLQANEMNDITVEQGTLHLLTLHKVTLEDAGTVSFHVGTCSSEAQLKVTAKNTVVRGLENVEALEGGEALFECQLSQPEVAAHTWLLDDEPVHTSENAEVVFFENGLRHLLLLKNLRPQDSCRVTFLAGDMVTSAFLTVRGWRLEILEPLKNAAVRAGAQACFTCTLSEAVPVGEASWYINGAAVQPDDSDWTVTADGSHHALLLRSAQPHHAGEVTFACRDAVASARLTVLGLPDPPEDAEVVARSSHTVTLSWAAPMSDGGGGLCGYRVEVKEGATGQWRLCHELVPGPECVVDGLAPGETYRFRVAAVGPVGAGEPVHLPQTVRLAEPPKPVPPQPSAPESRQVAAGEDVSLELEVVAEAGEVIWHKGMERIQPGGRFEVVSQGRQQMLVIKGFTAEDQGEYHCGLAQGSICPAAATFQVALSPASVDEAPQPSLPPEAAQEGDLHLLWEALARKRRMSREPTLDSISELPEEDGRSQRLPQEAEEVAPDLSEGYSTADELARTGDADLSHTSSDDESRAGTPSLVTYLKKAGRPGTSPLASKVGAPAAPSVKPQQQQEPLAAVRPPLGDLSTKDLGDPSMDKAAVKIQAAFKGYKVRKEMKQQEGPMFSHTFGDTEAQVGDALRLECVVASKADVRARWLKDGVELTDGRHHHIDQLGDGTCSLLITGLDRADAGCYTCQVSNKFGQVTHSACVVVSGSESEAESSSGGELDDAFRRAARRLHRLFRTKSPAEVSDEELFLSADEGPAEPEEPADWQTYREDEHFICIRFEALTEARQAVTRFQEMFATLGIGVEIKLVEQGPRRVEMCISKETPAPVVPPEPLPSLLTSDAAPVFLTELQNQEVQDGYPVSFDCVVTGQPMPSVRWFKDGKLLEEDDHYMINEDQQGGHQLIITAVVPADMGVYRCLAENSMGVSSTKAELRVDLTSTDYDTAADATESSSYFSAQGYLSSREQEGTESTTDEGQLPQVVEELRDLQVAPGTRLAKFQLKVKGYPAPRLYWFKDGQPLTASAHIRMTDKKILHTLEIISVTREDSGQYAAYISNAMGAAYSSARLLVRGPDEPEEKPASDVHEQLVPPRMLERFTPKKVKKGSSITFSVKVEGRPVPTVHWLREEAERGVLWIGPDTPGYTVASSAQQHSLVLLDVGRQHQGTYTCIASNAAGQALCSASLHVSGLPKVEEQEKVKEALISTFLQGTTQAISAQGLETASFADLGGQRKEEPLAAKEALGHLSLAEVGTEEFLQKLTSQITEMVSAKITQAKLQVPGGDSDEDSKTPSASPRHGRSRPSSSIQESSSESEDGDARGEIFDIYVVTADYLPLGAEQDAITLREGQYVEVLDAAHPLRWLVRTKPTKSSPSRQGWVSPAYLDRRLKLSPEWGAAEAPEFPGEAVSEDEYKARLSSVIQELLSSEQAFVEELQFLQSHHLQHLERCPHVPIAVAGQKAVIFRNVRDIGRFHSSSFLQELQQCDTDDDVAMCFIKNQAAFEQYLEFLVGRVQAESVVVSTAIQEFYKKYAEEALLAGDPSQPPPPPLQHYLEQPVERVQRYQALLKELIRNKARNRQNCALLEQAYAVVSALPQRAENKLHVSLMENYPGTLQALGEPIRQGHFIVWEGAPGARMPWKGHNRHVFLFRNHLVICKPRRDSRTDTVSYVFRNMMKLSSIDLNDQVEGDDRAFEVWQEREDSVRKYLLQARTAIIKSSWVKEICGIQQRLALPVWRPPDFEEELADCTAELGETVKLACRVTGTPKPVISWYKDGKAVQVDPHHILIEDPDGSCALILDSLTGVDSGQYMCFAASAAGNCSTLGKILVQVPPRFVNKVRASPFVEGEDAQFTCTIEGAPYPQIRWYKDGALLTTGNKFQTLSEPRSGLLVLVIRAASKEDLGLYECELVNRLGSARASAELRIQSPMLQAQEQCHREQLVAAVEDTTLERADQEVTSVLKRLLGPKAPGPSTGDLTGPGPCPRGAPALQETGSQPPVTGTSEAPAVPPRVPQPLLHEGPEQEPEAIARAQEWTVPIRMEGAAWPGAGTGELLWDVHSHVVRETTQRTYTYQAIDTHTARPPSMQVTIEDVQAQTGGTAQFEAIIEGDPQPSVTWYKDSVQLVDSTRLSQQQEGTTYSLVLRHVASKDAGVYTCLAQNTGGQVLCKAELLVLGGDNEPDSEKQSHRRKLHSFYEVKEEIGRGVFGFVKRVQHKGNKILCAAKFIPLRSRTRAQAYRERDILAALSHPLVTGLLDQFETRKTLILILELCSSEELLDRLYRKGVVTEAEVKVYIQQLVEGLHYLHSHGVLHLDIKPSNILMVHPAREDIKICDFGFAQNITPAELQFSQYGSPEFVSPEIIQQNPVSEASDIWAMGVISYLSLTCSSPFAGESDRATLLNVLEGRVSWSSPMAAHLSEDAKDFIKATLQRAPQARPSAAQCLSHPWFLKSMPAEEAHFINTKQLKFLLARSRWQRSLMSYKSILVMRSIPELLRGPPDSPSLGVARHLCRDTGGSSSSSSSSDNELAPFARAKSLPPSPVTHSPLLHPRGFLRPSASLPEEAEASERSTEAPAPPASPEGAGPPAAQGCVPRHSVIRSLFYHQAGESPEHGALAPGSRRHPARRRHLLKGGYIAGALPGLREPLMEHRVLEEEAAREEQATLLAKAPSFETALRLPASGTHLAPGHSHSLEHDSPSTPRPSSEACGEAQRLPSAPSGGAPIRDMGHPQGSKQLPSTGGHPGTAQPERPSPDSPWGQPAPFCHPKQGSAPQEGCSPHPAVAPCPPGSFPPGSCKEAPLVPSSPFLGQPQAPPAPAKASPPLDSKMGPGDISLPGRPKPGPCSSPGSASQASSSQVSSLRVGSSQVGTEPGPSLDAEGWTQEAEDLSDSTPTLQRPQEQATMRKFSLGGRGGYAGVAGYGTFAFGGDAGGMLGQGPMWARIAWAVSQSEEEEQEEARAESQSEEQQEARAESPLPQVSARPVPEVGRAPTRSSPEPTPWEDIGQVSLVQIRDLSGDAEAADTISLDISEVDPAYLNLSDLYDIKYLPFEFMIFRKVPKSAQPEPPSPMAEEELAEFPEPTWPWPGELGPHAGLEITEESEDVDALLAEAAVGRKRKWSSPSRSLFHFPGRHLPLDEPAELGLRERVKASVEHISRILKGRPEGLEKEGPPRKKPGLASFRLSGLKSWDRAPTFLRELSDETVVLGQSVTLACQVSAQPAAQATWSKDGAPLESSSRVLISATLKNFQLLTILVVVAEDLGVYTCSVSNALGTVTTTGVLRKAERPSSSPCPDIGEVYADGVLLVWKPVESYGPVTYIVQCSLEGGSWTTLASDIFDCCYLTSKLSRGGTYTFRTACVSKAGMGPYSSPSEQVLLGGPSHLASEEESQGRSAQPLPSTKTFAFQTQIQRGRFSVVRQCWEKASGRALAAKIIPYHPKDKTAVLREYEALKGLRHPHLAQLHAAYLSPRHLVLILELCSGPELLPCLAERASYSESEVKDYLWQMLSATQYLHNQHILHLDLRSENMIITEYNLLKVVDLGNAQSLSQEKVLPSDKFKDYLETMAPELLEGQGAVPQTDIWAIGVTAFIMLSAEYPVSSEGARDLQRGLRKGLVRLSRCYAGLSGGAVAFLRSTLCAQPWGRPCASSCLQCPWLTEEGPACSRPAPVTFPTARLRVFVRNREKRRALLYKRHNLAQVR

SEQ ID NO: 24005 - protein, 318 aa, Homo sapiens
MAVFVVLLALVAGVLGNEFSILKSPGSVVFRNGNWPIPGERIPDVAALSMGFSVKEDLSWPGLAVGNLFHRPRATVMVMVKGVNKLALPPGSVISYPLENRVYMVGKANSVFEDLSVTLRQLRNRLFQENSVLSSLPLNSLSRNNEVDLLFLSELQVLHDISSLLSRHKHLAKDHSPDLYSLELAGLDEIGKRYGEDSEQFRDASKILVDALQKFADDMYSLYGGNAVVELVTVKSFDTSLIRKTRTILEAKQAKNPASPYNLAYKYNFEYSVVFNMVLWIMIALALAVIITSYNIWNMDPGYDSIIYRMTNQKIRMD

SEQ ID NO: 24006 - protein, 558 aa, Homo sapiens
MAQSVLVPPGPDSFRFFTRESLAAIEQRIAEEKAKRPKQERKDEDDENGPKPNSDLEAGKSLPFIYGDIPPEMVSVPLEDLDPYYINKKTFIVLNKGKAISRFSATPALYILTPFNPIRKLAIKILVHSLFNMLIMCTILTNCVFMTMSNPPDWTKNVEYVTEFVDLGNVSALRTFRVLRALKTISVIPGLKTIVGALIQSVKKLSDVMILTVFCLSVFALIGLQLFMGNLRNKCLQWPPDNSSFEINITSFFNNSLDGNGTTFNRTVSIFNWDEYIEDKSHFYFLEGQNDALLCGNSSDAGQCPEGYICVKAGRNPNYGYTSFDTFSWAFLSLFRLMTQDFWENLYQLTLRAAGKTYMIFFVLVIFLGSFYLINLILAVVAMAYEEQNQATLEEAEQKEAEFQQMLEQLKKQQEEAQAAAAAASAESRDFSGAGGIGVFSESSSVASKLSSKSEKELKNRRKKKKQKEQSGEEEKNDRVRKSESEDSIRRKGFRFSLEGSRLTYEKRFSSPHQVTLMQEVGSLGLQQLHPCHFAGYSFPPDYFHGLALNVCGFSSPY

SEQ ID NO: 24007 - protein, 363 aa, Homo sapiens
MGGCAGSRRRFSDSEGEETVPEPRLPLLDHQGAHWKNAVGFWLLGLCNNFSYVVMLSAAHDILSHKRTSGNQSHVDPGPTPIPHNSSSRFDCNSVSTAAVLLADILPTLVIKLLAPLGLHLLPYSPRVLVSGICAAGSFVLVAFSHSVGTSLCGVVFASISSGLGEVTFLSLTAFYPRAVISWWSSGTGGAGLLGALSYLGLTQAGLSPQQTLLSMLGIPALLLASYFLLLTSPEAQDPGGEEEAESAARQPLIRTEAPESKPGSSSSLSLRERWTVFKGLLWYIVPLVVVYFAEYFINQGLFELLFFWNTSLSHAQQYRWYQMLYQAGVFASRSSLRCCRIRFTWALALLQMESRSVAQAGM

SEQ ID NO: 24008 - protein, 623 aa, Homo sapiens
MEKLRLRSPWVPLCLGQPRVLQGRLARSSPSIWDSALQEQKGELRKRLSYTTHKLEKLETEFDSTRHYLEIELRRAQEELEKVTEKLRRIQSNYMALQRINQELEDKLYRMGQHYEEEKRALSHEIVALNSHLLEAKVTIDKLSEDNELYRKDCNLAAQLLQCSQTYGRVHKVSELPSDFQERVSLHMEKHGCSLPSPLCHPAYADSVPTCVIAKVLEKPDPASLSSRLSDASARDLAFCDGVEKPGPRPPYKGDIYCSDTALYCPEERRRDRRPSVDAPVTDVGFLRAQNSTDSAAEEEEEAEAAAFPAGFQHEAFPSYAGSLPTSSSYSSFSATSEEKEHAQASTLTASQQAIYLNSRDELFDRKPPATTYEGSPRFAKATAAVAAPLEAEVAPGFGRTMSPYPAETFRFPASPGPQQALMPPNLWSLRAKPGTARLPGEDMRGQWRPLSVEDIGAYSYPVSAAGRASPCSFSERYYGGAGGSPGKKADGRASPLYASYKADSFSEGDDLSQGHLAEPCFLRAGGDLSLSPGRSADPLPGYAPSEGGDGDRLGVQLCGTASSPEPEQGSRDSLEPSSMEASPEMHPAARLSPQQAFPRTGGSGLSRKDSLTKAQLYGTLLN

SEQ ID NO: 24009 - protein, 2512 aa, Homo sapiens; identical to SEQ ID NO: 22978

SEQ ID NO: 24010 - protein, 1266 aa, Homo sapiens
MASVKVAVRVRPMNRREKDLEAKFIIQMEKSKTTITNLKIPEGGTGDSGRERTKTFTYDFSFYSADTKSPDYVSQEMVFKTLGTDVVKSAFEGYNACVFAYGQTGSGKSYTMMGNSGDSGLIPRICEGLFSRINETTRWDEASFRTEVSYLEIYNERVRDLLRRKSSKTFNLRVREHPKEGPYVEDLSKHLVQNYGDVEELMDAGNINRTTAATGMNDVSSRSHAIFTIKFTQAKFDSEMPCETVSKIHLVDLAGSERADATGATGVRLKEGGNINKSLVTLGNVISALADLSQDAANTLAKKKQVFVPYRDSVLTWLLKDSLGGNSKTIMIATISPADVNYGETLSTLRYANRAKNIINKPTINEDANVKLIRELRAEIARLKTLLAQGNQIALLDSPTALSMEEKLQQNEARVQELTKEWTNKWNETQNILKEQTLALRKEGIGVVLDSELPHLIGIDDDLLSTGIILYHLKEGQTYVGRDDASTEQDIVLHGLDLESEHCIFENIGGTVTLIPLSGSQCSVNGVQIVEATHLNQGAVILLGRTNMFRFNHPKEAAKLREKRKSGLLSSFSLSMTDLSKSRENLSAVMLYNPGLEFERQQREELEKLESKRKLIEEMEEKQKSDKAELERMQQEVETQRKETEIVQLQIRKQEESLKRRSFHIENKLKDLLAEKEKFEEERLREQQEIELQKKRQEEETFLRVQEELQRLKELNNNEKAEKFQIFQELDQLQKEKDEQYAKLELEKKRLEEQEKEQVMLVAHLEEQLREKQEMIQLLRRGEVQWVEEEKRDLEGIRESLLRVKEARAGGDEDGEELEKAQLRFFEFKRRQLVKLVNLEKDLVQQKDILKKEVQEEQEILECLKCEHDKESRLLEKHDESVTDVTEVPQDFEKIKPVEYRLQYKERQLQYLLQNHLPTLLEEKQRAFEILDRGPLSLDNTLYQVEKEMEEKEEQLAQYQANANQLQKLQATFEFTANIARQEEKVRKKEKEILESREKQQREALERALARLERRHSALQRHSTLGMEIEEQRQKLASLNSGSREQSGLQASLEAEQEALEKDQERINAYIEEEVQRRLQDLHRVISEGCSTSADTMKDNEKLHNGTIQRKLKYERMVSRSLGANPDDLKDPIKISIPRYVLCGQGKDAHFEFEVKITVLDETWTVFRRYSRFREMHKTLKLKYAELAALEFPPKKLFGNKDERVIAERRSHLEKYLRDFFSVMLQSATSPLHINKVGLTLSKHTICEFSPFFKKGVFDYSSHGTG

SEQ ID NO: 24011 - protein, 1081 aa, Homo sapiens
MDDLDALLADLESTTSHISKRPVFLSEETPYSYPTGNHTYQEIAVPPPVPPPPSSEALNGTILDPLDQWQPSSSRFIHQQPQSSSPVYGSSAKTSSVSNPQDSVGSPCSRVGEEEHVYSFPNKQKSAEPSPTVMSTSLGSNLSELDRLLLELNAVQHNPPGFPADEANSSPPLPGALSPLYGVPETNSPLGGKAGPLTKEKPKRNGGRGLEDVRPSVESLLDELESSVPSPVPAITVNQGEMSSPQRVTSTQQQTRISASSATRELDELMASLSDFKTSSSTVALSAPGLSSSAPSSYCSLPPSPPPMPSVFLPPTTIPSPRGQGHTPEFPCTEQSGRGLLPPVAPSWLDLAGLGVMPDTFNSRSPSVEGSLWAVGTESQGRDWRHLPTITSELSGAPRCHTVPCAGSTALQEPGEPQGPPASPSCPEEALAATWEQPWASEVFGPERMPPSGAARSFQEVTEPAVVAVDRQAIFPDTWTLTEEHGLQQERPRPEPGRLGSSSPASVTTEQLGAKMTERGSVARPTQGPETPRSPEGTTEAATQDGKEQPELPCAMAMGTPSTTERISTSGQIRSVIRRSWESGHAHPMSREPSPRRRLDPATLSRTPSQEQLIAELQGRLGIQPEAEEPAEAAGPSAQDWLTEGVIITVQPRGKRAGGQLVEKVVFPPGSPIPLRRTISVLASPSVPLLQHRTDAAASSSSPLPSLLASSPLGPSAYTCGSSGVQSAGEEPHDEGVQGPALPIPAPHTMRSVGCQTDEDPLFPPMQIQGLEQRADGERCWAAGWPRDGGRSSPGGQDEGGFMAQGKTGSSSPPGGPPKPGSQLDSMLGSLQSDLNKLGVATVAKGVCGACKKPIAGQVVTAMGKTWHPEHFVCTHCQEEIGSRNFFERDGQPYCEKDYHNLFSPRCYYCNGPILDKVVTALDRTWHPEHFFCAQCGAFFGPEGFHEKDGKAYCRKDYFDMFAPKCGGCARAILENYISALNTLWHPECFVCRECFTPFVNGSFFEHDGQPYCEVHYHERRGSLCSGCQKPITGRCITAMAKKFHPEHFVCAFCLKQLNKGTFKEQNDKPYCQNCFLKLFC

SEQ ID NO: 24012 - protein, 1903 aa, Homo sapiens
SPMDQMGKMRPQPYGGTNPYSQQQGPPSGPQQGHGYPGQPYGSQTPQRYPMTMQGRAQSAMGGLSYTQQIPPYGQQGPSGYGQQGQTPYYNQQSPHPQQQQPPYSQQPPSQTPHAQPSYQQQPQSQPPQLQSSQPPYSQQPSQPPHQQSPAPYPSQQSTTQQHPQSQPPYSQPQAQSPYQQQQPQQPAPSTLSQQAAYPQPQSQQSQQTAYSQQRFPPPQELSQDSFGSQASSAPSMTSSKGGQEDMNLSLQSRPSSLPDLSGSIDDLPMGTEGALSPGVSTSGISSSQGEQSNPAQSPFSPHTSPHLPGIRGPSPSPVGSPASVAQSRSGPLSPAAVPGNQMPPRPPSGQSDSIMHPSMNQSSIAQDRGYMQRNPQMPQYSSPQPGSALSPRQPSGGQIHTGMGSYQQNSMGSYGPQGGQYGPQGGYPRQPNYNALPNANYPSAGMAGGINPMGAGGQMHGQPGIPPYGTLPPGRMSHASMGNRPYGPNMANMPPQVGSGMCPPPGGMNRKTQETAVAMHVAANSIQNRPPGYPNMNQGGMMGTGPPYGQGINSMAGMINPQGPPYSMGGTMANNSAGMAASPEMMGLGDVKLTPATKMNNKADGTPKTESKSKKSSSSTTTNEKITKLYELGGEPERKMWVDRYLAFTEEKAMGMTNLPAVGRKPLDLYRLYVSVKEIGGLTQVNKNKKWRELATNLNVGTSSSAASSLKKQYIQCLYAFECKIERGEDPPPDIFAAADSKKSQPKIQPPSPAGSGSMQGPQTPQSTSSSMAEGGDLKPPTPASTPHSQIPPLPGMRSNSVGIQDAFNDGSDSTFQKRNSMTPNPGYQPSMNTSDMMGRMSYEPNKDPYGSMRKAPGSDPFMSSGQGPNGGMGDPYSRAAGPGLGNVAMGPRQHYPYGGPYDRVRTEPGIGPEGNMSTGAPQPNLMPSNPDSGMYSPSRYPPQQQQQQQQRHDSYGNQFSTQGTPSGSPFPSQQTTMYQQQQQNYKRPMDGTYGPPAKRHEGEMYSVPYSTGQGQPQQQQLPPAQPQPASQQQAAQPSPQQDVYNQYGNAYPATATAATERRPAGGPQNQFPFQFGRDRVSAPPGTNAQQNMPPQMMGGPIQASAEVAQQGTMWQGRNDMTYNYANRQSTGSAPQGPAYHGVNRTDEMLHTDQRANHEGSWPSHGTRQPPYGPSAPVPPMTRPPPSNYQPPPSMQNHIPQVSSPAPLPRPMENRTSPSKSPFLHSGMKMQKAGPPVPASHIAPAPVQPPMIRRDITFPPGSVEATQPVLKQRRRLTMKDIGTPEAWRVMMSLKSGLLAESTWALDTINILLYDDNSIMTFNLSQLPGLLELLVEYFRRCLIEIFGILKEYEVGDPGQRTLLDPGRFSKVSSPAPMEGGEEEEELLGPKLEEEEEEEVVENDEEIAFSGKDKPASENSEEKLISKFDKLPVKIVQKNDPFVVDCSDKLGRVQEFDSGLLHWRIGGGDTTEHIQTHFESKTELLPSRPHAPCPPAPRKHVTTAEGTPGTTDQEGPPPDGPPEKRITATMDDMLSTRSSTLTEDGAKSSEAIKESSKFPFGISPAQSHRNIKILEDEPHSKDETPLCTLLDWQDSLAKRCVCVSNTIRSLSFVPGNDFEMSKHPGLLLILGKLILLHHKHPERKQAPLTYEKEEEQDQGVSCNKVEWWWDCLEMLRENTLVTLANISGQLDLSPYPESICLPVLDGLLHWAVCPSAEAQDPFSTLGPNAVLSPQRLVLETLSKLSIQDNNVDLILATPPFSRLEKLYSTMVRFLSDRKNPVCREMAVVLLANLAQGDSLAARAIAVQKGSIGNLLGFLEDSLAATQFQQSQASLLHMQNPPFEPTSVDMMRRAARALLALAKVDENHSEFTLYESRLLDISVSPLMNSLVSQVICDVLFLIGQS

SEQ ID NO: 24013 - protein, 909 aa, Homo sapiens
LWIAAKQGKHKVQPPTKQGQKSQRKARRGPAISSWDWLDISSVNSLAEVHRLYVGGPPLEKEPRELFVKGTMKDIRENFQDLMQYCAQDVWATHEVFQQQLPLFLERCPHPVTLAGMLEMGVSYLPVNQNWERYLAEAQGTYEELQREMKKSLMDLANDACQLLSGERYKEDPWLWDLEWDLQEFKQKKAKKVKKEPATASKLPIEGAGAPGDPMDQEDLGPCSEEEEFQQDVMARACLQKLKGTTELLPKRPQHLPGHPGWYRKLCPRLDDPAWTPGPSLLSLQMRVTPKLMALTWDGFPLHYSERHGWGYLVPGRRDNLAKLPTGTTLESAGVVCPYRAIESLYRKHCLEQGKQQLMPQEAGLAEEFLLTDNSAIWQTVEELDYLEVEAEAKMENLRAAVPGQPLALTARGGPKDTQPSYHHGNGPYNDVDIPGCWFFKLPHKDGNSCNVGSPFAKDFLPKMEDGTLQAGPGGASGPRALEINKMISFWRNAHKRISSQMVVWLPRSALPRAVIRHPDYDEEGLYGAILPQVVTAGTITRRAVEPTWLTASNARPDRVGSELKAMVQAPPGYTLVGADVDSQELWIAAVLGDAHFAGMHGCTAFGWMTLQGRKSRGTDLHSKTATTVGISREHAKIFNYGRIYGAGQPFAERLLMQFNHRLTQQEAAEKAQQMYAATKGLRWYRLSDEGEWLVRELNLPVDRTEGGWISLQDLRKVQRETARKSQWKKWEVVAERAWKGGTESEMFNKLESIATSDIPRTPVLGCCISRALEPSAVQEEFMTSRVNWVVQSSAVDYLHLMLVAMKWLFEEFAIDGRFCISIHDEVRYLVREEDRYRAALALQITNLLTSAVDIDRCLRKEVTMDCKTPSNPTGMERRYGIPQGEALDIYQIIELTKGSLEKRSQPGP

SEQ ID NO: 24014 - protein, 301 aa, Homo sapiens
MGFSVKEDLSWPGLAVGNLFHRPRATVMVMVKGVNKLALPPGSVISYPLENAVPFSLDSVANSIHSLFSEETPVVLQLAPSEERVYMVGKANSVFEDLSVTLRQLRNRLFQENSVLSSLPLNSLSRNNEVDLLFLSELQVLHDISSLLSRHKHLAKDHSPDLYSLELAGLDEIGKRYGEDSEQFRDASKILVDALQKFADDMYSLYGGNAVVELVTVKSFDTSLIRKTRTILEAKQAKNPASPYNLAYKYNFEYSVVFNMVLWIMIALALAVIITSYNIWNMDPGYDSIIYRMTNQKIRMD

SEQ ID NO: 24015 - protein, 953 aa, Homo sapiens
DDDDDEAPKRQTRRRAAKNVSYKEDDDFETDSDDLIEMTGEGVDEQQDNSETIEKVLDSRLGKKGATGASTTVYAIEANGDPSGDFDTEKDEGEIQYLIKWKGWSYIHSTWESEESLQQQKVKGLKKLENFKKKEDEIKQWLGKVSPEDVEYFNCQQELASELNKQYQIVERVIAVKTSKSTLGQTDFPAHSRKPAPSNEPEYLCKWMGLPYSECSWEDEALIGKKFQNCIDSFHSRNNSKTIPTRECKALKQRPRFVALKKQPAYLGGENLELRDYQLEGLNWLAHSWCKNNSVILADEMGLGKTIQTISFLSYLFHQHQLYGPFLIVVPLSTLTSWQREFEIWAPEINVVVYIGDLMSRNTIREYEWIHSQTKRLKFNALITTYEILLKDKTVLGSINWAFLGVDEAHRLKNDDSLLYKTLIDFKSNHRLLITGTPLQNSLKELWSLLHFIMPEKFEFWEDFEEDHGKGRENGYQSLHKVLEPFLLRRVKKDVEKSLPAKVEQILRVEMSALQKQYYKWILTRNYKALAKGTRGSTSGFLNIVMELKKCCNHCYLIKPPEENERENGQEILLSLIRSSGKLILLDKLLTRLRERGNRVLIFSQMVRMLDILAEYLTIKHYPFQRLDGSIKGEIRKQALDHFNADGSEDFCFLLSTRAGGLGINLASADTVVIFDSDWNPQNDLQAQARAHRIGQKKQVNIYRLVTKGTVEEEIIERAKKKMVLDHLVIQRMDTTGRTILENNSGRSNSNPFNKEELTAILKFGAEDLFKELEGEESEPQEMDIDEILRLAETRENEVSTSATDELLSQFKVANFATMEDEEELEERPHKDWDEIIPEEQRKKVEEEERQKELEEIYMLPRIRSSTKKAQTNDSDSDTESKRQAQRSSASESETEDSDDDKKPKRRGRPRSVRKDLVEGFTDAEIRSARIESTLFLTICMAHMSSQDMLAST

SEQ ID NO: 24016 - protein, 270 aa, Homo sapiens
MASSTQISNTSVFKLEENPKPALILEEKNEANHLGGQRDSNKQGGSYTQGNPGTFRLQGQPGYFNKLEKPRHFKQGRAGVLNQPGILKNSGKSNQKGNPESSNKQENSGSSSQLGRPGISTQQGNPGSSDQQEKPGSFSQKVMVGSSSQQGKPGSSSQHGNLGSSTQKGNLGSSSLQGHLGLSSHQGKPESSGQQGKPGSSSQQGNLGTSGQQEKPGSSSQQGKPGLSSHQGKPGSSSQQGNLHLSSQQGNQGPSSKQRKPGSSSRQGNL

SEQ ID NO: 24017 - protein, 631 aa, Homo sapiens
MVSNPVHGLPFLPGTSFKDSTKTAFHRSQTLSYRNGYAIVRRPTVGIGGDRLQFNQLSQAELDELASKAPVLTYGQPKQAPPADFIPAHVAFDKKVLKFDAYFQEDVPMSTEEQYRIRQVNIYYYLEDDSMSVIEPVVENSGILQGKLIKRQRLAKNDRGDHYHWKDLNRGINITIYGKTFRVVDCDQFTQVFLESQGIELNPPEKMALDPYTELRKQPLRKYVTPSDFDQLKQFLTFDKQVLRFYAIWDDTDSMYGECRTYIIHYYLMDDTVEIREVHERNDGRDPFPLLMNRQRVPKVLVENAKNFPQCVLEISDQEVLEWYTAKDFIVGKSLTILGRTFFIYDCDPFTRRYYKEKFGITDLPRIDVSKREPPPVKQELPPYNGFGLVEDSAQNCFALIPKAPKKDVIKMLVNDNKVLRYLAVLESPIPEDKDRRFVFSYFLATDMISIFEPPVRNSGIIGGKYLGRTKVVKPYSTVDNPVYYGPSDFFIGAVIEVFGHRFIILDTDEYVLKYMESNAAQYSPEALASIQNHVRKREAPAPEAESKQTEKDPGVQELEALIDTIQKQLKDHSCKDNIREAFQIYDKEASGYVDRDMFFKICESLNVPVDDSLVKERQGLTLLPDWNAVV

SEQ ID NO: 24018 - protein, 351 aa, Homo sapiens
MQRAVSVVARLGFRLQAFPPALCRPLSCAQEVLRRTPLYDFHLAHGGKMVAFAGWSLPVQYRDSHTDSHLHTRQHCSLFDVSHMLQTKILGSDRVKLMESLVVGDIAELRPNQGTLSLFTNEAGGILDDLIVTNTSEGHLYVVSNAGCWEKDLALMQDKVRELQNQGRDVGLEVLDNALLALQGPTAAQVLQAGVADDLRKLPFMTSAVMEVFGVSGCRVTRCGYTGEDGVEISVPVAGAVHLATAILKNPEVKLAGLAARDSLRLEAGLCLYGNDIDEHTTPVEGSLSWTLGTVTSGCPSPSLKKNVAMGYVPCEYSRPGTMLLVEVRRKQQMAVVSKMPFVPTNYYTLK

SEQ ID NO: 24019 - protein, 1106 aa, Homo sapiens
MSDTPSTGFSIIHPTSSEGQVPPPRHLSLTHPVVAKRISFYKSGDPQFGGVRVVVNPRSFKSFDALLDNLSRKVPLPFGVRNISTPRGRHSITRLEELEDGESYLCSHGRKVQPVDLDKARRRPRPWLSSRAISAHSPPHPVAVAAPGMPRPPRSLVVFRNGDPKTRRAVLLSRRVTQSFEAFLQHLTEVMQRPVVKLYATDGRRVPSLQAVILSSGAVVAAGREPFKPGNYDIQKYLLPARLPGISQRVYPKGNAKSESRKSSNWKVFIITSDLPDAGTSSQIYIILYGQHRSSAPIYLYGTDGARFQVGHEDIFTITVGDIGALFKIRIGHTNSGSSPSWHCKEIQLHNMNSGKQFYVPVQRWLARDQEDGEICREFPLLSKGQPVLPVTIYEVNVATGELWNAGTVANVYISIHGEKGDTGSRQLFRSKSSFNFLRGQTDTFFLEAVHLGDLCKIVIGHDGLGPGNGWFLDDVVIKDPTTNYEYAFFCHRWLDQGEDDCKIVRELYARDNSIFSARQKLELKRKETWTAESWKFTKGNTLQFYNKLTGGFVRLHPDGTVDAIGEKTDKYGVFDVIFNKRNICIFQSHEMRHLSLALDNGIVTGMVSGEATTELRVLYQPNRCALLESALVPGHTVVFDRHGKIADASSAGYANLSKEFVIFVKGVFLNSAVVLLATSLCQALCLQPDGSCTGVGSQSEKSYWKVHKISSGICMFESVKNAQMYLRIKDGRCDGTGTGDVDCHFKIKKNLKNASISLESTKSPGLFVGLQSDGQAKPMIYTKDENVCFYPQVIQFGRENPMGMSATPSQEEEKIHESKKQKKIPPESEARSPLPSSTAKEIRHFQSSETLLSEDEWKVLVLTGNTGTQANVTLWVYGDKGVTGPISLRKDSSEQLFLPGHEDEFQVEIRNTGNIYKIRIGHDGTSEQPEWNLQRVTMQHMKSKKILDFAANVWLSRIQADGDVVCELPVVKGGQAIFPLVRYQVDVYTGQLKHAETESEVFLCLFGERGDSGLRQLYKSNMQVKFQRGQIDKFQVAAVSLGKLQKVLLRCEASDKSQYWYCEQVIVREPGTTSESIFTCQRWLPFMSQGIIHSEIELYLQGEDY

SEQ ID NO: 24020 - protein, 1249 aa, Homo sapiens
MRYKKYIGILEAAVGITPLNKRELLPESRRHVNLWQQPGVRSTTLLSSPCEWDWHPGCSSRSKYSRKHRAVPVHGPRCQAPGMEELIWEQYTVTLQKDSKRGFGIAVSGGRDNPHFENGETSIVISDVLPGGPADGLLQENDRVVMVNGTPMEDVLHSFAVQQLRKSGKVAAIVVKRPRKVQVAALQASPPLDQDDRAFEVMDEFDGRSFRSGYSERSRLNSHGGRSRSWEDSPERGRPHERARSRERDLSRDRSRGRSLERGLDQDHARTRDRSRGRSLERGLDHDFGPSRDRDRDRSRGRSIDQDYERAYHRAYDPDYERAYSPEYRRGARHDARSRGPRSRSREHPHSRSPSPEPRGRPGPIGVLLMKSRANEEYGLRLGSQIFVKEMTRTGLATKDGNLHEGDIILKINGTVTENMSLTDARKLIEKSRGKLQLVVLRDSQQTLINIPSLNDSDSEIEDISEIESNRSFSPEERRHQYSDYDYHSSSEKLKERPSSREDTPSRLSRMGATPTPFKSTGDIAGTVVPETNKEPRYQEDPPAPQPKAAPRTFLRPSPEDEAIYGPNTKMVRFKKGDSVGLRLAGGNDVGIFVAGIQEGTSAEQEGLQEGDQILKVNTQDFRGLVREDAVLYLLEIPKGEMVTILAQSRADVYRDILACGRGDSFFIRSHFECEKETPQSLAFTRGEVFRVVDTLYDGKLGNWLAVRIGNELEKGLIPNKSRAEQMASVQNAQRDNAGDRADFWRMRGQRSGVKKNLRKSREDLTAVVSVSTKFPAYERVLLREAGFKRPVVLFGPIADIAMEKLANELPDWFQTAKTEPKDAGSEKSTGVVRLNTVRQIIEQDKHALLDVTPKAVDLLNYTQWFPIVIFFNPDSRQGVKTMRQRLNPTSNKSSRKLFDQANKLKKTCAHLFTATINLNSANDSWFGSLKDTIQHQQGEAVWVSEGKMEGMDDDPEDRMSYLTAMGADYLSCDSRLISDFEDTDGEGGAYTDNELDEPAEEPLVSSITRSSEPVQHEESIRKPSPEPRAQMRRAASSDQLRDNSPPPAFKPEPPKAKTQNKEESYDFSKSYEYKSNPSAVAGNETPGASTKGYPPPVAAKPTFGRSILKPSTPIPPQEGEEVGESSEEQDNAPKSVLGKVKIFEKMDHKARLQRMQELQEAQNARIEIAQKHPDIYAVPIKTHKPDPGTPQHTSSRPPEPQKAPSRPYQDTRGSYGSDAEEEEYRQQLSEHSKRGYYGQSARYRDTEL

SEQ ID NO: 24021 - protein, 2460 aa, Homo sapiens
MARFGDEMPARYGGGGSGAAAGVVVGSGGGRGAGGSRQGGQPGAQRMYKQSMAQRARTMALYNPIPVRQNCLTVNRSLFLFSEDNVDDTEPYFIGIFCFEAGIKIIALGFAFHKGSYLRNGWNVMDFVVVLTGILATVGTEFDLRTLRAVRVLRPLKLVSGIPSLQVVLKSIMKAMIPLLQIGLLLFFAILIFAIIGLEFYMGKFHTTCFEEGTDDIQGESPAPCGTEEPARTCPNGTKCQPYWEGPNNGITQFDNILFAVLTVFQCITMEGWTDLLYNSNDASGNTWNWLYFIPLIIIGSFFMLNLVLGVLSGEFAKERERVENRRAFLKLRRQQQIERELNGYMEWISKAEEVILAEDETDGEQRHPFDGALRRTTIKKSKTDLLNPEEAEDQLADIASVGSPFARASIKSAKLENSTFFHKKERRMRFYIRRMVKTQAFYWTVLSLVALNTLCVAIVHYNQPEWLSDFLYYAEFIFLGLFMSEMFIKMYGLGTRPYFHSSFNCFDCGVIIGSIFEVIWAVIKPGTSFGISVLRALRLLRIFKVTKYWASLRNLVVSLLNSMKSIISLLFLLFLFIVVFALLGMQLFGGQFNFDEGTPPTNFDTFPAAIMTVFQILTGEDWNEVMYDGIKSQGGVQGGMVFSIYFIVLTLFGNYTLLNVFLAIAVDNLANAQELTKDEQEEEEAANQKLALQKAKEVAEVSPLSAANMSIAVKEQQKNQKPAKSVWEQRTSEMRKQNLLASREALYNEMDPDERWKAAYTRHLRPDMKTHLDRPLVVDPQENRNNNTNKSRAAEPTVDQRLGQQRAEDFLRKQARYHDRARDPSGSAGLDARRPWAGSQEAELSREGPYGRESDHHAREGSLEQPGFWEGEAERGKAGDPHRRHVHRQGGSRESRSGSPRTGADGEHRRHRAHRRPGEEGPEDKAERRARHREGSRPARGGEGEGEGPDGGERRRRHRHGAPATYEGDARREDKERRHRRRKENQGSGVPVSGPNLSTTRPIQQDLGRQDPPLAEDIDNMKNNKLATAESAAPHGSLGHAGLPQSPAKMGNSTDPGPMLAIPAMATNPQNAASRRTPNNPGNPSNPGPPKTPENSLIVTNPSGTQTNSAKTARKPDHTTVDIPPACPPPLNHTVVQVNKNANPDPLPKKEEEKKEEEEDDRGEDGPKPMPPYSSMFILSTTNPLRRLCHYILNLRYFEMCILMVIAMSSIALAAEDPVQPNAPRNNVLRYFDYVFTGVFTFEMVIKMIDLGLVLHQGAYFRDLWNILDFIVVSGALVAFAFTGNSKGKDINTIKSLRVLRVLRPLKTIKRLPKLKAVFDCVVNSLKNVFNILIVYMLFMFIFAVVAVQLFKGKFFHCTDESKEFEKDCRGKYLLYEKNEVKARDREWKKYEFHYDNVLWALLTLFTVSTGEGWPQVLKHSVDATFENQGPSPGYRMEMSIFYVVYFVVFPFFFVNIFVALIIITFQEQGDKMMEEYSLEKNERACIDFAISAKPLTRHMPQNKQSFQYRMWQFVVSPPFEYTIMAMIALNTIVLMMKFYGASVAYENALRVFNIVFTSLFSLECVLKVMAFGILNYFRDAWNIFDFVTVLGSITDILVTEFGNNFINLSFLRLFRAARLIKLLRQGYTIRILLWTFVQSFKALPYVCLLIAMLFFIYAIIGMQVFGNIGIDVEDEDSDEDEFQITEHNNFRTFFQALMLLFRSATGEAWHNIMLSCLSGKPCDKNSGILTRECGNEFAYFYFVSFIFLCSFLMLNLFVAVIMDNFEYLTRDSSILGPHHLDEYVRVWAEYDPAACGRIHYKDMYSLLRVISPPLGLGKKCPHRVACKRLLRMDLPVADDNTVHFNSTLMALIRTALDIKIAKGGADKQQMDAELRKEMMAIWPNLSQKTLDLLVTPHKSTDLTVGKIYAAMMIMEYYRQSKAKKLQAMREEQDRTPLMFQRMEPPSPTQEGGPGQNALPSTQLDPGGALMAHESGLKESPSWVTQRAQEMFQKTGTWSPEQGPPTDMPNSQPNSQSVEMREMGRDGYSDSEHYLPMEGQGRAASMPRLPAENQRRRGRPRGNNLSTISDTSPMKRSASVLGPKARRLDDYSLERVPPEENQRHHQRRRDRSHRASERSLGRYTDVDTGLGTDLSMTTQSGDLPSKERDQERGRPKDRKHRQHHHHHHHHHHPPPPDKDRYAQERPDHGRARARDQRWSRSPSEGREHMAHRQGSSSVSGSPAPSTSGTSTPRRGRRQLPQTPSTPRPHVSYSPVIRKAGGSGPPQQQQQQQQQQQQQAVARPGRAATSGPRRYPGPTAEPLAGDRPPTGGHSSGRSPRMERRVPGPARSESPRACRHGGARWPASGPHVSEGPPGPRHHGYYRGSDYDEADGPGSGGGEEAMAGAYDAPPPVRHASSGATGRSPRTPRASGPACASPSRHGRRLPNGYYPAHGLARPRGPGSRKGLHEPYSESDDDWC

SEQ ID NO: 24022 - protein, 305 aa, Homo sapiens
MASNRQRSLRGPSHPSHMEEPFLQMVQASESLPPSQTWAQREFFLPSESWEFPGFTRQAYHQLALKLPPCTDMKSKVRQRLIHPWKGGAQHTWGFHTWLDVCRLPATFPTQPDRPYDSNVWRWLTDSNAHRCPPTEHPIPPPSWMGQNSFLTFIHCYPTFVDMKRKKQVIFRTVKELKEVEKLKLRSEARAPPLDAQGNIQPPASFKKYRHISAGGRFEPQGLQLMPNPFPNNFARSWPCPNPLPHYQEKVLKLALLPSAPLSQDLIRDFQTLIKDRTALPLHHLSKAQASKSPARKRKRRPGHF

SEQ ID NO: 24023 - protein, 1595 aa, Homo sapiens
MTTETGPDSEVKKAQEEAPQQPEAAAAVTTPVTPAGHGHPEANSNEKHPSQQDTRPAEQSLDMEEKDYSEADGLSERTTPSKAQKSPQKIAKKYKSAICRVTLLDASEYECEVEKHGRGQVLFDLVCEHLNLLEKDYFGLTFCDADSQKNWLDPSKEIKKQIRSSPWNFAFTVKFYPPDPAQLTEDITRYYLCLQLRADIITGRLPCSFVTHALLGSYAVQAELGDYDAEEHVGNYVSELRFAPNQTRELEERIMELHKTYRGMTPGEAEIHFLENAKKLSMYGVDLHHAKDSEGIDIMLGVCANGLLIYRDRLRINRFAWPKILKISYKRSNFYIKIRPGEYEQFESTIGFKLPNHRSAKRLWKVCIEHHTFFRLVSPEPPPKGFLVMGSKFRYSGRTQAQTRQASALIDRPAPFFERSSSKRYTMSRSLDGAEFSRPASVSENHDAGPDGDKRDEDGESGGQRSEAEEGEVRTPTKIKELKPEQETTPRHKQEFLDKPEDVLLKHQASINELKRTLKEPNSKLIHRDRDWERERRLPSSPASPSPKGTPEKANESQRTQDISQRDLVPEPGAAAGLEVFTQKSLAASPEGSEHWVFIEREYTRPEELGLLKVTTMQQEERQAGLAGILANGRLSKVDVLVDKFKVEVATEEMVGNRRANTQQQGKMIASPEDFESVGEEGPWIRESPGGAALASGRTLAEKLLEGSELRADTREATIRNRCMSDGQPEGQTELRKGLEEPHTCGRPTAPGTRPAEVDVLSPASDKGGLQSFLLDPAHAEARAELSNETDTSFAERSFYLNYEEKDSEDQVLPPPLEERKGRLDAPPGGEPRPTLNSLDLRVSAAASSRSKDEAHMTSPKEGAGTPKNHGGPGDLKGSPAGQTFAEGWEDAQWGVEGEFPHLTASAAREEGTPVSGDLLGKAEESPTEELKKHPPHRGQGVHPDPQACALPRAIPLNVRKPVKPDRGNFPPKERGVVPTQKGGAELKDREASAFLHMEVIIPLPASPGHSEDLAALEEASPSPTSHGSGEPSELREPFLRHVHLSKASPEPKDQVGFVVSPATGGERRPPPITSRKPRVVPEEAEGRIPLGFGFPSGKRREMTSFQAGDQEGSLEDISKTSVANKIRIFETHGAETRRMSEGEARSLPNDVSSEAPVGQAEQQRSTLSDLGFAQLQPPGDFASPKATHSTVIPLATRHFREDTSASYQEAHTELEPVSPNSGCETTLAEATGTGNKSGDAVREEKRSTNLAANTPGKGGRLRFASPSGPQRAGLREGSEEKVKPPRPRAPESDTGDEDQDQERDTVFLKDNHLAIERKCSSITVSSTSSLEAEVDFTVIGDYHGSAFEDFSRSLPELDRDKSDSDTEGLLFSRDLNKGAPSQDDESGGIEDSPDRGACSTPDMPQFEPVKTETMTVSSLAIRKKIEPEAVLQTRVSAMDNTQVDGSASVGREFIATTPSITTETISTTMENSLKSGKGAAAMIPGPQTVATEIRSLSPIIGKDVLTSTYGATAETLSTSTTTHVTKTVKGGFSETRIEKRIIITGDEDVDQDQALALAIKEAKLQHPDMLVTKAVVYRETDPSPEERDKKPQES

SEQ ID NO: 24024 - protein, 788 aa, Homo sapiens
MLLLLLLLLLLPPLVLRVAASRCLHDETQKSVSLLRPPFSQLPSKSRSSSLTLPSSRDPQPLRIQSCYLGDHISDGAWDPEGEGMRGGSRALAAVREATQRIQAVLAVQGPLLLSRDPAQYCHAVWGDPDSPNYHRCSLLNPGYKGESCLGAKIPDTHLRGYALWPEQGPPQLVQPDGPGVQNTDFLLYVRVAHTSKCHQETVSLCCPGWSTAAQSQLTAALTSWAQRRGFVMLPRLCLKLLGSSNLPTLASQSIRITGPSVIAYAACCQLDSEDRPLAGTIVYCAQHLTSPSLSHSDIVMATLHELLHALGFSGQLFKKWRDCPSGFSVRENCSTRQLVTRQDEWGQLLLTTPAVSLSLAKHLGVSGASLGVPLEEEEGLLSSHWEARLLQGSLMTATFDGAQRTRLDPITLAAFKDSGWYQVNHSAAEELLWGQGSGPEFGLVTTCGTGSSDFFCTGSGLGCHYLHLDKGSCSSDPMLEGCRMYKPLANGSECWKKENGFPAGVDNPHGEIYHPQSRCFFANLTSQLLPGDKPRHPSLTPHLKEAELMGRCYLHQCTGRGAYKVQVEGSPWVPCLPGKVIQIPGYYGLLFCPRGRLCQTNEDINAVTSPPVSLSTPDPLFQLSLELAGPPGHSLGKEQQEGLAEAVLEALASKGGTGRCYFHGPSITTSLVFTVHMWKSPGCQGPSVATLHKALTLTLQKKPLEVYHGGANFTTQPSKLLVTSDHNPSMTHLRLSMGLCLMLLILVGVMGTTAYQKRATLPVRPSASYHSPELHSTRVPVRGIREV

SEQ ID NO: 24025 - protein, 92 aa, Homo sapiens
MAQSVLVPPGPDSFRFFTRESLAAIEQRIAEEKAKRPKQERKDEDDENGPKPNSDLEAGKSLPFIYGDIPPEMVSVPLEDLDPYYINKKVSS

SEQ ID NO: 24026 - protein, 1209 aa, Homo sapiens
MCETQKARKEREVEEKRHWDSSWEYEDYGSVRKRNLTVLDGLYRENDLDPRYWAKGQHQPYRKRDCGYWDFEQSEPSYMDCGEAHESGKGCVYHGGHDGYRSPENVDYESLSPGTKDNSPTRSPDVTSKAGGYGEANGYSDCKNLNYNPEDSKKAEQLTDCRGLDDSSANLGQPQLWYIDHENVNHNLEDCWATNFYCREHSNLYHVPGSYPDGQPVSFSDSNGVNEDKEFIKYHEGDRNVHQNDNMYPKAKTHIMDQGDFDTENKGYDALFANCAYKSRNSRGTDSLHQMENLEYNGTDIPRTKAHGGSRILLDGLQTQCTRGEQGGHHLGIPQSSSLEKNIWHLEEEKKLNGPETWRRNSCLRRTAPSTLRRSEFVQNSKKTQEMTLLSSQSSSLVAPSGSVSAENPEQRMLEKRAKVIEELLQTERDYIRDLEMCIERIMVPMQQAQVPNIDFEGLFGNMQMVIKVSKQLLAALEISDAVGPVFLGHRDELEGTYKIYCQNHDEAIALLEIYEKDEKIQKHLQDSLADLKSLYNEWGCTNYINLGSFLIKPVQRVMRYPLLLMELLNSTPESHPDKVPLTNAVLAVKEINVNINEYKRRKDLVLKYRKGDEDSLMEKISKLNIHSIIKKSNRVSSHLKHLTGFAPQIKDEVFEETEKNFRMQERLIKSFIRDLSLYLQHIRESACVKVVAAVSMWDVCMERGHRDLEQFERVHRYISDQLFTNFKERTERLVISPLNQLLSMFTGPHKLVQKRFDKLLDFYNCTERAEKLKDKKTLEELQSARNNYEALNAQLLDELPKFHQYAQGLFTNCVHGYAEAHCDFVHQALEQLKPLLSLLKVAGREGNLIAIFHEEHSRVLQQLQVFTFFPESLPATKKPFERKTIDRQSARKPLLGLPSYMLQSEELRASLLARYPPEKLFQAERNFNAAQDLDVSLLEGDLVGVIKKKDPMGSQNRWLIDNGVTKGFVYSSFLKPYNPRRSHSDASVGSHSSTESEHGSSSPRFPRQNSGSTLTFNPSSMAVSFTSGSCQKQPQDASPPPKECDQGTLSASLNPSNSESSPSRCPSDPDSTSQPRSGDSADVARDVKQPTATPRSYRNFRHPEIVGYSVPGRNGQSQDLVKGCARTAQAPEDRSTEPDGSEAEGNQVYFAVYTFKARNPNELSVSANQKLKILEFKDVTGNTEWWLAEVNGKKGYVPSNYIRKTEYT

SEQ ID NO: 24027 - protein, 471 aa, Homo sapiens
MKIPNIGNVMNKFEILGVVGEGAYGVVLKCRHKETHEIVAIKKFKDSEENEEVKETTLRELKMLRTLKQENIVELKEAFRRRGKLYLVFEYVEKNMLELLEEMPNGVPPEKVKSYIYQLIKAIHWCHKNDIVHRDIKPENLLISHNDVLKLCDFGFARNLSEGNNANYTEYVATRWYRSPELLLGAPYGKSVDMWSVGCILGELSDGQPLFPGESEIDQLFTIQKVLGPLPSEQMKLFYSNPRFHGLRFPAVNHPQSLERRYLGILNSVLLDLMKNLLKLDPADRYLTEQCLNHPTFQTQRLLDRSPSRSAKRKPYHVESSTLSNRNQAGKSTALQSHHRSNSKDIQNLSVGLPRADEGLPANESFLNGNLAGASLSPLHTKTYQASSQPGSTSKDLTNNNIPHLLSPKEAKSKTEFDFNIDPKPSEGPGTKYLKSNSRSQQNRHSFMESSQSKAGTLQPNEKQSRHSYID

SEQ ID NO: 24028 - protein, 410 aa, Homo sapiens
MAGSADSYTSRPSDSDVSLEEDREAIRQEREQQAAIQLERAKSKPVAFAVKTNVSYCGALDEDVPVPSTAISFDAKDFLHIKEKYNNDWWIGRLVKEGCEIGFIPSPLRLENIRIQQEQKRGRFHGGKSSGNSSSSLGEMVSGTFRATPTSTDGAHSSLRCCTVNASGGVSGAVTERLRAEVQSEIERIFELARSLQLVVLDADTINHPAQLIKTSLAPIIVHVKVSSPKVLQRLIKSRGKSQSKHLNVQLVAADKLAQCPPEMFDVILDENQLEDACEHLGEYLEAYWRATHTTSSTPMTPLLGRNLGSTALSPYPTAISGLQSQRMRHSNHSTENSPIERRSLMTSDENYHNERARKSRNRLSSSSQHSRDHYPLVEEDYPDSYQDTYKPHRNRGSPGGYSHDSRHRL

SEQ ID NO: 24029 - protein, 421 aa, Homo sapiens
MKRTPTAEEREREAKKLRLLEELEDTWLPYLTPKDDEFYQQWQLKYPKLILREASSVSEELHKEVQEAFLTLHKHGCLFRDLVRIQGKDLLTPVSRILIGNPGCTYKYLNTRLFTVPWPVKGSNIKHTEAEIAAACETFLKLNDYLQIETIQALEELAAKEKANEDAVPLCMSADFPRVGMGSSYNGQDEVDIKSRAAYNVTLLNFMDPQKMPYLKEEPYFGMGKMAVSWHHDENLVDRSAVAVYSYSCEGPEEESEDDSHLEGRDPDIWHVGFKISWDIETPGLAIPLHQGDCYFMLDDLNATHQHCVLAGSQPRFSSTHRVAECSTGTLDYILQRCQLALQNVCDDVDNDDVSLKSFEPAVLKQGEEIHNEVEFEWLRQFWFQGNRYRKCTDWWCQPMAQLEALWKKMEGVNLLLVKIL

SEQ ID NO: 24030 - protein, 1094 aa, Homo sapiens
MDPPAGAARRLLCPALLLLLLLLPPPLLPPPPPPANARLAAAADPPGGPLGHGAERILAVPVRTDAQGRLVSHVVSAATSRAGVRARRAAPVRTPSFPGGNEEEPGSHLFYNVTVFGRDLHLRLRPNARLVAPGATMEWQGEKGTTRVEPLLGSCLYVGDVAGLAEASSVALSNCDGLAGLIRMEEEEFFIEPLEKGLAAQEAEQGRVHVVYRRPPTSPPLGGPQALDTGASLDSLDSLSRALGVLEEHANSSRRRARRHAADDDYNIEVLLGVDDSVVQFHGKEHVQKYLLTLMNIVNEIYHDESLGAHINVVLVRIILLSYGKSMSLIEIGNPSQSLENVCRWAYLQQKPDTGHDEYHDHAIFLTRQDFGPSGMQGYAPVTGMCHPVRSCTLNHEDGFSSAFVVAHETGHVLGMEHDGQGNRCGDEVRLGSIMAPLVQAAFHRFHWSRCSQQELSRYLHSYDCLLDDPFAHDWPALPQLPGLHYSMNEQCRFDFGLGYMMCTAFRTFDPCKQLWCSHPDNPYFCKTKKGPPLDGTMCAPGKHCFKGHCIWLTPDILKRDGSWGAWSPFGSCSRTCGTGVKFRTRQCDNPHPANGGRTCSGLAYDFQLCSRQDCPDSLADFREEQCRQWDLYFEHGDAQHHWLPHEHRDAKERCHLYCESRETGEVVSMKRMVHDGTRCSYKDAFSLCVRGDCRKVGCDGVIGSSKQEDKCGVCGGDNSHCKVVKGTFTRSPKKHGYIKMFEIPAGARHLLIQEVDATSHHLAVKNLETGKFILNEENDVDASSKTFIAMGVEWEYRDEDGRETLQTMGPLHGTITVLVIPVGDTRVSLTYKYMIHEDSLNVDDNNVLEEDSVVYEWALKKWSPCSKPCGGGSQFTKYGCRRRLDHKMVHRGFCAALSKPKAIRRACNPQECSQPVWVTGEWEPCSQTCGRTGMQVRSVRCIQPLHDNTTRSVHAKHCNDARPESRRACSRELCPGRWRAGPWSQCSVTCGNGTQERPVLCRTADDSFGICQEERPETARTCRLGPCPRNISDPSKKSYVVQWLSRPDPDSPIRKISSSNRPVYNSASALQCMPCALWSLPWAPLLSVYGKLP

SEQ ID NO: 24031 - protein, 694 aa, Homo sapiens
MVEKGSDHSSDKSPSTPEQGVQRSCSSQSGRSGGKNSKKSQSWYNVLSPTYKQRNEDFRKLFKQLPDTERLIVDYSCALQRDILLQGRLYLSENWICFYSNIFRWETLLTVRLKDICSMTKEKTARLIPNAIQVCTDSEKHFFTSFGARDRTYMMMFRLWQNALLEKPLCPKELWHFVHQCYGNELGLTSDDEDYVPPDDDFNTMGYCEEIPVEENEVNDSSSKSSIETKPDASPQLPKKSITNSTLTSTGSSEAPVSFDGLPLEEEALEGDGSLEKELAIDNIMGEKIEMIAPVNSPSLDFNDNEDIPTELSDSSDTHDEGEVQAFYEDLSGRQYVNEVFNFSVDKLYDLLFTNSPFQRDFMEQRRFSDIIFHPWKKEENGNQSRVILYTITLTNPLAPKTATVRETQTMYKASQESECYVIDAEVLTHDVPYHDYFYTINRYTLTRVARNKSRLRVSTELRYRKQPWGLVKTFIEKNFWSGLEDYFRHLESELAKTESTYLAEMHRQSPKEKASKTTTVRRRKRPHAHLRVPHLEEVMSPVTTPTDEDVGHRIKHVAGSTQTRHIPEDTPNGFHLQSVSKLLLVISCVLVLLVILNMMLFYKLWMLEYTTQTLTAWQGLRLQERLPQSQTEWAQLLESQQKYHDTELQKWREIIKSSVMLLDQMKDSLINLQNGIRSRDYTSESEEKRNRYH

SEQ ID NO: 24032 - protein, 864 aa, Homo sapiens
MAFFRNFQQNLPSVSSLVDTISSAVEDLTTAVGEVSYALTDSVAEQVTSMMSGFRPEEESSVAEEAVDTSKQKNAGLTEVSKNTNCQKTQANLEHRAKQINTCKTSLKQDQGIHEERVFKHVNDRQQTLSEYQDTGNTGDSSLKGYMNNGGISVIRQNTRAGSICQELESTDRCKTIGVGISNNGKNDLKEVGYQEMKGNQKNANGINKLYEQKKYVGTDNCKKEEYSKSRHVYLGRDQENMGHFNKCKHLPDLGHSDHLKKAEKCVKSKASKGNECSGNECSLKDILTSNRHMTQKSIIKEDIHPAPSTNSKDKLSGKIEEQINSTKYCKVNEDIKPKKTEAISAKKGTAKSKDEKYSKIIPEKDNSYMDKDEHGSSSESEDEALGKYHEALSRTHNSRLPLADSRQRNYAWETRQKYSPLSAEYDGYSSEASIDEGNCIQRMRRTPPLDELQPPPYQDDSGSPHLSCTPSEIGDSKCEFSHCSNSPRCSYNKCPSEGSTGHEIESFHNKGYEEDVPSDSTAVLSPEDMSAQGSSSQLPKPFDPEPEAKYGTLDVTFDYDSQEQKLLVTVTAVTDIPTYNRTGGNSWQVHLVLLPIKKQRAKTSIQRGPCPVFTETFKFNHVESEMIGNYAVRFRLYGVHRMKKEKIVGEKIFYLTKLNLQGKMSLPVILEPSYNHSGCDSQMSVSEMSCSESTSSCQSLEHGSVPEILIGLLYNATTGRLSAEVIKGSHFKNLAANRPPNGLFCCLKHLIGGQVYIIRDTYVKLTLLNSMGQEMSKCKTSIRRGQPNPVYKETFVFQVALFQLSDVTLILSVYNKRSMKRKEMIGWISLGLNSSGEEELNHWTEMKESKGQQVCRWHALLES

SEQ ID NO: 24033 - protein, 817 aa, Homo sapiens
MPAATPAPQPPPPPARPAPACPARPAPGQQGLCDHSLKYLSSRITERKLQGSWLPASRGNLEKPFLGPRGPVVPLFCPRNGLHSAHPENSPLKPRVVTVVKLGGQRPRKITLLLNRRSVQTFEQLLADISEALGSPRWKNDRVRKLFNLKGREIRSVSDFFREGDAFIAMGKEPLTLKSIQVAVEELYPNKARALTLAQHSRAPSPRLRSRLFSKALKGDHRCGETETPKSCSEVAGCKAAMRHQGKIPEELSLDDRARTQKKWGRGKWEPEPSSKPPREATLEERHARGEKHLGVEIEKTSGEIIRCEKCKRERELQQSLERERLSLGTSELDMGKGPMYDVEKLVRTRSCRRSPEANPASGEEGWKGDSHRSSPRNPTQELRRPSKSMDKKEDRGPEDQESHAQGAAKAKKDLVEVLPVTEEGLREVKKDTRPMSRSKHGGWLLREHQAGFEKLRRTRGEEKEAEKEKKPCMSGGRRMTLRDDQPAKLEKEPKTRPEENKPERPSGRKPRPMGIIAANVEKHYETGRVIGDGNFAVVKECRHRETRQAYAMKIIDKSRLKGKEDMVDSEILIIQSLSHPNIVKLHEVYETDMEIYLILEYVQGGDLFDAIIESVKFPEPDAALMIMDLCKALVHMHDKSIVHRDLKPENLLVQRNEDKSTTLKLADFGLAKHVVRPIFTVCGTPTYVAPEILSEKGYGLEVDMWAAGVILYILLCGFPPFRSPERDQDELFNIIQLGHFEFLPPYWDNISDAAKDLVSRLLVVDPKKRYTAHQVLQHPWIETAGKTNTVKRQKQVSPSSEGHFRSQHKRVVEQVS

SEQ ID NO: 24034 - protein, 323 aa, Homo sapiens
MDVVARGTTTRRSRLKRSDGSTTSTSFILRQGSADSYTSRPSDSDVSLEEDREAIRQEREQQAAIQLERAKSKPVAFAVKTNVSYCGALDEDVPVPSTAISFDAKDFLHIKEKYNNDWWIGRLVKEGCEIGFIPSPLRLENIRIQQEQKRGRFHGGKSSGNSSSSLGEMVSGTFRATPTSTAKQKQKVTEHIPPYDVVPSMRPVVLVGPSLKGYEVQISSVTLQFLIEHPGDSHVDACSSRVCFHVGPDGSQCSAWEGRGYRVGLMRPSALSFLSCTLLIFYVLHCLEIPPSKYSQWEDLVKDLLYIKCKEKDFICLDHSHYY

SEQ ID NO: 24035 - protein, 2261 aa, Homo sapiens
MARFGDEMPARYGGGGSGAAAGVVVGSGGGRGAGGSRQGGQPGAQRMYKQSMAQRARTMALYNPIPVRQNCLTVNRSLFLFSEDNVVRKYAKKITEWPPFEYMILATIIANCIVLALEQHLPDDDKTPMSERLDDTEPYFIGIFCFEAGIKIIALGFAFHKGSYLRNGWNVMDFVVVLTGILATVGTEFDLRTLRAVRVLRPLKLVSGIPSLQVVLKSIMKAMIPLLQIGLLLFFAILIFAIIGLEFYMGKFHTTCFEEGTDDIQGESPAPCGTEEPARTCPNGTKCQPYWEGPNNGITQFDNILFAVLTVFQCITMEGWTDLLYNSNDASGNTWNWLYFIPLIIIGSFFMLNLVLGVLSGEFAKERERVENRRAFLKLRRQQQIERELNGYMEWISKAEEVILAEDETDGEQRHPFDGALRRTTIKKSKTDLLNPEEAEDQLADIASVGSPFARASIKSAKLENSTFFHKKERRMRFYIRRMVKTQAFYWTVLSLVALNTLCVAIVHYNQPEWLSDFLYYAEFIFLGLFMSEMFIKMYGLGTRPYFHSSFNCFDCGVIIGSIFEVIWAVIKPGTSFGISVLRALRLLRIFKVTKYWASLRNLVVSLLNSMKSIISLLFLLFLFIVVFALLGMQLFGGQFNFDEGTPPTNFDTFPAAIMTVFQILTGEDWNEVMYDGIKSQGGVQGGMVFSIYFIVLTLFGNYTLLNVFLAIAVDNLANAQELTKDEQEEEEAANQKLALQKAKEVAEVSPLSAANMSIAVKEQQKNQKPAKSVWEQRTSEMRKQNLLASREALYNEMDPDERWKAAYTRHLRPDMKTHLDRPLVVDPQENRNNNTNKSRAAEPTVDQRLGQQRAEDFLRKQARYHDRARDPSGSAGLDARRPWAGSQEAELSREGPYGRESDHHAREGSLEQPGFWEGEAERGKAGDPHRRHVHRQGGSRESRSGSPRTGADGEHRRHRAHRRPGEEGPEDKAERRARHREGSRPARGGEGEGEGPDGGERRRRHRHGAPATYEGDARREDKERRHRRRKENQGSGVPVSGPNLSTTRPIQQDLGRQDPPLAEDIDNMKNNKLATAESAAPHGSLGHAGLPQSPAKMGNSTDPGPMLAIPAMATNPQNAASRRTPNNPGNPSNPGPPKTPENSLIVTNPSGTQTNSAKTARKPDHTTVDIPPACPPPLNHTVVQVNKNANPDPLPKKEEEKKEEEEDDRGEDGPKPMPPYSSMFILSTTNPLRRLCHYILNLRYFEMCILMVIAMSSIALAAEDPVQPNAPRNNVLRYFDYVFTGVFTFEMVIKMIDLGLVLHQGAYFRDLWNILDFIVVSGALVAFAFTGNSKGKDINTIKSLRVLRVLRPLKTIKRLPKLKAVFDCVVNSLKNVFNILIVYMLFMFIFAVVAVQLFKGKFFHCTDESKEFEKDCRGKYLLYEKNEVKARDREWKKYEFHYDNVLWALLTLFTVSTGEGWPQVLKHSVDATFENQGPSPGYRMEMSIFYVVYFVVFPFFFVNIFVALIIITFQEQGDKMMEEYSLEKNERACIDFAISAKPLTRHMPQNKQSFQYRMWQFVVSPPFEYTIMAMIALNTIVLMMKFYGASVAYENALRVFNIVFTSLFSLECVLKVMAFGILNYFRDAWNIFDFVTVLGSITDILVTEFGNNFINLSFLRLFRAARLIKLLRQGYTIRILLWTFVQSFKALPYVCLLIAMLFFIYAIIGMQVFGNIGIDVEDEDSDEDEFQITEHNNFRTFFQALMLLFRSATGEAWHNIMLSCLSGKPCDKNSGILTRECGNEFAYFYFVSFIFLCSFLMLNLFVAVIMDNFEYLTRDSSILGPHHLDEYVRVWAEYDPAACGRIHYKDMYSLLRVISPPLGLGKKCPHRVACKRLLRMDLPVADDNTVHFNSTLMALIRTALDIKIAKGGADKQQMDAELRKEMMAIWPNLSQKTLDLLVTPHKSTDLTVGKIYAAMMIMEYYRQSKAKKLQAMREEQDRTPLMFQRMEPPSPTQEGGPGQNALPSTQLDPGGALMAHESGLKESPSWVTQRAQEMFQKTGTWSPEQGPPTDMPNSQPNSQSVEMREMGRDGYSDSEHYLPMEGQGRAASMPRLPAENQRRRGRPRGNNLSTISDTSPMKRSASVLGPKARRLDDYSLERVPPEENQRHHQRRRDRSHRASERSLGRYTDVDTGLGTDLSMTTQSGDLPSKERDQERGRPKDRKHRQHHHHHHHHHHPPPPDKDRYAQERPDHGRARARDQRWSRSPSEGREHMAHRQ

SEQ ID NO: 24036 - protein, 273 aa, Homo sapiens
MVMVKGVNKLALPPGSVISYPLENAVPFSLDSVANSIHSLFSEETPVVLQLAPSEERVYMVGKANSVFEDLSVTLRQLRNRLFQENSVLSSLPLNSLSRNNEVDLLFLSELQVLHDISSLLSRHKHLAKDHSPDLYSLELAGLDEIGKRYGEDSEQFRDASKILVDALQKFADDMYSLYGGNAVVELVTVKSFDTSLIRKTRTILEAKQANPASPYNLAYKYNFEYSVVFNMVLWIMIALALAVIITSYNIWNMDPGYDSIIYRMTNQKIRMD

SEQ ID NO: 24037 - protein, 474 aa, Homo sapiens
MSTEEQYRIRQVNIYYYLEDDSMSVIEPVVENSGILQGKLIKRQRLAKNDRGDHYHWKDLNRGINITIYGKTFRVVDCDQFTQVFLESQGIELNPPEKMALDPYTELRKQPLRKYVTPSDFDQLKQFLTFDKQVLRFYAIWDDTDSMYGECRTYIIHYYLMDDTVEIREVHERNDGRDPFPLLMNRQRVPKVLVENAKNFPQCVLEISDQEVLEWYTAKDFIVGKSLTILGRTFFIYDCDPFTRRYYKEKFGITDLPRIDVSKREPPPVKQELPPYNGFGLVEDSAQNCFALIPKAPKKDVIKMLVNDNKVLRYLAVLESPIPEDKDRRFVFSYFLATDMISIFEPPVRNSGIIGGKYLGRTKVVKPYSTVDNPVYYGPSDFFIGAVIEVFGHRFIILDTDEYVLKYMESNAAQYSPEALASIQNHVRKREAPAPEAERFAFTSFHWLHIQILLKGSCVDIPTVSFLFYNSIYI

SEQ ID NO: 24038 - protein, 1944 aa, Homo sapiens
MEEKKKKKQEEKKKKEGAQKKAADQKTKVPEPTKTCSSQPQPAGTSTSTSTSTISSSNNGKRASASGQQPAASRYLPREVPPRFRQQEQKQLLKRGQPLPTGTLTSVSPTQGAGPAGVSPPPLPGAGTQHHPSKLQPDLSHSGLADHYENSHWGQQPTYRSEANCSWDKVIIDRTDKEAWPSITGTETESASECTTDTDSASNCGSENSSMATGSAQGNFTGHTKKTNGNNGTNGALVQSPSNQSALGAGGANSNGSAARVWGVATGSSSGLAHCSVSGGDGKMDTMIGDGRSQNCWGASNSNAGINLNLNPNANPAAWPVLGHEGTVATGNPSSICSPVSAIGQNMGNQNGNPTGTLGAWGNLLPQESTEPQTSTSQNVSFSAQPQNLNTDGPNNTNPMNSSPNPINAMQTNGLPNWGMAVGMGAIIPPHLQGLPGANGSSVSQVSGGSAEGISNSVWGLSPGNPATGNSNSGFSQGNGDTVNSALSAKQNGSSSAVQKEGSGGNAWDSGPPAGPGILAWGRGSGNNGVGNIHSGAWGHPSRSTSNGVNGEWGKPPNQHSNSDINGKGSTGWESPSVTSQNPTVQPGGEHMNSWAKAASSGTTASEGSSDGSGNHNEGSTGREGTGEGRRRDKGIIDQGHIQLPRNDLDPRVLSNTGWGQTPVKQNTAWEFEESPRSERKNDNGTEAWGCAATQASNSGGKNDGSIMNSTNTSSVSGWVNAPPAAVPANTGWGDSNNKAPSGPGVWGDSISSTAVSTAAAAKSGHAWSGAANQEDKSPTWGEPPKPKSQHWGDGQRSNPAWSAGGGDWADSSSVLGHLGDGKKNGSGWDADSNRSGSGWNDTTRSGNSGWGNSTNTKANPGTNWGETLKPGPQQNWASKPQDNNVSNWGGAASVKQTGTGWIGGPVPVKQKDSSEATGWEEPSPPSIRRKMEIDDGTSAWGDPSNYNNKTVNMWDRNNPVIQSSTTTNTTTTTTTTTSNTTHRVETPPPHQAGTQLNRSPLLGPVSSGWGEMPNVHSKTENSWGEPSSPSTLVDNGTAAWGKPPSSGSGWGDHPAEPPVAFGRAGAPVAASALCKPASKSMQEGWGSGGDEMNLSTSQWEDEEGDVWNNAASQESTSSCSSWGNAPKKGLQKGMKTSGKQDEAWIMSRLIKQLTDMGFPREPAEEALKSNNMNLDQAMSALLEKKVDVDKRGLGVTDHNGMAAKPLGCRPPISKESSVDRPTFLDKLTLSFSNQDGGLVEEPTPSPFLPSPSLKLPLSHSALPSQALGGIASGLGMQNLNSSRQIPSGNLGMFGNSGAAQARTMQQPPQPPVQPLNSSQPSLRAQVPQFLSPQVQAQLLQFAAKNIGLNPALLTSPINPQHMTMLNQLYQLQLAYQRLQIQQQMLQAQRNVSGSMRQQEQQVARTITNLQQQIQQHQRQLAQALLVKQPPPPPPPPHLSLHPSAGKSAMDSFPSHPQTPGLPDLQTKEQQSSPNTFAPYPLAGLNPNMNVNSMDMTGGLSVKDPSQSQSRLPQWTHPNSMDNLPSAASPLEQNPSKHGAIPGGLSIGPPGKSSIDDSYGRYDLIQNSESPASPPVAVPHSWSRAKSDSDKISNGSSINWPPEFHPGVPWKGLQNIDPENDPDVTPGSVPTGPTINTTIQDVNRYLLKSGGSSPPSSQNATLPSSSAWPLSASGYSSSFSSIASAPSVAGKLSDIKSTWSSGPTSHTQASLSHELWKVPRNSTAPTRPPPGLTNPKPSSTWGASPLGWTSSYSSGSAWSTDTSGRTSSWLVLRNLTPQIDGSTLRTLCLQHGPLITFHLNLTQGNAVVRYSSKEEAAKAQKSLHMCVLGNTTILAEFAGEEEVNRFLAQGQALPPTSSWQSSSASSQPRLSAAGSSHGLVRSDAGHWNAPCLGGKGSSELLWGGVPQYSSSLWGPPSADDSRVIGSPTPLTTLLPGDLLSGESL

SEQ ID NO: 24039 - protein, 481 aa, Homo sapiens
MKRTPTAEEREREAKKLRLLEELEDTWLPYLTPKDDEFYQQWQLKYPKLILREASSVSEELHKEVQEAFLTLHKHGCLFRDLVRIQGKDLLTPVSRILIGNPGCTYKYLNTRLFTVPWPVKGSNIKHTEAEIAAACETFLKLNDYLQIETIQALEELAAKEKANEDAVPLCMSADFPRVGMGSSYNGQDEVDIKSRAAYNVTLLNFMDPQKMPYLKEEPYFGMGKMAVSWHHDENLVDRSAVAVYSYSCEGPEEESEDDSHLEGRDPDIWHVGFKISWDIETPGLAIPLHQGDCYFMLDDLNATHQHCVLAGSQPRFSSTHRVAECSTGTLDYILQRCQLALQNVCDDVDNDDVSLKSFEPAVLKQGEEIHNEVEFEWLRQFWFQGNRYRKCTDWWCQPMAQLEALWKKMEGVTNAVLHEVKREGLPVEQRNEILTAILASLTARQNLRREWHARKMDQFTDSSRENASPISSLAAWNITV

SEQ ID NO: 24040 - protein, 263 aa, Homo sapiens
TLDNRVADQLWVPDTYFLNDKKSFVHGVTVKNRMIRLHPDGTVLYGLRITTTAACMMDLRRYPLDEQNCTLEIESYGYTTDDIEFYWRGGDKAVTGVERIELPQFSIVEHRLVSRNVVFATGAYPRLSLSFRLKRNIGYFILQTYMPSILITILSWVSFWINYDASAARVALGITTVLTMTTINTHLRETLPKIPYVKAIDMYLMGCFVFVFLALLEYAFVNYIFFGRGPQRQKKLAEKTAKAKNDRSKSESNRENDFTFLIS

SEQ ID NO: 24041 - protein, 259 aa, Homo sapiens
MDDLCEANGTFAISLFKILGEEDNSRNVFFSPMSISSALAMVFMGAKGSTAAQMSQALCLYKDGDIHRGFQSLLSEVNRTGTQYLLRTANRLFGEKTCDFLPDFKEYCQKFYQAELEELSFAEDTEECRKHINDWVAEKTEGKISEVLDAGTVDPLTKLVLVNAIYFKGKWNEQFDRKYTRGMLFKTNEEKKTVQMMFKEAKFKMGYADEVHTQVLELPYVEEELSMVILLPDDNTDLAVDTLRSTSFFCDILANIIST

SEQ ID NO: 24042 - protein, 1454 aa, Homo sapiens
MASPRKVTEKRHNPVESICRKIRAIHKREAISNPIQQIIKYQSSSFDSPQTNTKKYFEEVLRKMTAACVPTPGSHWSSSEEVDAFISSPQIISPRTPSTSHLSSPETATYSVILTSSENVSKPKSQSNKNYTSLMSQIRKAEFFSNKDLNNYCSENNFSTLTLDFDSTFVQSLKCFDPQDSVVKKLSLNEDGWKQEADDGKEDVIYSINRACKEEALTSIFNACDIKRKELICSSFSKGSVGVAKIINFLRQTTSQNSEDSGLEQLWNMLDPEKRDPHVDLETFQAMMKDWMAYCGNTWEGVNHRLSSIIDDSVCEQDGIKSDGTMKMSTDITDSTLGSFEALGGETSKGVLEVSDLIAYVADLHFNKRKLEEENNKFKLALETLEETNSQLSEDCTELRLQVKSAHQAIMRTNLLKEELEELKLSMNASEEQKSMIVAQSKQLETENRALILKIRILQEENFKNIMDIDRLEKKIEDLSKTETEHQMQLHTYENTLLNKDTSLQKKGLYIEELKSTIIEYGSIIENLRGEKSKLAHELQHLQQALITNGIQLNVNGECNSIISEGEKSLHYELTLAQSAENTETERQHNVINLSSLDAMMDQEMLLLLREPAQKAVEFTATLQKLHEEISKIATLIENSRRWVTNPEITVKEKWEEQLTEFNNIMEEKLDLCILMLNILGNHKESLDKEFAKLIEILKRFRQEYFYFRKEFLASQKQLEAIKQLQEDAVNQEGILRKRLQETSQRLEDVEEQGKDRDREAHTASEKATSLLHKLEEAISEQRNLQTINTELSNTCQALQQKTRKLKTTIESLQKEFIEGEHHGLLFQSFLDEEFPHYDSLSCADAIQQPLQEKLQCCHKLYGGQEARIHQTPLTLKHTCWYTPLLDALSLDSFTAVPTLESTPFSGVANQIHTLCERPTYGEVKDGALDVKRQHKCPGPTSGPSPGTNLSGCIRMNDDPSMEENGVERVCPESLLQSREYSSLPLPRHTSSTDGTITSSDPGLEILNMASCDLDRNSLCKKEEDTRSASPTIEAQGTSPAHDNIAFQDSTSKDKTILNLEAKEEPETIEEHKKEHASGDSVVSPLPVTTVKSVNLRQSENTSANEKEVEAEFLRLSLGFKCDWFTLEKRVKLEERSRDLAEENLKKEITNCLKLLESLTPLCEDDNQAQEIIKKLEKSIKFLSQCAARVASRAEMLGAINQESRVSKAVEVMIQHVENLKRMYAKEHAELEELKQVLLQNERSFNPLEDDDDCQIKKRSASLNSKPSSLRRVTIASLPRNIGNAGMVAGMENNDRFSRRSSSWRILGSKQSEHRPSLPRFISTYSWADAEEEKCELKTKDDSEPSGEETVERTRKPSLSEKKNNPSKWDVSSVYDTIASWATNLKSSIRKANKALWLSIAFIVLFAALMSFLTGQLFQKSVDAAPTQQEDSWTSLEHILWPFTRLRHNGPPPV

SEQ ID NO: 24043 - protein, 540 aa, Homo sapiens
MLAEWGACLLLAVALLGPGLQAQAMEGVKCGGVLSAPSGNFSSPNFPRLYPYNTECSWLIVVAEGSSVLLTFHAFDLEYHDTCSFDFLEIYNGASPDKGNLLGRFCGKVPPPPFTSSWHVMSVIFHSDKHVASHGFSAGYQKDVCGGVLTGLSGVLTSPEYPNNYPNSMECHWVIRAAGPAHVKLVFVDFQVEGNEECTYDYVAVLGGPGPTRGHHYCGSTRPPTLVSLGHELQVVFKSDFNIGGRGFKAYYFSGECQEVYMAMRGNFSSPQYPSSYPNNIRCHWTIRLPPGYQVKVFFLDLDLEEPNSLTKTCDFDHLAAFDGASEEAPLLGNWCGHHLPPPVTSSHNQLLLLLHTDRSTTRRGFSVAYIGVVPMNVSCSRTDFQILISTQALAPLERTKVYLGSRSCAAQEVGGNLRIQARFDTCGTESQRRNNTSVIVSVLYIDFSAAGREDIHEYEVRCEPRRKEASVHLLSGSHWLGPYAATAEHLQEAPPMDEAEALEGPVSMVAQDTSDIVFLGLCILAGILMVIAIVVLMLL

SEQ ID NO: 24044 - protein, 981 aa, Homo sapiens
MAADEGSAEKQAGEAHMAADGETNGSCENSDASSHANAAKHTQDSARVNPQDGTNTLTRIAENGVSERDSEAAKQNHVTADDFVQTSVIGSNGYILNKPALQAQPLRTTSTLASSLPGHAAKTLPGGAGKGRTPSAFPQTPAAPPATLGEGSADTEDRKLPAPGADVKVHRARKTMPKSVVGLHAASKDPREVREARDHKEPKEEINKNISDFGRQQLLPPFPSLHQSLPQNQCYMATTKSQTAAAVSRKKKRRMGTYSLVPKKKTKVLKQRTVIEMFKSITHSTVGSKGEKDLGASSLHVNGESLEMDSDEDDSEELEEDDGHGAEQAAAFPTEDSRTSKESMSEADRAQKMDGESEEEQESVDTGEEEEGGDESDLSSESSIKKKFLKRKGKTDSPWIKPARKRRRRSRKKPSGALGSESYKSSAGSAEQTAPGDSTGYMEVSLDSLDLRVKGILSSQAEGLANGPDVLETDGLQEVPLCSCRMETPKSREITTLANNQCMATESVDHELGRCTNSVVKYELMRPSNKAPLLVLCEDHRGRMVKHQCCPGCGYFCTAGNFMECQPESSISHRFHKDCASRVNNASYCPHCGEESSKAKEVTIAKADTTSTVTPVPGQEKGSALEGRADTTTGSAAGPPLSEDDKLQGAASHVPEGFDPTGPAGLGRPTPGLSQGPGKETLESALIALDSEKPKKLRFHPKQLYFSARQGELQKVLLMLVDGIDPNFKMEHQNKRSPLHAAAEAGHVDICHMLVQAGANIDTCSEDQRTPLMEAAENNHLEAVKYLIKAGALVDPKDAEGSTCLHLAAKKGHYEVVQYLLSNGQMDVNCQDDGGWTPMIWATEYKHVDLVKLLLSKGSDINIRDNEENICLHWAAFSGCVDIAEILLAAKCDLHAVNIHGDSPLHIAARENRYDCVVLFLSRDSDVTLKNKEGETPLQCASLNSQVWSALQMSKALQDSAPDRPSPVERIVSRDIARGYE

SEQ ID NO: 24045 - protein, 226 aa, Homo sapiens
MQRAVSVVARLGFRLQAFPPALCRPLSCAQEVLRRTPLYDFHLAHGGKMVAFAGWSLPVQYRDSHTDSHLHTRQHCSLFDVSHMLQTKILGSDRVKLMESLVVGDIAELRPNQGTLSLFTNEAGGILDDLIVTNTSEGHLYVVSNAGCWEKDLALMQDKVRELQNQGRDVGLEVLDNALLALQDLGAGSGGSSPGNSYSEKPRGEAGRAGSQGQPAPGGRPLPVWE

SEQ ID NO: 24046 - protein, 706 aa, Homo sapiens
MDDLDALLADLESTTSHISKRPVFLSEETPYSYPTGNHTYQEIAVPPPVPPPPSSEALNGTILDPLDQWQPSSSRFIHQQPQSSSPVYGSSAKTSSVSNPQDSVGSPCSRVGEEEHVYSFPNKQKSAEPSPTVMSTSLGSNLSELDRLLLELNAVQHNPPGFPADEANSSPPLPGALSPLYGVPETNSPLGGKAGPLTKEKPKRNGGRGLEDVRPSVESLLDELESSVPSPVPAITVNQGEMSSPQRVTSTQQQTRISASSATRELDELMASLSDFKTSSSTVALSAPGLSSSAPSSYCSLPPSPPPMPSVFLPPTTIPSPRGQGHTPEFPCTEQSGRGLLPPVAPSWLDLAGLGVMPDTFNSRSPSVEGSLWAVGTESQGRDWRHLPTITSELSGAPRCHTVPCAGSTALQEPGEPQGPPASPSCPEEALAATWEQPWASEVFGPERMPPSGAARSFQEVTEPAVVAVDRQAIFPDTWTLTEEHGLQQERPRPEPGRLGSSSPASVTTEQLGAKMTERGSVARPTQGPETPRSPEGTTEAATQDGKEQPELPCAMAMGTPSTTERISTSGQIRSVIRRSWESGHAHPMSREPSPRRRLDPATLSRTPSQEQLIAELQGRLGIQPEAEEPAEAAGPSAQDWLTEGVIITVQPRGKRAGGQLVEKVARRCPWLGLGQSQAPGVRVLPWPQCWPEGRSGERVGVSCLL

SEQ ID NO: 24047 - protein, 248 aa, Homo sapiens
MDPGAGSETSLTVNEQVIVMSGHETIRVLEVGVDAQLPAEEESKGLEGVAAEGSQSGDPAEASQAAGEAGPDNLGSSAEATVKSPPGIPPSPATAIATFSQAPSQPQASQTLTPLAVQAAPQYCRSSGWSAGAGRVDNSYSNCGCPPRTDRCFSYGGSVQATFSRSPSSCCAEHRSSGTGTSCRTSTGLLDGPTPATSPAPDAVPDPAAAADHTCHPPAAHCCHRCCPYPQASGHPPTDHRPACRLRI

SEQ ID NO: 24048 - protein, 355 aa, Homo sapiens
RGSGIVTRRPLVLQLVNATTEYAEFLHCKGKKFTDFEEVRLEIEAETDRVTGTNKGISPVPINLRVYSPHVLNLTLVDLPGMTKVPVGDQPPDIEFQIRDMLMQFVTKENCLILAVSPANSDLANSDALKVAKEVDPQGQRTIGVITKLDLMDEGTDARDVLENKLLPLRRGYIGVVNRSQKDIDGKKDITAALAAERKFFLSHPSYRHLADRMGTPYLQKVLNQQLTNHIRDTLPGLRNKLQSQLLSIEKEVEEYKNFRPDDPARKTKALLQMVQQFAVDFEKRIEGSGDQIDTYELSGGARINRIFHERFPFELVKMEFDEKELRREISYAIKNIHGISSSSTRGYGRRWSAS

SEQ ID NO: 24049 - protein, 2302 aa, Homo sapiens
MARFGDEMPARYGGGGSGAAAGVVVGSGGGRGAGGSRQGGQPGAQRMYKQSMAQRARTMALYNPIPVRQNCLTVNRSLFLFSEDNVVRKYAKKITEWPPFEYMILATIIANCIVLALEQHLPDDDKTPMSERLDDTEPYFIGIFCFEAGIKIIALGFAFHKGSYLRNGWNVMDFVVVLTGILATVGTEFDLRTLRAVRVLRPLKLVSGIPSLQVVLKSIMKAMIPLLQIGLLLFFAILIFAIIGLEFYMGKFHTTCFEEGTDDIQGESPAPCGTEEPARTCPNGTKCQPYWEGPNNGITQFDNILFAVLTVFQCITMEGWTDLLYNSNDASGNTWNWLYFIPLIIIGSFFMLNLVLGVLSGEFAKERERVENRRAFLKLRRQQQIERELNGYMEWISKAEEVILAEDETDGEQRHPFDGALRRTTIKKSKTDLLNPEEAEDQLADIASVGSPFARASIKSAKLENSTFFHKKERRMRFYIRRMVKTQAFYWTVLSLVALNTLCVAIVHYNQPEWLSDFLYYAEFIFLGLFMSEMFIKMYGLGTRPYFHSSFNCFDCGVIIGSIFEVIWAVIKPGTSFGISVLRALRLLRIFKVTKYWASLRNLVVSLLNSMKSIISLLFLLFLFIVVFALLGMQLFGGQFNFDEGTPPTNFDTFPAAIMTVFQILTGEDWNEVMYDGIKSQGGVQGGMVFSIYFIVLTLFGNYTLLNVFLAIAVDNLANAQELTKDEQEEEEAANQKLALQKAKEVAEVSPLSAANMSIAVKEQQKNQKPAKSVWEQRTSEMRKQNLLASREALYNEMDPDERWKAAYTRHLRPDMKTHLDRPLVVDPQENRNNNTNKSRAAEPTVDQRLGQQRAEDFLRKQARYHDRARDPSGSAGLDARRPWAGSQEAELSREGPYGRESDHHAREGSLEQPGFWEGEAERGKAGDPHRRHVHRQGGSRESRSGSPRTGADGEHRRHRAHRRPGEEGPEDKAERRARHREGSRPARGGEGEGEGPDGGERRRRHRHGAPATYEGDARREDKERRHRRRKENQGSGVPVSGPNLSTTRPIQQDLGRQDPPLAEDIDNMKNNKLATAESAAPHGSLGHAGLPQSPAKMGNSTDPGPMLAIPAMATNPQNAASRRTPNNPGNPSNPGPPKTPENSLIVTNPSGTQTNSAKTARKPDHTTVDIPPACPPPLNHTVVQVNKNANPDPLPKKEEEKKEEEEDDRGEDGPKPMPPYSSMFILSTTNPLRRLCHYILNLRYFEMCILMVIAMSSIALAAEDPVQPNAPRNNVLRYFDYVFTGVFTFEMVIKMIDLGLVLHQGAYFRDLWNILDFIVVSGALVAFAFTGNSKGKDINTIKSLRVLRVLRPLKTIKRLPKLKAVFDCVVNSLKNVFNILIVYMLFMFIFAVVAVQLFKGKFFHCTDESKEFEKDCRGKYLLYEKNEVKARDREWKKYEFHYDNVLWALLTLFTVSTGEGWPQVLKHSVDATFENQGPSPGYRMEMSIFYVVYFVVFPFFFVNIFVALIIITFQEQGDKMMEEYSLEKNERACIDFAISAKPLTRHMPQNKQSFQYRMWQFVVSPPFEYTIMAMIALNTIVLMMKFYGASVAYENALRVFNIVFTSLFSLECVLKVMAFGILNYFRDAWNIFDFVTVLGSITDILVTEFGNNFINLSFLRLFRAARLIKLLRQGYTIRILLWTFVQSFKALPYVCLLIAMLFFIYAIIGMQVFGNIGIDVEDEDSDEDEFQITEHNNFRTFFQALMLLFRSATGEAWHNIMLSCLSGKPCDKNSGILTRECGNEFAYFYFVSFIFLCSFLMLNLFVAVIMDNFEYLTRDSSILGPHHLDEYVRVWAEYDPAACGRIHYKDMYSLLRVISPPLGLGKKCPHRVACKRLLRMDLPVADDNTVHFNSTLMALIRTALDIKIAKGGADKQQMDAELRKEMMAIWPNLSQKTLDLLVTPHKSTDLTVGKIYAAMMIMEYYRQSKAKKLQAMREEQDRTPLMFQRMEPPSPTQEGGPGQNALPSTQLDPGGALMAHESGLKESPSWVTQRAQEMFQKTGTWSPEQGPPTDMPNSQPNSQSVEMREMGRDGYSDSEHYLPMEGQGRAASMPRLPAENQRRRGRPRGNNLSTISDTSPMKRSASVLGPKARRLDDYSLERVPPEENQRHHQRRRDRSHRASERSLGRYTDVDTGLGTDLSMTTQSGDLPSKERDQERGRPKDRKHRQHHHHHHHHHHPPPPDKDRYAQERPDHGRARARDQRWSRSPSEGREHMAHRQFRKWKPSPLNIWYQHSAAGPPPAPPDPLHPPATRVLFPCDP

SEQ ID NO: 24050 - protein, 2066 aa, Homo sapiens
SDIKIKEENLFCDNIKGNEIFPSQQIARLIECERVLVALELSNFLNDSSYALQAVTQCYGLLAPIIYHNIVLVPVVQILIKCIVVLQGLPSIVCSKKHTASFESIQHMIACCIFYITKILRSWREYDLAVMIINYGKKMLDITPGCKSLFDGSNEQEEMPEEDSSKKSLKTKKPQQILLPEKINEQLALLETHLLKLTKQYVTSELSGGEDPIFLYPVVLNWSVKGAVKEVMKFKQKPRFLEFFTQVMLKCMNEEKFHLMVEVTTPVHDFLKRRNESLLGLIKVKYKDSALNKKANKSLKFKAAVMEIGRSAEMQQRIRSKKKETLRDFIFKNPAISEMVAHERNRRTSVRKAAQRYLMDYLNPLILSYVKRKRFHRLSLEEMPWRAQMNLYLAGAHFNLVLQKLWECTKMKFGTSHMMVSFRSCDPNMFSLYNSGTVLPTRKLTVENYKAMLDFLLTAKKRKANLPSDAEEFSTFINSIMSDENMSKTQTVYDSDSQSGSSAKEKDRGANLCVMDHFMKIFLYCRRAMVLAHRGGYWTLLQNCCRALWNFTQELQILLKQAVDLDKTFPISQDGFLCTSVLPFYLGAELLIDMLIQLQNTSSIKPIEDKGEFSVPSCYGNIKNDNGGSSLTFEHPLDDVNVVDLKWIHDFVLKSLEVLYQVEKWETLVSLAIQFNTVSHERYTEQVTPLLVYAQRQLLLRIQKFKGPDITQQPCARYEAEYGEKITCRNFIGKQLKINSSTIEATSNCTDLLKMLISSEYSRAKALVCVPVDVTDTLRCFRETLEKSKYHNRSIRHSRKLLSLFLAQTQGEKGEINDSKCTSGKVEFCLGTEEMHMSIPPDLSQEHFRVFSSVEKSKLPYSQLGLVISSYHQTIDVLQASNQRSLKVQALHSLGSLLIFAEKKRAAFKCWCQALDDIFRKPDVLHTWKEFGPSLTNVTNSHSPPGFKDYSEEFLSRVGIWGCLQGAVISAKIAQFIKSLNVEKKTDCCILSALLFQGLLRTTLPHPKAERCYAQYEITQLLPGIELFSDRYRADICSVIASLYYIIRELHFVRQNLIVLPLLALYQYFVSGICQDITRNLEARILKIEVLIDLRFFSEAFYEISQIFYGKNMPCPIPAGYKATGKMKIFQSFDSGKLLTSKENIQAIDELRNKGLPAVLVTIGQPHLLNKFNFVKAYFFLSVAATINCVPENKFKTVITNKSKPNLPNLEEIYSKDDGSSFYNLTKLKDEITLSMLKSMLLMEAEDRLNFLLSEVEQKTLSQCSAGELEIVVEARLQLAAVALQRHRAAYSAAIVFSTLTLLQDSKLFEKKVVQDDTENPVSPGTSVTENKDDSEFLDPISLNAREYFNIHLWLRCRLALVTAFVAQIHGIGIVKEDDMTDCLSLINEVCMEAKSAGDTELQAEFLTQAVILGLQEKHLKADIMTNLQDIIHLLEGNEFISPQSRLTLARSLVLLDDLTKAEKFKESPSSKTGKLNLLTRAHSILTEQMLAFGETIEFRSSNTKYANPLQPLKNIYLPHVMLLAKIKMRIGHTVAKQVYYKNKRKDPSKWLPALHLFDVALKLCRTTAVEEHEVEAEILFQKGKIERQILMEEKSPSFQLESLYEAIQLSLKNDQNSGLIRDSYLEMALLYFHLKKPKIKISGSPLTLKPPLRRSSSVKETSANKFEMYSSLAWIAIRAAAQVSEAVLAINLLIGKKNTRMHKVNQVALPNIPEFAALDLLSSYTDYLLDNYQVLFQTSCTFLYQNDDVCDSADGRKKTQTKVDITWILLLRYYIHLQRINNLSKLLASATPVSGISLPDDTLLTSLYNSELILRQKEVHFFLKKFLQLYSSSCIDEFPKELLCQLENPPLSEKDLRESSAKLYRDSSVQSILSFKPVSGSSCVDITPIEMVTQASNKELCFQWYIPPLDRPPKETEPMVLLLYAYNLKPLKISDVRHSTYNSTCVGSLWIPLNRVIAIHEKLSNLAQIAELSLPAAPEITSNENIYEVEVEEESVDNEMEDMIIQCCSEIASLFLNDKEPTPLSEVPFDISLPSIFNLERLFDLANGCILSGGSLFNWIVSIIP

SEQ ID NO: 24051 - protein, 2507 aa, Homo sapiens
MARFGDEMPARYGGGGSGAAAGVVVGSGGGRGAGGSRQGGQPGAQRMYKQSMAQRARTMALYNPIPVRQNCLTVNRSLFLFSEDNVVRKYAKKITEWPPFEYMILATIIANCIVLALEQHLPDDDKTPMSERLDDTEPYFIGIFCFEAGIKIIALGFAFHKGSYLRNGWNVMDFVVVLTGILATVGTEFDLRTLRAVRVLRPLKLVSGIPSLQVVLKSIMKAMIPLLQIGLLLFFAILIFAIIGLEFYMGKFHTTCFEEGTDDIQGESPAPCGTEEPARTCPNGTKCQPYWEGPNNGITQFDNILFAVLTVFQCITMEGWTDLLYNSNDASGNTWNWLYFIPLIIIGSFFMLNLVLGVLSGEFAKERERVENRRAFLKLRRQQQIERELNGYMEWISKAEEVILAEDETDGEQRHPFDGALRRTTIKKSKTDLLNPEEAEDQLADIASVGSPFARASIKSAKLENSTFFHKKERRMRFYIRRMVKTQAFYWTVLSLVALNTLCVAIVHYNQPEWLSDFLYYAEFIFLGLFMSEMFIKMYGLGTRPYFHSSFNCFDCGVIIGSIFEVIWAVIKPGTSFGISVLRALRLLRIFKVTKYWASLRNLVVSLLNSMKSIISLLFLLFLFIVVFALLGMQLFGGQFNFDEGTPPTNFDTFPAAIMTVFQILTGEDWNEVMYDGIKSQGGVQGGMVFSIYFIVLTLFGNYTLLNVFLAIAVDNLANAQELTKDEQEEEEAANQKLALQKAKEVAEVSPLSAANMSIAVKEQQKNQKPAKSVWEQRTSEMRKQNLLASREALYNEMDPDERWKAAYTRHLRPDMKTHLDRPLVVDPQENRNNNTNKSRAAEPTVDQRLGQQRAEDFLRKQARYHDRARDPSGSAGLDARRPWAGSQEAELSREGPYGRESDHHAREGSLEQPGFWEGEAERGKAGDPHRRHVHRQGGSRESRSGSPRTGADGEHRRHRAHRRPGEEGPEDKAERRARHREGSRPARGGEGEGEGPDGGERRRRHRHGAPATYEGDARREDKERRHRRRKENQGSGVPVSGPNLSTTRPIQQDLGRQDPPLAEDIDNMKNNKLATAESAAPHGSLGHAGLPQSPAKMGNSTDPGPMLAIPAMATNPQNAASRRTPNNPGNPSNPGPPKTPENSLIVTNPSGTQTNSAKTARKPDHTTVDIPPACPPPLNHTVVQVNKNANPDPLPKKEEEKKEEEEDDRGEDGPKPMPPYSSMFILSTTNPLRRLCHYILNLRYFEMCILMVIAMSSIALAAEDPVQPNAPRNNVLRYFDYVFTGVFTFEMVIKMIDLGLVLHQGAYFRDLWNILDFIVVSGALVAFAFTGNSKGKDINTIKSLRVLRVLRPLKTIKRLPKLKAVFDCVVNSLKNVFNILIVYMLFMFIFAVVAVQLFKGKFFHCTDESKEFEKDCRGKYLLYEKNEVKARDREWKKYEFHYDNVLWALLTLFTVSTGEGWPQVLKHSVDATFENQGPSPGYRMEMSIFYVVYFVVFPFFFVNIFVALIIITFQEQGDKMMEEYSLEKNERACIDFAISAKPLTRHMPQNKQSFQYRMWQFVVSPPFEYTIMAMIALNTIVLMMKFYGASVAYENALRVFNIVFTSLFSLECVLKVMAFGILNYFRDAWNIFDFVTVLGSITDILVTEFGNNFINLSFLRLFRAARLIKLLRQGYTIRILLWTFVQSFKALPYVCLLIAMLFFIYAIIGMQVFGNIGIDVEDEDSDEDEFQITEHNNFRTFFQALMLLFRSATGEAWHNIMLSCLSGKPCDKNSGILTRECGNEFAYFYFVSFIFLCSFLMLNLFVAVIMDNFEYLTRDSSILGPHHLDEYVRVWAEYDPAAWGRMPYLDMYQMLRHMSPPLGLGKKCPARVAYKRLLRMDLPVADDNTVHFNSTLMALIRTALDIKIAKGGADKQQMDAELRKEMMAIWPNLSQKTLDLLVTPHKSTDLTVGKIYAAMMIMEYYRQSKAKKLQAMREEQDRTPLMFQRMEPPSPTQEGGPGQNALPSTQLDPGGALMAHESGLKESPSWVTQRAQEMFQKTGTWSPEQGPPTDMPNSQPNSQSVEMREMGRDGYSDSEHYLPMEGQGRAASMPRLPAENQRRRGRPRGNNLSTISDTSPMKRSASVLGPKARRLDDYSLERVPPEENQRHHQRRRDRSHRASERSLGRYTDVDTGLGTDLSMTTQSGDLPSKERDQERGRPKDRKHRQHHHHHHHHHHPPPPDKDRYAQERPDHGRARARDQRWSRSPSEGREHMAHRQGSSSVSGSPAPSTSGTSTPRRGRRQLPQTPSTPRPHVSYSPVIRKAGGSGPPQQQQQQQQQQQQQAVARPGRAATSGPRRYPGPTAEPLAGDRPPTGGHSSGRSPRMERRVPGPARSESPRACRHGGARWPASGPHVSEGPPGPRHHGYYRGSDYDEADGPGSGGGEEAMAGAYDAPPPVRHASSGATGRSPRTPRASGPACASPSRHGRRLPNGYYPAHGLARPRGPGSRKGLHEPYSESDDDWC

SEQ ID NO: 24052 - protein, 478 aa, Homo sapiens
MDEFHPFIEALLPHVRAIAYTWFNLQARKRKYFKKHEKRMSKDEERAVKDELLSEKPEIKQKWASRLLAKLRKDIRQEYREDFVLTVTGKKHPCCVLSNPDQKGKIRRIDCLRQADKVWRLDLVMVILFKGIPLESTDGERLMKSPHCTNPALCVQPHHITVSVKELDLFLAYYVQEQDSGQSGSPSHNDPAKNPPGYLEDSFVKSGVFNVSELVRVSRTPITQGTGVNFPIGEIPSQPYYHDMNSGVNLQRSLSSPPSSKRPKTISIDENMEPSPTGDFYPSPSSPAAGSRTWHERDQDMSSPTTMKKPEKPLFSSASPQDSSPRLSTFPQHHHPGIPGVAHSVISTRTPPPPSPLPFPTQAILPPAPSSYFSHPTIRYPPHLNPQDTLKNYVPSYDPSSPQTSQLRICDWTMNQNGRHLYPSTSEDTLGITWQSPGTWASLVPFQVSNRTPILPANVQNYGLNIIGEPFLQAETSN
